United States Patent Application Publication US 2005/0228172 A9 - sequence listing, part 107

SEQ ID NO: 495515 - DNA, 603 bp, Homo sapiens
tgaaaaagtcaagagaatgaattttcccccagagcctccagaaggaagcagcccagccagtaccttgactttagcccggtgaggctgagtccagacttccgacgtccaggatgacaagaggaaacaggttttattttgagctaccacgctggtgggaatttcttacagcagcaacaagaaactcaygcctccggcttataatacatttcacttatttgtttcttgtttatcgcctccaatagaatgcaagcttaaagaaggcagacactcccatctgttttgttggtgatcatgtgcctgctgactgtacagccctggctcacagtgggtactccatgaaaactgtgcgttgttcagaaaaagaaaagggaccttaaacgtgtgaaaagatgctcaaccacactccagatctcagagatgaaaattaagatcaagggaggcgcagtggctcacgcctgtaatcccagcactttgcgaggccgaggcgggtagatcacctcaggtcaggagttcaagaccagcctgaccaacatgatgaaaccccacctctattaaaaatacaaaaattagccggacatggtggctcatgcctgtgatcccagc

SEQ ID NO: 495516 - DNA, 510 bp, Homo sapiens
aaaccccatttctactaaaaatacaaaaaatgagcagggsgtggtggcagacgcctataatcccagctactcaggagactgagggaggagaatcacttgaacccaggaggcagaggttgcagtgagccgagattgcaccactgcactccagcctgggcgacagagcgagattctgtctcaaaaaaaagaagaagaagaggacagaaatggctgcagacagaggctgcagcaggaagaagggcctggaaaccctgactctcacatccaatgctcaatccacgtgggttgagggtatttgaagtgtttgaagatggaagcggagctctcctcattagccacgcatccccaggccgggcctggcctttcctaaaacatgacacccctggatgcccctggtggggttcaagctgtcagtgaacacagaacaggcttgagtggcaaccgtcactgtgactgtttgccttcaggttttattgagtgactactgtttgctgggtctcggagttgggc

SEQ ID NO: 495517 - DNA, 655 bp, Homo sapiens
acctacgtttttctttctggccccatcactgggctaattaatttctctttgctctatttatccatctaggaaatgggataataataatgccttttcccttactcccaagaacattacaagagatgcataattatataaattccaggtagcattattacattctgacttatttttgactgttaagtttttcatttccagagatttatagtctcaaaaattctagaatcctgatttattccaaagtacttcctctttgacgtcaagtgttttcattgaatgttttttaaggcaggaatttttwagctggaggaaattttctagtaattgctccatcctactgttagggctaaagcattcagaatcatcttcctagcatttatgtcacacgtatacagaattacaaaggctctgtggtgaagtatcctcatactgcccaatgctgaagtctcctcagaacttcaagaatggcccttgttgaacctggggtacaaagcagcagagtttattctgaggagacaaattcagaattatgataaatctcagcacctgcatacgcacttgtgtttgtgtatacaagtacatgcatctagagagaaatgaaaagtgaaggaccaccctgttgcaggggtttgtgtttgcgaaatccaccaggtgt

SEQ ID NO: 495518 - DNA, 493 bp, Homo sapiens
aataggggtatggaaaccacaagaatgaagttgtggttttttttaaaaatacttggcaattcttcccaaatatgcattctgatatgggtgaggagacagaatgagatccttgtcagactctgttatgtcagcatgaatctcctcctagggccattttgcctcaaagagtatgttttgagtctttttgtcctggaaaaacccacaggagctgtgagtaaggatggtggcatgcaggggcccaggtgtgggctggaacacttcttgctgccagctccagagttcctgggaaagcagtatgatagtggtaggaagaatttctaggcaatactgctttcagggaataaaggtgaaagtgaagggaaaattaagctcacaaatgaaaatgaaagataaagtagcctttcttttctctggcctgattaagctyagtactctttcgttgatgaaaagaggatccaacatgaggattttaagcttgtgctgtccatggtgg

SEQ ID NO: 495519 - DNA, 583 bp, Homo sapiens
gtgcttaatagacccaatgctgtgaagttctttttaactgttttcttaagcacataaaaagatataacatttcctccaacattttttgaaatacattttggtttggggttttctctgtaacatttgctgtataaatatttcttacaatgctttcattgttctttctttctttccttcattctttccttctttctcttagtgctgaggctgacttcttaacaccaatagattctgacccctttcattgctttaatctgcgagataaattagagcttaaaatcagaaagtaccattacatgccactgaagaaaacctgccgcactacatgataagttggaaaacatacactaaatgtccctgttgagatatttccttatttagaggaaattccrtccatgggactaagcaaatatttcatcaatctgggctgtgtaagaagccaatacaacattcttttcatggaaaagattagatcaggccagtttcagaatgaaataatttttaaagatattcctaataccaaacatttgaggaaaatttaagtagtccatcatatattctcacattataatccaattggaat

SEQ ID NO: 495520 - DNA, 655 bp, Homo sapiens
actggtataggtaactataactgcatgtatatcacattcaaaatatgaaccctgaactcaaaatgtcttatcatrtcttactctcccatctaaaatgtatctacttctgtaattactatattaggagcatgaccaactttagacaagtccaaaatttactagtctaccttgactactcctcctttcgtacctccccaaatccagtcaatttattcaatgaattttttaacaaagcctcaaaaatctctatcatatttacttcattctccattactatggccaatacactctccaagacttcagtctttatttgccacacaccattactctacaatactctttttgaaatacaaacatgacaatagcttaagcttatgtcaagcctctgtgtgaaacaccagtacgtggtaagaattcaagtagtttatttgaattgcatttatttgcactaagtttttcttacctcatgtttaaatcttcaaatatattggtggaaataaaatagccaagcatacaaagtaattgaattgttagtaaattgccattacttataaaattacatttttgagcttgaatggacttataatacaatgacatatgttcccagaagctaaaactaaatcatctcatttattaaacacaataaaatcattgt

SEQ ID NO: 495521 - DNA, 462 bp, Homo sapiens
ccctttccttcattaagtggtcctctggttatacatttcaaattacagtaggttctagggttccaaaaacagagctgattctgtcagtgttttccaggtgatggtagtttcaatgagtggacctagtattcaaacaccttactctgccattcccaagacatcactatctgtctgattatctcaaggcctaaggcctgccgcttctctctctttctctgaagcgtgataccctgcttgtgggagacagtgtaygtaattagtataatttatcatcaaaatagataaaataatttgagataatggctaattcatagatcagcagtggcatttccacatagtaggataagttaaagtatgacctaaaaatactagtcacattcatgcccagaacaatttccttgtattactctagtaagtttcatttgtcaattgtacagatgcctggaaatgtgtttttgagaa

SEQ ID NO: 495522 - DNA, 581 bp, Homo sapiens
ctggaatcagagctgagcagctctggtgcagtytcgtttttttgcttgttttttgtaagggggaagacagtcttcaagaactagattctgcagaactgggcttcatttgttggtttatagttgagtgtgagaaatgtgtcctcattctcagctcaaataggtgatcacataattatcctccagactttcgaaactggaaaaaaaaaaaaagtgctactgataattatgtgggctctggcaaactgggactgtcccaggcataagattgccatcactcacttgtattcattttttgaaaaggccaatgcacttgataatgtaataaaggagaagtctgaaaattaaaaacaaaaaacaaaaaactgttcttaatggtgtgagttagaaagaacgttttaaaaaaaatttttttagaagtgtgaaacacctttggaattgttagatgccagcagatctgctttgaaatacagcaatgtgttttgatacaaattcaatatgctgaagaaacagaagaaaattatgtctaaatatacgtatttgccctataattgcaaagcattacggatagcagtttactgaac

SEQ ID NO: 495523 - DNA, 581 bp, Homo sapiens
ctggaatcagagctgagcagctctggtgcagtctcgtttttttgcttgttttttgtaagggggaagacagtcttcaagaactagattctgcagaactgggcttcatttgttggtttatagttgagtgtgagaaatgtgtcctcattctcagctcaaataggtgatcacataattatcctccagactttcgaaactggaaaaaaaaaaaaagtgctactgataattatgtgggctctggcaaactgggactgtcccaggcataagattgccatcactcacttgtattcattttttgaaaaggccaatgcacttgataatgtaataaaggagaagtctgaaaattaaaaacaaaaaacaaaaaactgttcttaatggtgtgagttagaaagaacgttttaaaaaaaatttttttagaagtgtgaaacacctttggaattgttagatgccagcagatctgctttgaaatacagcartgtgttttgatacaaattcaatatgctgaagaaacagaagaaaattatgtctaaatatacgtatttgccctataattgcaaagcattacggatagcagtttactgaac

SEQ ID NO: 495524 - DNA, 549 bp, Homo sapiens
acatttttattctaactgtacgtggataatactgtcagattgcggtgttagggctaagtcttaaaagtgagcttcatagaaaggtttttagaaatttggctagaaatggaattgagttaacttacaattagttttttaatatgtgctcctgagacattagaatacaaagagatctgttaccactgaaatatagtacagacttttgactttttctgaatgtgatggggtgttttgttttgttttggtttgtatttgtttttgtttttgaggtagggtcttgctgtgttgcccaggtgggactgcagtggygtgatctcggctcactgtagcctctacctttcaggttcaagtgattcttgtgcctcagccacccaagtagctgggattacaggcgtgcaccaccatgcctggctagtttttgtatttttagtagagatagagtttctccatactggccaggctggtctggaactcctggcctcaagtgattcacccacctcgacctcccaaagtgctaggattataggcgtagcgtgagccactgcaccc

SEQ ID NO: 495525 - DNA, 642 bp, Homo sapiens
aagatttgctgtagtcagctacagtttccttgtcacatgtccttggactagtatcaatttattataaggttttcacccatccatcgtgaaataaataaagttaggaatctcagttattcattttaaaatgttggcctttttttggtgttatgcctttttcatttgttttgttttaattttttttcatgtaagaaataacattaacagctgggttttttaaaaaaataaaagccactttgtaaatgtttatgttcccagtggcagtgggaatataaaatggaagcagaagagaggtatagtcaatatgatttagtgactgttgaatgagaaaatttaggggacagagagaaatcycagatgattcacaggtttccaggttgtacagtattatttaacctgaacatgaggaaggagtaggaaattttctggtgaatacagaagagcaaagaagagcagctcaagaggaatgacttaattatttttctgtgcatgtttaatgggatattcatataggatttttgaatagatcattgaatatcagcatttatagctggcatcctactagtttgactctcagtaataagacttgtcaaagatccaagaatctgaaagttgatgataaatttccatgtgtatcaccat

SEQ ID NO: 495526 - DNA, 618 bp, Homo sapiens
agccgccgtcgggcggaccgcctggctcggcagcagccacrgggacatctggtcctggttcttagatgttcggagagcaggcgggcttagaggtttcccggaggctgctgcctgcacacagagggcgactgcagcttgggtgcccaggcgggctggaggggcatggcctgggcggcctcgggatcgccagcgcgaccagcctgagggcccctaggccgtgcctcccgccccgctcctccgccgcagggagacagaagccgctggcatgggcactccgcagtcacccaggatggggttgagcggcaggttctcagttctcgcccctgtgcagccgccgccgggcagaacgcctggcttggccgcagcaccgggacttctggccccggctctgcgatgctggcagtgtgagcgggctggggagttgccgggcagcgcccaagtgcagccccaaatccgcgatccaccccaaaaccacaatccacccaaaaatttggggctgcagcttgggcgcccaggcgacggagcatggcctggcgacctccggaatgcgtgcgcgccaggcctgagggctcccctggcggtgccacccgctctgctcctcctctgccagagcctgga

SEQ ID NO: 495527 - DNA, 546 bp, Homo sapiens
ctggctgagctcttagagggcaaggcacattgccaggagaatgcctctagcaccagccacactcctgcccctgtgctgcccgccttagagtcccagtatgrttcacaggatgttcaaacaagttctctaggaattaacaatccagccactagcccagctcatttgctttctagcatgtgttactaggaacactgaagtgtcatcataaagagagggacgtggtggtaggagcatgagcttgagacccagacagcttctttgcctcctttgtatgactttgggcaagtcaccttaattctctggttccccatctctcccttcttttttattttttccctattttgacatatcaaatatgcaacatacagaaaagttgcaagaatagtaaaaagaattcccagaaacccttcatccagattcccaaaatggcaactgtttctgcaattgcttcatcctttcctcagtcactatctgtgggtgcttgtgtgcacatataccatgcatctcaatttttttctgaaccacttaagaataggttgcagacac

SEQ ID NO: 495528 - DNA, 649 bp, Homo sapiens
caattcttataacacagaataagaaaggctgactctatagcccagcgattttacaatgtatggctaatcaccaagataaatgtttttatgcaacaggaattgctttcctataaatttgtttttttcttttctgtaaagttarttttcaaaagcagcagatataaagacagaggtatgctaaaatcaacaaatcaatcaagtaaataaaggagcgactagttcatataggtttgggtgagatattgtcaaggaagccgataaaaaaagataatttatgagtttgggattatttaagctgaggatatgtgtgctttctaaaataaaattaagtaaagaaaggatatcagagaaaaggagagaataaggaaaagatcagaaaaaataagtagagaagtaggaaaatacagtgaaaagagtccagagaaagtcagaggagaaaaaaagagaaaaaaaaagaaaagaatgagttctaccaggataaaatcagcagcttttaattgaaataccttggttctgaaattcctgggggaagatgactattaatcaggccaactctagctgctgaagttcatacattcttttaacactctgagcatctattttttaatggatttctaaagtttagaaacaattgttcagtatacactat

SEQ ID NO: 495529 - DNA, 649 bp, Homo sapiens
caattcttataacacagaataagaaaggctgactctatagcccagcgattttacaatgtatggctaatcaccaagataaatgtttttatgcaacaggaattgctttcctataaatttgtttttttcttttctgtaaagttaattttcaaaagcagcagatataaagacagaggtatgctaaaatcaacaaatcaatcaagtaaataaaggagcgactagttcatataggtttgggtgagatattgtcaaggaagccgataaaaaaagataatttatgagtttgggattatttaagctgaggatatgtgtgctttctaaaataaaattaagtaaagaaaggatatcagagaaaaggagagaataaggaaaagatcagaaaaaataagtagagaagtaggaaaatacagtgaaaagagtccagagaaagtcagaggagaaaaaaagagaaaaaaaaagaaaagaatgagttctaccaggataaaatcagcagcttttaattgaaataccttggttctgaaattcctgggggaagatgactattaatcaggccaactctrgctgctgaagttcatacattcttttaacactctgagcatctattttttaatggatttctaaagtttagaaacaattgttcagtatacactat

SEQ ID NO: 495530 - DNA, 424 bp, Homo sapiens
aaaacaagtacaagggcatctttccaaagaccactaaagataagtgagacattatcagtacatgatctgaggctatccagtgagtgtggttagagaggaatggagagttttgagaattatgtaggacaaagaaaaacatgtgagtagcaatcaagtcttcttgctgtcagcaatgcgtttctgaagtggaatatagtgacagtggctaagccaacacccttaattttccctccctgttctcccttgggatatagaacagaaagagttgtttagccttggcaattttctgagtctagtcatatctaccatgtgatattyactcaaagtttacagggcttacgaaattttgcattttaacacctctgtacattttttaaagaaaagtcatgagacagaaaattatttcattatccaattaccattt

SEQ ID NO: 495531 - DNA, 640 bp, Homo sapiens
atatcctgatttaaaatttaacattcaaggtgaattaaccataaatataggtggccaacctcagcaattcctggcaatatgggcgctactctttcttttctttctttctttttttgtattgagayagagtcttactctgtcactgaggctgcagtgcattggcacaatctcggttcactgcaaccgcttcctgggttcaagtgattctcctgcctcagcctcctgagtaactgggactacaggcatgcatcatgataccctgcttttttttttttttttgtatttttagtagagatggggttttgccatgttggtcaggctgctctagaactcctgacctcaggtgatctgcctgccttggccccccaaagtgctgggattacaggtgtgagccaccatgcccagccaggcactaactctttctacattaaaccctggcaattttgctcaacattttcctcataggaagcaagtagcaggtatctcaaataacccacagattccttctatctcctactgtaactacaacctttgggtacttgacttaaaaacatttctccctgctctattataacactcttgcaaatttaatggggagtaacttaattttcaaatagaattataatagtaagtgcaccag

SEQ ID NO: 495532 - DNA, 487 bp, Homo sapiens
cattggcacaatctcggttcactgcaaccgcttcctgggttcaagygattctcctgcctcagcctcctgagtaactgggactacaggcatgcatcatgataccctgcttttttttttttttttgtatttttagtagagatggggttttgccatgttggtcaggctgctctagaactcctgacctcaggtgatctgcctgccttggccccccaaagtgctgggattacaggtgtgagccaccatgcccagccaggcactaactctttctacattaaaccctggcaattttgctcaacattttcctcataggaagcaagtagcaggtatctcaaataacccacagattccttctatctcctactgtaactacaacctttgggtacttgacttaaaaacatttctccctgctctattataacactcttgcaaatttaatggggagtaacttaattttcaaatagaattataatagtaagtgcaccagctg

SEQ ID NO: 495533 - DNA, 618 bp, Homo sapiens
ggactggcaaagcagaatatctgtgtgtcagtgtacttcattcatccatcgctgggtcagggtctgcaggttggaccctagcagaggttcctcaaaggattccacattcttggtcaccaaagctgttgtggttttcttcaccatggaagtagataagtagcaggcctttgccctaatagttggtcaagtccctgcaggcscatggggaccagtgttctggcaaatgctggttggggagaacatacagattttaatcacttttaaaaatagactcgggggtacaagtgcagttttgttacatggatatattgtgtgctggtgaaacctcagcgtttagtgtacccatcacccaaatagtgtacagtgtacctttcaggtaatttctcatccctcaattccctctcacccttccagtatctactggagtctccaaaatctccaatgagtcttcaatgtctattccacttttcatgtccatgggtacatattacttatctctcacttataagtgagaacatgcagtctttgaatttctgtttctgagttatatcacttaagataatggcctccagttccatccatattgctgcaaaaagtataatttcattcctttttatg

SEQ ID NO: 495534 - DNA, 618 bp, Homo sapiens
ggactggcaaagcagaatatctgtgtgtcagtgtacttcattcatccatcgctgggtcagggtctgcaggttggaccctagcagaggttcctcaaaggattccacattcttggtcaccaaagctgttgtggttttcttcaccatggaagtagataagtagcaggcctttgccctaatagttggtcaagtccctgcaggcccatggggaccagtgttctggcaaatgctggttggggagaacatacagattttaatcacttttaaaaatagactcgggggtacaagtgcagttttgttacatggatatattgtgtgctggtgaaacctcagcgtttagtgtacccatcacccaaatagtgtacagtgtacctttcaggtaatttctcatccctcamttccctctcacccttccagtatctactggagtctccaaaatctccaatgagtcttcaatgtctattccacttttcatgtccatgggtacatattacttatctctcacttataagtgagaacatgcagtctttgaatttctgtttctgagttatatcacttaagataatggcctccagttccatccatattgctgcaaaaagtataatttcattcctttttatg

SEQ ID NO: 495535 - DNA, 618 bp, Homo sapiens
ggactggcaaagcagaatatctgtgtgtcagtgtacttcattcatccatcgctgggtcagggtctgcaggttggaccctagcagaggttcctcaaaggattccacattcttggtcaccaaagctgttgtggttttcttcaccatggaagtagataagtagcaggcctttgccctaatagttggtcaagtccctgcaggcccatggggaccagtgttctggcaaatgctggttggggagaacatacagattttaatcacttttaaaaatagactcgggggtacaagtgcagttttgttacatggatatattgtgtgctggtgaaacctcagcgtttagtgtacccatcacccaaatagtgtacagtgtacctttcaggtaatttctcatccctcaattccctctcacccttccagtrtctactggagtctccaaaatctccaatgagtcttcaatgtctattccacttttcatgtccatgggtacatattacttatctctcacttataagtgagaacatgcagtctttgaatttctgtttctgagttatatcacttaagataatggcctccagttccatccatattgctgcaaaaagtataatttcattcctttttatg

SEQ ID NO: 495536 - DNA, 553 bp, Homo sapiens
ataatctatgcagtaattcttctgcacacaaaaacttccaaaatgagggataaaaggaaagtccctatgccaatgtctgggtgacaatcagagccatgtgtcttgaagggatttgtcaaattgccaggtgagtggaggctagggtgagatgtccaaggggctcctgcttgcccacaggatttactccattcagccttaayattaagccttgatggctttaatatgtatcactatgaggattaaacctgataaggagtcaccttttctgtatgttatggagggaagggccagatgctgaagtcagggagcccactgcccttttatcttatgaatatggttttatctgatgtgaaaggagactggagattcatggcagttttcggattcaattccatcctttcgcagttgctagagcttcgtgctttagccatcctggagtggggtttgcttagagaagttttgatccagtaaagaattgcttgatgaagtcctgtttggttggttactgctctcagatcatgatgaactacagtgtgacagtaaaaccagaata

SEQ ID NO: 495537 - DNA, 623 bp, Homo sapiens
atttcaggattagcagagcccagggaggctgatggggattgagcgagcgtagtgaggttggatatggaggctgtgaatctgtcagaggcctactgtcaggccatagcaaggctgcctctggcttttacactgaatgacgaactgctggaaaaatgtacattrtaataatttaagaatcttagcgttttatattcattatattttgagacattctccatgcacagattgttactaatcattaaataataataaaagtaatgaatgcatggtgctaagcacaatcaacaatatttgaataccaactcttttttttaatgggacaattatgttaatgataaaaattacattcccaaattgccatagtagactcaaggcctctctgaattatcaagtgaaatgaaggtttcaaggcccaaagacacgggccttagtcagaccccctgtggaacagctcggatttacacaaccagcagttcttggtctgaagaggaaaggttgggtccgtggcatggctacaggcactaagttcaccacccactcttagtccaggtaacagggtaaaagtagtgaggctcaggcttcactccagcctgctctggtggtgaagttggagggagaaacct

SEQ ID NO: 495538 - DNA, 665 bp, Homo sapiens
tccccttagtcttctaccatgattgaaagtttcctaaggccttcctagaagccataatgcttcctgtacagcctgtgaaatcatgagccaattaaacctcttttctttataaattacctagtctcaggtatttctttataacaaggcaatagtagactaatatctgtacaaatccatcatttcctcaccacactcatatctcctgaaagacagccttgactttattgtgatcacaaccttttatatcraaagtatgctcacaagaatccaataaataataataaccaggctaggtctatggtactttactctcaattttcctttcagaattccacatgcttaatatgttaagcacgtcttaatgctttagggagtgaaggacatgtgactctcagataactttagatctcctttagatctcacatgactttaacataaagcatatgttaaacaatatctttactagcatcctatagtagcaaataatagaaacactcttttgagtcctaactatgtgttagacccaataaattaggtaccattattatccccattttatagataaggaaactgaagcttagcgaggttacgttacttgatcaagtacacattcctattaagttgcagagccaggcttcagaacaaatcttgtctgaactcaacag

SEQ ID NO: 495539 - DNA, 604 bp, Homo sapiens
aagatagtttacaaaaaaagaatgtcaaacagctaggctgtgttaacattcaaaaagaaaactggctcacaagctattgctcagaattaattacagaaaaaaacatgcttatcaataaaatacaaaaaacaggagaggagtgattgaaggggatagttaaatggattttaagtgacagatttttaaaaataacattaaacatgcacctcaactcaccatataaagtccaaacaaagctctcatatttctgttgttcagtttcaatgcctgtgcaaaatactttcttgaaagttcgaggttttcaagtccaccttgggtatacttaacctgttaaaaattgcaaagtgctgaaaactgtttattttactactttgaaatatagcatggtttcatcataccayaggcattcagtaatcgaaacagatattctctgtaaacaaatacaagatgttaaaagaattcacctaaaggtttttaaagctaatctaaaatttcaaacataaccttccccaaaaaagctattctattctatgaacattgagatgactgagtagtttctaaaacaaaaatgctgccgcaataaaaagccagaataatttctatt

SEQ ID NO: 495540 - DNA, 583 bp, Homo sapiens
acagaaaatataatcccatatataatggcactaaatcttaaaaaatgaataagacttttacagaggaatattttaacacactattggagaacacacaaaaaagatctaartgaatggaaagctataccacatctctgaatgaaaaaataacatggtgaagacaatatttattcccattctgatctgtaaatttaatgcaattcaaataaaaattgtggatatccctagcaatttagaaaagaagagaaaagatgagagtaaaccttaagataacaaggtttacagcaaatatgtgacaattaaattactctagtactggcacaagaagagacaaatagactattagagtagaatagaggttccaaaatcatgcctatgtgcagattcaaaactgataagaatagattagttacttaaatcgttcatgaaacagtggattatttaaaaaataatgttgacctataaaataataatgacaattaacacttactgaacatttagtgtgtactagcactgtttcaaatgttgaaatacatactgacttgatctcataagaaccatatgaatattcctagcaccattt

SEQ ID NO: 495541 - DNA, 583 bp, Homo sapiens
acagaaaatataatcccatatataatggcactaaatcttaaaaaatgaataagacttttacagaggaatattttaacacactattggagaacacacaaaaaagatctaaatgaatggaaagctataccacatctctgaatgaaaaaataacatggtgaagacaatatttattcccattctgatctgtaaatttaatgcaattcaaataaaaattgtggatatccmtagcaatttagaaaagaagagaaaagatgagagtaaaccttaagataacaaggtttacagcaaatatgtgacaattaaattactctagtactggcacaagaagagacaaatagactattagagtagaatagaggttccaaaatcatgcctatgtgcagattcaaaactgataagaatagattagttacttaaatcgttcatgaaacagtggattatttaaaaaataatgttgacctataaaataataatgacaattaacacttactgaacatttagtgtgtactagcactgtttcaaatgttgaaatacatactgacttgatctcataagaaccatatgaatattcctagcaccattt

SEQ ID NO: 495542 - DNA, 566 bp, Homo sapiens
tattgctgacctttttctgcacatctagaagccttgttttctagagggaaatcttgagatgggctagcactatttagtgctgacctaattcccatgaaaaacaaagaactaccataaatggagaaactgggctttgacaattgcatcaatatctaatacaaaaatcgaagatggcttaaggttaaaggatgcatatccagcatagtgctatatgcagtacatatattcgttctatgtaacaaccacatatttatattctttcagaaacttgctttttataatgctagtccctgattcagtgattgcaagtgatttaaaaaaatcaatccatatccacaaatagtcaccaatatatactgaaatttgaaatcccatagtatttgccattttggacttcccatcacaaggagcakccatattcattcatctaccaagagatcaccagcaatatacccggtgtcatttagatgtccattaagatgagatacagcacaaattataaaaacactcctttggaagagctaccacctggttacagcaggaccaaaaaaggcagacatgtataa

SEQ ID NO: 495543 - DNA, 505 bp, Homo sapiens
actgaaattatcaaagctcatgacttacacagccagcacctcccgtagcaatcgttctgctgtggactacccaccaacaaaatctttagcaacaggattcattttttccagaccaaatattaagtagtaacgacaacacctcaatgtgcagaggatatcagagctgtgatgagccaagtcaaattcatgccagaaagatacataggcattttgaaagtaaagccattaacgcgtaagttcctcatttttatgtgctacattttccaaatcatcacatctcagaaattacctgaaatcaacctttaactacatcgaatgaaacagagcactctgaagaaaagtccatggataacttttagaccaaacaaattggaacgcttctacataccaaagtaaaatttcttcgacttwttcttcttttggtttcagaattcaaaaagtccagaagcctgtaaatatgaaaaaaaaaagtttaaggaaaagatctagaaaaatatcaatcaaa

SEQ ID NO: 495544 - DNA, 663 bp, Homo sapiens
atttgcaatcttaattccatctgcaaccttaaatcctctttgccatgtaacccaacatatttgtgggttttgagcagtaggatatggrtatgtttgggaagccattattctacctaccttaatccaatatgcacattcctctttttgatttggcttctaggatgctcagagttatctagcaattgtacaggacttcatcttatttttttatcccaattttcctttatttcctatagtctaattcgctcctaaagttcatgtcattacacacatacacacacacacacacacaaacacacacacatgccatatcaaaatataatcaaagtaatcatattaataatggacccctagagcaggaattggaaaactacaatgcatagattaagtctggattcccttgacctcctgggctcaagagatcctcttatcttagcctctcgagtagctgggactacaggtacccaccacctcactcagctactttttaagttatgtgtagagacagggtcttgctacgctgcccaggctagtgtcaagctcctgggctcaagctgtcctctggccttggcttcccaaagtactgggattatgagcatgagccactgtgcctggcaatgtttttgtaaataaagttttattggaacacagctactgctttcc

SEQ ID NO: 495545 - DNA, 663 bp, Homo sapiens
atttgcaatcttaattccatctgcaaccttaaatcctctttgccatgtaacccaacatatttgtgggttttgagcagtaggatatgggtatgtttgggaagccattattctacctaccttaatccaatatgcacattcctctttttgatttggcttctaggatgctcagagttatctagcaattgtacaggacttcatcttatttttttatcccaattttcctttatttcctatagtctaattcgctcctaaagttcatgtcattacacacatacacacacacacacacacaaacacacacacatgccatatcaaaatataatcaaagtaatcatattaataatggacccctagagcaggaattggaaaactacaatgcatagattaagtctgsattcccttgacctcctgggctcaagagatcctcttatcttagcctctcgagtagctgggactacaggtacccaccacctcactcagctactttttaagttatgtgtagagacagggtcttgctacgctgcccaggctagtgtcaagctcctgggctcaagctgtcctctggccttggcttcccaaagtactgggattatgagcatgagccactgtgcctggcaatgtttttgtaaataaagttttattggaacacagctactgctttcc

SEQ ID NO: 495546 - DNA, 565 bp, Homo sapiens
ctggtcttgggtatgtctttatcagcagcgtgaaaacagactaatacaagcccaaacaaacacaatggccaaacaaaacttactgggtttaatgcaaaccaacccattttaaatgatccaataaatacttgccaaaggattgatactgattgaacttaaattctcttgataatcttgtacgtctttcaattcaaaatatcaaaataagatctagttacgtgaaacctctaaagttctatgtcactatcagggacactgctatgatttcacattatgctctggggacaggggggttttaggaagcccccaaatttctaaattcatccaagacatcccagagaagtagccacatggtccctcaggtgaacttcctggagtcattgattttgcatcatgcctgagctatgtgcwcaaagtaaagaggggtgacaggggctgtaaaagctacattttctgatccagcaagtgaaggagcagcccaggctccattcaggtgcttcctttgctgtgggaaaaattagacctctgttcccatcttcctcttgcccctccccccactcattcc

SEQ ID NO: 495547 - DNA, 565 bp, Homo sapiens
ctggtcttgggtatgtctttatcagcagcgtgaaaacagactaatacaagcccaaacaaacacaatggccaaacaaaacttactgggtttaatgcaaaccaacccattttaaatgatccaataaatacttgccaaaggattgatactgattgaacttaaattctcttgataatcttgtacgtctttcaattcaaaatatcaaaataagatctagttacgtgaaacctctaaagttctatgtcactatcagggacactgctatgatttcacattatgctctggggacaggggggttttaggaagcccccaaatttctaaattcatccaagacatcccagagaagtagccacatggtccctcaggtgaacttcctggagtcattgattttgcatcatgcctgagctatgtgcacaaagtaaagaggggtgacaggggctgtaaaagctacattttctgatccagcaagtgaaggagcagcccaggctccattcaggtgcttccttygctgtgggaaaaattagacctctgttcccatcttcctcttgcccctccccccactcattcc

SEQ ID NO: 495548 - DNA, 558 bp, Homo sapiens
ctgtttactttagcttgctctccccttacctccccagccccgactcatatatacactgtggagtttccagtatgactctcctaatcccagtgagyttgcccgcttattagatgactgcaagcctgggacccaggctttttttttgacctggggctgtggagagagcccccttccttccctggctgtcaaactttatgaatgtatgctagagctaactgaagccattgctctggcctcttgtggatggccagtttgagagaataaggcccaacaagaacattccaaaaatccagagaggaaggtgtgagagggagaccatgaaaggaagagcactcaggaaagttggaggagagcgtaaccaacaggaagtgaccgtacccctgaagccatttccaagcccactctgtctctggtttggtcaataaaaaccttttttaatttaaaatagttcaagttaggtttcaatttgagatggaaagatgcagccaagagtcttgccttgagagacagtaatgatcccaaagggagtgaaaaagtcaatggtgggtttttagatgt

SEQ ID NO: 495549 - DNA, 463 bp, Homo sapiens
ggatttgaacacaggcaggccgactgtggagccctagcccatagtctcgaccagtactgccttgtgggtataaaagcactttatgcacaggtgacatctgtcattaccattatgctatcgtttgttgtgtcctgattcaggctctcaatgaaaaggcaagatcagagaaaatgaaaagaagttactctgcatgatagtgaaagaccactcaggggacagatgtggcagacacaakcaccaacacaatgcttcatgcttgctcaactagggaaagaggaatagatgagatggagcaaagctagggagaggggccctgcaggagcaattgatgagaacaaagtaagaggcgaagctccaaatagatattgaccagcctccatccttgagtttataggggcgggggggaccttctatatgcaaaaacgagtgggacaatgacaggatgggataaataggtaaagtc

SEQ ID NO: 495550 - DNA, 546 bp, Homo sapiens
atataggaagtgtccagaatggtatactccaaattattaacatttttctccctcagatataattttctatagtgaaattggattatttaaaaattattaacaatgaaactaaatttgaaaactcttctccatccttcaatgtccatccagagacatttcaatgttacccactccctggaagctgtccctgctgccttgactgtggttaccctggcacagacctcacatagcattcttggatctctattttggcagtgatcatggtttgccttatatttggttttatttttctccctgrcaagactgcggtatccttcaatgtggtacccacatccattctgttggaagaaaacaagcatagctatagtctatcacacatttaccatggagagatatctgtgaaattgttgattggagccagggaaatcactgcttctacaccccacggtgtcctagggctggtccagatcacagtgtcctaaggactgagctatggtcatggaccaggccaggaggtctgcagagaaaagaagcatcctggtttct

SEQ ID NO: 495551 - DNA, 458 bp, Homo sapiens
gcagataagtctcagtttctgttgatctggcaatggtcatctggagtatgktgatgaaggcaaggaggccactttggggctcaatgggaggaggactggggtccacaggccatgactggccacaaggactccctgagaggaaccgtggggcccaccggccacctctggccacaggggcaaggagggtgcagcacacaccactgactcattggctgaccacagagtctaaccctcagctatctcctctcatgttttgtgagtattttattttcaaaattagacaccatcttcttcacgccccctttctgtgcattcttcagtttattttttattttgggggtatttttagcaatgtcaatctcagcctaggtctgactagtgcaggtaaacaggagctgtattatcttccttttcttaggacagtcccgacccatactgttcgacacttgtctctgttt

SEQ ID NO: 495552 - DNA, 598 bp, Homo sapiens
ttggtaatttttctgagtgatacataaaatygttggttgcctcaaaactgacaatgtcttagatttgataaatatctctttccacacatgcatttcatttaccccctacttcatcagtttacaaagtattacattctataattaatgtaagtacaactggcataatcaagtgtggggaagaagacagctggcccttggaaagacatacagaattggcgaggaagggagacagtcatgagaggagtcatgctggcagcgctcccctgccctgggcggcagccaggatgcgctgtggagaagggagagtgtgtccatctggaaggggcctaatggacatggtggagagtttccatgatatccacaatcattataaactgtgaagtgcagcacacattcttattataatacttaatcatggctttcctccatgtggagccatgtaagccatctcttttacaggctgcactaggaaatcctcaggcaggcagggtggccgaagggtcagtatcaggtagctgcccttgggcagagaattctagttttccttggcctgtttcaatgagtttggaccattaacaaatcctatccccaaatcact

SEQ ID NO: 495553 - DNA, 632 bp, Homo sapiens
ctcctcagccacctggaaatgccaaggaaactacctgctaggcccaagttacccaacatatctgagtaactatgttatgtgtcattaacaatgtgaacacaaattattgatattaaggttccagtatcagctctgaaaatcttacaatgttcacgaaaaaggatgagactcatctgaggttttctttcatattttgtatatttttgaggctgtatttggacaaaaaaaaaaaaaaaaacttcctytctatggcaatctacatcttagataccttcaacagtccatagaactagctccgtgccttagatctttgccacaaacagcaccagcattgaactttgttgggaaaagtctcctactgcatgagttttgatcaacaaatggaatcaaagctcctcaagtctgatgttctatttcctactgaaccaactggatatcccgattcagggcccaagaaaacttgtgaatgtcaaagacctcttagcaagcatgttctgatgcaataaaccaacccaaagttaaaaattaaaaacattgtaataatgctcaatactcaacattcaggcagtccttagactgaaagtctgttggtacaaggtacaggatgagttttcttaaggtttctggaaaat

SEQ ID NO: 495554 - DNA, 361 bp, Homo sapiens
aagcacaaacaggccaaacaaatgctttgagagaagaaaaacaagccaaattacttacgattattttctctctgtgcacaaggagccaaaaattaccaaacagtaggcaaaaataaaaacttcagttttttaatctcwtaaatgcaaaagctacccacctgcttctctgttggtggcaagttcattgaatgccaggctaggaacaagctgctcaaaagaaggaatccgtaggagaccacttaggctgttacccagtgttctcaaatgtggggccttcatggagacagttcctctccttaaagcttgagtgtctcaggttcactctcattcgtccccttgcctggttctgacccctctctca

SEQ ID NO: 495555 - DNA, 445 bp, Homo sapiens
tgtcctcagtcgcttggtcagatagtctaatctcagtttttcaggtgagttccctcttgactttcttctagagttttgcgtgtgccctggagtggacaccctcggaggatgggagaaactrtgtactgcgccaggtcgcctcaggcctgccttttccctccatcctttcccacccctcccctcttccacccactttctcacactcctcctcttttctctttcctcccttttcctccctcttcatcatcctccctcttatttttctttcccttcactaccccatctcctgcctggcccttctgcactggcagagtagaccctcagaaaccctgggagggaggatggctgggacaggctgatgtcttgagtcctgtccttggctgtctctgaggctcttaagactcctaattacaggagtgactccgacttgcttttctgacagggc

SEQ ID NO: 495556 - DNA, 585 bp, Homo sapiens
agaaatagtagtggcatagcaatgaacagagcttttttggtccccgtgtctctcttccatctcaaatagtatggacttctgtgggcagtaaaacatacctgttaatggtgttattgtcatttttccaaacttcttatcagttgaatttgtttctgttgccatttctattcccatactccttcatctgctctatctgcaaatctcttgcgtttctgtcttgttttccaatttaattaaatatgattcrcatttaaaagtaggaactatatattatttttatattcatttatattccggattgtatatgtatgttttagatgactttatagaggatattttatttattcatttatattttttgagacaggatcttgctctgttgcccaggttggagtgcagtggcatgatcatagctcactgcagcttcaatctcccagactcaagtgatccttctgcctttgcctcccaagtagctgggatgataggcgtgtgccatgaagatatatttaaatagccgtttgagtcagatattcattccaacagttatttgatgttattgagacatgatacaggctgagtgaaaac

SEQ ID NO: 495557 - DNA, 397 bp, Homo sapiens
tgaggactggcctgaggggtccggagaggggcctgtgcggtgttcggcgccgcggaccgattctgacgccttagttgctgttgcaggcrgagtacgtccccacgaattgcccttgaactttttgcgagggaaccttttatgaagctttcttcatagataatcgtgttgtggtatgtttttgtagtcgatcttgtttatcttaaaatggggaacgccccccccatgttattttttatccaactatttccagagtctgaattgttttcacttagcgctcttttgcgtttaggtcacaacaaaattctcagtttttaaaaaagacatattttgcttttggaagccccgtttatccatggaaaccaatttttgctgttactcttctttctttagtgtattc

SEQ ID NO: 495558 - DNA, 638 bp, Homo sapiens
caggcaatgtttttctatagccctcaattaaatcttcaattgtttcctcaatggggaatcccgctaagcaaaacttgtgaaggaatgaaaatttgcatgagaatgaagcctgaatcaaataaatcaactaacaaattacattcacagctaagacaagtgttactaaagaagcagagagcaggaaagatcagagggaattattgaaatggctggtgaatacggaatgaatttgccaaataaagtgcttaccatatcatttgtgattcctggaacaaaaggcttgcyatgcagccgacgaggatgggattcgaacccacgtgtgcagagcacaatggattagcagtccatcgccttaaccactcggccacctcgtcacacaaagaatcaacaacttgaatttcttcgtctgtgtagtgctcccagtgagtcttgtagaaacatgatctaatcgttttttcctggtttaatccccataaccacagtctgagtcaggtgtcttaattaagacacatttcacaaccaccataaaaatgacgactgtcacttagagtagtgaagttacttggcaaatatctaataataggttgaaccagtgccggcattcattggtagacaaaaatcacctgcttttttgttga

SEQ ID NO: 495559 - DNA, 574 bp, Homo sapiens
catttgttatgctaccttctgatttgtcttcttcagtgtgatgttatgtcatcatatgagttgaattgttatttgcgtgaactgggtagctacaatcttaccacaatagcataagcattagagacatataaatgctagcacggccaaaattaggcgttgaaatagccatccctcccattcaggtagtaatttggcaagcctaagccaaaggttgcaggcttctgaggagtcatctgttataccatgattaggcactccagttttctttctttttttctttccagcagacagtttgttacatactccttagcagattctgacatccatgaccactgtcttgcccagttttcctatttttaatataatgtcttttacagattgcaataaattttaaaatcccagataaattggcaacaatataacattcttcccagagtttccttctctctaaataatgagagtagtaagtttattctaactcaacagtcaaaataacagctattatccaggacaatgatgcttccaagackgtagtaaagcctataaaatgtaaaataatcaagttaatgtacag

SEQ ID NO: 495560 - DNA, 633 bp, Homo sapiens
ttttttttctggatagggtctctttaggaatctgtaaacatttgctaaatgagtgaatgagtaagggactctaaaacctatatttttaatctctatgttatacaggactaatttatagccatgataataagccttggacattgcatatgttccctaactgtaggtgattaaaattacataaaattaacagttgtcttcaaaatgtaacactaagggaaaaaaatccaggaagctgcacaagtaaggggacctatgagtggaggttccctaccctatacactggtcatctttatagccatcactgaccaccaccgttccctaggtctgaamgtggactccaacaggccgcacctatcaaggactggccaaaagaaatagatcggtttcgccttgggccattaaattcacacatcaagattatgtcttcagggaaccggaagacattggcagaggacttcctgtgagcaagtcatggtgctagagcctagggttgagttccaaccttctcatccacagtctgggttctggagtccatttccactatgtgggatgcatcattgctattaatatttatctttcttgggatcttattaatgagccaacagactgataaacacactcaatccatgcacc

SEQ ID NO: 495561 - DNA, 633 bp, Homo sapiens
ttttttttctggatagggtctctttaggaatctgtaaacatttgctaaatgagtgaatgagtaagggactctaaaacctatatttttaatctctatgttatacaggactaatttatagccatgataataagccttggacattgcatatgttccctaactgtaggtgattaaaattacataaaattaacagttgtcttcaaaatgtaacactaagggaaaaaaatccaggaagctgcacaagtaaggggacctatgagtggaggttccctaccctatacactggtcatctttatagccatcactgaccaccaccgttccctaggtctgaaagtggactccaacaggccgcacctatcaaggactggccaaaagaaatagatcggtttcgccttgggccattaaattcacacatcaagattatgtcttcagggaaccggaagacattggcagaggacttcctgtgagcaagtcatggtgctagagcctagggttgagttccaaccttctcayccacagtctgggttctggagtccatttccactatgtgggatgcatcattgctattaatatttatctttcttgggatcttattaatgagccaacagactgataaacacactcaatccatgcacc

SEQ ID NO: 495562 - DNA, 487 bp, Homo sapiens
ttctgattgaatttgtctagagtggggcctagacacataatttttgaagctccccaggtgatgctaacatcagcctggttgaggaaactgcatctgatggtctcttatttttctggtaaacctaaaattctctgaatttgcaatatggagtcactgagctaggagacaggcaatttcccaaggaattttagggtgattttcatctcaaaagacagaartgcagaaggttgagtgaatatatatatatatatatatatatgaacaatttaaacacttatctggtaccatttgtggattggaagatgtgtgccttaggtagtcttttccttctctctaaactgacataaacaagttagctaaaatccctaagatgttctaatctgatttcagcctcttgtggcaaactgtgaagtacattgttaagaacagagctaaggtttgaaagcacttaacagtgaaagctgtgaaacagcctgaacaagagagt

SEQ ID NO: 495563 - DNA, 605 bp, Homo sapiens
ggagtctggggccagggtgcagcatgaacattgctgagcccaccmttgcagtggctccagtcagccttggcgtttgtatgcaaggtccctgagcctctgcatcatgcacaagcacttgggaggagatggtagcattgaacagacattctctcctcacccacataaatcctcagagggtttccctctgtgggtttataaaagccctttatctaattcatggctcagagaattgagctcactggcaagaggctttttaagtcaaattttgaataatttctcagcaattcattacgtaggaaaacaggtcctttttgttctaatacttagcctaggaatgcaactactctctgccaaattcattaacaaaacctgtgtataaggcctggaaggctcaggccaatttcttaaatgtgctaaaacttgctggtcattgaaatgtaaatttttaccttcagctagaaattattcacaagtgttagattgtaggaaatagcaatgtcactttcaaatgcccaggatagttccagaccaagtacccattgtgagctgaggcttaacgtgtggcaaccaagagagacagccacatgtcatctttctgattggca

SEQ ID NO: 495564 - DNA, 645 bp, Homo sapiens
tttcttgaaagcaccaccttctagcaggaggccaaccagcacaaatatagtgcattaaacaacaaaagctaaggaccctcgtagagttcattttgttcctgacacctgcagatggtacacatcacaggactctgtgcagacaacccccagtaccagcccagagcctggtagacctgctaggtgactagatccagaaaagagataacaatcactacagctcagctctcagaaagccacattcctaggaaagccaggagagtactacatcaagggaacacctgtgggacaaaagagtcagaacagcagccttgagccctagaccttccctctgacagagcctacccaaatgagaaggacccacaaaaacaattctggtaacatgacaaaacaaggttctttaacagccccctaaaaaaatcacactagctcaccagcaatggatccaaaccaagaagaratccctgatttacctgaaaaacaatccagaaggtcagttattaagctaatcaaggaggcaccagagaaaggtaaagtctaatttaaggaaatcaaaaaaatgatacaagaaatgagggaagaaatcttcagtgaaatagatagcataaattaaaaacaattaaaacttcaggaaatattgacactctt

SEQ ID NO: 495565 - DNA, 642 bp, Homo sapiens
gcagatgacctactctggaacttccccttgtaatcctataaaccaattctccctaacaaccttatcttattggttttgtccctttggagaaccctgactaatacagttagtattaaaataaaatttacaaacatgcaaaatcatacagtatgttgatgaagatagagctatatatagtggagctataaagaagaacaaggaaatgataaacacaaaatccaggacagaagttacctctgggatggttggtgggagcagacaatgtgaaaatggaaggtcagatggagggcttaactactaatattaactgcatatttcttacagtggttggtgtgtacactcatgtccattttattactatctttcatattacayatgtttcataacattttgtagaatgtgtgagtatatgaattctaaatctaaatcccagttgtggccacaacaacgtatcaataccataggggagggcttccaaattcccagctagggtcaatgcatttttttcattgtcaacatattagtgcaatctattttgcatatccaaatacctacagttcaacagagaggggcaataaagctcgtatataaaagaatcaacacaatagtggtatataactgcctagagacaactaatgcaag

SEQ ID NO: 495566 - DNA, 642 bp, Homo sapiens
gcagatgacctactctggaacttccccttgtaatcctataaaccaattctccctaacaaccttatcttattggttttgtccctttggagaaccctgactaatacagttagtattaaaataaaatttacaaacatgcaaaatcatacagtatgttgatgaagatagagctatatatagtggagctataaagaagaacaaggaaatgataaacacaaaatccaggacagaagttacctctgggatggttggtgggagcagacaatgtgaaaatggaaggtcagatggagggcttaactactaatattaactgcatatttcttacagtggttggtgtgtacactcatgtccattttattactatctttcatattacatatgtttcataacattttgtagaatgtgtgagtatatgaattctaaatctaaatcccagttgtggccacaacaacgtatcaataccataggggagggcttccaaattcccagctagggtcaatgcatttttttcaytgtcaacatattagtgcaatctattttgcatatccaaatacctacagttcaacagagaggggcaataaagctcgtatataaaagaatcaacacaatagtggtatataactgcctagagacaactaatgcaag

SEQ ID NO: 495567 - DNA, 564 bp, Homo sapiens
ctgcacaagagtcagtatgacagtaagtagatttattaaaacttaaaaataccaaagccaaattctgggggwaaaagtttccccataagtctactaaagccttgaattcataaatgagaagctttattgctaccatatttgcttacatacagtttagcttttgatatgaaagaaaaatttaaacaaagtaaaacttgcaaagggatcataagatgttttctccagggctcttccaccctccctttcccctggcctggtatccttacaccagtgtttctcaacaggacatttggcaatgtctggagaaatttcaatgttggtctcggttagtgggagggactgctggaatctagtgaatagaggtcaggatgctactaaatagcctgcaatgaacaggacaacttctcctctcctcctgcctcacaagtcaaagaattatgcagactagaaagtcagtactgctgagaatgagaaactctgacccatcccactgactctaaaaattgattatgtgctaattgttggtagttcaaatcaattcctaaattgtccccctgacttgcc

SEQ ID NO: 495568 - DNA, 612 bp, Homo sapiens
gtaagtagatttattaaaacttaaaaataccaaagccaaattctgggggaaaaagtttccccataagtctactaaagccttgaattcataaatgagaagctttattgctaccatatttgcttacatacagtttagcttttgatatgaaagaaaaatttaaacaaagtaaaacttgcaaagggatcataagatgttttctccagggctcttccaccctccctttcccctggcctggtatccttacaccagtgtttctcaacaggacatttggcaatgtctggagaaatttcaatgttggtctcggttagtgggagggactgctggaatctagtgaatagaggtcaggatgctactaaatakcctgcaatgaacaggacaacttctcctctcctcctgcctcacaagtcaaagaattatgcagactagaaagtcagtactgctgagaatgagaaactctgacccatcccactgactctaaaaattgattatgtgctaattgttggtagttcaaatcaattcctaaattgtccccctgacttgccaattacctatttgcagtttgttctagagccagccgttatggctaaaatgtatgtgtccctccaaaattta

SEQ ID NO: 495569 - DNA, 513 bp, Homo sapiens
tttatccacaaagaagaaaaatcatgaacatgttcctgtgccttatatattatgctcaaatctgtatttcaagtagatttcagatttacacaggaaaggaaaaactataaaaactttgggttaagatatagaaaattttaggatcacatggaatgaaagtattaaaagccaggttgtaagaaamgtagtcaaatttgattgcatttaagaacttctattcatcaaaatgcactgaagagtgaaagatgaaagaaaaaaagaagaaaggagggagggaggaaggaaggaaggaggcaaacttaatacaaatcaagaagaaatcaagaagatagagacacactttctactgaaatatgtcctaaattcatgaggtaatttacagatgagaaatgcaaaaattagtaattgtggaaatactctcatctgctaatctgcccttggtcagttccttcccaggagctctggcctccccttcactgttagaacattcttgttaggtgtcaaggccctttt

SEQ ID NO: 495570 - DNA, 454 bp, Homo sapiens
aatctgcccttggtcagttccttcccaggagctctggcctccccttcactgttagaacattcttgttaggtgtcaaggcccttttaagtaagtcagtaagactcaagctataaaggaatctrtagatacctttgactgctcaaaatgattgaataaaggaataaatacatgaataaatcaatgaacgtaaaaatataacacaaactcaaaaaacaaatggaagattggaatatttgtaaatcaatttaagataaagtattaatgtcattaaaatacagaggactattatcacataaaagaacatttatcaaatagcaaagtgagtaaaagatatgcttacttaactttcacacatgcaagtccaaagaggaaattaaaaaaagaaaattatgctcaaccttccatgtaccttgtgaaaggcaaatgcaagtaagaataaaacgcaatttctcca

SEQ ID NO: 495571 - DNA, 642 bp, Homo sapiens
gtttcactgtagcatacataaagaaagatcaacgtttgtttaaaatgtattgtttgtgggtagaaagcaaatataaaattttaaaacccttatcacaaaaaaatgttggtttaaatggagtcaacccatatgatattacacataggtttaattactgggtaagttgatcagttaaagaggcagatgaattcaaattttttacccctaaaaatattggggttataacggtgataaaaatttgaataaggtaaatagttaaacttcaatttcattgaattgtttgttgcaataaaaaagtttcttaaaaaaaactataatgcttatttgtcccaagttaaaattttatttaatttttttattcttactctaaagcagaagtaactacataacttattgtctgatagcaaaaattccttattgatcaatatgtttaacatcactttttgcaaacttgagaaaataaaaaagtttataatacagacataagttgttcttgttctatctacacttctttaaaaaataacaggttacatatttaaaggggartattgcctttttgacatctacatacccattgttctttctaagcttttgttcactagctcaggctgagaatggataattatatgtaatggaagacag

SEQ ID NO: 495572 - DNA, 607 bp, Homo sapiens
gttacttctcctcagagtttctgcaggagacacaaacaattcaaatgctacagaatgaaggaaaactatattaaaaaatttgatttatgaaactgaggaccgaaaaacaagtggatgctaaatgcaaaaaaatctttatatcttccatacataatgctaaagtttgggggtccagggtaataatatattactttacttcagttgtattaggaataacatgaatgatctataattttggtttcagttgaagttgctacatagaattaaactaaggaaatatgtacttgctsttaatttatacaattaatcgtttagtaagttaataattattgattttattaataacagttgttgccaactagttgtgtcatttggtgtggtggttacttgggttcaaatcctacctctgccatgtaatcttgggtacattacctaattcttctgattgttagtgtactcatctcttaaatggggccaaaattgaatagctgtgaagatcgaatgagttaaataattaaagtaaccaggacagtacctaagacacaattaccaatgcacatctgtgtgtgtttttttgggggtgatacataacatttctactctcctg

SEQ ID NO: 495573 - DNA, 643 bp, Homo sapiens
ctatgcctttttcttaacattttcaatgcagtacaacatattaaaaaaaaactgttattctaatagttagccaaggaattcctaaaaacgttattatatatattgtcaatacatcttaatagaaatgtttccttgtgaaaatactgcattctgggataacgaaggaagctataactatgcattttttcctaagatatgtagaagaaaaataccattgaaatactaagagagaaaactgctaccctcatttatttctggatatttaaagttgccccactggccctctaacaaatgaatcaataacatttgtggggagggggggcattgattacgaagcctggaaaaatgagtaattgctcaacttagtgattccaaaaacaattttgtatttaataggctcttaaaaatgaaaagctatttcatgggactctaagagtgtggatttctcttaagaatccagggaatcaagtttgcactgtaaacactmgatgggagaaaaaaacctcccaggacagtagaaaccccagttaagtttatgggattcccagaggagaagggtctgtggactacttttgagtggtaacttgaaagacacaaaattattagggaacacatattcaaaatggtgtctgagaggtatgtc

SEQ ID NO: 495574 - DNA, 573 bp, Homo sapiens
ggatttatgaaaaaatatattttagtgtgttagtttatctaggtctgaaactataattgaccccagcaytcttacctttcatttttgatgaaatcttaatgttgagaaaaaaatattttacttcaagatgcagagtgaacaccaggtgagtatcaaataaaattgaattatgttagttgaaaaaaattctcatcaaatgaattcataaattatgataggcacatcaatcagatgcttaagaatgcccactaggcaagcaaatggtatttgtttgaaataaaatagttacctttttaggacagatttgaaaatgttaatataaaaaaggttaattttcttctgctatacatgactaatttatgggtttaataatatgccattgatctgatcacaaagatttttatacgcacagatacattaaagttaagatctcatgttcttgaaataacctgtaaatttggggtattgctatttataaaagcatgtgtctttaatcatttgatcattgtaaattacaaatgatcatttagtcatagtatatgctggtaattaattagtttttgagacgttgaa

SEQ ID NO: 495575 - DNA, 613 bp, Homo sapiens
catttaggaatgattttgtggtgaatacatttattatctcaccatataatcccacagaagtatttaagaataagttattatggtcagtatrtaaaaatatcctctttccttcctctacctattgacaacgaatttgacatgcactatagtgatttaaattcagttattagaaatcttgagttcacatacaagaaaaatataggaaaataaaataattttagaatgttcttaatgctaattttgcagcttatttcctaaccagtttctatgaattattttacatgaaattaataattcatgttttaagtcagcataacaaatatgattgaggtataactataaagagagtctgtatttagttcaaattctgtgataaatgggactaaacataagattacattaaggccatctgtttaacatcctcccaaacacaataacaaccagattttaaaaataatgtggctccttcatgttattttctccacactgttgatgctaacagaagcactactcatttatctatttactgtatccctttgctctccagttttgactgactttcatctacattcaaaactttgaattttagcctagagtattcattaattttggc

SEQ ID NO: 495576 - DNA, 276 bp, Homo sapiens
tgatctcacccctgtccctttagacccagctaccatgtgttcccacaatgtaacttccatgtcatgaacaccaactccaccaacggacataggacgagacagttccttttttatgtatttcctttgcctaatttgagtccttttgctgayggtaatttttacctggaaggaaaccttcctagactatattctcatcatggaaatccattatcttagcctagctcctcacatgaaacggagagtaattcatatttattctcttaacacaaaaaggag

SEQ ID NO: 495577 - DNA, 422 bp, Homo sapiens
ggccctgctagctctaaggactggctagcactggaagccgcagtctcttcttagccagaaaggtcttttaagatgtcaaaacaccacaatatgcagaaaattctatatatatgcaatacacacggaaggggcagaggtagggagcaatcttccctgaaaatgaccctgtgctaagatctcaaagggaagaaagacaagcagaatctatgaaaacagacagtaaaaaccctagtcctgatgcccagatgatcatcatggctgcagagcagggctggtgggtcaggaagaggcatggccccgccaaggccacattcagacgcttggtccttatcctaagagcaatgggaaggaactaccccatggggaggacatgattagatttgtrtttttaaaagatgagtctggcagcgtgagaacaggtt

SEQ ID NO: 495578 - DNA, 434 bp, Homo sapiens
gtgaagcccaaacactgctgccgatttctggtttagacaaacagctcctgcaggactggaattgggcaagactggagtcaggaaagccatcaggagcttaaaggaattcaggcaggcacagaacggggttgttagaaataatgagataacggtatcttcaggtgttttgagaatcattattttaccatgaartaagagcatgaaacaatattccgcataacttgctacactctaattgtttcctggactctcttcagaagctgtgtgtgcctagtgaatggaaaccgtaactacttcttgctagctgtcactttatctcacctttcatgtgaagtctgatgccagacacagtgtaggcacaaaataattgttagctgaataggagaaggcagaatgagatttggcaggtctgtggtcatatgccacactgtaaa

SEQ ID NO: 495579 - DNA, 537 bp, Homo sapiens
tggctaattgtggagggctcaatgtrcaaatgacaggacagagatgagaggtccctcttgactcgcatgctgtttcttaggctttagtcttgagtttcattctggctttatgattccgcagattagaaagccggagaaagcaaaggatgagaggtttacctatgaagttgattgaatgcgtttttctcagaaggcagtttgggttgataatgaagtcattgatttttgaattaggttgagaattttttgaaatttatgggaggttgaattctaatacctcacacagattctgttatggatggagttgacagaactaatacctaatgaaaagtggctcctcctgaaacgcgtcccttgccccggtttcccccaccaccccagccttccttgacctctgacttgcccatctctgtctcgtgggctgtgagctggtatctcctgcccagccttgtgggtgtcccgaggtggtgtcgtgagtcctgttcacacgctacaggcctcgagtctttgagatttccaccgcaggctcacagcgcg

SEQ ID NO: 495580 - DNA, 537 bp, Homo sapiens
tggctaattgtggagggctcaatgtgcaaatgacaggacagagatgagaggtccctcttgactcgcatgctgtttcttaggctttagtcttgagtttcattctggctttatgattccgcagattagaaagccggagaaagcaaaggatgagaggtttacctatgaagttgattgaatgcgtttttctcagaaggcagtttgggttgataatgaagtcattgatttttgaattaggttgagaattttttgaaatktatgggaggttgaattctaatacctcacacagattctgttatggatggagttgacagaactaatacctaatgaaaagtggctcctcctgaaacgcgtcccttgccccggtttcccccaccaccccagccttccttgacctctgacttgcccatctctgtctcgtgggctgtgagctggtatctcctgcccagccttgtgggtgtcccgaggtggtgtcgtgagtcctgttcacacgctacaggcctcgagtctttgagatttccaccgcaggctcacagcgcg

SEQ ID NO: 495581 - DNA, 537 bp, Homo sapiens
tggctaattgtggagggctcaatgtgcaaatgacaggacagagatgagaggtccctcttgactcgcatgctgtttcttaggctttagtcttgagtttcattctggctttatgattccgcagattagaaagccggagaaagcaaaggatgagaggtttacctatgaagttgattgaatgcgtttttctcagaaggcagtttgggttgataatgaagtcattgatttttgaattaggttgagaattttttgaaatttatkggaggttgaattctaatacctcacacagattctgttatggatggagttgacagaactaatacctaatgaaaagtggctcctcctgaaacgcgtcccttgccccggtttcccccaccaccccagccttccttgacctctgacttgcccatctctgtctcgtgggctgtgagctggtatctcctgcccagccttgtgggtgtcccgaggtggtgtcgtgagtcctgttcacacgctacaggcctcgagtctttgagatttccaccgcaggctcacagcgcg

SEQ ID NO: 495582 - DNA, 403 bp, Homo sapiens
gggcagatgggagttggtatccggcagctccccgttgtttctccaccttggatggagacaatgactccctggctgccaaagacaatgaagacatgtgaatccggcccrgagactgtgctggccttgaagacacacagcaggcctggcctcccatcctcagttctaccggtgctgttggaagcttgatgggcccaggagccagaccagcgtggatgaagcagggagttgattgcaaacctgctgaatgttaaccatagctgccaggaaggcgtgtgcttggaagtctctttctgccacattaaacgtgtcatttgcagcaaattaaaataaatccacgttgcagtttccatgtgtataaaatgaaaatagtaagtccatcttgctgggttttatcatatcaggg

SEQ ID NO: 495583 - DNA, 531 bp, Homo sapiens
gtaagaacattattaattttagccacttaaacgcgagccatttgctttttgctttttaggcctaatcactttggaacataagcacataattaaaaatatatgcaggtaaccttgttgtaaattgacttgattttagcagtatgctatttatttctgcccagctttcataacttactcattttgcatgaaactgtttatatctttaaaaaaaattagaacatactaataaccaggtgcttgtgagtacagccatgtaatatttgaattgttttgcttatcttattctgtatttctctgaaactgttttctgtttacctcttgctaaaygtcaaagtgagatactttttgtaaatctcttaccagaaaaactaaaagtccaagatagattaaaaagataagggaactgctgaagctgatagagtcagtccatgatcgttgaaaaattgctttcttccatctggtttctaatcattttcaaacactcagttgctgtagacctataaaagactcgttttaccttttaaggaacac

SEQ ID NO: 495584 - DNA, 578 bp, Homo sapiens
agcgacaaattacaagcaggaaggtgcagaggctttattgggcagggcaggaccagtggttaagggtgagaggtgtggggataaagagcagaaaggaaagagagggacacgaggagtaagaggggaagcagagagaaaataacacacattcaaaaaacacacagtgtattttttgatcaattcttaactgtggcccctgtgaatatttatattttacatctatttagtacagttaaacacacagagattcatatttctacagacactcatggctcagcacataatccttgaacaggcaagaactcagatctagtgaaatttaggctgtaaaaggaatgtaacagtttagtatatagactattcaggcacaaagaatctttgaacaaagcaaataattttttctgwctattatttttgtatatgtgaaattacactgacaaaaaagtcttacaggaattttttttaatttttgtgggtacatagtagttgtatatatttgtgtgattcatgagatattttgatacagacatgcaatgtgaaataatcatgatgagaaaggggtatccatcccctcaagc

SEQ ID NO: 495585 - DNA, 293 bp, Homo sapiens
gccagcatgcctggctaacttttttttgtatttttgtcttatttttatttcagagttcccctcaaaaaataacctactttttattttttattttttttgtagagacacggtttccctatgttgcccaggctggtcttgaactcctggtctcaagtgatcctyctgccttggcaaaatgctgggattacaggtatgagccaccatgcttgacctcttttttttaattaaactttttattttgaggtcattgtagactcatatacaattttaagaaatgacagagatcccttgta

SEQ ID NO: 495586 - DNA, 572 bp, Homo sapiens
ggaggaatgaacccaaagaagtaaactgcccagcattccaggctaccttgacctgaaggcgtttgttaataaggaagaaacatccaggacactgagttcctcaactgtgcctggaggggagcatcgaaatcagccacccacctgcactcccagtccttttaggctcaccttcaattcatatgtctatgggatgctctaggaagaggaacaaggcagagcctctgccttataatctgctgggtttgaggaaggagaagccaggcagttgtccctggagattgggttgtttgttttatcttatccgccttaggaagcagaaagcagtatggtaaaaggagaggamccccgatgaggaaggaaaagaaggctgtgtatggtagctcacgcctgtaactcagcacttcaggaggctgtggtgggaggactgcttgaggccaggagtttgagaccagcctggacaacatagtgagaccctgattctacaaaaaataataaattagccaagcgtggtggctcacacctaatagtcctagctactccgaaggccgaggcaggagaattgcttgagctat

SEQ ID NO: 495587 - DNA, 353 bp, Homo sapiens
agtcatcagtaaaggatgtgtacagggaatgacaatattagaacaaaaacaacctgcaagtaaatcggatgcaagagtctatgtatcttgcaaggaaatcttttgcacttaatcacaacatggctctcctcaatactacggagaacagaattgattcagattgtttttaagcctgaacgtaaacaatattgycgcctttttgggtttcagcacctccttattcatccattttctcttttatgggaagggggttgatgaggtgtgtgaagatgatagaacgtgccccagaaactgaacaatgaagagacgcctgtcatatcgggggtacctagattcctctgaaaggaagccca

SEQ ID NO: 495588 - DNA, 581 bp, Homo sapiens
tgctactgggttgtggcttgaatattaccatctgaaaatacactggatgttgccataacctctaatttttcaagaaagatcagaaatccagactttaacatgaaatctcctgatctgtgaatgctgacaactaattcaaacttttgtaacaacaataaggaggccaaaaaacttgtaagcaggccaaacctgacctctcatctagtctcatcaccyagacccacaccctctgcaacagccatacttaacatttctcagattcttagtgatgccaagctttttttccttagggctctcacacatgttgtgtcttctgctttgaccctcaacctcccctcaacctccaattccacttcattaagcaatctcctactcattctacgtttctgaggcacactttctcaatgaagtcttccttattcccactgcccctccacccccaactctatagactaggtcacacattccttgctctgaaagcactgagtacaacttcgtaacattcatcacacctcaaaaacaaaattatttatttaatgcccatcatctctccctagattgaaagtttcatgaaagcgggg

SEQ ID NO: 495589 - DNA, 581 bp, Homo sapiens
tgctactgggttgtggcttgaatattaccatctgaaaatacactggatgttgccataacctctaatttttcaagaaagatcagaaatccagactttaacatgaaatctcctgatctgtgaatgctgacaactaattcaaacttttgtaacaacaataaggaggccaaaaaacttgtaagcaggccaaacctgacctctcatctagtctcatcacccagacccacaccctctgcaacagccatacttaacatttctcagattcttagtgatgccaagctttttttccttagggctctcacacatgttgtgtcttctgctttgaccctcaacctccyctcaacctccaattccacttcattaagcaatctcctactcattctacgtttctgaggcacactttctcaatgaagtcttccttattcccactgcccctccacccccaactctatagactaggtcacacattccttgctctgaaagcactgagtacaacttcgtaacattcatcacacctcaaaaacaaaattatttatttaatgcccatcatctctccctagattgaaagtttcatgaaagcgggg

SEQ ID NO: 495590 - DNA, 530 bp, Homo sapiens
tgatcctgtcatgatcaccattcctacagaatacagggacctgttcaataggaaagatttcacctgctttttataacagtgttgccccaaatgtagcaaaggccaccatatcggccagatttgatccaaataaactgaaaacaaatttggcagatgcactccattcacagagcagcattattcctttgattgaggtcaatgtcattcctgwtgacaatctgtccttcatcagtaaagatactaaagaggcaaacaacagagcttcaattatttttacatctatgaatgagccaaccagcactgtggtggattccactgttccttccactgaaggcagttatgtgagtggtgattttatgttacctggagaagataatgttaagtctagaggattccaatctctgctgagaaccaacatgctccttcttgattccttaaatgaaaatccagaaacccctggcctaatgagagataactccttttctgaatcttcaataactaggtcagaagagttagaaagagcaactgaa

SEQ ID NO: 495591 - DNA, 614 bp, Homo sapiens
gatcctgtcatgatcaccattcctacagaatacagggacctgttcaataggaaagatttcacctgctttttataacagtgttgccccaaatgtagcaaaggccaccatatcggccagatttgatccaaataaactgaaaacaaatttggcagatgcactccattcacagagcagcattattcctttgattgaggtcaatgtcattcctgatgacaatctgtccttcatcagtaaagatactaaagaggcaaacaacagagcttcaattatttttacatctatgaatgagccaaccagcactgtggtggattccactgttccttccactgaaggcagttatgtgagtggtgattttatgttacctggagaagataatgttaagtctagaggattccaatctctgctgagaaccaacatgctccttcytgattccttaaatgaaaatccagaaacccctggcctaatgagagataactccttttctgaatcttcaataactaggtcagaagagttagaaagagcaactgaatatgttggtgccattaatggaggcaatgtcccagagaagcaggttataataactcaaaccaacattcattcctatcccttggctt

SEQ ID NO: 495592 - DNA, 588 bp, Homo sapiens
atctgcaaccaggctaatcgtctaagacagaaagctgaaaactttgaagttgagtccatatttaataaataataactatttgtccttgagatggaacccactattcaggctgatgttgctgccctttctcagatttagttgtgtctgagtatgaaaattcaatttcttctaacaacactggaaaaagactcattctagcattaacactaaactgcaatctgctttcatytaattagctaaaccttaaggttgataacacaaggatgtttgatacaattaacgttattattaaaaatactccctctgaaattgagaatataattcttaaaaataatgcagttatccacatcttgattcttgtttctgggtgaattttgacacatgacaccagctccctgccactgacaaccctccctgtcttctgggttaaaataacagcctgcagaaaaaacattcctaaaacaattttaacctacaaaacttgagactctcactattactcaagtaaattcaagaagaagtaagaaatacaatgaaaaagagaacactaaagacccaaacaggagcagtggttctcccagcacgcag

SEQ ID NO: 495593 - DNA, 467 bp, Homo sapiens
ggaaaggtaggaaagagagaaattatacagtacttgttaaacatcctggatcttatctgtttggaagatattaaaggttttaatcattttatcctcaaaacagtcttagtactgagagcactgcctagctgaaaagcatcattattttataaactccaactatacttctttcaagggctttgtttaggaaaataacttgatagtcccctttgcttggaggagatgaggctctgaggcataaaccaaactgcaacagttaaacaattaaaaagataatgtgctgtacaatacaagttaacagaatttggggctagggcttagaaataacaagaagaacagcacactggcaattggttagagtccaggaagatgagtgtccagtgagattcctggtggtcaatgaacatttttccaagaaagcgtgcctaattatgygttttaccttgcgccatttcaaagcaaagttt

SEQ ID NO: 495594 - DNA, 249 bp, Homo sapiens
gaaaatatctagtatccagtataatcctctgagtcwgcttgctttagattatgtattaaaacaaccttagtttatatgcccatttctttcaggggatttcaacttcttcacatgcttagagccaatttttccatgcctaagatgttgtatgcaactaaaataattgtgtgttaatttttcatgcatttcacattaaatctagatgtaattttataagtgctagatccttcacttcctagctctttgacc

SEQ ID NO: 495595 - DNA, 588 bp, Homo sapiens
acaattggaaattcaaaatttagtcaaatcaggaataactagctattatgcaatgtatttgggcatatatagaacacttttgatttttctcwtctaattgtttacatgcattagtttacctgtttatcaaggtgattgagatgaactttagcattgctttcactatgaggaagcagtgttaatgccaattgtaggagaactggctgcagttatagcagcagatagtgcagcagaggtggttccagatgaggctgtatttgtggtgaccatagtcatgggactggtggctgccactagggcagtggtgatggagtcactgttaggtgtgattgttgctgctgtcattgtgatagctggagcactgtagcttccttcagtagtggcctcatctcctgaagttgtagcttcaataattgaagcaggttcagcactggaggcagcagtaactgtgattgtggtggcaggacctggtacaatcatactggcagtagttgtgtcacccaaggcttactgttgatggcaacacttgtggaggctgcagttgttgcagtggtggctgctacaggaattacggttgtagaaaaagca

SEQ ID NO: 495596 - DNA, 645 bp, Homo sapiens
atcccatacctctgtattcttacatataaattggaagagtacctgctctctttcacacaattggaaattcaaaatttagtcaaatcaggaataactagctattatgcaatgtatttgggcatatatagaacacttttgatttttctcttctaattgtttacatgcattagtttacctgtttatcaaggtgattgagatgaactttagcattgctttcactatgaggaagcagtgttaatgccaattgtaggagaactggctgcagttatagcrgcagatagtgcagcagaggtggttccagatgaggctgtatttgtggtgaccatagtcatgggactggtggctgccactagggcagtggtgatggagtcactgttaggtgtgattgttgctgctgtcattgtgatagctggagcactgtagcttccttcagtagtggcctcatctcctgaagttgtagcttcaataattgaagcaggttcagcactggaggcagcagtaactgtgattgtggtggcaggacctggtacaatcatactggcagtagttgtgtcacccaaggcttactgttgatggcaacacttgtggaggctgcagttgttgcagtggtggctgctacaggaattacggttgtagaaaaagcag

SEQ ID NO: 495597 - DNA, 661 bp, Homo sapiens
gttcattgttgtatgtcacagaaatttttttaaatgaacttttagcatagatttttaagcatgattcccagcagaataatgatgaaacactgtaattcatttggcttgctccagcagagggtgtctatccaaagttgataggaaataacatgtctgagatttggggcattccctcagtccatattaattattttatgatgatcagcaggccagttataaaataaaaacaatggtttcaagcctttgcataactggtttgctttcttctggtaaaagtgcttggttctaattctacagaatataaatctaagtagtctatgaaatcaatcatttttggtcttccattatcattataattcattatttttaaagtcatgacgtatttaatcaacttttttaagtgatggatacaatcwtccagtacgttggtttattttgaagttttaggtctttatacattagcaaattcaaaatcattgtttgattcaaaaaaacatagatgattaggcaaagcttattttttccatttcgttcattcagtcagtatgataggcagagtaatgccccaccccaagaggtctgcatcccaacccccagaacctgtgaatatgttgttacatggcagaggggaagtaaggctgaagacgaaattgaggttgct

SEQ ID NO: 495598 - DNA, 554 bp, Homo sapiens
ctgacactctggttgcagtattgtgaccctgaatagaagacccagttaaaccctgtccakgaaaaaagataataactgggtgatgttttaagctgctcagtttgcactggtaaatccaccaacaggaaagtaatatacaagttaagtgggccgggcgtggtggctcatgcctgtaatcccaacactttgggaggctaaggagggtggatcacgaggtcaagagatcaacaccatcctggccaacatgatgaaaccctgtctctactaaaaatacaaaaattagccaggcgtggtggcacgcacctgtagtcccagctactcaggagactgaagcaggagaatcacttgaacccaggaggtggaggttgcagtgacctgggaccatggcactgcactccaacctgggcaacagagagagactccatctatctcaaaaaaaaaataaataaataaatagaagtagttaaacgaatacttttgaccattgatggaagttgctttcattccctcttacttaatcatctttatcttagccctgaaagagggatgcttta

SEQ ID NO: 495599 - DNA, 554 bp, Homo sapiens
ctgacactctggttgcagtattgtgaccctgaatagaagacccagttaaaccctgtccaggaaaamagataataactgggtgatgttttaagctgctcagtttgcactggtaaatccaccaacaggaaagtaatatacaagttaagtgggccgggcgtggtggctcatgcctgtaatcccaacactttgggaggctaaggagggtggatcacgaggtcaagagatcaacaccatcctggccaacatgatgaaaccctgtctctactaaaaatacaaaaattagccaggcgtggtggcacgcacctgtagtcccagctactcaggagactgaagcaggagaatcacttgaacccaggaggtggaggttgcagtgacctgggaccatggcactgcactccaacctgggcaacagagagagactccatctatctcaaaaaaaaaataaataaataaatagaagtagttaaacgaatacttttgaccattgatggaagttgctttcattccctcttacttaatcatctttatcttagccctgaaagagggatgcttta

SEQ ID NO: 495600 - DNA, 554 bp, Homo sapiens
ctgacactctggttgcagtattgtgaccctgaatagaagacccagttaaaccctgtccaggaaaaaagataataactgggtgatgttttaagctgctcagtttgcactggtaaatccaccaacaggaaagtaatatacaagttaagtgggccgggcgtggtggctcatgcctgtaatcccaacactttgggaggctaaggagggtggatcacgaggtcaagagatcaacaccatcctggccaacatgatgaaaccctgtctctactaaaaatacaaaaattagccaggcgtggtggcaygcacctgtagtcccagctactcaggagactgaagcaggagaatcacttgaacccaggaggtggaggttgcagtgacctgggaccatggcactgcactccaacctgggcaacagagagagactccatctatctcaaaaaaaaaataaataaataaatagaagtagttaaacgaatacttttgaccattgatggaagttgctttcattccctcttacttaatcatctttatcttagccctgaaagagggatgcttta

SEQ ID NO: 495601 - DNA, 554 bp, Homo sapiens
ctgacactctggttgcagtattgtgaccctgaatagaagacccagttaaaccctgtccaggaaaaaagataataactgggtgatgttttaagctgctcagtttgcactggtaaatccaccaacaggaaagtaatatacaagttaagtgggccgggcgtggtggctcatgcctgtaatcccaacactttgggaggctaaggagggtggatcacgaggtcaagagatcaacaccatcctggccaacatgatgaaaccctgtctctactaaaaatacaaaaattagccaggcgtggtggcacgcacctgtagtcccagctactcaggagactgargcaggagaatcacttgaacccaggaggtggaggttgcagtgacctgggaccatggcactgcactccaacctgggcaacagagagagactccatctatctcaaaaaaaaaataaataaataaatagaagtagttaaacgaatacttttgaccattgatggaagttgctttcattccctcttacttaatcatctttatcttagccctgaaagagggatgcttta

SEQ ID NO: 495602 - DNA, 336 bp, Homo sapiens
gatgtgttgtaagctcaagctttaccagcgaacacctcagcacaaaaggctgaattgatcgccctcactcaggctctccrataaagagtaaacgtattaacatttacactgacagcaagtacgcctttgctactgtgcatgtacataaagccatctaccaggaaagcaggctactcacctcagcagctagctgtgatccactgcaaaggacatcaaaaagaaaacacggccgtagcccatagtaaccagaaagctgattcagcagctcaggtcgcagcaagactttcagtcacgcctctaaacttgctgcccacagtctcctttccacagccagat

SEQ ID NO: 495603 - DNA, 336 bp, Homo sapiens
gatgtgttgtaagctcaagctttaccagcgaacacctcagcacaaaaggctgaattgatcgccctcactcaggctctccgataaagagtaaacgtattaacatttacactgacagcaagtacgcctttgctrctgtgcatgtacataaagccatctaccaggaaagcaggctactcacctcagcagctagctgtgatccactgcaaaggacatcaaaaagaaaacacggccgtagcccatagtaaccagaaagctgattcagcagctcaggtcgcagcaagactttcagtcacgcctctaaacttgctgcccacagtctcctttccacagccagat

SEQ ID NO: 495604 - DNA, 336 bp, Homo sapiens
gatgtgttgtaagctcaagctttaccagcgaacacctcagcacaaaaggctgaattgatcgccctcactcaggctctccgataaagagtaaacgtattaacatttacactgacagcaagtacgcctttgctactgtgcatgtacataaagccatctaccaggaaagcaggctactcacctcagcagstagctgtgatccactgcaaaggacatcaaaaagaaaacacggccgtagcccatagtaaccagaaagctgattcagcagctcaggtcgcagcaagactttcagtcacgcctctaaacttgctgcccacagtctcctttccacagccagat

SEQ ID NO: 495605 - DNA, 336 bp, Homo sapiens
gatgtgttgtaagctcaagctttaccagcgaacacctcagcacaaaaggctgaattgatcgccctcactcaggctctccgataaagagtaaacgtattaacatttacactgacagcaagtacgcctttgctactgtgcatgtacataaagccatctaccaggaaagcaggctactcacctcagcagctagctgtgatccacygcaaaggacatcaaaaagaaaacacggccgtagcccatagtaaccagaaagctgattcagcagctcaggtcgcagcaagactttcagtcacgcctctaaacttgctgcccacagtctcctttccacagccagat

SEQ ID NO: 495606 - DNA, 593 bp, Homo sapiens
gtggtttgacgcaccttgtgttgttgtttccaatacccagsggggaagacaatagtactatttttgatagtcctattcatccgctccacctttccggaacgctgaggctgggaggcagcatgcagtttccgtgtgatccccaatacctttgctgtcttctgtaccaaggcagccaaaaacgcaggccccttgtctgagccgatacctaagggcggtcgaaatctaggaatgagatctcaaagaagcacaggggttacttcacgagctttctcagttcgtgttggataggcctccacccatccagagtaattacgcccaagaactagtacatacttgtcacctccacactttggcatctctgtgaagtccacctttagaccttcaaagggggctgctccataagctcgtatgccgggcggaatggctggaccttgcctcgcatcatgctgtcagcaggtaacacatcgctgcctcacggttttggcaagggctgacaaaggcgagatgtagaaataccggcctaacaacttttccagtgactcctgacctcgatgggtggtttcttgcacagccagtacaactgcagctcccag

SEQ ID NO: 495607 - DNA, 593 bp, Homo sapiens
gtggtttgacgcaccttgtgttgttgtttccaatacccaggggggaagacaatagtactatttttgatagtcctattcatccgctccacctttccggaacgctgaggctgggaggcagcatgcagtttccgtgtgatccccaatacctttgctgtcttctgtaccaaggcagccaaaaacgcaggccccttgtctgagccgatacctaagggcggtcgaaatctaggaatgagatctcaaagaagcacaggggttacttcacgagctttctcagttcgtgttggataggcctccacccatccagagtaattacgcccaagaactagtacatacttgtyacctccacactttggcatctctgtgaagtccacctttagaccttcaaagggggctgctccataagctcgtatgccgggcggaatggctggaccttgcctcgcatcatgctgtcagcaggtaacacatcgctgcctcacggttttggcaagggctgacaaaggcgagatgtagaaataccggcctaacaacttttccagtgactcctgacctcgatgggtggtttcttgcacagccagtacaactgcagctcccag

SEQ ID NO: 495608 - DNA, 595 bp, Homo sapiens
tggtttgacgcaccttgtgttgttgtttccaatacccaggggggaagacaatagtactatttttgatagtcctattcatccgctccacctttccggaacgctgaggctgggaggcagcatgcagtttccgtgtgatccccaatacctttgctgtcttctgtaccaaggcagccaaaaacgcaggccccttgtctgagccgatacctaagggcggtcgaaatctaggaatgagatctcaaagaagcacaggggttacttcacgagctttctcagttcgtgttggataggcctccacccatccagagtaattacgcccaagaactagtacatacttgtcacctccacactttggcatctctgtgaagtccacctttagaccttcaaagggggctgctccataagctcgtatgccrggcggaatggctggaccttgcctcgcatcatgctgtcagcaggtaacacatcgctgcctcacggttttggcaagggctgacaaaggcgagatgtagaaataccggcctaacaacttttccagtgactcctgacctcgatgggtggtttcttgcacagccagtacaactgcagctcccagcag

SEQ ID NO: 495609 - DNA, 622 bp, Homo sapiens
tgcagccactacagatccgaccaggagttctttctcaggttggtaataattcattctttgccatatatcwgcttgtgcttttgggaaatagtgaaaatgacctggatagggatttaatccattttgtaggttatggactttaatgtttataattgttagctgttacttttagatagttttgagtttaagatatggtaaagttcaattacttataacttgttattttctattgttttgctttgctgcaagcagacgtggtctggtagaacacagcagatgctggtgcctgcctggcaacaggtgacacccctggctcctgctactactacactaacttctgagagtgtggctggttcacacaggcttggagactgggggtaagctgaaaacaaaagtactttgtgaatagtttgcagactagatcttgattaaagaaagatcttgattaaaaacattgttctgaacttctccctaggaagatgatttcatgcagcaatcattataactcagtgatgccgcagcctcttctgaccaatcagataactttatctgcccctcagccagttagtgtggggattgcacatgttgtctggcctcagcctgccactaccaagaaaaataa

SEQ ID NO: 495610 - DNA, 655 bp, Homo sapiens
ccactgaatctgctcaatgtggtgaacagcactcagtatatgtgtgcattttaacaaagggtataagctaaatgaagtttcacaaaacaacttgcttcatttggtgcaagagcccaccaaggcagggttacagatattattactccacatacaaatgaagaaactgcaactcagagattgtaacttcctcagagtcatgcagctaataaatggcagtgataaaggcagaagccaggtcttctgaccaccccatgtctctcttcccactatgtaagagacacccaggaaaatggagctcattgccatgctgggaagaatgaacagagagagagtgaatgcatgaatgaacgtagttaacaytattttgactttttctctgccttcttttttgtcctttcctaggttttacatgaaaggagcattggcacatgaatgtatacatctcttctttttacattttgctttctttaccctcacaaattatatacaggctactgtcatctacatgagcacacacaaatagcttctcataatcacataaatattttttgataaatcaaattaactttgaaaaacagaaaagaaaggaaggtcccactccaaatagcatccactactctgatcttcacctgctttctcttctagaatttcgggt

SEQ ID NO: 495611 - DNA, 655 bp, Homo sapiens
ccactgaatctgctcaatgtggtgaacagcactcagtatatgtgtgcattttaacaaagggtataagctaaatgaagtttcacaaaacaacttgcttcatttggtgcaagagcccaccaaggcagggttacagatattattactccacatacaaatgaagaaactgcaactcagagattgtaacttcctcagagtcatgcagctaataaatggcagtgataaaggcagaagccaggtcttctgaccaccccatgtctctcttcccactatgtaagagacacccaggaaaatggagctcattgccatgctgggaagaatgaacagagagagagtgaatgcatgaatgaacgtagttaacattattttgactttttctctgccttcttttttgtcctttcctaggttttacatgaaaggagcattggcacatgaatgtatacatctcttctttttacattttgctttctttaccctcacaaattatatacaggctactgtcatctayatgagcacacacaaatagcttctcataatcacataaatattttttgataaatcaaattaactttgaaaaacagaaaagaaaggaaggtcccactccaaatagcatccactactctgatcttcacctgctttctcttctagaatttcgggt

SEQ ID NO: 495612 - DNA, 357 bp, Homo sapiens
ggtggaatcaaactctcttatactctmttctgagaaattcccactgtccattaatgagtgaataatctgcaatttcagctagagccatgaggcacatagttctcttcccagaactaagtatttaaaacaggtaccttttacctagctatagaaagtgatggcaagccctggagcccaaatgttccagaattccaaataatacttgaatatttacaactgcttttcataaaaagttcaagcttgtttcattactattagtctaaatattatattaacaggtatgctagcaagaaggccttttattagctcctggattgtctctcaattattaaaagagcgttcaaattatggttattt

SEQ ID NO: 495613 - DNA, 632 bp, Homo sapiens
aaatggctaatgtgtggaagaaaatcccaagggcaaagcacccattactaaaatgtgatgttctgagcyatacaattagagattttgcaaccactgagtcagtgtagggacagcaggcaagcagatgctccacagtatgctttgagagatgcttgaaaggcacccaacttctccaaaatcctgaaggcatctaaaacttctgtgttaagtgttaaggccctggcactctcagttaaatacgagcaatgtctaggaagagtaaggcatggatcagatttgaattttgatgagaggggaaagtctgaatttgatgggatctgaggctgaggaaaattttacagagcaagattcacagctactggtgacactgggaacttggcagggaagtcctgatatggggagttagaggcttctgaaacatgttctgatggagtggcttttagtaacaaaacttgatgagctttagttattcctccgttcctctctcaatccatttattcatttgtcaattagttattgaacacattctgtattctaggcagttcacagggcaccttgaccctgactacatagggcttggagtctaatgggcgaggtagataatacttgtgccaacaataaaattaagcttg

SEQ ID NO: 495614 - DNA, 632 bp, Homo sapiens
aaatggctaatgtgtggaagaaaatcccaagggcaaagcacccattactaaaatgtgatgttctgagccatacaattagagattttgcaaccactgagtcagtgtagggacagcaggcaagcagatgctccacagtatgctttgagagatgcttgaaaggcacccaacttctccaaaatcctgaaggcatctaaaacttctgtgttaagtgttaaggccctggcactctcagttaaatacgagcaatgtctaggaagagtaaggcatggatcagatttgaattttgatgagaggggaaagyctgaatttgatgggatctgaggctgaggaaaattttacagagcaagattcacagctactggtgacactgggaacttggcagggaagtcctgatatggggagttagaggcttctgaaacatgttctgatggagtggcttttagtaacaaaacttgatgagctttagttattcctccgttcctctctcaatccatttattcatttgtcaattagttattgaacacattctgtattctaggcagttcacagggcaccttgaccctgactacatagggcttggagtctaatgggcgaggtagataatacttgtgccaacaataaaattaagcttg

SEQ ID NO: 495615 - DNA, 666 bp, Homo sapiens
tgcccttgcacgggccctggcccactgaaatctctcaggcaagcccaggtacatctggatggtgggtggggtagaaggtggggtgatcatgaggaccaatctggcttagctgcttttgatgtcygcctctttctaggacactggcttatctttgcccctgcaagcctattctggtactggccagtgggctgatgctacacagaaggatgacttccagctccctgtgaagggggccttcacatgtgtggaggctctgagaggaaaagagtgaataggacagattccatggaacttggaatttgcaggcaaattagtttgtcattgtacctgctcaaatgttagcttcctcatcttccttttctggaagcaaaatattgccaatagctttaccaatttaagaaagtgagaattttcctagctcctcaaacactggccttgctaacaaccccatgttttctcttccatccatcttccatgcctcactgaaacaccgaatacacctgactgcccacaatcaacagtgtctgaacatgcaaaaactcatgaaggctggcaacttatttttaatttgtacattgtcttcaaaaattacatacaccttggcactttcaaaagtcatgctcctttgccctcaactgcagaatcaggactaaatgaaaaattaaa

SEQ ID NO: 495616 - DNA, 559 bp, Homo sapiens
ctctaaactagtgtttcctaaagcttgttccaaataatgatcacttgcacaggaaaaaagagagagggtagcttatgatccaatgagcttgggaaacactgatgatgtccactgaatactytgagaaatgctactccaaattcagacaagaaaaatggtcaagcaccattcatttaaaagaagtgtacaaacatcatttatagagagcagaggcatgggagaacatggatgtgtagaaggtcatattaatgttcacaaatactttcccctttcacatgggacaagtgtgcttcctgctctgttactgttgggctttgatcaacaggatatatgtagaagggactttgccacttctgagcaggagcttgtcatgtaatttcttggtctcgctcttctgctcagtctcagggatgggtgtgtcccacataggggcttctccttcaggctggatccaggaacaagacttgtggagcagagcccatcagaacctcagcagccacggtccaaccacaacttccagcatgtgatgtgatccagaaataaatgtttgctgtaagca

SEQ ID NO: 495617 - DNA, 559 bp, Homo sapiens
ctctaaactagtgtttcctaaagcttgttccaaataatgatcacttgcacaggaaaaaagagagagggtagcttatgatccaatgagcttgggaaacactgatgatgtccactgaatactttgagaaatgctactccaaattcagacaagaaaaatggtcaagcaccattcatttaaaagaagygtacaaacatcatttatagagagcagaggcatgggagaacatggatgtgtagaaggtcatattaatgttcacaaatactttcccctttcacatgggacaagtgtgcttcctgctctgttactgttgggctttgatcaacaggatatatgtagaagggactttgccacttctgagcaggagcttgtcatgtaatttcttggtctcgctcttctgctcagtctcagggatgggtgtgtcccacataggggcttctccttcaggctggatccaggaacaagacttgtggagcagagcccatcagaacctcagcagccacggtccaaccacaacttccagcatgtgatgtgatccagaaataaatgtttgctgtaagca

SEQ ID NO: 495618 - DNA, 634 bp, Homo sapiens
aggagccagaagatggaaggaacctggagtcctgaatgactctgtggagtaaaggctgccattgaatagaatgctttcctcagactkttacatgagaaagaaagaaacatctttgccctttaagccatgttattactgttcttcttgttactttagcagagggttttactgtaactaataaagagaaacatgaagcaagaagcattaagatgtaaaaatgaaaatgatcactgtaatttattgacttgcagagctttttccaaaactatagagctgatttctttccttcagttgctggtgctttttaatcagaggatctgaatagagttggacaagattcccaacctctcaaactcttatttttctcattcataaaataaagttactataattatattaacatcacaagattattgttgtgaaaaatatctgatatatgtttgcaaattctctggtacatagaagattttcaacctcgcccactactttgcagttttgaagaaaaaaagaaaacccacaacaataaatataatcaagttatctgagtcagaatgaaaagacgattgtcattgcccacacttcaccagccttcaggaagtttctgcagcaacgtcaagcacctcttcttttaaat

SEQ ID NO: 495619 - DNA, 534 bp, Homo sapiens
aattcaagtgccctggacagactgcataacaggccttaggagacatccctgattatccctgacaggcaggctgggaacttttctgggaaaattcaaaggctggacatgagctacttgatctggaggagtcattagtggtcgaagaataatgctggctacttgcaggcatacaaaaccccaaccactttggccctgatctccatgaccgcaatagatttttggaaagtgtgagattaaattcatttcctagttccaatgaagatataaaactgagtgttataaagtgagttgtcagtaaaaatgaaayggggaactagagatagtaaatgggccctacaatggatgtctctaaagtccatgagaaaaaaaaatgataagcaataagagcattaaggcaatattaagatgcaaagttcagtggaacataacacatcctcacagaaggcatgcaaaatacaagtttctagacactgatttagcctgaaatgacttgattaaattcaagtagcgtgcaatggattccgcggctgtgtt

SEQ ID NO: 495620 - DNA, 492 bp, Homo sapiens
tggcctgcaaggcctagcatgatctgatccctaccttgtccttatccctcacaacyttcccccatcactctcccctcctgccacaccaatcaccctatttaatattgcaaatcattccttgactccagcactcttaatctgcctcacacttctaatgtttatcttttccacagcacttagtatcttctaacatacctatatatgtatgtatacatcaatatatctatctatctatctatctatcagccaagtattgtcaaaatagtttgcactaacataccatcccaattctcagtgacttagaacaacaatcatttgttctcaatcacatatctctggattgactgggagttggctccaagctgctatttgtatctaatcatcctccacttgtttcttatcttccttggaccagtaggctaccagggacatatctttctcaagcttatggtagaagcacaagaaagcaagcccaaacacacaatcacattt

SEQ ID NO: 495621 - DNA, 532 bp, Homo sapiens
ccagctgagggcttcatctcttattctgaatgtgtcctaygaaaatgagttcatttacttaaattcctccaccagattctaatgagcaacgcatatttgttctaccatcttctcttcctttattgcacccctttagttctgtactatatcttcttcccaaatgttcttgaggtccaacgggctaatgttgatataaacaatttgtcttttgtaatactccaatgtttatttatttattttttgaccaggagatagggagaaaggtgataagagcaataaggttctttgttccatctatgggttccttgactttagtgactattgctagacaaaacactttgcttccaaatttctgatccagccctcttgatatcttttagtttatgtctgtaacaatgaggctccagtccatttaaatctgattttgaatttttttttttttttttttttttttgcagtaaagacttttaactttgttagctgcgggaggcagtaggctgaaaaacctacattgggctggaatcagaaggat

SEQ ID NO: 495622 - DNA, 530 bp, Homo sapiens
agctgagggcttcatctcttattctgaatgtgtcctacgaaaatgagttcatttacttaaattcctccaccagattctaatgagcaacgcatatttgttctaccatcttctcttcctttattgcacccctttagttctgtactatatcttcttcccaaatgttcttgaggtccaacgggctaatgttgatataaacaatttgtcttttgtaatactccaatgtttatttatttattttttgaccaggagatagggagaaaggtgataagagcaataaggttctttgttccatctatgggttccttgactttagtgactattgctagacaaaacactttgcttccaaatttctgatccagccctcttgatatcttttagtttatgtctgtaacaatgaggctccagtccatttaaatctgattttgaatttttttttttttttttttttttttgcagtaaagacttttaactttgytagctgcgggaggcagtaggctgaaaaacctacattgggctggaatcagaaggat

SEQ ID NO: 495623 - DNA, 530 bp, Homo sapiens
agctgagggcttcatctcttattctgaatgtgtcctacgaaaatgagttcatttacttaaattcctccaccagattctaatgagcaacgcatatttgttctaccatcttctcttcctttattgcacccctttagttctgtactatatcttcttcccaaatgttcttgaggtccaacgggctaatgttgatataaacaatttgtcttttgtaatactccaatgtttatttatttattttttgaccaggagatagggagaaaggtgataagagcaataaggttctttgttccatctatgggttccttgactttagtgactattgctagacaaaacactttgcttccaaatttctgatccagccctcttgatatcttttagtttatgtctgtaacaatgaggctccagtccatttaaatctgattttgaatttttttttttttttttttttttttgcagtaaagacttttaactttgttagytgcgggaggcagtaggctgaaaaacctacattgggctggaatcagaaggat

SEQ ID NO: 495624 - DNA, 576 bp, Homo sapiens
  misc_feature (1)...(576): n = A,T,C or G
ccacagagtagagttgaaaggaatagagggtatattggaaggggcatatgaaaaatatacagcacaatttatctttttttttcttggcatctactatttttttggtggtggtctttttctttnctttttttttttttttttgagatggagtctcgctctgtcacccaggctggagtgcagtagcgtgacctcggctcactgcaagctccacatccctcattcacgccattctactgcctcagcctcctgagtagctgggaacacaggtgcccgccaccactcctggctaatttttttttattattatttttagtagagacggggttttactgtgttagccaggatgatcttgatctcctgacctcgtgatctgcctgcctcagcctcttattagttcttcaggtgaaaaaggtgtgtccctaatacaaaagacacacaaagttctggaagcgacatggaatgtgaaatactagttattatgagaagctaaaattctagctttctctttwtgtaatctggcaggcattaaaatgaagtaaaataaacaacataaacataggggctttaattttcact

SEQ ID NO: 495625 - DNA, 576 bp, Homo sapiens
  misc_feature (1)...(576): n = A,T,C or G
ccacagagtagagttgaaaggaatagagggtatattggaaggggcatatgaaaaatatacagcacaatttatctttttttttcttggcatctactatttttttggtggtggtctttttctttnctttttttttttttttttgagatggagtctcgctctgtcacccaggctggagtgcagtagcgtgacctcggctcactgcaagctccacatccctcattcacgccattctactgcctcagcctcctgagtagctgggaacacaggtgcccgccaccactcctggctaatttttttttattattatttttagtagagacggggttttactgtgttagccaggatgatcttgatctcctgacctcgtgatctgcctgcctcagcctcttattagttcttcaggtgaaaaaggtgtgtccctaatacaaaagacacacaaagttctggaagcgacatggaatgtgaaatactagttattatgagaagctaaaattctagctttctctttawgtaatctggcaggcattaaaatgaagtaaaataaacaacataaacataggggctttaattttcact

SEQ ID NO: 495626 - DNA, 609 bp, Homo sapiens
attgcacctcaaatatgttcaattcatgagttcataatgatacaaaataaaaaccaactagttatctttgaaggacaccagggaaatatcaactctgtattttgaaaattgataaggatgggcacggtggctcatgcctgtaatcccagcagtttgggaggctgaggcaggcggatcacctgaggtcaggagttcaagacaagcctggccaacatggcaaaacccygtctctaataaaaatacaaaaattagccaagcgtggtggcaacccgggaggcggaggttgcggtgagccaagatcgcaccattgcactccagcctgggcgacgagagcaaaactccatctcaaaaaaataaaaaataaaaaaaaataaaccccacaagatcaccaagaaattcctgtttgaacactggcttcaagtaattccctcctctattccccagcaagtttagtttcttcagttgttacaagtaaaagttggaaaaagagagacctataaagtataaacactttagcaaggtattcgaaacattttcctagctagttccaatcttcctctctagcctttctcactgttcccttctccctgccccaaataagctacctgc

SEQ ID NO: 495627 - DNA, 616 bp, Homo sapiens
ttccatatgcttagtatgcactaaacacacattttagcaaagttctattggcatgacaaactagacacacacacacacacacacacacacacacacacaagtagatgatgtatgtgtacttccagaattttttttaaagcttagttcatggttgtgatgaacaatgctgatttggaacaaaccaaaattctggtggggtgctttgctgaaaacattgattcttaacayataacatggattcaatattgacacatctattagtgctggcaagtaaagtatcatgcttctgttagaaaaggtaatagcctcaaggattagctataagtagccatcatgacatttttatctaagttggtccagtgatacttgtgttgtagtcttaggaggattagttgagtcaatgcatgtgaaagtgctcttagaagtatgacatttctatgcaaatgcatggcacatatatgagttgtgtataaagatattatgatatgtcaaagtctctgagagagcatatatatgatattgatactaaacttcaaggcaggaattgggaaaatgtgtcccaggctctgggagatgttctcagatcaaatgaattttttagtaaaaatttatgtaa

SEQ ID NO: 495628 - DNA, 508 bp, Homo sapiens
tgtgtacttccagaattttttttaaagcttagttcatggttgtgatgaacaatgctgatttggaacaaaccaaaattctggtggggtgctttgctgaaaacattgattcttaacatataacatggattcaatattgacacatctattagtgctggcaagtaaagtatcatgcttctgttagaaaaggtaatagcctcaaggattagctataagtakccatcatgacatttttatctaagttggtccagtgatacttgtgttgtagtcttaggaggattagttgagtcaatgcatgtgaaagtgctcttagaagtatgacatttctatgcaaatgcatggcacatatatgagttgtgtataaagatattatgatatgtcaaagtctctgagagagcatatatatgatattgatactaaacttcaaggcaggaattgggaaaatgtgtcccaggctctgggagatgttctcagatcaaatgaattttttagtaaaaatttatgtaaaatg

SEQ ID NO: 495629 - DNA, 508 bp, Homo sapiens
tgtgtacttccagaattttttttaaagcttagttcatggttgtgatgaacaatgctgatttggaacaaaccaaaattctggtggggtgctttgctgaaaacattgattcttaacatataacatggattcaatattgacacatctattagtgctggcaagtaaagtatcatgcttctgttagaaaaggtaatagcctcaaggattagctataagtagccatcatgacatttttatctaagttggtcmagtgatacttgtgttgtagtcttaggaggattagttgagtcaatgcatgtgaaagtgctcttagaagtatgacatttctatgcaaatgcatggcacatatatgagttgtgtataaagatattatgatatgtcaaagtctctgagagagcatatatatgatattgatactaaacttcaaggcaggaattgggaaaatgtgtcccaggctctgggagatgttctcagatcaaatgaattttttagtaaaaatttatgtaaaatg

SEQ ID NO: 495630 - DNA, 513 bp, Homo sapiens
tgggataaacccctcatgatcataatgaataatgatgtgtggagagtggggagggtttacatatgaaaaatgtagaaaatacaaaaagtgtctatatatacaaaaatgtaagtgttaacatttttatatttgcttcaagctttttttttaaataaaagaaatgcaatattgcaattaaatttgtgttcttctttcttctgtttcacatccaatttatctccccttcctccagaggcagtaactatcatggcttttgtgggtatccttcaggctgttagttttacacacacacacacacacacacacatcagatcacactatcactagtggtggcataagatgaagtgaaggtagaggacaaggyactgggaattccagtttatgaatttagtttcgaaagggatttagtttccatggcaacaatagtcattataaagattgtaaattggcattttcgatagctctaggaagtttagacaacgaaaaaattgagattgaaagaaaaactatcca

SEQ ID NO: 495631 - DNA, 505 bp, Homo sapiens
tttggggtcataaactttgttttgtttaatggttaggaaggtttgcctcaagcaaggtctcccatcttgggcccagtcaataggtatatttgttcctaaggaaaaggaaacatttactctgattatctttaaaggrgatatataaagcttacatatttcccctacaattacacctttgatcatattgcctaaaattgacaattgtgttttacaattggaacagtggagttaattaagtaaaccctaggataaatagaagaatctaaacaaggtagtgaatatttaatctgattccaactgtagcgaagcacctttctaagaataggaagttgtacattacatagcaaaggagattttcattcatttttgttggtgtcattttgtgaccacacggcctaatttccaaattgcttcagctaactttgtcatgctaaatagctggagcaattataaattaaataatcaggagaaactcaatttctggtttccacagggaaattctaaa

SEQ ID NO: 495632 - DNA, 390 bp, Homo sapiens
tgccatccctcagtcgtttgacaatggggtacaccttgcaagttacagccagggatgtccatcaggagaaactaaggcaccagggagggaggtgagagaatcatgacaacatgccaaacgtggacccatcactcacgtcattggccatttctatttgcaggagactccctggaaatccccaggccctaggagatgttctaraaacactcaaacacagccttggagggaggagtcagttttaaaagactcttataaaagtaatatactgctagctctgaagaatcggaggctaaaatcatctcttcaagtccccagggaatcccaaagaactccaggggaaggtgggatgggccagagagctctggaagcttccaggtctgttgcaagcct

SEQ ID NO: 495633 - DNA, 611 bp, Homo sapiens
ttgaagaccaaagaatcaaggggctgggggtagggggatccagcctgtctttaaacggaatctacagcccctgagtggggcagaggtctcccttccacagggggaaggagggaggcctgaagcgagagaaggcgagtgctctgtatactgagaacaaaagcctggatcgcagggagcacggagatgcagacccctaggatccccagggagagctgtgggattgatgggcacctttcagcctgggcttctgtctcaaaaccaactcagatagctggggttaggggtggaggggcagggaatggagaagaccatggtctgatatcatttcactaaacttatccagcagatggttttctgcctgatgaattcattccattttaatgtgtcccaggctacaaaccaggttttgctgctttagcaaaactcatcagttccctttcctattacctacctggggttccagaaggagaagagcccatctccagcacctcttaaggatctgatatccccccattactaaagtggacrtcccttcaatcaataaccattactctgttaagtatgaaggtttggaaaccctagccacccacagatgtggtggtcacacttgg

SEQ ID NO: 495634 - DNA, 238 bp, Homo sapiens
tttatgtattcctcgggccctttttttaaagatgttttaaagtgactctgaatgacaacctacaaactaccccacttccatgccaaaagtaaaacatctgggaagtcaagagtgaaaaggcccaaaaaagggcaggagggcacacctggaracggttataagaccatcctcagaaacgctgcacagaggtggcggctggcctggggaagccctgcttctgccatcggaggcccgacac

SEQ ID NO: 495635 - DNA, 505 bp, Homo sapiens
gaagctgccaaaagcagcaagaggccttgttttagaatgcatttttaagtgttgttctatttgcagagtgacagctgggacagctgaggaggagagtgccaggcgaggcagggacactgtccatgcaggggaggtgaaaaaccatggggctgatgaaaatgcacatggatgtcaactccagggatgtcaaggtcttaccctggcagcagaagcacgagcrgccgtcacagcctcaaggaggcagggtggatggcaggtgaccaagctaggaggaggtggcagggcagcttgggacagggggggatccacagagtgtggtgccagtgataccccacgtgggtgcttggaaatgggcatgcctgccttccccaaggcaggtgtgcgaggagcatcttagcgtcaaagcatttcctaactcttcaacaggactgtggtcttcattgtaaacttgcctattagagatttgttttgtgtctgtctcattagactttgagtctctcaagca

SEQ ID NO: 495636 - DNA, 497 bp, Homo sapiens
agaagcacactactaggttaagtacatggccaaataattttaggcatcttgaacccagacatctcttttgcgtcatttatgcaactgcctttacatacaattcttaaacatgtcagtgaccctttaaattcaatatgcatacactttattcatgttcactcctctaaaagctgatccaactcttgcgctttctcacttartaaagggcattgctagaaatccaggtggtaagccagaaatctggcagtcaattctgaaatctcatagtctctaagcttcatatcgcaatcattaatgtctaacaatatatgttaaacccatctgtcctgtgttggaactcttatactgggctactgtgtgagcaagagataaacttttgatgtgtcaagcatggaaatctggggctgtttctacagcagttagcatactatggggaatgccggtacaggtcctttgaagtaggattctacaataataaaaaaaattaagttgtatga

SEQ ID NO: 495637 - DNA, 497 bp, Homo sapiens
agaagcacactactaggttaagtacatggccaaataattttaggcatcttgaacccagacatctcttttgcgtcatttatgcaactgcctttacatacaattcttaaacatgtcagtgaccctttaaattcaatatgcatacactttattcatgttcactcctctaaaagctgatccaactcttgcgctttctcacttagtaaagggcattgctagaaatccaggtggtaagccagaaatctggcagtcaattctgaaatctcatagtctctaagcttcatatckcaatcattaatgtctaacaatatatgttaaacccatctgtcctgtgttggaactcttatactgggctactgtgtgagcaagagataaacttttgatgtgtcaagcatggaaatctggggctgtttctacagcagttagcatactatggggaatgccggtacaggtcctttgaagtaggattctacaataataaaaaaaattaagttgtatga

SEQ ID NO: 495638 - DNA, 557 bp, Homo sapiens
tctattccatgcacatcagggttagggtcttaagggaatagaggaccactatctagctctctttggtgcccacaagcttggcatagaacttgccacatgcttggcatgaaacaaacacacatagaattgtccagagggaggactgccacatatgtgggctcctaagtctcttttagccctccctgccatagtgtgcagttctaatgactgacttggagagaagttctgagcaggstgggtggcccggaagcctggacttggaaaccaagctcatactttgggctgagagaggcactggggcaggacccctgtggcttggaacgtggatccaggtaagccaagcctcctatctggagagcacaaggtcagcactgggtggcaaaggatggcgtgggctgcccaggtggtagagttgtgtctccttgagagcaggtgggcagaacctggtgatggagaatctgctgtctggcaaagtgtagaggcgtgatcacgaaatcccaagttatctgaacgaggagggtccttagggttgtctagtcctgcactgtccaatatgg

SEQ ID NO: 495639 - DNA, 557 bp, Homo sapiens
tctattccatgcacatcagggttagggtcttaagggaatagaggaccactatctagctctctttggtgcccacaagcttggcatagaacttgccacatgcttggcatgaaacaaacacacatagaattgtccagagggaggactgccacatatgtgggctcctaagtctcttttagccctccctgccatagtgtgcagttctaatgactgacttggagagaagttctgagcaggctgggtggcccggaagccyggacttggaaaccaagctcatactttgggctgagagaggcactggggcaggacccctgtggcttggaacgtggatccaggtaagccaagcctcctatctggagagcacaaggtcagcactgggtggcaaaggatggcgtgggctgcccaggtggtagagttgtgtctccttgagagcaggtgggcagaacctggtgatggagaatctgctgtctggcaaagtgtagaggcgtgatcacgaaatcccaagttatctgaacgaggagggtccttagggttgtctagtcctgcactgtccaatatgg

SEQ ID NO: 495640 - DNA, 593 bp, Homo sapiens
cccaaggcctcctgagcaggcccgtggaacataagtcttcctgaggccaataaggtgaggctatcaaacaacttgaagatggaatatcgaggctgatgaatggagaagatgattgttcgtccctgcttagacatcctaagttaaaagtgagacaatactaagtcattaaatatctgaaacttgtatttctcagtaaaatactctattcttgcctttagattgtttgctctagttcagcctgactttgtcttactaacttttcatctcatattatttagctatagttagcaaacctaaattcaatgcttttattaaaacagaataggaattttcagtgtgttgtattgacaayctagaatcaactagaatagttattaaaaatgcagattctaggacagtcttcccagacattgaattagaatctctggcagtaggtctagggaatccatattttaagaagcaacccaggtaatctgcaagtatttacaagtttgagaactaactatggactgcatattaaaacaatggtcatatatctcattctgacttatcatttaggtcttctggctctttaaaaattggttttcactctt

SEQ ID NO: 495641 - DNA, 476 bp, Homo sapiens
ggaaaatataatgcaaacaaaaatgaagatacagtatatctgattattatgatgtcatttctaatgttattcatcatacacacaaatgtttgtattctgtatactataacataatgctatacaagattttatatcaaaaatgtattatatttaaagtrccttattaccacattttaagagtttgaaggaaaatatagccttctggcattttcaccttatggcatgatgcttcttctcaatgtggggaaagattccctcgattaaaaaaaaaagtagggaaaagattttcggaacatctaggttttgtcatggaggttacctttaacttaaaaacagtgagtgaacttttatatattatagttcctttttttttttgagacagggtctcactctgttgcccagtctggggtgcagtggcatgatcttggctcactgcagcctccacctcccagcctcaagtgatcctcccacctcag

SEQ ID NO: 495642 - DNA, 424 bp, Homo sapiens
ttctgtggctttctgcttctgctgcttctggtactgcaaaggcatgaagtggtcaaagccaacwtggggcccagggccttctatctggtaggtatgcatggcgtgtggaggtggtgtttttctgctagatgtccttctagaaatggccaggaattttccaatggctcatgatagaaaagcctcctatgtagtgtttggcctgtgatagtcctttgggttcagtgtctaccaggttgacctgagatacgctttgcatatctcagtgtagacataaacccgaatgagaacaagcagagaagatttatggagagctctctatagcgagggagtcagccactagcacttggttttagcagatagtcaaagtcaggcgggggagtaggcaagctttagagtgagaaaaaaaggggagggcttcaggtgt

SEQ ID NO: 495643 - DNA, 424 bp, Homo sapiens
ttctgtggctttctgcttctgctgcttctggtactgcaaaggcatgaagtggtcaaagccaacttggggcccagggccttctatctggtaggtatgcatggcgtgtggaggtggtgtttttctgctagatgtccttctagaaatggccaggaattttccaatggctcatgatagaaaagcctcctatgtagtgtttggcctgtgatagtcctttgggttcagtgtctaccaggttgacctgagatacgctttgcatatctcagtgtagacataaacccgaatgagaacaagcagagaagatttatggagagctctctatagcgagggagtcagccactagcacttggttttrgcagatagtcaaagtcaggcgggggagtaggcaagctttagagtgagaaaaaaaggggagggcttcaggtgt

SEQ ID NO: 495644 - DNA, 582 bp, Homo sapiens
tatcccatcaaagtgcttagatgtgctgaccacaaagctcttcttagctccttacagcacttactgacaggaagccaggaaggagctggtgcctttcccctccctgccaaggggacgctggagcttgcgattcccgcccatatgcatcggcctctgctgcatgacttgagatttgcagtatattgacaaggcctattgtattagtttgctagggttgtcataacaaagaactgcagacttgacttaaacaacagaaacatattttcacagtcctggaagttgggaagtccaagatcaaggtgtcagcagggttggttycttctgacgcctctctaagcttggagatggccatttttggagttggcttggcgatggccattttttcccctatgtcttcatatcatcttccttctgtgccagttgtgccctaatattctcttataggacaccagtcatattggattagtgctctaactgttttaacttaattacctctttaaatacaaatatagccacattttgaggtactgggaattaagacctcaacatacacattttgggagaacacggttcaggccacaa

SEQ ID NO: 495645 - DNA, 647 bp, Homo sapiens
agagctaataaacaactccacccacgcttcacagaggaacgggaaggtttaatctgatttttacgtctgtcgtctgactactgtctctgattatctcaagttcaaagttggccttctgattactgtgactctctttgagaactgataatggcttacaaatggattcctttaccacacttttgttcgtctgatgtttcatggactgtctctgtgtaaacttagttatttaatgtctcatactttgggggatagtgcatcagtgaggaatctgtttggctattaactttgttttaaacatataacatagacagagatgatacacatcaaatgatttgtctcacaggcaaaaaggcaggggaaggtacttgyaggctagagcagcagcccctttacacaatcgtcagcgttctaggcccctctgtcttttcacactgtcacctttggcatgttggtttgcggcccaaaggctgcaagatggcagtgcatctccaagcatcctccaggtaggcagaagcaagaagggcaaagtggggaaaaccgggccttgccagccaactctgccactctctattgagaagacaaaagctttcctggagtccacacccagtagaattctgtgtccatctcatttcacacagccgcctaca

SEQ ID NO: 495646 - DNA, 633 bp, Homo sapiens
gctggcttcagaatgaggacaatttgcttttattaactgtttacatccttatgttttcctcaagaaccattaaaatttaatggtctctatacttaagtgaatggatatagaattatttagtttgactttcagaaggtttgcattttagccgaagatttaattctagctgcccatgccatgattactttttgaacagaaagaagtcacttgatgttattgactaggaaaaaaaatggtaatcagccagaatggtacctctgggcaaattactctgtgggagtaagcttgtttagaaccacactgatatgaattaggaatgttgagtatggtactaaacagctaatgaggggcctgaaagatttatgagctattaggaaccacagccatatctggccaaattttagagtttttctcaatagagagttacaaaatcttytggaacagtctcgtattatatctatctggagactgctgcgaacaaacagctctttagttcttggtaagaacaaagaatattgggccagatttctggcccctaagaaatgtggagtctgttccatttggctggaagtttagtttggtatggaattttagccagacttctaggggaaataattttttaaaaatgtaatg

SEQ ID NO: 495647 - DNA, 547 bp, Homo sapiens
taaatgtaacatgacataatatatttcctaaataatttaaaataatctagcttgagctgctctgaaggttagtcagttggtggtgtgcatagaggtagagccttcccccactctcaaggatgctgtgaggggtattcctaccatgtggtgagttgggaggttttcctgaggtccttttccatcctgagactctggttttccattttgtttctcacaggccagggctttgaccgacacttgtttgctctgcggcatctggcagcagccaaagggatcatcttgcctgagctctacctggaccctgcatacgggcagataaaccacaatgtcctgtscacgagcacactgagcagcccagcagtgaaccttgggggctttgcccctgtggtctctgatggctttggtgttgggtatgctgttcatgacaactggataggctgcaatgtctcttcctacccaggccgcaatgcccgggagtttctccaatgtgtggagaaggccttagaagacatgtttgatgccttagaaggcaaatccatcaaaagtt

SEQ ID NO: 495648 - DNA, 596 bp, Homo sapiens
cccaatgctggctgcagtggctgtgatactgcagggggtgggaaggggaagaggagcagcaggaggggcagggtgcattgtcagggtctggctccaaggaagaggttgagtgtcagggcctctgggacagccatttggtgcggggggtgggtaggaatgccacaccagggagctctcggggtcaagtccctcctcacagtcctgmagccccatggacccccattcctggcctcaggagaatccctgggaactgtgcaaacacctgtgtctggagctgtgcctctgtgggttccaggaagctatattgctatggggctgcccagggactctgactgaccaccacatggctctgcctgcctgcctctggggcctggcctccagggtcagacctgtgtgcttggctgggctgtgaggcctccgtcagcctcagccgcatcccagcaccccttcgttggctcctgccacacgggcggcctctccaaggtcctgagtcctgtccctggcctccgctcgccctgtggccaccagcaatgccctccctcccgggctgtcctccaggctcggagctcccagccctggccctctgcctgctgtgc

SEQ ID NO: 495649 - DNA, 505 bp, Homo sapiens
cactgtgccctggcaccactggccttctttaagtttctggaaggagggagtccagctcttcactgcctcagggcctttgcgcaagccgtttacrcagtgccccaggcactggctgcccgctctccaaacagcttggaagccatccccgatcccctttgcaaactcccatttattcttcaatatctcacctcttagggcctattacaacataactgtctgggttttttcccgtctcctctgcgaggttagctcagcgagagcaagaactgcatctccttagctggagcatgttagacgcacagtggtcaatggtgagtgaggactagggcctttcctgatgctcctggcgcctcccccggcattctaggccttcctccccagctcgcacacaccaggaaagggtggtgtgggaacggctccgtggggtgagctctgtcaggccagtcctgaaacagggactgagtggctgccctacctcctggtgagaccgacgtggggagcagag

SEQ ID NO: 495650 - DNA, 520 bp, Homo sapiens
tgtaccaaaaatgattttctttgagtgataaagttatgaatgattttggccgtgtgcagtagctcacacctgtaatcctagcaytttgggaggctgaggcagtggatcacttgaggtcaggagttcgagaccagcctggccaacatagtgaaaccccgtctctactaaaaatacaaaaaattagcatggtggcgtgtgctgtagtcccagctactcagaaggctgaggcaagagaatcgctcgaacccaggaggcagaggttgcagtgaggcaagatcatgctactgcactccagcctgggtgagagagcaagactctgtctcaaaaaataataataataataaatgatgaatgatttatattttcttcttcttgcttactgatattttctaatttttccacagtgaaataaatgttccttctctaaaaattttttttcaataaaattattaggttgctcttgtttcttttaaacaaggtgtgtgagtttgttgtcctccttttgttattcaccctgcca

SEQ ID NO: 495651 - DNA, 520 bp, Homo sapiens
tgtaccaaaaatgattttctttgagtgataaagttatgaatgattttggccgtgtgcagtagctcacacctgtaatcctagcattttgggaggctgaggcagtggatcacttgaggtcaggagttcgagaccagcctggccaacatagtgaaaccccgtctctactaaaaatacaaaaaattagcatggtggcgtgtgctgtagtcccagctactcagaaggctgaggcaagagaatcgctcgaacccaggaggcagaggttgcagtgaggcaagatcaygctactgcactccagcctgggtgagagagcaagactctgtctcaaaaaataataataataataaatgatgaatgatttatattttcttcttcttgcttactgatattttctaatttttccacagtgaaataaatgttccttctctaaaaattttttttcaataaaattattaggttgctcttgtttcttttaaacaaggtgtgtgagtttgttgtcctccttttgttattcaccctgcca

SEQ ID NO: 495652 - DNA, 597 bp, Homo sapiens
atctcaagaaggtaaatcacaaacaaaaccgcaaattaaacccaatgaaarggaaagaatagaaatcaatgatccaaaaaagagacaactaggaaaatcaacacaaaaagacaaatgttggttttgactgatggaaggaaagataaaaggcttacgttactaacaacatgaaatgaaaaacaggaatcactcctgatttagaggtgttaacaggataacgaaagtcatatgaataattttatgccgatgtatttgcaaatttatatgaactagacaaattccttgaaaaacattatttaccaaaagagaaacgactaagaaacagaaaatgtgaacaatagtattatcttttttttcttctgagacagggtctcactctgttatcccggctggagtccagtgacatgatctccactcactgcaacctccacttctcagtgatggcagcggcagcccctgtggagtggctactgccatgacattggctgtagtgtgagaggtgcatccagggctgtgtgctccacatagctagcaggagccccatccctttcaaagttggagtggtgggagtcccgcactcctgggcacagtggcagc

SEQ ID NO: 495653 - DNA, 597 bp, Homo sapiens
atctcaagaaggtaaatcacaaacaaaaccgcaaattaaacccaatgaaagggaaagaatagaaatcaatgatccaraaaagagacaactaggaaaatcaacacaaaaagacaaatgttggttttgactgatggaaggaaagataaaaggcttacgttactaacaacatgaaatgaaaaacaggaatcactcctgatttagaggtgttaacaggataacgaaagtcatatgaataattttatgccgatgtatttgcaaatttatatgaactagacaaattccttgaaaaacattatttaccaaaagagaaacgactaagaaacagaaaatgtgaacaatagtattatcttttttttcttctgagacagggtctcactctgttatcccggctggagtccagtgacatgatctccactcactgcaacctccacttctcagtgatggcagcggcagcccctgtggagtggctactgccatgacattggctgtagtgtgagaggtgcatccagggctgtgtgctccacatagctagcaggagccccatccctttcaaagttggagtggtgggagtcccgcactcctgggcacagtggcagc

SEQ ID NO: 495654 - DNA, 640 bp, Homo sapiens
gggaaactaaaacttacaaacatgaaacaaagaactatacttggtaccatttaatgaatattaaatggacaattcggctaataaaggcagcaggagttcagagagagttaggaaaggatttataaatatgatagaacttgaggtgtgacttacagaatgagcaggatgggtaaaggtacagagaaggacttgcaggtaaggggaacagcattagaaaaggcattaagtccaggcgtggtggctcacacctgtaatcccagcactttgggaggccaaggtgggaggatcacgaggtcaggagttcragaccagtctggccaacatagtgaaaccccatctctactaaacatacaaaaaaattagccaggtgtggtggtgtgcacctaacgtcccagatactcgggaggctgaggcaggagaatcgaatgagcccaggaggcggaggttgcagtgagccaagatcacgccattgcattccaggccgagcgacagtgcgagactctgtctcaaaaaaataaagcattaaaatgagaatgagcatgacatatgtgtgacaacataatgctaccaactttctactgcaaaatactggctaggaagagtggagataaagttggataggtaagataagctcagatca

SEQ ID NO: 495655 - DNA, 597 bp, Homo sapiens
gccaatgtctgtcattttgggaattatttttcaatgataaagatgtctaggaactaagtcatatttctttctctctctctctctctctctstgtgtgtgtgtgtgtgtgtgtgtgtgtgtgtgtgtgtgtctgacttgggttattagtgcttctatctaatctccttctaattaaatacagtaattggcacatgcagaggattaaggaaccatgcaaaatctgtcagggtagaaagatgcagtctgagataattcctagatagttagttgttccatccaaaaataatcacagctcttgcgaaagtggagaatagcaaatttctacctcagtcaaaacaagaacacaaaaaattaaggtttgttttagtatcattacttaattaaaagcattaggtactttccagaggataattgcccaaattgaaagagtatatagcagtcttcctttagcttaaaatacgtatacttatcccctttccaaaagcataatgagacctacaaattctttttgctggattaggtgggattttaattgttaacactgaatagaagctcattcttttgtgattccttaaagcatttttccttttgttttga

SEQ ID NO: 495656 - DNA, 556 bp, Homo sapiens
gaccacaggtgtgcgccaccatgcccagctaaaaattagtgtactaattagttaaaaattagctactcgggaggctgaggtgggaggattgcttgagaygggaggttgaggctgcagggagccatgattgtgccactgcactccagcctgggcgacagagtgaccccgtttcaaaaatagaaaacaaaaattttggaaaaaaattagatggttgtatctgtactgaacatctgtagacttttttccttatcatttattccttccacaatacagtgtaacaattatgtacatagcatttacattgtattaggtatataagtaatctagagatgatttaaagtatacaggaggatatgtatagtttctatgcaaatactacgcagttttatataagggacttgagcatctgtggattttgttatcctggaatcaatctcccacagatactgagggttgactgtacttttagaatatggcatccaaacatgacttctttggttctgctataatccttaaattgtttgatttcttggtcttgtttcttcaacttaattgc

SEQ ID NO: 495657 - DNA, 608 bp, Homo sapiens
actcccaaggtggactgtccgtaggagaaatacctgttccctccagtggtggcagctacacaaacattacaaggttgggtttggaccagggctcacttcatcccagcagccaccttaggctagagcttccccagcagcatctgggatctgagtcagtttccatcagcactgagaggtttcccattcctttctcatctcaagtggaactagatgtgacctgctcactctggtttcgagtttttgaccagtccaagctttccctgttatcaaagctgccgcccttagcccttgttgacaatgaaaagcttatttattttgttcgacaggccaacttgaatttccccaaagaatgttttaaaaggtaaaatatcaaacatattaagcatgtaggactttgccacccatacttattgcccagaggagggaggttgccatggcaatgcctctggtaaggaggatgaagtctggctgaagggtgaataaagtatcacagtggggcacaggctgccccrccaggcagcaagccccttatgatactggaagtgtttgcccaagtcttaagaattaagtcataattaagagagagtaagaaaaacaaaaatgtccag

SEQ ID NO: 495658 - DNA, 608 bp, Homo sapiens
actcccaaggtggactgtccgtaggagaaatacctgttccctccagtggtggcagctacacaaacattacaaggttgggtttggaccagggctcacttcatcccagcagccaccttaggctagagcttccccagcagcatctgggatctgagtcagtttccatcagcactgagaggtttcccattcctttctcatctcaagtggaactagatgtgacctgctcactctggtttcgagtttttgaccagtccaagctttccctgttatcaaagctgccgcccttagcccttgttgacaatgaaaagcttatttattttgttcgacaggccaacttgaatttccccaaagaatgttttaaaaggtaaaatatcaaacatattaagcatgtaggactttgccacccatacttattgcccagaggagggaggttgccatggcaatgcctctggtaaggaggatgaagtctggctgaagggtgaataaagtatcacagtggggcacaggctgccccgccaggcagcaagccccttatgatactggaagtgtttgcccaagtcttaagaattaagtcataattaagagagagwaagaaaaacaaaaatgtccag

SEQ ID NO: 495659 - DNA, 615 bp, Homo sapiens
tctcctccctggctaccatttgacttgctttcacttcttggtatcatttatgagctgagtctagtgacwccctctctgcttctttccaatttgtcgtgttcaacatattacgggcagaaaatccagacaagaagctttgtgtgaccataactaaagtaaaataagttttcaggaaagcaactgagaaactgagattgtatgagctcaagcatgcagttcttttaggacttatattggctgctcagtagctttattttggagaggaaggtggggaggagcttacttccaggtccttgactgcattctgtgtagtaaacattgtgacatcacatatttctatatctcagttaacttgtttgaaattttcagtgtcgtcactatttcaaatataaaaaggaaatgtagaacatgttctagagctaatgctgtgaagctgtgctttataattgaaatcttattatctattttatattacttgcaataaatactgttagtaattacaggaatgcatacttttttatatgattaggtttgcgtgaaagcagctgctcccaggaggaagtatagtgtacatgcatagtcatacttgtagcaaaatctccactttgaataatt

SEQ ID NO: 495660 - DNA, 535 bp, Homo sapiens
agctgctcccaggaggaagtatagtgtacatgcatagtcatacttgtagcaaaatctccactttgaataattcataattaagccatttcttctcttctttaagttaccccacaaggtttcaagaaaagtgtggtaaggagtattggcttatgcttgcctttccagatatatgattagaacaccccttacagaattcgagaagggaaagcaaggaagggatgatcacmtagtaggaatctttttttttttttttgagacggagtcttgctgtgtcccccaggctggagtgtagtggtgcgatctcggcccactgcaacctccacctcctgggttcaagcgattctctgcctcagcctccccagtagcgggattacaggtgcacaccaccacgcacagctaatttttgtattttaagtagagatgcagtttcaccatgttggccaggctggtcttgaactcctggcctcatgatctgcccatcttggccgcccaaagtgctggggttacaggtgtgagccaccgtgcccggcccata

SEQ ID NO: 495661 - DNA, 582 bp, Homo sapiens
gagattcaaggccaagaggatggaaggcatttttgcttttcttctggctccggcctctgcaatgctgtgctctactaccctgactccaggagtggcccgaatagggtgaaggatgcataatcctcaattatgcgtaagtgcattttttcagtctaattagaattccaggctttaaaattagatgtatattttgaaaagtatatctgaaaatttcatagtttgtgaatatatttttaaatacagtcaaaatactaagcacagtaacaacaygatttagaggacaaagttgtaaatatgccacctttatatttataagagtatttacacaagaatttgcagttttaagtcgttatcaatcattgagttgatataaggtcaatatagtattaatatatcacctacacaaaagcagataaaaagttattttcagcagggcatgatggctcacactcgtaatcctagcactttgggaggccaaggcaggtgaatcacttgaggtcagcctggccaacatggtgaaaccccactttaccaaaaatacaaaaatcagccgggcattgtggcgcatgcctgtaatcccag

SEQ ID NO: 495662 - DNA, 533 bp, Homo sapiens
agctttagtttagttaactctgtgaaaacactgaacacagtgtacagtcaaggctaggttaggaaatgctgaagtaacaaataaatccagatcttcaggtattaacaaaaattagtttattctagaatgatggatttagctggggaacagagcctggagatttgtccatagctctaaagcacttctccctgaaggtggccccctttacttctgcacatattccattgaccaaagcaagtttcatggtcatcccatcattaaaagagtagagaagtactcagaagaggtgagttaggcatatygaagagccagggtaatgtctaaatatatgatgtctagctcattgttaagtgctccagttattattaaagtgtattctgattttttcatttctcagttcaaattacgtttattggatctgctttacctccttataacacggaaacttcttgttgtcgttgacactcattgtgatgtaaatcctaactacattcctgtttatatgttatactgcttcacttcattttaccttt

SEQ ID NO: 495663 - DNA, 533 bp, Homo sapiens
agctttagtttagttaactctgtgaaaacactgaacacagtgtacagtcaaggctaggttaggaaatgctgaagtaacaaataaatccagatcttcaggtattaacaaaaattagtttattctagaatgatggatttagctggggaacagagcctggagatttgtccatagctctaaagcacttctccctgaaggtggccccctttacttctgcacatattccattgaccaaagcaagtttcatggtcatcccatcattaaaagagtagagaagtactcagaagaggtgagttaggcatattgaagagccagggtaatgtctaaatatatgatgtctagctcattgttaagtgctccagttattattaaagtgtattctgattttttcatttctcagttcaaattacgtttattggatctgctttacctccttataacacggaaactycttgttgtcgttgacactcattgtgatgtaaatcctaactacattcctgtttatatgttatactgcttcacttcattttaccttt

SEQ ID NO: 495664 - DNA, 536 bp, Homo sapiens
ttttttcagctcctcgtgtgttcttacttactgaatctatccttattaagctgctaattctgctatcaggaagttcttggtaagttcttggtatttaggattgtgcaacwaaaattgaagtcaactattttgtacaaaaaaaaaatcattattctacattaacagttgattttggaggtacttagtaaagtggactcaatcatagacctccaaatggaacaaacacccttacttgcatttcattgtgatttttgcaggccctttgcagtaatagttctgaaaaacagtcagaaataaacaacttaaaccctcaaacatattttatatgctttgaatttaaagcactcatttaaaagaaaaattcaatcaggtggttttttttgtgtgtgtgtgcctacatttgtttaggtttcttcttttattttttatttttggcccttattcctctttcttttctactttcccagaaattctggtaaaagtaatgtaaaaaatgtgaatacctgatcagaggagttgcttaagaaatgtctcag

SEQ ID NO: 495665 - DNA, 536 bp, Homo sapiens
ttttttcagctcctcgtgtgttcttacttactgaatctatccttattaagctgctaattctgctatcaggaagttcttggtaagttcttggtatttaggattgtgcaactaaaattgaagtcaactattttgtacaaaaaaaaaatcattattctacattaacagttgattttggaggtacttagtaaagtsgactcaatcatagacctccaaatggaacaaacacccttacttgcatttcattgtgatttttgcaggccctttgcagtaatagttctgaaaaacagtcagaaataaacaacttaaaccctcaaacatattttatatgctttgaatttaaagcactcatttaaaagaaaaattcaatcaggtggttttttttgtgtgtgtgtgcctacatttgtttaggtttcttcttttattttttatttttggcccttattcctctttcttttctactttcccagaaattctggtaaaagtaatgtaaaaaatgtgaatacctgatcagaggagttgcttaagaaatgtctcag

SEQ ID NO: 495666 - DNA, 507 bp, Homo sapiens
agccttgctcagggttccgccgttccctgaaagctctcccgctcctttacygctacaggcctttctcaggcttcctctaccaagaacaccattcttctcccttctgcacatgtgtgaattcttgctcctcctccaagttcaagcctccttccaggaggacatttgggatgccggcaccacatctttgccaggtgcccctctgtttccctctaccctggccctgcagtgtgactgtctgcatcacccccattagaccttgacctcatgtatcaagatcttgcccctctgcttccctctaccccggccctgcagtatgactgtctgcatctctcccagtagaccttgacctcatggatcaaggtataggggcccagggctgggggacttactcaaggaacctggtgatatactggcggctgcagcgggaccaggtgaggggagcggcgtcgtacaggagctgtggagacatgatgaaaggtcgtttcccaacgggctcacagtcattgc

SEQ ID NO: 495667 - DNA, 507 bp, Homo sapiens
agccttgctcagggttccgccgttccctgaaagctctcccgctcctttaccgctacaggcctttctcaggcttcctctaccaagaacaccattcttctcccttctgcacatgtgtgaattctygctcctcctccaagttcaagcctccttccaggaggacatttgggatgccggcaccacatctttgccaggtgcccctctgtttccctctaccctggccctgcagtgtgactgtctgcatcacccccattagaccttgacctcatgtatcaagatcttgcccctctgcttccctctaccccggccctgcagtatgactgtctgcatctctcccagtagaccttgacctcatggatcaaggtataggggcccagggctgggggacttactcaaggaacctggtgatatactggcggctgcagcgggaccaggtgaggggagcggcgtcgtacaggagctgtggagacatgatgaaaggtcgtttcccaacgggctcacagtcattgc

SEQ ID NO: 495668 - DNA, 486 bp, Homo sapiens
caaaaagtgaacaaaagattaattttccccttcctatctgtgctcccacccccagcaagaaaaatgggcttagagaatcagatagactcgggtrttcaaatctcagctctgtctaagtgatcttaggcaagcacttaacttcaaatactccatgtttttcatctacacaatagaggtaatcctagtaactgtgtcatatggtggttgtgaggattaaatgggattgctagcatggaacctggtgaagcactccataacggttcaaacagtggtagtaataacagtaataacaatagcaatattatctgatctctctgggcctctgttagccagctgtaaattcgatctctttccctctcccttccaactttactgagttcttttaataaccaggccacgggcttggaaatgccttgacctttactaaccgagttgtatattgagcctagccctagcccttttaaggggcactgcccgggctcccca

SEQ ID NO: 495669 - DNA, 611 bp, Homo sapiens
ccagccttccctggggccccactctgtggtcctcagagacctgttccacagggattgagcccaccatgtcacttgcagggactgccccctggagtggtggggactggggcccccatggggacctccctggccctgtctgttctatctgttgactcttctgcaaaaagcaggcagagaggggaagagcaggctggccagctgtgccctactgtgtccccacgtgtcccttcatctctgtgcccagagatagggctgggctaattgtcactgcctcaggttggcccctttcccaccaccagccccagctacaggttcctaccacgctgatctatggtccagcacctggcacctgcctacccacagccccttcccctcccataaaatctagtcccatggagccagacagtagtgcccacagcagggaacagatgggcatgaaggtgctttgaagagggtcctggcctgaccaggggcgggaggctggggaaggggcggacactgtcccyccaggcccaggcccagccctggatccaaccctggcctctggctgtgagccttagactcagccgttgacaatttcttcctcagccctccccctggaaggtgttacg

SEQ ID NO: 495670 - DNA, 554 bp, Homo sapiens
tggctctggctgtccttgccaactgggaaatcattttggctctcaggggtggcaggtgtctgcaggccatcagtggaaaccctgggccaggacaggctggggagcccaagatctggggcccctatgggggtgtcttcctcaggcaggaaattgatcaaagggttcccaggggtctgctctgagggtgggggtggggagcggccggcctggctaggccaagggctcggggaccaaggtcccagtaccccctcctccttggctgcaggaggctctgtggcaggcacggggctacccgtggagggcgcagcaggatggctgtgtggtgggggtgtccggtcccctgtccccgccaggtctagatcgggctcctcagagggcccgtaggacagatcctcgtggaaattgatgaaattgtagtcgtagtagaagtcgtccacaaacacgggccccggcaggtccagctctggagcctcctcctcaatggcgttgcccatggtgcctggcttgggtgatgaggygggtgaagggcgtggggccaggtggtgcgggatgaa

SEQ ID NO: 495671 - DNA, 519 bp, Homo sapiens
ctcctgccccgcggcgctgccgcacgagccccacgagccgctcaccccgccgttctcagcgctgcccgaccccgctggcgcgccctcccgccgccagtcccggcagcgccctcagttgtcctccgactcgccctcggccttccgcgccagccgcagcsacagccgcaacgccacccgcagccacagccacagccacagccccaggcatagccttcggcacagccccggctccggctcctgcgacagctcctctgggcaccgtccctgcgccgacatcctggaggttgggatgctcttgtccaaaatcaactcgcttgcccacctgcgcgccgcgccctgcaacgacctgcacgccaccaagctggcgcccggtgagagcaccccccgcctccggcccggggatgcggggcggcggcgggatctcctgggtggggagctggcggctcgcgggccggcactgagtccccgtgcttccccctttcctaggcaaggagaaggagcccctggagtcgcagtacc

SEQ ID NO: 495672 - DNA, 519 bp, Homo sapiens
ctcctgccccgcggcgctgccgcacgagccccacgagccgctcaccccgccgttctcagcgctgcccgaccccgctggcgcgccctcccgccgccagtcccggcagcgccctcagttgtcctccgactcgccctcggccttccgcgccagccgcagcgacagccgcaacgccacccgcagccacagccacagccacagccccaggcatagccttcggcacagccccggctccggctcctgcgrcagctcctctgggcaccgtccctgcgccgacatcctggaggttgggatgctcttgtccaaaatcaactcgcttgcccacctgcgcgccgcgccctgcaacgacctgcacgccaccaagctggcgcccggtgagagcaccccccgcctccggcccggggatgcggggcggcggcgggatctcctgggtggggagctggcggctcgcgggccggcactgagtccccgtgcttccccctttcctaggcaaggagaaggagcccctggagtcgcagtacc

SEQ ID NO: 495673 - DNA, 484 bp, Homo sapiens
ctgctgaatgccgcgatgggtcaggtaggggggaaacaggttgggatgggataggactagcaccattttaagtccctgtcacctcttccgactctttctgagtgccttctgtggggactccggctgtgctgggagaaatacttgaacttgcctcttttacctgctgcttctccaaaaatctgcctgggttttgttccctatttttctctcctgtcytccctcaccccctccttcatatgaaaggtgccatggaagaggctacagggccaaacgctgagccacctgcccttttttctgcctcctttagtaaaactccgagtgaactggtcttcctttttggtttttacttaactgtttcaaagccaagacctcacacacacaaaaaatgcacaaacaatgcaatcaacagaaaagctgtaaatgtgtgtacagttggcatggtagtatacaaaaagattgtagtggatctaatttttaagaaatt

SEQ ID NO: 495674 - DNA, 660 bp, Homo sapiens
tgatgaggatggtgatgaaagacaggaagaggacgattttaaaactccagcagatgatgaagttatttatgatgttacttgcacccctgtactttggtgtgatctcagtgcaactgccattccctaggtgcttctgttcaaagatgagatacatgtctacggccatgatggtgaagacccctgacaacacggtgcccattttggcagtcatcccacaccactgctgctgtttcatgctgagacctcctgtgaagacaaacaacatgagggagaattctagttcctgccaacatggtaaattaccagggtttctgcctccttccccaaatctactttggagaaatatagacagaaataygaaaactgggaaactatagccttgggaagacacaggctgtttaaaatagattgggggtggggaagagagaggattcagtcaagttggtggcaatgaccagataaaattacagtagtggttctcaaccctggatccaccttagaatcaccaaaagtacccaagtccaggccccaccacagaccaatcacaacattctctggttgggatccaggcaccagtaattttcaaaacttcctagtaattttcgtatgtagccagtgttggaaaaagctgagttagaaaaagatggcttaaattatgct

SEQ ID NO: 495675 - DNA, 617 bp, Homo sapiens
ctcctgtatgtcatcagtcatgttcagctccaggagaatctcaggtactcactgctatgatcagagtgctaagatctgttataggaagtgaatgtgttggaaaagtgtctgagcagataatagcagtagctgcctgaagacctcttcctcaaagtttatcatatagaaggattgaaggtagagatttgatggggacatttttttctattacgttttgatatctgtacattttttttaaaaggtagcataagggttgaacttcagaagtttaaatacttgaatgactttttgaacaactgcttcctctagtctcctttctgcttccctamaatgctttgttcatttggtgggagtagaattcatcggggtgtgtggaatgaaagtgttgagacttctactcaagtatattttagttcatatttcttaatttccattttatacataattttttagatacataatatattatatacctgtagcatgcaaatacttacatataaaaaggcattttattcttttttacattagagctataagatcagaaactttggagactatagttctaaatgatctaattctattaagttataaggctttgcaaaagtaaatatgaaaaa

SEQ ID NO: 495676 - DNA, 527 bp, Homo sapiens
cgttctgacccactcccccacatwgataggttacagccctccagctcctgtggggtgccctgcctctccccactacccagcactcatccgggcaaggcttcccggaaagaaggctgggtggctcagggtgaacagagaggagtaaaaaggagctgggttagaggctcccttttccattttgtgccaccctatctcagtgccccgggagacacaatgggatgggctgagctctgccagcttcaggcagcgactcaccttcaacctcatccacattcccccttctccccaaaggaggtacatttatgcaaaccggcaaccaaaacatacacagagatttggccacccctccatggccctgccagggaaggaaaaagccctgggtcccacgtggaagcctcttagatccagaaaggaagtgagccaagctcccagtaagtaggcagctatggtagaagtcctgaggctgctcctgagatgtctccaaagtccagcactgtcccatccagcacccttgctgcagagcgaca

SEQ ID NO: 495677 - DNA, 547 bp, Homo sapiens
acatttgttgagtacttagtactttgagagtagttctaaggtcagaggaatgattttaaatgtcactgcttcgtgttgggagatatatcaagagaaaaagaagacatcagttaaaaattacttggacagctttttaaaagacaactgggttatctaaatcattcccttatgtgtcttctgaattctaaaaagacatgaaaatgttattaattaaatgtggaatatgtaatgtatttttcacacctttgattgacataggatagtgaagctgcattttttgcgtgttaaatacatgttttagaaaacatttgtaagacaaaaatatttattatatatcattgcttaaagctatcattttttagctactgaatccttagtgcagttattgaacccaataataattgtttctacamaaaatttaattcagtttataatagttttcaggaacactgtgcagcaaataataagggtcacatagattttgtttctattttgaaatttaatctgtcctttaaagacacaccttaatgttatttaccagcctgag

SEQ ID NO: 495678 - DNA, 609 bp, Homo sapiens
agctgcacagttttctcaacctgcttccctgtctgtagaagttttagtgtccagcggatcacgaggtcaggagatcgagaccatcctggctaacacggtgaaaccccatctctactaaaaatacaaaaaattagcctggtgtggtggcgggcgcctgtagtcccagctactcgggagrctgaggcaggagaatggcgtgaacccgggaggcggagcttgcagtgagccgagatcgcgccactgctctccagcctgggcgacagagccagactccgtctcaaaaaaaaaaaaaaaagaaaaaaagttttagggtccaaagtcctcctttcattttgtagctttctgtccctttaaatgcaagctagcagtgtttctttcaaataattatttttcaaactttgcatatatcctgtgaatattttggggggttcactccatggaacaaaatctcctcaagataagcctttttctaccctgagcttctactgagactctcgagggacaacaatcttcaacctcttggaagtcttattgtttaactaaatggatctctgaggcactattttgcatttttttaaggtcttaaagaattttacagacattctgagc

SEQ ID NO: 495679 - DNA, 609 bp, Homo sapiens
agctgcacagttttctcaacctgcttccctgtctgtagaagttttagtgtccagcggatcacgaggtcaggagatcgagaccatcctggctaacacggtgaaaccccatctctactaaaaatacaaaaaattagcctggtgtggtggcgggcgcctgtagtcccagctactcgggaggctgaggcaggagaatggcgtgaacccgggaggcggagcttgcagtgagccgagatcgcgccactgctctccagcctgggcgacagagccagactccgtctcaaaaaaaaaaaaaaaagaaaaaaagttttagggtccaaagtcctcctttcattttgtagctttctgtccctttaaatgcaagctagcagtgtttctttcaaataattatttttcaaactttgcatatatcctrtgaatattttggggggttcactccatggaacaaaatctcctcaagataagcctttttctaccctgagcttctactgagactctcgagggacaacaatcttcaacctcttggaagtcttattgtttaactaaatggatctctgaggcactattttgcatttttttaaggtcttaaagaattttacagacattctgagc

SEQ ID NO: 495680 - DNA, 605 bp, Homo sapiens
aagaagaggaataagagttgtaatggcagagatgggagagggcagctctcagagcgcacaatccattctggactcatccacttgacttcattgccagtctggacacacacccgctatgagtttccaggccagattcaggattgagctggaagaagggagaagcttcaaattgaatgggaattggatgttttgatttagattagattggactttatgaaagtaatgtgcttaatcaaatagtaatgatttaaacagcagtatcacacttaagacaaaaacacatgtccctatctctatcccattctgccttttgatttctactttttggaggcactcatgtttaactcaacattttyatctgttgcttctgctatttacttcaaaattcctgttacatcctgatttttcaactttaagcattctctattaactttgtttcatggtaaatgaggatttagatacctttcattaccaccttgcctcttctcttcccaatatacacatgtacgcctatccatcttcccaatataattatattgtgatttatttttattaaatcagtatttcatgtttatattagtatgcctagtaaacaggaagatttg

SEQ ID NO: 495681 - DNA, 619 bp, Homo sapiens
aatcgataaaaattaatttgtggttgcttagggctgagaagagaggttgaagaaataagcagtgactgctaatgggtaccatgcttcttttaaggataatgaaaatgttctaaaatgtattatagtgatggtcgcacagctccatgaatacacttaaaaaaaattgggtgaactgtatggtctgtgaaatgtacctcaataaagcagttgaaaaaattataaattaaagagaaactggaagccccctgaggttaagtaatttgcccaaagtcaaactgctggctagtaaaaactggaaccagaaacatcccgattcccgcaccagtctcagttctttaactacagattgtcrcaagcaactctgatgggccaaaaaggttccacaaagagctggaaaaacagaaaacctattcttatcctggtatcaggataagaaaaggaagagaaatttaggtaatgcaactaaattttggttttcaaaatttaatgtgactccaaaatggatgcgtggcctaaaaatctaacaaccattgatgtaacctcactgctatacgaggttgtgacttggtataacaataccccttttactaagagctcaattagagcagggcactggatg

SEQ ID NO: 495682 - DNA, 651 bp, Homo sapiens
tgcttcccagttccagcgtcaagcyggtagatggagccccgggctgggaactcacagtctgggcctctcctttttgctgtggggcttccctgtcttcacctgtaaggcaggaaaatgggtgagggcagatggtataggaaccatagtcagtggggcatcctcacctcttttcttctccacaggctgttagagagtgccatgagtggaaaatacctgcacgatgacttcgccctgccctgcccaccggggctgaaaattcctgaggaagatggttacaccatcacccccaacaccctcaaggtactagggccaagactcaagctgcgggtagatgggactgtcctgtctgggggatggagttcttagtgtgtttctcagggtgacctgcggggtgaaggactgggaagacctgggtcccagcagtggtttcatagcattgctcctaccctgctagcctaactcttacaggacaggccttgtcgggggagggggcagagggaacagtttgggtgaaaaaggcagtccctagaaggaaaaagactttctgagctcattgtcctgggctgagaaaggctgtaggcttcgggaaacagtgcctcacgtaggtgcttgcctcggccccagaccctggtgctggtaggctgtttcacc

SEQ ID NO: 495683 - DNA, 614 bp, Homo sapiens
gggaccaggtgattttggtagccctgcatcctggcttccatccaccccagcctctgtctcagcctttgcaccaccatcccagacaggcatccaccttctgtctctggccctgcttctacccccactccacctgccctcatgtctgccttccccttctgcacccctgctgggctcctgaggaacaggatggaaggagagtgtgtcccctacccccagcttccagtctcaggagggtcagaacagacaatacaggtcaaagcagcaaggctaagggtgacaggtacacaacrctgcagcccccagatctagagacaagattaggatttcggtcagagggggatgaagcacacaccatccccactcccacccagcaccaccatccttccccttcctcctcctgggtcagggtcgaaaagtggagaatccccagaaatcctttagagtcctctgatgaagcctcccgagtcctgccttcgagccagtggggagggggagaggaggatgattacagggcggcccccccaggggcatctcaagacactcccaggacagcatggacaggcatggaccctcctgccctgtggctcctgccaggacccctcccctgagctgcc

SEQ ID NO: 495684 - DNA, 603 bp, Homo sapiens
cccctcatcctcaacagctccacccagagggagtgcaaacaagggccccaagaactgagtctggttgtttattgaatgcaaattcattcatagaaaacggaaatgcaaccatagcatggagacgctctgagaaaagatccagacccacctcatctcccagcccttcaagcagagctataaaaacaagtttgggagaaaaacacattcccatccccaaagcagaggccccgcctgagctcccccatcctcagcatctggggtggaccaggtgggacgaaggggatccaaggaccagggtggccagggtgcccagagctggggcaattctttgtaaactccaaggtttcataggtatgtgtgtgcatgactaacacagaacttgcctgaagactggacggaaacttagaagccagccctgggtcctagagcgaggctaggactgggcacgtagagggaaacagcacatcccttcctgaagcccctttctaaggtaggcactggggtgcccacagctrtggaggcagaacgggctgaactctgtatcatccctcctttgcccctggacattcttgggcagtgtcaatggcactgaaaggccaccag

SEQ ID NO: 495685 - DNA, 620 bp, Homo sapiens
caccatggagtctcccacgaacagtacatcaggctctttgtctttacagtccaaaacaaatctgttgtgctggtttgaagaagaaaaaaaaaaattattaactggcacttctggctgggtgtggtggcccatgcttgwactctcaacattttgggaggccaggacaggagaataacttgaggtcaggagtttgagatcagcctgggtaatatatcaagatcccatctctacaaaaacaacttttttctttctttttttttttttttctaagacagcgtctggctctctcacccaggctggagtacagtggcgtgatcttggctcactgcaacttctgcttcaggggctcaagtcatcttcccacctcagtcacctgaatagctgggattataggctcatgccaccatgcctggctaattttttctatttttttgtagagacgaggttttaccatgttgcccaggctggtcttgaactcctgagctcaagcaatctgcccaccttagccttccaaagtgctgggattacaggtgtgagccacacatctagccaaaaaaaaatttttttaataaaaaaagaaactgatatttctttccctgtgagacttcttggcctagaaa

SEQ ID NO: 495686 - DNA, 381 bp, Homo sapiens
agcggcgtttctggaactggaccaagcaaaggggagaccgaggtgaacgctcgcgtgaagaggcgcttcgtacaaacggaagccacctcccaccaacgtgtgcattcatcagaggccacgcccacccttcgggggcacttgcgtttctccgcacagtcgcagagtgagcggcaagatgggatggcaccatagcaacctcggacacaacctagggactggagttgcgcgtttctacgtaagagccggagctgccgctcaagtccctgtggtggtggaactcccacatcgtggcagagtaagrggcccctgggaaccccgtgggaaccccgggagagggcggacacccctgctgtagaaagctgctctgcccgagcctggacc

SEQ ID NO: 495687 - DNA, 479 bp, Homo sapiens
cctaccacccctgcagcaaataacttgatataaaacctgggcccaggctagtaatacccttgaagcccatgacagaagcaggcacagtgatagaagcaaaatcacgtagacattatcaatctagccccctccaattcctacccataaagcccactgaagatgaatttacaatcataaastacaaaacatgccaagaaagaaccacatgagggaagtcagcagatgtgtgaacagcaggaacggactccgccaccaaaggccttcaaaaggtgaatcaagcaaaaaagagaacattaattaaacatgtttaacatgggtaagaattacaggaataaaagaagtaaatgaacaagaatacgattgcaagggagtggtagaagaataggcagttttgaagaactaaatggaatatctagaatgaaaaaccatgcttgctaaaattaactcaatgagtgagtttaaaaagcaatttagaccca

SEQ ID NO: 495688 - DNA, 506 bp, Homo sapiens
ttggtcagtgtggctttttttctggtttaacaggagagcacttagttcaatacctcacagttactctgtgctcccttcccagcacccagagatgccctctacaccatgcagccactgctcgggggtgggtgaggagtaacatcagtaattcaaaactgttttttctatctctttagtacctctttcagcaatatggagtaaaaactgggtgctatgacagctcacctgattttttattcttatgaagatttatgtatgtgtgtgtgtagatgttaaatagatgtccttgtggggtgggggagcaacgaatggaaccttctatttcatcattttgctctgcctcctaaacaaatgtatttattaccactgaactgtgtccacttaaaatgacaaagatggtaaaatacatatatatagtttacctcaacaaaaawtttaattaaattttgaaaataagatactttttataatagtatcacagaatgcaaagtatctgaaaataattc

SEQ ID NO: 495689 - DNA, 640 bp, Homo sapiens
ctttcatttacatagggtacagttacatgggtgcagaactagtgagcctttttttttttaccagacaatatagctgcatttacccttagccccagatgagatgaaggtacagcccactccctgagttgtcccttgttgctgggaaggctcaatcctggatagtcctatcccacattgggaagaaagaggagacatttcagtgaggaactttagttgcacccaaaagccaaattgggaatgcatcatagagtgtgaaaagtgagacctcagtcaaattattgatttacatagctgctgttgcttattgaattatctctagtctttgaaatatgattttaagttatttgaaagaagtaagatgatgagagatgcatcgcattaatcatttgaatagtagaaatacaatgcacataagtattataaaaagaaaatttgtatgccagaacaacaacaaaaagacctttcttcattttcaatatggagccaacttaaaacatcatgaagaaaattaaatccagattcttctttaaaggcttgttgtaaccaaggggckgctattctcatttttttctagatgagtttctgcttcatgagaactatttatatatgcaacaaaaggtgtttgccaccatatatacag

SEQ ID NO: 495690 - DNA, 388 bp, Homo sapiens
cctaccgttcgatttcattttgttccagtccattcctttcgcgtccattccattccatttcactccattcgattccattccattcgattccattccactcgattccacttcgttccatttcattgcattccattctattcamctctattgccttccattccattccattcgattacattccatgcgattccattcgaaattgaatcaattacattgcaatccattactattgagtccgttttattccagtccactgcattctggtccattccatttgattccattccattctattccattccatacagttgcattccattggattccattctatatctataaattcaattcgagaccattgcttttgagtccattctatatgattcca

SEQ ID NO: 495691 - DNA, 380 bp, Homo sapiens
aatggaatggaatcatatagaatggactcaaaagcaatggtctcgaattgaatttatagatatagaatggaatccaatggaatgcaactgtatggaatggaatagaatggaatggaatcaaatggaatggaccagaatgcagtggactggaataaaacggactcaatagtaatggatwgcaatgtaattgattcaatttcgaatggaatcgcatggaatgtaatcgaatggaatggaatggaaggcaatagaggtgaatagaatggaatgcaatgaaatggaacgaagtggaatcgagtggaatggaatcgaatggaatggaatcgaatggagtgaaatggaatggaatggacgcgaaaggaatggcctggaacaaaatg

SEQ ID NO: 495692 - DNA, 380 bp, Homo sapiens
aatggaatggaatcatatagaatggactcaaaagcaatggtctcgaattgaatttatagatatagaatggaatccaatggaatgcaactgtatggaatggaatagaatggaatggaatcaaatggaatggaccagaatgcagtggactggaataaaacggactcaatagtaatggatagcaatgtaattgattcaatttcgaatggaatcgcatggaatgtaatcgaatggaatggaatggaaggcaatagaggtgaatagaatggaatgcaatgaaatggaacgaagtggaatcgagtggaatggaatcgaatggaatggaatcgaatggagtgaaatggaatggaatggacgcgaaaggaatggmctggaacaaaatg

SEQ ID NO: 495693 - DNA, 553 bp, Homo sapiens
caatgaacattttcttcagtgtcatgtgtgcactcagtttcagactttggggcatttcagattttcaaattaggaatactcaacctgaatagccccttccttgttctctttctgaaactcaaactattctctctcaatctctttcacttgctccctctttattcttcaaattttgttatttctggggaactttttccatagtccttttctctcactcgtgttggctctagaaccacrctgcagaattagaacaccagctttactttcgtatctcatgtgcctttgcaaagttatttactcttttctgtgttttaatgttttcatcagtaaaactgagctacttatacctacctcacaaggatacaagaattaaatgaacatacatttaaatatatattcaagacaactgtatgctagacactgtacagagcattcaataactgttagccattcttattacaagaatctttgaaaagtcaaactcttccatgcctttacctatcctgagggttgaaaattcaaattcctgtcaacaatctgagctccagattcc

SEQ ID NO: 495694 - DNA, 541 bp, Homo sapiens
gccaaaattagcaatcatttgatcaggaaaggctctggacattggtcccctttatccttggaagcctctttgtgttcaggtaaatattaatttacaayagatacttgtggctggtattgttcattgtgtgtgtataagctcctgagagtggagataagggatgctttcatgccctctcttcaggtatatttaactctaatcttagtacaggcatcatgtttagttttctgcatatacaacctatgcccagttcaaatttaatcctgccaaaattccctgtcacacatacaaaatataggaacatattgtgcattgtgcatatcatgtaattaatatataaaaatgtttatattcaatatgaatgatatatttatcattgaaattgttatatataatctgtataatggatatattttataatcattgcaatttataatgtgaatattgtgctgatactaatatgaatactattatttatatacatatatctttatagaactatattaaatatatataacacatatgtatttattttcttaat

SEQ ID NO: 495695 - DNA, 299 bp, Homo sapiens
ctgacgtgggaggactgcttgagcccaggagttcgaggacagcctgggcaacagagatcttgtctctaaaaaaaaaataattccacttsgtagggaaacctggacgggagggccttcaacaagaggtgttgagagggtagggttaggtgtagtctagggcaggagacaaggattccgtgagagctgccacgtgaccatgacagagagctctgtgtttggatcaaacacagagaggaggaaaacgaaaggtgattttaagtgagcccaggcagaactgtgagggcggcccatgctgcagg

SEQ ID NO: 495696 - DNA, 299 bp, Homo sapiens
ctgacgtgggaggactgcttgagcccaggagttcgaggacagcctgggcaacagagatcttgtctctaaaaaaaaaataattccacttggtagggaaacctggacgggagggcctycaacaagaggtgttgagagggtagggttaggtgtagtctagggcaggagacaaggattccgtgagagctgccacgtgaccatgacagagagctctgtgtttggatcaaacacagagaggaggaaaacgaaaggtgattttaagtgagcccaggcagaactgtgagggcggcccatgctgcagg

SEQ ID NO: 495697 - DNA, 299 bp, Homo sapiens
ctgacgtgggaggactgcttgagcccaggagttcgaggacagcctgggcaacagagatcttgtctctaaaaaaaaaataattccacttggtagggaaacctggacgggagggccttcaacaagaggtgttgagagggtagggttaggtgtagtctagggcaggagacaaggattccgtgagagctgccacgtgaccatgacagagagctctgtgtttggatcaaacacagagaggaggaaaacraaaggtgattttaagtgagcccaggcagaactgtgagggcggcccatgctgcagg

SEQ ID NO: 495698 - DNA, 299 bp, Homo sapiens
ctgacgtgggaggactgcttgagcccaggagttcgaggacagcctgggcaacagagatcttgtctctaaaaaaaaaataattccacttggtagggaaacctggacgggagggccttcaacaagaggtgttgagagggtagggttaggtgtagtctagggcaggagacaaggattccgtgagagctgccacgtgaccatgacagagagctctgtgtttggatcaaacacagagaggaggaaaacgaaaggtgmttttaagtgagcccaggcagaactgtgagggcggcccatgctgcagg

SEQ ID NO: 495699 - DNA, 405 bp, Homo sapiens
ttttctgcactgagtcatcaggagcaaatgctagatcaggtaattgaacccaagcaatctggttccagagccaaatagatgtatgttttatggtatacaaacatatacatacatttttaggggaagggtgggggtaggatgggatgaggattatgagtaattgcttggtaaatgccaaatacctttcttgtytgtccctcttttcaaatgataaagtaatgtcaattgcacacttttttttttttttttttgagacaaggtctagctggagtacagtgatgcagtcatagcccactgcagcctcagattcctgggctcaagcaatccacccacatcagtttcccaagtagttgggactacaggcccacactactatgcccagctaattattttaatttttgtaga

SEQ ID NO: 495700 - DNA, 634 bp, Homo sapiens
aggtgactgaacactgggaaaagacaaattccaagtctttctagagctgttaagatactagttataacctgatgataatccctggaaataaacactgtggtcagagtggaagcttacgagggtcaagtgataaatggagttttcatccaattccatttccaagtgggtccaataaagactgtgagctcagtttttattttctcccctccaatctcagagcatagtgaaacttcctaactataaaggctactactatggtaagatgggaagacacaaatgaatgttcctacaactatcccttcctgtcccctcctcaccaatataaatctaatgtaataacacatccttgtgaaaaaytgtacatattactcccatccctgtggaaaattgtacatattattgccataaaggcctgaaagatacaggggtagtgattcctactatattccctatctgttttactcatgtgtttggctagagcaaacaacaaataaacctgaagaaagtggtagtgtattacaaacttaacgggttgggggatgatgccaattacagctgcaggttctgatatggtatctttactaaacaatatagccactggcaacaacagctactgacctagcaaaaatatttc

SEQ ID NO: 495701 - DNA, 534 bp, Homo sapiens
gcataataaatagtgaaaagttgtttgagatgagcttgaagaaataggtaggaagtagatcatgaaggactttttaagctatgataagaaatttgggttttattcaaagtgtggttagtgttattggctatctcaagaaatgaaacgaattacaggaaaagaacaaaataaatttcacttagaaaagcacatcatacgccaagacaattcagtgagagaaagaatggtcttttcaccaaatagtgctggaacaactggataaccacatgcaaaagaataaagttgaaccyttccttctactgcagaaaaaaatgaactccaaatgagtcatagacctaaatgtaagagctaaaactgtaaaagtcttagaagaaaacatgggagtacgtcttctaagataaattggacttcattaaaattaaaagattgttggttcataggacacaatcaagaaagtaaaagatcaacccacataataggagaaaatatttgaaaatcatatatgataagggactcgtatccagaatatattaa

SEQ ID NO: 495702 - DNA, 584 bp, Homo sapiens
tcttcattctcttaacagtgttttttcaaggcagatttaaaaagatgttaatgaagtccaacttaccagttttttctttcatgggttgtgcttttggtgatatagctaaaaactcatcaacaaacctcaggtcacatagattttctctatgtttatattttaggagttttatggctttgttttttacatttaagtctatgattcattttgagggtgtgtgtgtgtgtgtgtgtgtgtgtgtgtgtaaggtgtaagatctgcatctagattcacgttttgcatgtggatatctatttgttccagcataatttgttgaaaagactatccattgtattgcctttgctcctttgtcacagatcacttgattttatttgtgactatatgttgtgtatattgtgtagaacaaagagtataactgttctatttctgggcttaccactctgttccaaygatctacagtcgacacttaaaacaacataagggttacagtgccaacctcctgcagagttaaaaatctgagtacaacttttgactcctccaaaatgtaaccacttatagcctactgttgactggatgccttacta

SEQ ID NO: 495703 - DNA, 438 bp, Homo sapiens
cttctgttaagcctttattcccactaagctcatgattcacaaagaaagcgcctagagttactcctctgaaacctatagtatcatgctgacagatccttctttggtctctctctctctctctctcwcacacacacacacacacacacacccctccccacaagaggcattaaagatatgatttccaaaacaagaacttcatgaagcattcctcacaaaccaatgaaaggcttactaaaggcttacttagcaggtattttcatagaagaacatggagttccttaaaatctttcatacttgtctcagttggtgtaaaatattatgattcaggcttttccctcttgtgacatgaatacagcatatattttattttaacctctaaaggaaactactcatttttttcctcataaaggatgaaatgttattttcataatcgaaccc

SEQ ID NO: 495704 - DNA, 438 bp, Homo sapiens
cttctgttaagcctttattcccactaagctcatgattcacaaagaaagcgcctagagttactcctctgaaacctatagtatcatgctgacagatccttctttggtctctctctctctctctctcacacacacacacacacacacacmcccctccccacaagaggcattaaagatatgatttccaaaacaagaacttcatgaagcattcctcacaaaccaatgaaaggcttactaaaggcttacttagcaggtattttcatagaagaacatggagttccttaaaatctttcatacttgtctcagttggtgtaaaatattatgattcaggcttttccctcttgtgacatgaatacagcatatattttattttaacctctaaaggaaactactcatttttttcctcataaaggatgaaatgttattttcataatcgaaccc

SEQ ID NO: 495705 - DNA, 438 bp, Homo sapiens
cttctgttaagcctttattcccactaagctcatgattcacaaagaaagcgcctagagttactcctctgaaacctatagtatcatgctgacagatccttctttggtctctctctctctctctctcacacacacacacacacacacacacccctccccacaagaggcattamagatatgatttccaaaacaagaacttcatgaagcattcctcacaaaccaatgaaaggcttactaaaggcttacttagcaggtattttcatagaagaacatggagttccttaaaatctttcatacttgtctcagttggtgtaaaatattatgattcaggcttttccctcttgtgacatgaatacagcatatattttattttaacctctaaaggaaactactcatttttttcctcataaaggatgaaatgttattttcataatcgaaccc

SEQ ID NO: 495706 - DNA, 562 bp, Homo sapiens
ggtgagctgtagtaactggaggatttgctgcatttgtttctctccatgggttctgtcatttagctgctggattgtcttctcatttctcatttctgcatgctccaaagtgtggactcacacatgcttatcttaaaacagmatcaaattcttgaagaattaattttgccaccagcctatgactttttttccccctaaaacagttggggaaagaggaagtaggagtccttgtatctcttttcatctctatgaacactcaccccactggtgaccttacacacactcacggttttaaataccatctccatgaatgctgatgcaagatggcagccactgcaggctcaggaataaaagtgccttgaaatctctgactgttgcaagaactcaaagaagaccagaaaggaagaagtgatggcacagttagcttggggtctagaagataatgaggatataatacaagatggacaaggataatcattgggcctccaagtacaatttataaaaaccgaatatacaaccttaaaatggaatgtgaacctaaatccccagaagcacccccagtttg

SEQ ID NO: 495707 - DNA, 616 bp, Homo sapiens
cctgtgaggccagttcccggacgctggccaggacagcagcagtaattatgaaccagggcgcctggtctcaaagttgtgctcagagcagatttatatcatgtaaatgattgttctaataaagagattggtacattagccaaaactcaaggacatgcaaaatgtattaggcaatttatagtccaacaagtttcctgtggcgaaggcagtagagaaacattcccaaaatgaatgtcattttaattcttaatctaaaaagaattataaccacagctggttttccccactaaaattaattctgcattatcatctataatggagcaggacactagaaatctgtgatgaccttctgtccctgttgacatcaagagttcagcacctgctcaacactgcaatcacacctctcaaatgtacaaaagttgcattrattccttggaattatataagcctagggatctggcatcatcatttagactccttcagtatatgttcgatctataataattgccacggttaaaaagaatcttcaatgcttgtatatttttaactgcatttaaaataaaaaggaaatggaaaaatattttattacctgcagaaacatgattccaagtaactgcag

SEQ ID NO: 495708 - DNA, 484 bp, Homo sapiens
ttccttgaagataaaaaaggcaatgaaataggagatgacactaatttccttcctgacatttattaacagtaagccattcaccaacatcaacagaaaacaccttmtgttttgtagtagaatataaaataaaaattatttgatttgtcataatataaaaatattattatcatataacaatttcaaaagcctaaacttttgtaggttttgtctttctttctgatataacatatcatttatatgcatgtatcttacatattttatatattactctcaagaatctaagtttgaatgtttctatatattgctacatctgtttcctcagatgtgtattttctttttaccccaccagtataatttgattttcatggttggttctttgttcttctgtaacccctaattctctctaacattttagaaaatctggccaagacagcatacttatttctttgattttttaaaaaatctgctttgctccattttaggg

SEQ ID NO: 495709 - DNA, 484 bp, Homo sapiens
ttccttgaagataaaaaaggcaatgaaataggagatgacactaatttccttcctgacatttattaacagtaagccattcaccaacatcaacagaaaacaccttctgttttgtagtagaatataaaataaaaattatttgatttgtcataatataaaaatattattatcatataacaatttcaaaagcctaaacttttgtaggttttgtctttctttctgatataacatatcatttatatgcatgtatcttacatattttatatattactctcaagaatctaagtttgaatgtttctatatattgctacatctgtttcctcagatgtgtattttctttttaccccaccagtataatttgrttttcatggttggttctttgttcttctgtaacccctaattctctctaacattttagaaaatctggccaagacagcatacttatttctttgattttttaaaaaatctgctttgctccattttaggg

SEQ ID NO: 495710 - DNA, 521 bp, Homo sapiens
tgtgtaaaatatgacaattatatggactgatggtaccgcaagccttggacatcacacatgaatccttttagataactcagaccagttccctgtctccttatctcctctcattaagacataagctagactgtgcctgactcaatttcagcctcataatacaaaggggagtgaggtacttcatctgtaagtccrtctgcttcctattgcctcaccttgatccccaggtcaggaaaggggggactgctcctctttgcaaggtacttctttcatacatgctttacatgcttctttccctgcttcctccaggctcttgctccaaccattattcaatttttctgtattggcgaaatttcccattccattagctccttcccataagtgtagccaaaatatgccacataagagacacaaagaaaataaatggaaactcttctacatatctgtgttttttctcctctgttacctttattctacacagcatatccacttttcccaaaatattaatacttgctaaaacttta

SEQ ID NO: 495711 - DNA, 589 bp, Homo sapiens
ctcagcctcgactctgattaatccctctaatcccaggtactcgcgaggcggaggcaagagaatcatttgaacccaggcggcagagtttgcagygagctgagatcccgccactgcactccagactgggtgacagagtgagactccgactattaaaaaataataataaatgatggcggatcggcggctgcggggactggggcagtggctggtgaagtgaagattgggagaggggcctcatcaaccctccgcaaatcctggcctgaggctgggatcttgcgctgcctcccctgcgatctgcctgaggtttcttgctcctgaggtttcttcctggttgtcgaccctccgagaataccggtctccagagaccatcctgttaacaccctggccaggactgctctcagcctcgactctgacgcactatcacacaaggcttctactttgccaagtctcagggacctatttctgggccgcagtgcgggacactgttaccaaagcggcggctcggacctcgcgcatgcgcactgacgaggccgactccgcccttgctccggagagtcaggctgcggaccctttaaaaaatggcttcaac

SEQ ID NO: 495712 - DNA, 622 bp, Homo sapiens
gtgctctgctatagtacttgatttctttccatttcccaaatatatcatattttcttctgcctttctacttttgggctcattgttcattctagctaaaatgcctttcttgtgccaccttctttgctttatcagattatcagttcttcttatcttttaggcctcaactcaaggattatatattcttggcagagttagaagtgaccttttctctcctttggaacactcygtagataatttttttattatttaccacagtctattgtaatattttgtgtatatgtctttgggacattgtagcttcttttttctcttccaatttaactttgcctcactatgtaactatttgcttcatgagaacaggaaccaaatctttttaatttttgtatttctaatggcctaacgtttagtaaatgttaagaaagtgcttgttaaattaataataaaaaaattgagatagaaagaggtaagattaaattaaattattttctaaaaaggtttaaaatattaacatagacttgatatttttaaatgtctaaatattcttagtagaatgagtttttgtttttgttttaaattaaagcaggaaagtttgcaaaaaacaatctataagctggaagaacag

SEQ ID NO: 495713 - DNA, 492 bp, Homo sapiens
tttttcatgcaattgaaagaaaataagaaaatctgtgtgctctctactctacctggctttctctggctctgaccattgaaatctcattccaactcagaggcatctttgagggttggtgataataragatgcacttattaatatttattttgtgacaagcactgtgctatgcagtttacaggtataacctaatttaattctcagaacagcattttaaagactaagaaactaaggcttagagaggtcacatatctggtccacaatcacacaaataataaagggtagagccaggatttttttctccttgatgccagagcttgatcaccagcactgtgttatcctgcattcctctgggtaggtacattccactgctgattgggagattagtaattggatgtcttctgctggaacctccatatcctatcaattgtcctcctatagcttggggtaaatacttgtggctttcagaaagtggcctagccttgggaaatct

SEQ ID NO: 495714 - DNA, 503 bp, Homo sapiens
atcgatttttttccaccccttttataacctcctcttttgctattatgtgttgtattgcatattgggttaaatgggaacccccacaggagctttgtcttttatgtgttttaaagtgccatgtacccttacaactattataaataaatcatcatcatcatcttgggatgaaagtaaaacataaaaatgtcaacckttcaaacgaaaatgagttatcttcctctctttaactttaccttagagatgcatcttataaaattctagaaacttttctaacaagtatacagtttaagtttaaaaagaaaaaaaatgatgttgtatcggcttagggtaaacaaccattctggtttgcctggttttagcagtgaatgccctatatcccaggaaaaccctcagtcctaggcaagctggtttgttggttgcccaataatatcactcttcttttaagacatctaaagcatatatattttatatcttttatagcaaattacatctaagaaaatgtt

SEQ ID NO: 495715 - DNA, 503 bp, Homo sapiens
atcgatttttttccaccccttttataacctcctcttttgctattatgtgttgtattgcatattgggttaaatgggaacccccacaggagctttgtcttttatgtgttttaaagtgccatgtacccttacaactattataaataaatcatcatcatcatcttgggatgaaagtaaaacataaaaatgtcaaccgttcaaacgaaaatgagttatcttcctctctttaactttaccttagagatgcatcttataaaattctagaaacttttctaacaagtatacagtttaagtttaaaaagaaaaaaaatgaygttgtatcggcttagggtaaacaaccattctggtttgcctggttttagcagtgaatgccctatatcccaggaaaaccctcagtcctaggcaagctggtttgttggttgcccaataatatcactcttcttttaagacatctaaagcatatatattttatatcttttatagcaaattacatctaagaaaatgtt

SEQ ID NO: 495716 - DNA, 503 bp, Homo sapiens
atcgatttttttccaccccttttataacctcctcttttgctattatgtgttgtattgcatattgggttaaatgggaacccccacaggagctttgtcttttatgtgttttaaagtgccatgtacccttacaactattataaataaatcatcatcatcatcttgggatgaaagtaaaacataaaaatgtcaaccgttcaaacgaaaatgagttatcttcctctctttaactttaccttagagatgcatcttataaaattctagaaacttttctaacaagtatacagtttaagtttaaaaagaaaaaaaatgatgttgtatyggcttagggtaaacaaccattctggtttgcctggttttagcagtgaatgccctatatcccaggaaaaccctcagtcctaggcaagctggtttgttggttgcccaataatatcactcttcttttaagacatctaaagcatatatattttatatcttttatagcaaattacatctaagaaaatgtt

SEQ ID NO: 495717 - DNA, 503 bp, Homo sapiens
atcgatttttttccaccccttttataacctcctcttttgctattatgtgttgtattgcatattgggttaaatgggaacccccacaggagctttgtcttttatgtgttttaaagtgccatgtacccttacaactattataaataaatcatcatcatcatcttgggatgaaagtaaaacataaaaatgtcaaccgttcaaacgaaaatgagttatcttcctctctttaactttaccttagagatgcatcttataaaattctagaaacttttctaacaagtatacagtttaagtttaaaaagaaaaaaaatgatgttgtatcggcytagggtaaacaaccattctggtttgcctggttttagcagtgaatgccctatatcccaggaaaaccctcagtcctaggcaagctggtttgttggttgcccaataatatcactcttcttttaagacatctaaagcatatatattttatatcttttatagcaaattacatctaagaaaatgtt

SEQ ID NO: 495718 - DNA, 463 bp, Homo sapiens
tggaagataaattatagaagtttagatttaaaagatttaccatttcttattccaatatgatctgattgttatgggggaatggaaaaaaggtgattatcactctggatagataagaaagtgcaaatctaagacgaatattaggtgaatatagtttagtgatataacttatagttcctggctacattgtttataatakagtaaaaaaatggcaatgccccaaatgttcaattgcaaggtatctgttacaggtaccttggtattagttagacattaagaaatacacaattatttagaaaatgtttaaagtatatttaatgaaggaatcaagttataaaagagtaatctatagatacattataaatatattatgtaggtgacctgatgatgtgccacacacattccctcttcaaggattagacttgctgcccagctatagcaagtatggtgagcagacagcttccag

SEQ ID NO: 495719 - DNA, 611 bp, Homo sapiens
tgtcattcttgcctctattcaaatctatgatgcttcatttgcactttttgtttttttggcaatttattacagtaagtactttgaaatttagtggtctagcctgtttgtgtagctagaaaggaatacttgaggctgggtaatttatgaagaaaaaaggtttatttggcttacagttctgcaggctgtacaggaaggatggcatcagcatctgcttctagtgagggcttctggaagcttcgactcaggatagaagttgaaggggagctggcatgtagagatcacatggtggaaagtaagagagaaggaaaaagaatagggagggaggtggcagacttttaaacaattagatctctgggaactattagaactgaggagaactcactcattaccactgagatgggactaaaccattcatgagggatttgccccatgacccaaacaccttacactaggtcccaccttcaacatyggggatcaatttagatgtgagatggaggggacaattgtccaaactatgtaagtttgttatttttcctaaaacagtatcttataataaataggaatataagtgtgtgttaaaatataagcctgttaattttacaaatgtgaaa

SEQ ID NO: 495720 - DNA, 611 bp, Homo sapiens
agttatatacctgaagttatcatatgtgaaggcaactttgcattaatactaacatgcactgacagattttatgaaatatttattcaacataaatcctactgaaccaattaattgttttactatggcatttttattttaaatataggtgcatactgaaaagtcaaaaacaatttgtttcaaatgcattttttttcttttaaacaagtaatagaatatttcatgtggtcagatttacaactgcacaaytcataggcgagctcttatctaacctaagctcttgacttagcagatcccctgcgctttactggcagagtagacttttggggagaactccacctctataaccttgttccttaacactgtacccaagatattacaatgaagaaagataatcttatagaattattttcaaaataaaacaaaacctttggaaacattgactatagttcaatcatctgttttgcaaatgaagtaacggcaggcctctccctcttacctataatgacttctatattgttagctcctcctcatctaagaaaaaaaaacattaatcaaaaccaaatcttcatgtacaatattctttttctcagaggcatttattaagcattgag

SEQ ID NO: 495721 - DNA, 611 bp, Homo sapiens
agttatatacctgaagttatcatatgtgaaggcaactttgcattaatactaacatgcactgacagattttatgaaatatttattcaacataaatcctactgaaccaattaattgttttactatggcatttttattttaaatataggtgcatactgaaaagtcaaaaacaatttgtttcaaatgcattttttttcttttaaacaagtaatagaatatttcatgtggtcagatttacaactgcacaactcataggcgagctcttatctaacctaagctcttgacttagcagatcccctgcgctttactggcagagtagacttttggggagaactccacctctataaccttgttccttaacactgtacccaagatattacaatgaagaaagataatcttatagaattattttcaaaataaaacaaaamctttggaaacattgactatagttcaatcatctgttttgcaaatgaagtaacggcaggcctctccctcttacctataatgacttctatattgttagctcctcctcatctaagaaaaaaaaacattaatcaaaaccaaatcttcatgtacaatattctttttctcagaggcatttattaagcattgag

SEQ ID NO: 495722 - DNA, 634 bp, Homo sapiens
tgaaggcattcttcctcaacttgtccagtcgctggaacattccagtgatgagattgcagctcatggagatctgagtgagttcttcagggatgcgatactctgagtatcacagggaccagccatcctcatcaaagtgcccccagaaatatggcagtgccacaaggagtgtgtccttgtyggagtccttgccgcttaaattcatccaacacagccgggtgtggcggctcacacctgtaatcccagcactttgggaggccaaggctggtgaatcacaaggtcaggagttcgagaccagcctgaccaatatggtgaaaccccatctctactaaaaatacaaaacattcgctgggcgtagtggtgggcaactgtaatcccagctactcaggaggctgaggcaggagaatcgcttgaaccggggaggtggaggttgccttgagccgagatcacaccactcactgtactcccgcctgggcgacagagtgagactccgcctcaatcaatcaatcaatcaatataaaataaaaattcacccaacacaaaggtactcttgggcaggtgatcggagggatccttggccttaggctcagcggccagcgcctgcttacattcatccatctcctcctctggagcaggg

SEQ ID NO: 495723 - DNA, 634 bp, Homo sapiens
tgaaggcattcttcctcaacttgtccagtcgctggaacattccagtgatgagattgcagctcatggagatctgagtgagttcttcagggatgcgatactctgagtatcacagggaccagccatcctcatcaaagtgcccccagaaatatggcagtgccacaaggagtgtgtccttgttggagtccttgccgcttaaattcatccaacacagccgggtgyggcggctcacacctgtaatcccagcactttgggaggccaaggctggtgaatcacaaggtcaggagttcgagaccagcctgaccaatatggtgaaaccccatctctactaaaaatacaaaacattcgctgggcgtagtggtgggcaactgtaatcccagctactcaggaggctgaggcaggagaatcgcttgaaccggggaggtggaggttgccttgagccgagatcacaccactcactgtactcccgcctgggcgacagagtgagactccgcctcaatcaatcaatcaatcaatataaaataaaaattcacccaacacaaaggtactcttgggcaggtgatcggagggatccttggccttaggctcagcggccagcgcctgcttacattcatccatctcctcctctggagcaggg

SEQ ID NO: 495724 - DNA, 634 bp, Homo sapiens
tgaaggcattcttcctcaacttgtccagtcgctggaacattccagtgatgagattgcagctcatggagatctgagtgagttcttcagggatgcgatactctgagtatcacagggaccagccatcctcatcaaagtgcccccagaaatatggcagtgccacaaggagtgtgtccttgttggagtccttgccgcttaaattcatccaacacagccgggtgtggcggctcacacctgtaatcccagcactttgggaggccaaggctggtgaatcacaaggtcaggagttcgagaccagcctgaccaatatggtgaaaccccatctctactaaaaatacaaaacattcgctgggcgtagtggtgggcaactgtaatcccagctactcaggaggctgaggcaggagaatcgcttgaaccggggaggtggaggttgccttgagccgagatcacaccactcactgtactccmgcctgggcgacagagtgagactccgcctcaatcaatcaatcaatcaatataaaataaaaattcacccaacacaaaggtactcttgggcaggtgatcggagggatccttggccttaggctcagcggccagcgcctgcttacattcatccatctcctcctctggagcaggg

SEQ ID NO: 495725 - DNA, 634 bp, Homo sapiens
tgaaggcattcttcctcaacttgtccagtcgctggaacattccagtgatgagattgcagctcatggagatctgagtgagttcttcagggatgcgatactctgagtatcacagggaccagccatcctcatcaaagtgcccccagaaatatggcagtgccacaaggagtgtgtccttgttggagtccttgccgcttaaattcatccaacacagccgggtgtggcggctcacacctgtaatcccagcactttgggaggccaaggctggtgaatcacaaggtcaggagttcgagaccagcctgaccaatatggtgaaaccccatctctactaaaaatacaaaacattcgctgggcgtagtggtgggcaactgtaatcccagctactcaggaggctgaggcaggagaatcgcttgaaccggggaggtggaggttgccttgagccgagatcacaccactcactgtactcccgccygggcgacagagtgagactccgcctcaatcaatcaatcaatcaatataaaataaaaattcacccaacacaaaggtactcttgggcaggtgatcggagggatccttggccttaggctcagcggccagcgcctgcttacattcatccatctcctcctctggagcaggg

SEQ ID NO: 495726 - DNA, 575 bp, Homo sapiens
ataagcatataaactgcactaagagtggaaagggagtgatttaccaaaggaatgtcaagctgttgttggatagtggaaggatgagaagttaagtacagaacacttaggtgctatacatttatttactgtattcttccacctggtaccagtttttactaaatgcaaagattattrgtgattttagatgtcatatgcctgtgaatttcctgatgtttgactgaaaggagactgttattttactgccagtaacagaaaaccaaaaactcaaactgacttaaaataataaggaaattttctagttcctgtaagtagaaattaagagacacatgagatttcagggttagttcatataagggcttaacactaccatgaaagttgcatattttattttattttatttttttaatttacgtgacattctgttcagtcaaccacaggattggtttcattttaagttgggctcccttttggttgtggaatggctgccagtaataatcggattacacatttcctcacacagcatcaggaagaggagaggctgatttcccatatttctccagagagaaagaaaaaaa

SEQ ID NO: 495727 - DNA, 575 bp, Homo sapiens
ataagcatataaactgcactaagagtggaaagggagtgatttaccaaaggaatgtcaagctgttgttggatagtggaaggatgagaagttaagtacagaacacttaggtgctatacatttatttactgtattcttccacctggtaccagtttttactaaatgcaaagattattggtgattttagatgtcatatgcctgtgaatttcctgatgtttgactgaaaggagactgttattttactgccagtaacagaaaaccaaaaactcaaactgacttaaaataataaggaaattttctagttcctgtaagtagaaattaagagacacatgagatttcagggttagttcatataagggcttaacactaccatgaaagttgcakattttattttattttatttttttaatttacgtgacattctgttcagtcaaccacaggattggtttcattttaagttgggctcccttttggttgtggaatggctgccagtaataatcggattacacatttcctcacacagcatcaggaagaggagaggctgatttcccatatttctccagagagaaagaaaaaaa

SEQ ID NO: 495728 - DNA, 585 bp, Homo sapiens
tcacaaatgtttatgatcctatgaccatattaattataaatctgcatgtagatactaatgaaaattttacctaacatgttattagtccatgactctttttcatgataatttatagcaaccaaattgggagaagaaagctaaattgaattattaattataataaaattcaatatgaaagtttccataaactatgtcttgagaaccaccagcaacttgatagatgaatgtgaattatactgttctccctttcattgcttcttcagctaggctgtagtgtttacaaagcagacactaaagttgagatttagcaattgccacrttgtctgtgacttttttagatactgtgaaaaaaggaaagattacagagtttagaggaagggaaaaacttgaatgatttgttttaaaaacgctttgttctgaaaaccatgagttagtaggcttgcggttaatactagtgaaagagtctggattgcgttatgaaaggggtgatttattcccatacagagaagggtacattgattaatatgagttcctatgtaattacttagaataaactttgccaaaaccccctagttttgtcatttg

SEQ ID NO: 495729 - DNA, 575 bp, Homo sapiens
actgttctcgtggtagtgaataagtctcatgagatctgatgattttataaggggtttccccctttgcttggctgtcattctgtcttgcctgctaccatgtaagacatgcctttcaccttctgccatgattgtgaggcctctccagccacgtgaaactgtgagtcaaacaagactctttttctttataaattatccagtctcagatatatcttaaccagcagtatgaaaatggactaatacagcctataaagtgggaaatactggactgaattaagtgagaaagtrtttatatgaaacgtccagaatagacaaatccatacagatagaaagtagattacagattgctaaggggtgagggatgtggggaatgggaagtgactaccaattaatggtttatttttgtagtgacaaaaatgtcttggaagtagataatggtgatggttgcacaactttgtcaatatattaggttggtgcaagagtaattatggtttttgccattaaaagtaatttgtctactctgaacatttcacataaatactttatcatttaattcagtccagtatttccaactttag

SEQ ID NO: 495730 - DNA, 514 bp, Homo sapiens
gaaaggccagatcatgaatgccgtgcttgggaatttggactttgattttgaggtcagatggaatcatcaaagagttttaagcaagggggtcacttgggcagatctacgactacaaaaattagttctgctaagagagtagaggacggawtgaagtaatgataagggttacagcagagagggaccttcagaagaggagggagagaaatcggaaactgagaaattaaacacaggaggctcctgcagcaatcaatataagtaagaaatcatgatgttcatatacctctgctgtatcagcctactatatgtttccacccattgtccagttggaaaaatcctatttagctatcaaaacctacttgtggtaaacagaattccaaaatgaccccaaaaagtcacacccttatataatcccctcccactgagtgctggtgagacctgtgactgtgagaggatattactcctgtgattacattatttcatatggcaaaatgggggggtttacagatataattaa

SEQ ID NO: 495731 - DNA, 678 bp, Homo sapiens
taaaactcgtgtgtgtgtgtgtgtgtgtgtgtgtgtgtgtgtgtttatctatttctttccatcatctatctatgtatctatgatgaaggtaaaatagttaatttaaaagttgactaaactggtggagttttgatctaaaaataaggtagaattctactcatggaaattacccatttttttttcaggaaaacatcataatggtttttacytataaaactgaagaactctattcttaggcatagagagcctagttgaaaagttttatgtaaggggaattaagtcttgtaaaaaaaaaaaaggaaagaagaaggagaaggaggagaagaaaaaggagaggaaaagagaggaaaatgggggaagcggacgagagggagaggaaataggaattttagtttccacttgggagtaggttagataagaatttgggaactctgagattcagagagaatttgaaagaaggaagagaaaagtcactgtggtaaaagttggggaaaaaggcagtaaaccaaggcctaggaggacaaggcaagtgagaaattctttatagtggaaaatggctaatatgcatttaagacattgacctctaatatttaatcttaaattgtttcctgctccatacagtgctgatattctcctccccttcatattcattgaggtagcaccaaacttactaaaaca

SEQ ID NO: 495732 - DNA, 678 bp, Homo sapiens
taaaactcgtgtgtgtgtgtgtgtgtgtgtgtgtgtgtgtgtgtttatctatttctttccatcatctatctatgtatctatgatgaaggtaaaatagttaatttaaaagttgactaaactggtggagttttgatctaaaaataaggtagaattctactcatggaaattacccatttttttttcaggaaaacatcataatggtttttacttataaaactgaagaactctattcttaggcatagagagcctagttgaaaagttttawgtaaggggaattaagtcttgtaaaaaaaaaaaaggaaagaagaaggagaaggaggagaagaaaaaggagaggaaaagagaggaaaatgggggaagcggacgagagggagaggaaataggaattttagtttccacttgggagtaggttagataagaatttgggaactctgagattcagagagaatttgaaagaaggaagagaaaagtcactgtggtaaaagttggggaaaaaggcagtaaaccaaggcctaggaggacaaggcaagtgagaaattctttatagtggaaaatggctaatatgcatttaagacattgacctctaatatttaatcttaaattgtttcctgctccatacagtgctgatattctcctccccttcatattcattgaggtagcaccaaacttactaaaaca

SEQ ID NO: 495733 - DNA, 678 bp, Homo sapiens
taaaactcgtgtgtgtgtgtgtgtgtgtgtgtgtgtgtgtgtgtttatctatttctttccatcatctatctatgtatctatgatgaaggtaaaatagttaatttaaaagttgactaaactggtggagttttgatctaaaaataaggtagaattctactcatggaaattacccatttttttttcaggaaaacatcataatggtttttacttataaaactgaagaactctattcttaggcatagagagcctagttgaaaagttttatgtaaggggaattaagtcttgtaaaaaaaaaaaaggaaagaagaaggagaaggaggagaagaaaaaggagaggaaaagagaggaaaatgggggaagcggacgagagggagaggaaataggaattttagtttccacttgggagtaggttagataagaatttgggaactctgagattcagagagaatttgaaagaaggaagagaaaagtcactgtggtaaaagttggggaaaaaggcagtaaaccaaggcctaggaggacaaggcaagtgagaaattctttatagtggaaaatggctaatatgcatttaagacattgacctctaatatttaatcttaaattgtttcctgctccatacagtgctgatattctcctccccttcatrttcattgaggtagcaccaaacttactaaaaca

SEQ ID NO: 495734 - DNA, 535 bp, Homo sapiens
tagatggagagtaccacggggaaaaaaaagttaattttatcttaattggattaagccaggtcccatccatactgagggaatgaggttacaamagactagaaactgctaggttgacagaaagggattaattcatgggctagcgtcaggatgttgactaataacatattgatcgtatctgtaacatatgcagaatgtctgtcaggagcagatgcactttggaattgaagatggctaggatatctgacacgatcaaagtcagattaatattattaaggagctgcaagtgagctgccaattaccttagcaatcacagacattttctacacgtgcctgtgattgaccgtcctaaacagtagcagtacttgctgcttagagggaagtgacagatttgtgtagctgcttctccctctgccccttctttcctttaatgtgttccatcagacatatggaacggtcacagtttaatcccagtggagcctgcaggtggtattgtccttgcattgaagagttattaaattcttaaggtcaccataaa

SEQ ID NO: 495735 - DNA, 535 bp, Homo sapiens
tagatggagagtaccacggggaaaaaaaagttaattttatcttaattggattaagccaggtcccatccatactgagggaatgaggttacaaaagactagaaactgctaggttgacagaaagggattaattcatgggctagcgtcaggatgttgactaataacatattgatcgtatctgtaacatatgcagaatgtctgtcaggagcagatgcactttggaattkaagatggctaggatatctgacacgatcaaagtcagattaatattattaaggagctgcaagtgagctgccaattaccttagcaatcacagacattttctacacgtgcctgtgattgaccgtcctaaacagtagcagtacttgctgcttagagggaagtgacagatttgtgtagctgcttctccctctgccccttctttcctttaatgtgttccatcagacatatggaacggtcacagtttaatcccagtggagcctgcaggtggtattgtccttgcattgaagagttattaaattcttaaggtcaccataaa

SEQ ID NO: 495736 - DNA, 597 bp, Homo sapiens
caaatacttcgcctcttaatagcatccaaatgaggactaggtctaaaacatgaatttttgagggacatattcaggtaatagcaagtggcaatgtacttctttatgaaatttctgcttgaaacagctaaatgattcagytgaagtagagtggtttacattttatcatttcctagataaggcatagtcctcagatatttgatttttaagtagtatgtggtgattctactaaaaagttaagtgactaatttctgagtttcaaaaagataattttagaagagctaatgaacttgaaactgaacaaaaggctgtcgagctactggccttctcaaagtttacaaggcctgactcctttttcctttcccccacatcaatttttgagctttaaatctcattgtaagattatgttacgttaccacagagttcttagattcttccatctttaatataatcaggttggggggaggagaggaatctgcagaagattttttaaaaatccagaacgaaggacaatggagaacttcgaaatggacagaaaagtaatacatggtattgtgagaaaaaatgtatctctgtaagttcacaaagaaaatgggaccc

SEQ ID NO: 495737 - DNA, 597 bp, Homo sapiens
caaatacttcgcctcttaatagcatccaaatgaggactaggtctaaaacatgaatttttgagggacatattcaggtaatagcaagtggcaatgtacttctttatgaaatttctgcttgaaacagctaaatgattcagctgaagtagagtggtttacattttatcatttcctagataaggcatagtcctcagatatttgatttttaagtagtatgtggtgattctactaaaaagttaagtgactaatttctgagtttcaaaaagataattttagaagagctaatgaacttgaaactgaacaaaaggctgtcgagctactggccttctcaaagtttacaaggcctgactcctttttcctttcccccacatcaatttttgagctttaaatctcattgtaagattatgttacrttaccacagagttcttagattcttccatctttaatataatcaggttggggggaggagaggaatctgcagaagattttttaaaaatccagaacgaaggacaatggagaacttcgaaatggacagaaaagtaatacatggtattgtgagaaaaaatgtatctctgtaagttcacaaagaaaatgggaccc

SEQ ID NO: 495738 - DNA, 597 bp, Homo sapiens
caaatacttcgcctcttaatagcatccaaatgaggactaggtctaaaacatgaatttttgagggacatattcaggtaatagcaagtggcaatgtacttctttatgaaatttctgcttgaaacagctaaatgattcagctgaagtagagtggtttacattttatcatttcctagataaggcatagtcctcagatatttgatttttaagtagtatgtggtgattctactaaaaagttaagtgactaatttctgagtttcaaaaagataattttagaagagctaatgaacttgaaactgaacaaaaggctgtcgagctactggccttctcaaagtttacaaggcctgactcctttttcctttcccccacatcaatttttgagctttaaatctcattgtaagattatgttacgttaccacagagttcttagattcttccatctttaatataatcaggttggggggaggagaggaatctgcagaagattttttaaaaatccagaacgaaggacaatggagaacytcgaaatggacagaaaagtaatacatggtattgtgagaaaaaatgtatctctgtaagttcacaaagaaaatgggaccc

SEQ ID NO: 495739 - DNA, 630 bp, Homo sapiens
tgttagagaaactgctccctctccactcaccttacaagcacaatatactggctgagcacgattcacttctgggatatagaatgattctraaggatctgctttatagttttctttctctctctggaaaagttgtactcagagaaccagaaagactaactcaggatagagctagaatagagtgaaatcaaagatcattcttcttcacgttcgagttagggaatgggttcgtgcctttccaccctttccacacatacgtctttcatatggtggtgggaaaattgactcaggattcactttcaaaacattgcattccttactcaagaagctgattctttttttgtactttaaaagtcctgaaatttcaccctgcggtgttaaaagttagtcactgttcattggaatgtactcgagagcttaatgattagaattttgtgttttctttctgtcatcctgggcttagagcaaagtaccctggataaatgttgactcagctatatctactccttaaattaaagtgctttactttctgtatcccaactttttaaagcaaatacaggaaacaacacaagtgagacaatttctgcatgtgccatggtttcaaaatcaatagcacttcaactgccaaacagg

SEQ ID NO: 495740 - DNA, 559 bp, Homo sapiens
tgtagatactcatcagatttcttgtaattgaatcaaataacctctgtgccctgagactccccctgagtggctcccaggggactgtaataatctgcctcttgcaggaaagtcgaggacgtgatagggatctgaaagcagaaagctcctttaaattttcagtaggtggttggkagcccaatcaccggctgtacggtccctgtaggccttacctaatccgctgtcataatcctggatgaaatgcataggcttattctgctaaatctgattgcttggttcaaaaagtaatgcatagcttcatatatcacaataacaaggaggaaaggccgttaaaatatttacttatacttgctgggcatgtggtcatttgggtgtgatccactttgcctgccttacacacttgctttgtttaataacatttttcttaaaacagaactattcctgattctgttgtttataaaggaaataattttcatgtactatgatgaaggcagtctcttattttgtgtttgactgatattccattgacgtattccagacaattaaagtgatctccaaggta

SEQ ID NO: 495741 - DNA, 516 bp, Homo sapiens
gttgtatattggattggaccctttaaaatctgaaagatcagcttgccctcagaatgactctgtgtgtgtgtgtgtgtgtgtgtgtgtgtgtgtgtrtgtgcgcatgcacgcacatgggattattaaacaaaatattgctaccttgtccttctgtaatacttaagaaaacataaaggtacccacatgttggcaaaatatattttatttgttcatacaaagaaatagtatgaattaccagaatttcacttgcctagaaacatctttctctgtgtaaaattaatttgtgttatacataggacaaaatacttgatttaattttttgtacatattggctatcctaacatccaagttatcgaagacatactgctagaatttgcacagtattttagattacttggttgaatgagactcagtgataaattaatgtcacaaaagtgagaaaacatctaaccacacctttaagttttattggccatcctcttgataagctgaaaagtcacattagcttctgtgtca

SEQ ID NO: 495742 - DNA, 526 bp, Homo sapiens
atgatggtttggctgctaagtgtaagctagctagatgtaggctaaaacttttgggcaaatacatactggattttcaagacatcacttaaagaccagtgacatctctgatcagtttctaaaaatgaagtatcttttcatcttttcatacaatgttccttatactatcaggcaagtgatcccatacaacatacaaaagtgtcctttgtaactatcccatcccaaccattttgacaatatgtrtatcttcccacatattccttgatggaagtacaactgaaatcacaattcttttatggtagaagcattctggtttaaaaaactgaggttaaattaaacatatcattatgtgatattgctatatgtttaaccaactgcccctgtattactatatggctactcaattgccactatattgctatctggttacccaactgttataaatcaacagagaggcacggggagagcattctgtagagcagtgacagtgctggtaacccttctgtcaagacctggctaaaacaaggga

SEQ ID NO: 495743 - DNA, 539 bp, Homo sapiens
caggctgtattttgaagactatagactggacttcttaacaactgaagaatccgttaaaaataccagttgtattatttctacctgtgaaaatccatttcaaatgttaagaagttaactcaggtgccatctattccatgagattttctttaacccatgtatttggaatgaatctcttccactttagtgcccccagacttcctgattcctttattgcaacacttgttctctgtggtattaaacatgtttgtgtagcgctaaatactgttcgatctaccaagctgctagctccttgaaggaaaagccatatatgctattttatacctctcatagcattagcacagtgctcrgaatctttaatctgtaagtaagaaacaaaaacaaacaagtccatctccactttactttagcaatctcctgcttttgctaacttgagatctgatgttatccaagacagctccactgtcagacttgaattctcacatttctgttctttaactacaccctcttcctttccatcaccaccaaattaccttattatt

SEQ ID NO: 495744 - DNA, 548 bp, Homo sapiens
taactaaatgaatacccttttcttcctggcatagcaggattccctggcaaaagtaataaattgtgcaaagaagcaccagtacaattgatctctgggaccccaaggtccttagttgctcttgtctactttgttacctttctaccctcacaggagcaggtattacatatgcagatgcttacctggacatcattttatttatctcttcctggctaatcctagtcacataacagctcttccataatttctctgtccttttattcctgaatcctgccatctygaaggcatttgaagcagaaagcattgccatgcaaattttgaatatctcatgacatcagtagaagcactacattatacacctttaacctatatttggttaaaatttatggtctttgaaaatatatattcgatcatttgatcaaatgtaattttttattctgtgactgaagcctaccagaatacatatacttcttcaagggttatttctttttatttttattgttcagttttccagagatattcaagcaccctggaatactgtcctcctctgg

SEQ ID NO: 495745 - DNA, 548 bp, Homo sapiens
taactaaatgaatacccttttcttcctggcatagcaggattccctggcaaaagtaataaattgtgcaaagaagcaccagtacaattgatctctgggaccccaaggtccttagttgctcttgtctactttgttacctttctaccctcacaggagcaggtattacatatgcagatgcttacctggacatcattttatttatctcttcctggctaatcctagtcacataacagctcttccataatttctctgtccttttattcctgaatcctgccatcttgaaggcatttgaagcagaaagcattgycatgcaaattttgaatatctcatgacatcagtagaagcactacattatacacctttaacctatatttggttaaaatttatggtctttgaaaatatatattcgatcatttgatcaaatgtaattttttattctgtgactgaagcctaccagaatacatatacttcttcaagggttatttctttttatttttattgttcagttttccagagatattcaagcaccctggaatactgtcctcctctgg

SEQ ID NO: 495746 - DNA, 564 bp, Homo sapiens
ataaggctaagggaatgagtgtgcaactaaagtmagtcagtctaacacttactaagtttaacatttactaaataagtttaactcttgctacgtttaacacttactaagtttaacagacccaccaattaagcagtaattgcctgtgctcgaaaaaatcaggaaagtcttcatagtagaagagacaattaagttcagtttcccaagacacaaaggagctggccaaactgatttatataggacatgaacattccaagcacaatgtagaacctgagcaaaagctcagaggtaaggaatggaataggtcattcaagaactgtgaatgtattcacatggctgtgggacagtagaagaaggaagagctcaggctgaaaggtttgacggagaggccaaccacacatttgatacttttaagtggtatcgggactttctgcttcattctgtatgacagataaaatggaacaatgtggtgaattttcttctgtttatcttgtttgtggcctcagaatttttatcatgtaactccaaacagtcactagcaatattttggagtagtcatactccatg

SEQ ID NO: 495747 - DNA, 496 bp, Homo sapiens
acagcaatggggttgcatgacagccaggcatcagctcagccaccayagacagctaggccccactctgaccttggagctgctcaaattctaaacgtggctgtgctcctactttcagctcccttggttgcttcacaagtacctgtgccttgcaaactattgccaacacagtagcaaaggtgtctgcacactggcaccagtgccattactgcaccaggtccccaattttcagtccctccacctgtgcccatgtttcaggcctctgctctgtggctacttcatgggcatcactcacaagacactgatacaaccaccattgggagcaggaccacaagccagacccaatgggtagagaaacgcccttaactgcaaattccctgatgggagaaaaaaaatggaaggaccttaccagcgattgccaccaaagaccccagcaacactcattgccactatggaaatctatagcatttgctgctaagtgtttctgcagtcttaaaga

SEQ ID NO: 495748 - DNA, 463 bp, Homo sapiens
ttagtacatgaaaggacatattacaaccatgacatcaatgaattaacatttttataaaaacgttgtaactgagtgagttagagagaaaacgccacactttgagacaaattcaggagtcctttgttagccagtgaccgagagatggctaacacacaaaattctctcagacctgaagaaagggctagattttcttttatactttggtttagagaggggaaagggattctagctgtagcaatcttacagaagtaaaacagacaaaaaagttaaaaattaaaagttaacagttaaaaaattacaggaaaataaarggttccaggtgcaggggctttaaattcatcacaaggtgacaggtattggggctctgggtgttatctgccagacacaaacacgggctttatggtactatctcctgagtgaattcctgggaactgtggacattgcctacttcagtaccttatca

SEQ ID NO: 495749 - DNA, 641 bp, Homo sapiens
ctgcatccatgttgctgcaaaggacataattctgttcttcttcaataacaagtttattgattgtgaatatttttgtttgattgcttttgtttcttaagacagacaacctggaaacactctctttcttaggttttaggtggctaatctccctgttctaacaaaaccttgaagccctacttgaaatattcaatctcttgtagattcattttgtcactacctatctccagtaaataatttggtttcctacatcaaaaattttcactaaataataaagttccaaaactgtaactccagagaacattatttagattacttcttctagagaaaaatgtttttaaaaaataatttcaacttttatattagattcagagggtgcatgtgcaggtttattacatgggtatgttgcatgatgctgaggtttagggtaatatgatctatcatccaggtagtgaacatagtacctcataggtagttgctctgaccacaccccgtcttcctcctccctctagtagaggcaagcgtctattgttcccatctttatgtccatgtgtattcattcaatatttgactcccacttataagtgagaacatgtrgtatttagttgtctgtttctgtgttaattcgcttagaataatggcct

SEQ ID NO: 495750 - DNA, 621 bp, Homo sapiens
atgataaggtaactcaacagtaaattgtatccatgccttgttttayatactaatactttaacctataaaattggcttcttcttagttatttcattttcctttaactttttaaaatgctttagatttactaaataagcaacctaacactacttgacagagaagaatcggaggatgtggataatggaccaagtgcatgataaattcttgtagaaccaggagttgattaaaactcctcatttaaaaacttgcttattttcacaaagaggcaccactgataaaaatctgaatgagctacatcaagattcatttcagaaccattcaaaatcataagggccattagaaatgacacagataacttgaaaaatgttttataaaggtaaatatatgtttaccatacaacctggcaatctcactgctaggtatttatctaaaagaaataaaatatgtgtactcccaaaaaactgtatatgaatgtttgtatcagctttattcataattgccaaaaaatggaaataacccaaccttcaattggcaaatggataaacaaactgtggtgcatccatacaacaggatactactcagcaattaaatgggaaaaacacagactacagatgcatgtaa

SEQ ID NO: 495751 - DNA, 621 bp, Homo sapiens
atgataaggtaactcaacagtaaattgtatccatgccttgttttatatactaatactttaacctataaaattggcttcttcttagttatttcattttcctttaactttttaaaatgctttagatttactaaataagcawcctaacactacttgacagagaagaatcggaggatgtggataatggaccaagtgcatgataaattcttgtagaaccaggagttgattaaaactcctcatttaaaaacttgcttattttcacaaagaggcaccactgataaaaatctgaatgagctacatcaagattcatttcagaaccattcaaaatcataagggccattagaaatgacacagataacttgaaaaatgttttataaaggtaaatatatgtttaccatacaacctggcaatctcactgctaggtatttatctaaaagaaataaaatatgtgtactcccaaaaaactgtatatgaatgtttgtatcagctttattcataattgccaaaaaatggaaataacccaaccttcaattggcaaatggataaacaaactgtggtgcatccatacaacaggatactactcagcaattaaatgggaaaaacacagactacagatgcatgtaa

SEQ ID NO: 495752 - DNA, 556 bp, Homo sapiens
tctattagtattaaaatatttgtataagaatatttggggtcagagagcattctggaatttgtctcccatcattggctaggtcacgtatttatatgcagatatatttgcaattcatacccagatacaaatatgaacatcaaatttagacgtgatggcaatgagtgaaaagtaytttgtgacttctgattcactcaagtttcaatccctgttttaaggctgagtgcttcatattctagtagaggtgaaacatgtagccaagagatttcttgaataggaaagaatatgcatgggctaccatacctcatatcaggcccaaaggtaccttagaatgtgcaagaaaaagcaatgctgatgggctaaagaaaacaggggaaattagaagaatagagtttggggacacagtgagatggcaaggagagagttataacagacaaacttcagaaaagttaggaagcagtgaaagagaaaataaataagataggataaaggaaagaatccttgactccataaaaagtttctggatgggatttttaaaatgtccaggcagtgagggata

SEQ ID NO: 495753 - DNA, 556 bp, Homo sapiens
tctattagtattaaaatatttgtataagaatatttggggtcagagagcattctggaatttgtctcccatcattggctaggtcacgtatttatatgcagatatatttgcaattcatacccagatacaaatatgaacatcaaatttagacgtgatggcaatgagtgaaaagtattttgtgacttctgattcactcaagtttcaatccctgttttaaggctgagtgcttcatattctagtagaggtgaaacatgtagccaagagatttcttgaataggaaagaatatgcatgggctaccatacctcatatcaggcccaaaggtaccttagaatgtgcaagaaaaagcaatgctgatgggctaaagaaaacaggggaaattagaagaatagagtttggggacacagtgagatggcaaggagagagttrtaacagacaaacttcagaaaagttaggaagcagtgaaagagaaaataaataagataggataaaggaaagaatccttgactccataaaaagtttctggatgggatttttaaaatgtccaggcagtgagggata

SEQ ID NO: 495754 - DNA, 435 bp, Homo sapiens
ccactcgtttacactagactatttctgctattctctcagcctacatttccagtgcctccaacctccataatcacccgtcaaaattatattcacctttttgtgtgtccattagcgttctctacgataaataatagaaaatgagtcaagttgatttaagcaaaatgaggtgaaaggagaggctcgaaaatgaggctcagggaatgagcaggaactgatagaacctaagcagccagaaccacagccaagaccagacaacaggaagggtacgctgaggatacacacggctgtgactgcaggacccaggtatcgctggcaccaccacttytccatgcctccacctgcactgccaccactgtggctgccagtggtggggatgtttcacttcacccacttctttgcatcatttgcagagcatctggttgagtgtggatcacg

SEQ ID NO: 495755 - DNA, 555 bp, Homo sapiens
taaacttagagctacaatcttcaaggatgtggtaccaatgaaaggaaattcatccttttataattttgggaataaaatccaacaggaccttttaaaactatcccaaagtaatacttctaaaagtactgatttattaaaatgtcatatacttaggttacaatagttagatgtttttctttttagtcatatatttctggattatttgtttcccaagmcttttcatcattattggctgttgtatagtatatcaccataaaagttgtaccagatcaaataattttccagtattagatgcatagctgttcttttaaatttttgaaatattatataagattacaaaaagtttacatacaaaaacccccacacagcaaaactctatgtgtacacaaatgggaatgaaacaaagatattagttcactctttatctaaaaagcaaacagtaagaagccctttcttaacatctcaccagcattgtttgaatcatacaaagtaaaggttatcaaaatcagaaatttgaaagaggaagagaaattaaagagaactgagctcaataaa

SEQ ID NO: 495756 - DNA, 649 bp, Homo sapiens
ggatatcgcttcagtgtacgtcaataatggtcttttaaaatcctaaacttcaaaattaggctgatgtatttatttacttggtcccaggaagagaacaacttcaggccatactatgtgatggccatatctataaaaacttatgtcatgaacaggtccccagaaacaaagtaggagcaaaaagctgagccatgcatgccaattcctctcccgaactcatcaatttggtaatttatttcaactccttgaaaggaataggatgcagcctatgaccaggaactattaaggaatagcatttcttgtggatactataggagtatggaaaacagtgtaccacaaatatgtatgtagaaaatcctaaatgttagtgtaattacttttatctggaaaccccagtacatccacatcagcctttaaacatcaccagatataagcatggtgccactatagcttaattgattgatcttctagatttcagcacgaaagcagttctctttgctcagctactatcaaatcygcactatcaaatgtttcaaacactcttggtagccttccactgccatcatttataagtaaaaatgagaaaaaacatgttttctactccttgagtaaatgaaaattaaccagtcttttctcaaaagaggataatttg

SEQ ID NO: 495757 - DNA, 557 bp, Homo sapiens
ggccccacctccaacactggaaattacaatttaacatgagatttgaatgggcacacagagccaaagcatattaacatacttgacttttaacaatgaatagagcttactgagaagtaactctgttacttctgttaacaatgagacccttaacaatgaatagagcttgctgagaagtggtgggacccactatttgttgaagagaaataaattagacttatacttgagtttttgtccatgtgtacaattccatttgatttgttttacttaaattgttatatacatatatacatatgtcagcttatatatactatatatttcagcttatatacatatatatatataatatatatttaagcttcttctgagaaagcaatctcaaacctacagagaatcactacaaagaatttaatgagataaagttaataccacttatatttaggccctgaaagaaagagattgtttttatttgtctgtcttgttaatcataatgttcrtagtgaaacaagcaacaaaacatagattcagttttataaagatgctgactaaagaaagggaaa

SEQ ID NO: 495758 - DNA, 409 bp, Homo sapiens
tgctcttactggaagctagtctgtctatattaccttcacacatggtttcttaaaagtcattttctctattaaaaatctgcaaaatatcttgaaggaactttaaagaagtagaattgttatttaaataccacatggctcttaaattcacaaacagttactattctgagttcaaattacataggcactgttatatacaaaaaaaatagcatgawggaattccatctatacaatgcatacctggttatgtatacatggaactatggactagatgaggaaattgatactcttgttattccaaccaactatgaaaaacatcctacattttaaatgtaaaactggggcccatgggctgtctttaaaaaaaaaaaaagttaggatattggaggactgtgtgaagatttttgaaact

SEQ ID NO: 495759 - DNA, 409 bp, Homo sapiens
tgctcttactggaagctagtctgtctatattaccttcacacatggtttcttaaaagtcattttctctattaaaaatctgcaaaatatcttgaaggaactttaaagaagtagaattgttatttaaataccacatggctcttaaattcacaaacagttactattctgagttcaaattacataggcactgttatatacaaaaaaaatagcatgatggaattccatstatacaatgcatacctggttatgtatacatggaactatggactagatgaggaaattgatactcttgttattccaaccaactatgaaaaacatcctacattttaaatgtaaaactggggcccatgggctgtctttaaaaaaaaaaaaagttaggatattggaggactgtgtgaagatttttgaaact

SEQ ID NO: 495760 - DNA, 601 bp, Homo sapiens
agtttctccttactaaaatccactagttttctaaaagtgtaggttttaaaattagtgaggtcatagcatttttttttatgtagwgcttcttgtcatgatggggaattttaagtggtatttggaaggcccattattgcctttttctcaccaggtttaagtgtatctccattttaatgactttttctgatatatttgttatgtcaaaccccagcacatgatagtatcctccctttactttataccaagatacccagttccttcattcccaaaagattattcaacattaaaccggatgcattcttttgtaacctataactgaattttatcctcttgggtacaaaaattaaaaacaaaaagtctctgacacctcttactgctttctttgtgccccaacaaccaaaaaatgcataaaaatttagattttcttttcaatttctgaataaagaactcaaactccagtttttgttcgttactttctttttaattatttagtaagactctctttgaaggtacaataaaacctctattattaagactgcatattaactcactccacaagatcttttaagcccatgacttttatcatttatcctgagtttcc

SEQ ID NO: 495761 - DNA, 632 bp, Homo sapiens
ccaaaaaccttcacaaaaccaccaaatacttggctagcattgagtctattagagatttttaaaagtctgaaaacaaattgttatgttaaaagaaaaagtcttcaaaccatggctgacctatcaactgaccaataactttcctcacggagtatttacatcactcattctccagaactagcaacttccctaatcaaacagcatttccccaatgcttaggaatggcccagtgtattgctttgccttccttgaaacagggatgcactatgtctggcytggccaactatccaaaccacttttctatatatcaaggatccaaaataattccagcagacactaaagtgcaatgtcaatttgcctattcccatctcacatatcttcctaggaaattgagatcaacacagaatacatgatatttttgctcaaacatggaccttggcagatgtctcagaaatgcaggaatggatataccgctagctatagtgctaaatgaaacatctttcatattggtcattggtatacaattataaaatgaataataaagacaaaggaggtttatgtttgggattatagtttgaacctttttgaaaagccttctagatttaagaatatagtgaattcaaacaggtagtcaa

SEQ ID NO: 495762 - DNA, 634 bp, Homo sapiens
gccagtaggcaccttctgaagagacttagaataattctgattttatactaattttatcatctgcatctggctttgtatcctaagttggataaaatacataactccatggtgtacttatgttcttttttaaaaaaatttagtaatttaaactaattttgagaaatatgcaaatgagtcaatgatgcaataattttatcaatatgaagtctcatatttcacattaatgaagatttgtaaycctggtgatatccctttcctaaaaaccatcaccgtattgtcatccttatcatcatcaggcatgcatttttcgagaggaaaacaatagaataatagcaaaacttgaagagacagtgtctgctttgtaatattttaagttatttgatcttggtgaactctgtccttcctgccatcctgactgtggcctgttttatgctttcctccaaattcctcacctgcttagcaaatgtgtccaatcttttaaggaaagactttgtagtttatccaggcacatgccattctgttgaggttgggggtggggatcctcaacatttatgttttagagatgataggataattttgataaatattttcaaattttttacagtgatacacttctgtggaaaatcctgtcaca

SEQ ID NO: 495763 - DNA, 583 bp, Homo sapiens
accagtttcaagaaattattataaaaataaaatttaaaactgttactcatagagatttcacagggtactttataattttataacatcattttattttttagggttgttttgcaggcagtagtatatggtcttgctctgtcacccaggctggagtgcagtgacatgaacacggctcacttcagctcgaccttctgggtccaagcaatcctcctgcctcagtcgcccatgtagctgagaccataggcacacgccaccacacttggctaatttttttgttagagacaaatctcactttgttgcccagtctggtcttgaactcctgggctcaagcaatcctccractttggcctcacaaagtgctgagattacaagtgtgagccactgaacccagcttaatataaattttttataaagcaaatattataaaccatgaagaaaatgcaactaagtcaaaatgtaaaacttccttatgataaaaattaaaagatgatggatggtacagtactttggaagataatttggcagcttcttataaaactaaacatacttacccaaagatccagcaataattcttcttgatatt

SEQ ID NO: 495764 - DNA, 583 bp, Homo sapiens
accagtttcaagaaattattataaaaataaaatttaaaactgttactcatagagatttcacagggtactttataattttataacatcattttattttttagggttgttttgcaggcagtagtatatggtcttgctctgtcacccaggctggagtgcagtgacatgaacacggctcacttcagctcgaccttctgggtccaagcaatcctcctgcctcagtcgcccatgtagctgagaccataggcacacgccaccacacttggctaatttttttgttagagacaaatctcactttgttgcccagtctggtcttgaactcctgggctcaagcaatcctccaactttggcctcacaaagtgctgagattacaagtgtgagccactgmacccagcttaatataaattttttataaagcaaatattataaaccatgaagaaaatgcaactaagtcaaaatgtaaaacttccttatgataaaaattaaaagatgatggatggtacagtactttggaagataatttggcagcttcttataaaactaaacatacttacccaaagatccagcaataattcttcttgatatt

SEQ ID NO: 495765 - DNA, 354 bp, Homo sapiens
gaaactcatctgggtgcacttcattactaaggaatccaggcctgctcagggttcagcactgtacttacttatatcaggagtctggaaagatttaggtgtcatttgcttgttaataccttgtttaaataaggraaaaaaaagaaacaacagaaccatttggtttctgctctgtcctgactcaaaacttgtgtttcaatagcaaagattcagtgagacctagctctagagggtctcatttagatcttacgctagcacgtctagggtgtggccaggatgtttgaatttttaaaatctccacaggtgattcaaatatgtgccaaaggcttaaaagttctgcctaaaatcacttgagaa

SEQ ID NO: 495766 - DNA, 671 bp, Homo sapiens
gctgcaagcgaaactcatctgggtgcacttcattactaaggaatccaggcctgctcagggttcagcactgtacttacttatatcaggagtctggaaagatttaggtgtcatttgcttgttaataccttgtttaaataagggaaaaaaaagaaacaacagaaccatttggtttctgctctgtcctgactcaaaacttgtgtttcaatagcaaagattcagtgagacctagctctagagggtctcatttagatcttacgctagcacgtctagggtgtggccaggatgtttgaatttttaaaatctccacaggtgattcaaatatgygccaaaggcttaaaagttctgcctaaaatcacttgagaaggttgtcctaaggtgtgctatcttgtcttcttttccagggctgtctggtaaaggagtatgcagagagtactgtcactcaccagactgcactccttcatttcacagtcacttttgaaaccctcctatgtgcaggtattgtgccaagtgttgggagtatccagagcccttgctctcctggagtctatagtctactatctttctcttacactagggcagtgaataaaagaggtctggatttctacttactcctaggtgtgaatctgtgctctgctacttaataataagccatcaaagctctgggaccttgg

SEQ ID NO: 495767 - DNA, 602 bp, Homo sapiens
catctttctctgcttatgaatagtctctcattttaaggaatcatgtgattatggtgggcccacccagataatccaggataatctctcccatcacaagaagcttaattttaatcacatctgcaaagtactttttgccatgtaaggtgatatattcacaggttcctgagtgtagggcacaaacatctttatgatggctatcaatctgctgaacacatgtatatatgtcttatttctttttactagattgtaaactccttggagcctcaaatctgtgtccagtgtattgttgtattccgcacagaatctatccaagtctactgcttacaacaaaggtttagatcacagcatttgctgaatgcgtcagaagaactgaagcaatttcraagactcattcgagaaaatggcatactcgtgggactttaaaaatccctgaaagaatgatttttgaaatatttctaaatctactgagaaattcctgattcctgaacatttaaataattttataagtatattattacaaaaattattgtttatttttggtgcttgtacatgactatagttatgtaaccttatcacatattccatgatgctttgatggtgtt

SEQ ID NO: 495768 - DNA, 628 bp, Homo sapiens
ggaagaggataaaattaacaccttctatccacttcacaaaattgtgtaaataatgcgtaaaaaagtttatatttgtgaatttagataatgtcatgcattttactgtctttaaattcatgctatcttctacaataaaataaaataaaataatactctatgctcttaacccttgtttgattgttcaaattacttctcccacatacacacgcagatcaaggaggcttcctctgaaggyacatctaaagtgcacctggattgtagctccatcttttgctttattatgcttttcagcacttacagtacatgacattatatcatatttttatgtgtttacaagtttatatcatgttgctgtttttggaagtcgagctcctatagggctgtgctcttcatttctgtatcctcagtgctttgtctagggcatatagaagaggcttaaaaatatttgtggaattaatacattaatcgaataaataaccattgttgaattctctgtctgcctctggttctattcttgagcccaagtgaagtattttgcagaaatatcagtatggactaaggtggcaaataattctacagtcagccagcgttcaaattctatctaccagttccatctccaactgacaag

SEQ ID NO: 495769 - DNA, 601 bp, Homo sapiens
ttttgcttccaggttgcttgtatactcctttcgctttaaatttgtctcaatgctgacttcatctatatgttaaaaaatattttggaaggggaaaggggagcaccaactctttccacgccccattttccatcttgttcccagccaacttacagtggtactggtgccatttcagtggaaacagatgtttcctcttcctccaatgtttagtgttgctacaagatctgggtctttttttatatgttatgacatttccccaggaaggcttccctagacatctcagagcattaaacatatagcattaaaatatagctttgcaactgggctgtttcactgaacgtaagcactttgagatcataatttatttcattgtattattacttttaaaatstctttccctacatatattgcagagctcagcttatcatagtttcttagtaaatattttggtgaatgtatgaatgcgtcaatttttgaaaaagagaatggggtgtgaacattttttaagagttcagtaaagctctttgttccctgatcgtgggatttttttttctcttgtttggaagattggggttgaggaaaagggtaaactccagttgtctat

SEQ ID NO: 495770 - DNA, 601 bp, Homo sapiens
ttttgcttccaggttgcttgtatactcctttcgctttaaatttgtctcaatgctgacttcatctatatgttaaaaaatattttggaaggggaaaggggagcaccaactctttccacgccccattttccatcttgttcccagccaacttacagtggtactggtgccatttcagtggaaacagatgtttcctcttcctccaatgtttagtgttgctacaagatctgggtctttttttatatgttatgacatttccccaggaaggcttccctagacatctcagagcattaaacatatagcattaaaatatagctttgcaactgggctgtttcactgaacgtaagcactttgagatcataatttatttcattgtattattacttttaaaatgtctttccctacatatattscagagctcagcttatcatagtttcttagtaaatattttggtgaatgtatgaatgcgtcaatttttgaaaaagagaatggggtgtgaacattttttaagagttcagtaaagctctttgttccctgatcgtgggatttttttttctcttgtttggaagattggggttgaggaaaagggtaaactccagttgtctat

SEQ ID NO: 495771 - DNA, 601 bp, Homo sapiens
ttttgcttccaggttgcttgtatactcctttcgctttaaatttgtctcaatgctgacttcatctatatgttaaaaaatattttggaaggggaaaggggagcaccaactctttccacgccccattttccatcttgttcccagccaacttacagtggtactggtgccatttcagtggaaacagatgtttcctcttcctccaatgtttagtgttgctacaagatctgggtctttttttatatgttatgacatttccccaggaaggcttccctagacatctcagagcattaaacatatagcattaaaatatagctttgcaactgggctgtttcactgaacgtaagcactttgagatcataatttatttcattgtattattacttttaaaatgtctttccctacatatattgcagagctcagcttatcatagtttcttagtaaatattttggtgaatgtatgaatgcgtcaatttttsaaaaagagaatggggtgtgaacattttttaagagttcagtaaagctctttgttccctgatcgtgggatttttttttctcttgtttggaagattggggttgaggaaaagggtaaactccagttgtctat

SEQ ID NO: 495772 - DNA, 601 bp, Homo sapiens
ttttgcttccaggttgcttgtatactcctttcgctttaaatttgtctcaatgctgacttcatctatatgttaaaaaatattttggaaggggaaaggggagcaccaactctttccacgccccattttccatcttgttcccagccaacttacagtggtactggtgccatttcagtggaaacagatgtttcctcttcctccaatgtttagtgttgctacaagatctgggtctttttttatatgttatgacatttccccaggaaggcttccctagacatctcagagcattaaacatatagcattaaaatatagctttgcaactgggctgtttcactgaacgtaagcactttgagatcataatttatttcattgtattattacttttaaaatgtctttccctacatatattgcagagctcagcttatcatagtttcttagtaaatattttggtgaatgtatgaatgcgtcaatttttgaaaaagagaatggggtgtgaacattttttaagagttcagtaaagctctttgtwccctgatcgtgggatttttttttctcttgtttggaagattggggttgaggaaaagggtaaactccagttgtctat

SEQ ID NO: 495773 - DNA, 611 bp, Homo sapiens
agttagagctcatgttcacttggaggaaaggaaactgaaagctgtagaaggaaattctcatctctttggctttgggcctgggactaagggcaattcccccaaaaaatgtagtgcagagcatacaatctttctggtgctgagaatcagaaaagtgaataggaaactataaagggggaatcctagaagagatagagccagacaattgtttccacaaaagccctctatccacattgctggttgatctccacccatgcatgggaccaactcaaggcagctcaaccaaagacaaaaactgaaatgagatgagagctgctaccatgaagctgccagagtatgaatagagaagcaggcacactttggtagagagagcatacttgcctaagaagaaaagrtaggcaactcaacacttgtgttcaaagagaaaaaggtttgcttctctggtctggagacttattataatagagaagtgaagagggcgcaaatactgaagagaatgagggaatcccaggagggaaagaaccagagaagggctccgttaactttctctacccatatcaatgagagaaccctaaaacatgcatgcatagaatagactaaaagcaaagagacta

SEQ ID NO: 495774 - DNA, 547 bp, Homo sapiens
ttctcattaggcaaatcacaatgtgtcactactcttttaaaacattttgatagccttttatggcctaaagaaaagtctcaaatcctcatcatgatatgtagaactcaccacataaaagttccactcgtttttgkttttttttaagtacaatattatttcaaatcgacgtaataatgagtcaaatgatctcctgaaactctctcattacttctttcatgcttcttacattaaaaccctccttcaattggtctgtttctctgtctatctagatcgggaggtctttaaaagcagagaaattgttttattaatctccacatgcacagtgcctgccctagctcctagaacctaaaaggagatcactaaatgaatgaataaatgaactataaacctagaggatactataaatcgctgaaaagccaagaatcacggtattctaatatcataccctttggctaaaaagtatgctattttggaagaagatagaaagcaaagaaagaatagtttgaaatcagacctggaggcttgtgctgagtgatttcacacacat

SEQ ID NO: 495775 - DNA, 547 bp, Homo sapiens
ttctcattaggcaaatcacaatgtgtcactactcttttaaaacattttgatagccttttatggcctaaagaaaagtctcaaatcctcatcatgatatgtagaactcaccacataaaagttccactcgtttttggttttttttaagtacartattatttcaaatcgacgtaataatgagtcaaatgatctcctgaaactctctcattacttctttcatgcttcttacattaaaaccctccttcaattggtctgtttctctgtctatctagatcgggaggtctttaaaagcagagaaattgttttattaatctccacatgcacagtgcctgccctagctcctagaacctaaaaggagatcactaaatgaatgaataaatgaactataaacctagaggatactataaatcgctgaaaagccaagaatcacggtattctaatatcataccctttggctaaaaagtatgctattttggaagaagatagaaagcaaagaaagaatagtttgaaatcagacctggaggcttgtgctgagtgatttcacacacat

SEQ ID NO: 495776 - DNA, 547 bp, Homo sapiens
ttctcattaggcaaatcacaatgtgtcactactcttttaaaacattttgatagccttttatggcctaaagaaaagtctcaaatcctcatcatgatatgtagaactcaccacataaaagttccactcgtttttggttttttttaagtacaatattatttcaaatcracgtaataatgagtcaaatgatctcctgaaactctctcattacttctttcatgcttcttacattaaaaccctccttcaattggtctgtttctctgtctatctagatcgggaggtctttaaaagcagagaaattgttttattaatctccacatgcacagtgcctgccctagctcctagaacctaaaaggagatcactaaatgaatgaataaatgaactataaacctagaggatactataaatcgctgaaaagccaagaatcacggtattctaatatcataccctttggctaaaaagtatgctattttggaagaagatagaaagcaaagaaagaatagtttgaaatcagacctggaggcttgtgctgagtgatttcacacacat

SEQ ID NO: 495777 - DNA, 547 bp, Homo sapiens
ttctcattaggcaaatcacaatgtgtcactactcttttaaaacattttgatagccttttatggcctaaagaaaagtctcaaatcctcatcatgatatgtagaactcaccacataaaagttccactcgtttttggttttttttaagtacaatattatttcaaatcgacgtaataatgagtcaaatgatctcctgaaactctctcattacttctttcatgcttcttacattaaaaccctccttcaattggtctgtttctctgtctatctagatcgggaggtctttaaaagcagagaaattgttttattaatctccacatgcacagtgcctgccctagctcctagaacctaaaaggagatcactaaatgaatgaataaatgaactataaacctagaggatactataaatcrctgaaaagccaagaatcacggtattctaatatcataccctttggctaaaaagtatgctattttggaagaagatagaaagcaaagaaagaatagtttgaaatcagacctggaggcttgtgctgagtgatttcacacacat

SEQ ID NO: 495778 - DNA, 641 bp, Homo sapiens
tttgctagattataaaccaaactggccggtgtcttatctttgaggttatctttttccactgaacagaaacttcttatttactacacaaaaaatctacaggataatatgcaattccactaagcctgaaatctttaatcagagttttaatatttaaatctgtttatcatcttaaaggcaaacttccccttatcagtgtttttttctttgagacasagtctcactctatcacctacgctggagtgcagttgcaaaatctcagctcactgcaacctccacctcccaggttcaagccatccaccagtctcagcagcccaagtatctaggattataggcatgcaccaccccacccagctaatttttgtattttcactaaagacggggtttcaccatgttgcccaagctggtctcaaacccttggactcaagcaatcctcccgcttccgcctccctaagtgttgggattacaggagtgagtcaccatgcccggccatgaatcaatttttaaatatcaatttttttattagtcaccttggcccttgtgtgcagataattaaaactagcatatagaaaatagaaattttattctataaattgcatcatccctgttagctttctaattcaagtcccataggaagacacttc

SEQ ID NO: 495779 - DNA, 641 bp, Homo sapiens
tttgctagattataaaccaaactggccggtgtcttatctttgaggttatctttttccactgaacagaaacttcttatttactacacaaaaaatctacaggataatatgcaattccactaagcctgaaatctttaatcagagttttaatatttaaatctgtttatcatcttaaaggcaaacttccccttatcagtgtttttttctttgagacagagtctcactctatcacctacgctggagtgcagttgcaaaatctcagctcactgcaacctccacctcccaggttcaagccwtccaccagtctcagcagcccaagtatctaggattataggcatgcaccaccccacccagctaatttttgtattttcactaaagacggggtttcaccatgttgcccaagctggtctcaaacccttggactcaagcaatcctcccgcttccgcctccctaagtgttgggattacaggagtgagtcaccatgcccggccatgaatcaatttttaaatatcaatttttttattagtcaccttggcccttgtgtgcagataattaaaactagcatatagaaaatagaaattttattctataaattgcatcatccctgttagctttctaattcaagtcccataggaagacacttc

SEQ ID NO: 495780 - DNA, 641 bp, Homo sapiens
tttgctagattataaaccaaactggccggtgtcttatctttgaggttatctttttccactgaacagaaacttcttatttactacacaaaaaatctacaggataatatgcaattccactaagcctgaaatctttaatcagagttttaatatttaaatctgtttatcatcttaaaggcaaacttccccttatcagtgtttttttctttgagacagagtctcactctatcacctacgctggagtgcagttgcaaaatctcagctcactgcaacctccacctcccaggttcaagccatccaccagtctcagcmgcccaagtatctaggattataggcatgcaccaccccacccagctaatttttgtattttcactaaagacggggtttcaccatgttgcccaagctggtctcaaacccttggactcaagcaatcctcccgcttccgcctccctaagtgttgggattacaggagtgagtcaccatgcccggccatgaatcaatttttaaatatcaatttttttattagtcaccttggcccttgtgtgcagataattaaaactagcatatagaaaatagaaattttattctataaattgcatcatccctgttagctttctaattcaagtcccataggaagacacttc

SEQ ID NO: 495781 - DNA, 641 bp, Homo sapiens
tttgctagattataaaccaaactggccggtgtcttatctttgaggttatctttttccactgaacagaaacttcttatttactacacaaaaaatctacaggataatatgcaattccactaagcctgaaatctttaatcagagttttaatatttaaatctgtttatcatcttaaaggcaaacttccccttatcagtgtttttttctttgagacagagtctcactctatcacctacgctggagtgcagttgcaaaatctcagctcactgcaacctccacctcccaggttcaagccatccaccagtctcagcagcccaagtatctrggattataggcatgcaccaccccacccagctaatttttgtattttcactaaagacggggtttcaccatgttgcccaagctggtctcaaacccttggactcaagcaatcctcccgcttccgcctccctaagtgttgggattacaggagtgagtcaccatgcccggccatgaatcaatttttaaatatcaatttttttattagtcaccttggcccttgtgtgcagataattaaaactagcatatagaaaatagaaattttattctataaattgcatcatccctgttagctttctaattcaagtcccataggaagacacttc

SEQ ID NO: 495782 - DNA, 395 bp, Homo sapiens
gtgcccacccagattaagggtgggtctgcatttcccaaccccctgactcaaatgttaatctcctttggcaatgccctcacagacacacccaggatcagtactttgtatccttcaatccagtcaagttgatactcagcattaaccatcacactgacaaaattaattgcaagtgaggatccatagaagaatgtatccatggaatcaaagtgcattttattaattatggttaaatattttaatgatgatatacccctcttgcaactctagatgttgaattcatctatgtgtgggggagggagtgtgtacagaatgcattcgaatatgaaaagcraaactaaaagaaacaaggagaaattgttggagacaatactttttgaactcctaaacatctcagt

SEQ ID NO: 495783 - DNA, 576 bp, Homo sapiens
gtgcccacccagattaagggtgggtctgcatttcccaaccccctgactcaaatgttaatctcctttggcaatgccctcacagacacacccaggatcagtactttgtatccttcaatccagtcaagttgatactcagcattaaccatcacactgacaaaattaattgcaagtgaggatccatagaagaatgtatccatggaatcaaagtgcattttattaattatggttaaatattttaatgatgatatacccctcttgcaactctagatgttgaattcatctatgtgtgggggagggagtgtgtacagaatgcattcgaatatgaaaagcaaaactaaaagaaacaaggagaaattgttggagacaatactttttgaactcctaaacayctcagtctctcagaccaaacaagacaaaaataagtactttaaaagattgtccaatatctatgtttgtgctctgtaaaatgaggaattggtatgaaataatttcaagtatccccataagttctaaaattctaatttattaaaggtatttggaagtttttgagtaacctaaaataaagtttctcccaaa

SEQ ID NO: 495784 - DNA, 677 bp, Homo sapiens
ctgattaaacggtgcccattcagattaagtttgggtctgccttccccagtccactgactcaaatgttaatctcctttggcaacaccctcacagacacacccaggattaatactttgcatcctttgatccaatcaagttgacatttagtattaaccatcacatgtacctataccatattagtatactggtgttttcttgaagagagtgtatgcaaaatgtttcattttgttttgttttttctcactgccagttccttaaaagagaaaatctctgcasggatgtgcattaccatatcccaaccgttggaaaaagagcttagaagcgctttttgatgacctccagaggctatagaaaaaaatgcatttaagagatgaatttattattctctagggagagtggactttgttttttctccaatcccttctcttgcagagaccccatgggactagaactttgcgtatccatcctaccctcttcacacacccacacacacactcacacacagagtttttctaaaattttttaaatgcattaaattttttttcctagctgcctttgatgcgtggacttcagattgcatgaactacagtaagtcttttttagataggaaaacaaaaccgaaaacatgaagagagtgaggagaagcgagggagagagaagaaggcagaggacaaatc

SEQ ID NO: 495785 - DNA, 358 bp, Homo sapiens
aagccgtctgagtaccctggtgcagcttagcacctgcctgtgacttcatttccctataatccmacaaataaaatgaatgcttggcaaagtaaagagctccagaactctgtgtaaaggattatggccaacattcattcaatttggttatttccccaactaaacctgctgttaaatattctgcttatataagtatgataaaatatgagtggaggtaggacagatggatgggtgacgaatgaatggatggatggatcgatggatagatggatggatggataaatacaaacacggagacaaacagactgatcttgctagaatcctaataatatgcaaccaaaaacaaatgggaaccattttc

SEQ ID NO: 495786 - DNA, 258 bp, Homo sapiens
gaaaaaacatatatactaattaagatgatagttgctataaagaaaaataagtcgggacaagggtctaaatagtcatgtgtacatctctgtggrtgcgagtgtgtgtgctatttttcataggttgtcaggaaggaaggcctctatgagaaagcaacatttgaatgtaagtgtggggacaggagtgttacaaccagaaagaagcaattatagatcttgtgagacaagcttatctagatcttcctgcaacttacgattaac

SEQ ID NO: 495787 - DNA, 370 bp, Homo sapiens
tgccgagataagctgtgtctcctcttgttctgtgtggctcggttctttggcttcagaatttttgttgtgagtctttacccagttaagtgaggagtttactctatctgggtatgtgtggtgtatcagtgggtgtggcttcatttcagccagtaatcctcctgaaacactatagtagggtgggatgaatattccggttttacagatggagaaacagatggacttaatgtcattatgtatcttgcccaaagtcactcaggtaataagtggtagaagcagatttcaagctcagactgctgactccaactcttcacttacaataacctcactgtatgtgagsaaaatattgcttgaagaaatagtcctctctact

SEQ ID NO: 495788 - DNA, 640 bp, Homo sapiens
ttctcactccaaaatattgagttctcaatccaccgatttattttctgggtggacagttgcttttgttgttggttatttttcttacgtgctcgtgcatgcaaactataatatgtttaagttaagaagaggtaatacatcagtattcaaccaatccaacccacattaaatctcccccaattgagacaagaggaaaggaaagaaaaaaaggagacataaaggagaatccgaagggactacaaggaaagggaatgaagatggaggaggcaggaaaaatggaaggactgagatgcaaatacatttggacagactttcagttgggtttagaatcactgctaaatactgattacacactctacatattgaacttgttattcatagcccagaaaaatattttacctcstctaattcttgaatgtctttacgtagggaatatatgagatgtgtgcctgtgtaaaatgtttgaaagatacatattacagtatttgaagttaatgtcaccccgaaatggccatgtcgaactccattctttaccaggttttgaatcctatttctcatctgcaaaactgggaatttaaaaatgcagcattactgtgagccttaaatacaattgtcacatgggaggtgcacaagaattgttaat

SEQ ID NO: 495789 - DNA, 493 bp, Homo sapiens
ttattttctggttgaatttctgtttgtcagttttccatgcagtacttatggcatagaatgccacggaattccccaggtgtttttacactggggcatgctggaaaaagacggtcatctcctgagtttattttactcatcatcacattaacttgtattttttcaagttgcatcatatgaagattcatgttgaggctccttaatcttatcacatatgcttctgttaaataatattgccttcatgttgaacttttgcagattattttttagcttaattcaagattacaatgattcttamtacatttcaggcaaaaataatttacctatatcctatgctatcaattttttaatgatttttttaatgggcaccaacttgtagcagtagggaacattctcaactttttccctggaatttgagtagtctgaaatgctaaccattatgtaattcatgtttgccttcatctctactcattaaaaatgaagttttaaaaatatt

SEQ ID NO: 495790 - DNA, 493 bp, Homo sapiens
ttattttctggttgaatttctgtttgtcagttttccatgcagtacttatggcatagaatgccacggaattccccaggtgtttttacactggggcatgctggaaaaagacggtcatctcctgagtttattttactcatcatcacattaacttgtattttttcaagttgcatcatatgaagattcatgttgaggctccttaatcttatcacatatgcttctgttaaataatattgccttcatgttgaacttttgcagattattttttagcttaattcaagattacaatgattcttactacatttcaggcaaaaataatttacctatatcctatgctatcaattttttaatgatttttttaatgggcaccaacttgtagcagtagggaacattctcaactttttccctggaatttgagtagtctgaaatgctaaccattatgtaattcatgtttgcyttcatctctactcattaaaaatgaagttttaaaaatatt

SEQ ID NO: 495791 - DNA, 644 bp, Homo sapiens
ctgggcaaactgaagcaccctctttacaggtccttttcttccatgaagttctattcaattccttcaattgctggatagaagaacacagcccggtgtacagaaacgccctctttacaggtccttttcttccatgaasttctgttcggttcctgccagaaaactactgccctcaatgtgccatgctcaagactaccctcctctgtcaaacctgactcctgctttctatctttccccacagagaacccattgcctccctttactgcctggagaattgggactgggggattggagatgggggagaatgaaaattgtagtgatcattttctctgagggatttttcccccacacactcagttcttacttattaaacggcttttgtatgtcttaggaataaaaagccattcttcctgggtgtcttcttcctgctagcaatggagctctacctggtctcgtcagcaatcacgtcattaaatctgactggcaacttgcagaggatggtggggccgagagacaacaggtcaagttttcgagggtatgtcctctgaaactcaggcaggagttcaggtagtaagaatttgaaagctatcaaaaacagaagtgggcattctccttcttgctgaatgagctactcattcaggaaagcc

SEQ ID NO: 495792 - DNA, 644 bp, Homo sapiens
ctgggcaaactgaagcaccctctttacaggtccttttcttccatgaagttctattcaattccttcaattgctggatagaagaacacagcccggtgtacagaaacgccctctttacaggtccttttcttccatgaagttctgttcggttcctgccagwaaactactgccctcaatgtgccatgctcaagactaccctcctctgtcaaacctgactcctgctttctatctttccccacagagaacccattgcctccctttactgcctggagaattgggactgggggattggagatgggggagaatgaaaattgtagtgatcattttctctgagggatttttcccccacacactcagttcttacttattaaacggcttttgtatgtcttaggaataaaaagccattcttcctgggtgtcttcttcctgctagcaatggagctctacctggtctcgtcagcaatcacgtcattaaatctgactggcaacttgcagaggatggtggggccgagagacaacaggtcaagttttcgagggtatgtcctctgaaactcaggcaggagttcaggtagtaagaatttgaaagctatcaaaaacagaagtgggcattctccttcttgctgaatgagctactcattcaggaaagcc

SEQ ID NO: 495793 - DNA, 644 bp, Homo sapiens
ctgggcaaactgaagcaccctctttacaggtccttttcttccatgaagttctattcaattccttcaattgctggatagaagaacacagcccggtgtacagaaacgccctctttacaggtccttttcttccatgaagttctgttcggttcctgccagaaaactactgccctcaatgtgccatgctcaagactaccctcctctgtcaaacctgactcctgctttctatctttccccacagagaacccattgcctccctttactgcctggagaattgggactgggggattggagatgggggagaatgaaaattgtagtgatcattttctctgagggatttttcccccacacactcagttcttacttattaaacggcttttgtatgtcttaggaataaaaagccattcttcctgggtgtcttcttcctgctagcaatggagctctacctggtctcgtcagcaatcacgtcattaaatctgactggcaacttgcagaggatggtggggccgagagacaacaggtcaagttttcgagggtatgtccyctgaaactcaggcaggagttcaggtagtaagaatttgaaagctatcaaaaacagaagtgggcattctccttcttgctgaatgagctactcattcaggaaagcc

SEQ ID NO: 495794 - DNA, 594 bp, Homo sapiens
ctattaggttggtgtaaaaatagttgtgcttttttccattaaatagtaatggcattattaaaattggcattattaaaagtaatggcaaaacggcaattacttttgcaccaacctaatattaaatttttwaaaaataaaagtcatataagagactaagcaaatccacaataaaataaataagttgaaaattagtgaatgaaataggatctccacaaacaatgctgcagaatagtttagaaacactgaaagatatttctaacatgcaatacagatcctttcatgcttcatttgagaagctggtataaatagaaaagtgaatgtacagtttcagaatctcagaccagaaaacattctagagcacaagttctaagacaaaagaaagagaggactcacactctacttgggaatgggctgatttttgctccattgagcagattgcactgttgatcaacaaggtagatctggtaagaagttgagacagagacaccacatgctgaagaatctaggctgtcggtgctttttggaatctcagaaagaggtcagggagcccttgtgactccaggaggtaaatgactttcccattgtttgctgttc

SEQ ID NO: 495795 - DNA, 594 bp, Homo sapiens
ctattaggttggtgtaaaaatagttgtgcttttttccattaaatagtaatggcattattaaaattggcattattaaaagtaatggcaaaacggcaattacttttgcaccaacctaatattaaatttttaaaaaataaaagtcatataagagactaagcaaatccacaataaaataaataagttgaaaattagtgaatgaaataggatctccacaaacaatgctgcagaatagtttagaaacactgaaagatatttctaacatgcaatacagatcctttcatgcttcatttgagaagctggtataaatagaaaagtgaatgtacagtytcagaatctcagaccagaaaacattctagagcacaagttctaagacaaaagaaagagaggactcacactctacttgggaatgggctgatttttgctccattgagcagattgcactgttgatcaacaaggtagatctggtaagaagttgagacagagacaccacatgctgaagaatctaggctgtcggtgctttttggaatctcagaaagaggtcagggagcccttgtgactccaggaggtaaatgactttcccattgtttgctgttc

SEQ ID NO: 495796 - DNA, 241 bp, Homo sapiens
tggtgtaacctgccggatcctaaggtgctggggtatgagggctctgtctttgtgtaggccgcactgatgaagaggaaatttgccaaagaagacttgagagaaaaatacagcttcacayaggctcaagaaataatattttctaaatttacaaaatttaaaaactgtagtataaatccaagtaaaaataagaaacaatattatctggaacagaaaaaacatttttgaataaaatttatgttta

SEQ ID NO: 495797 - DNA, 625 bp, Homo sapiens
tcatcctgaggctgcccttgaccacatttcctgttggattccctgtttctggattctatgacctcacttctgaattttcttctgttttgcacattctccagtagtttccaagaaagtgtgtatgtgacataaatcactgagtttctgaatgctaaaaattttgttctttcttcccacttgattgatagtctgacagaatattctagattgaaaagaattttctctcaaaatgtaaaggcttttcttcatttcttctgttagggggagtcctatgcctagtgactctgctctgccagttaccactattccttctgtttacatttttcaaaaattcgctaaaataacctattctctaatgccttctctttttttcctctttgattttgtgggtttataaatttttattttcaattttagggggtttcaagctggaaaaaaaatcaatacatgtgaccatccatcaccttattcaaaagtaagattttattttttttgctgcctgactaaattggcaaaatgatagtaataaggtggcagcaaggtaaaaacttctttttaatgatgtacctaaataactgcacaaactaacaaygacgaaacagataagttacagggctggtgcaaa

SEQ ID NO: 495798 - DNA, 529 bp, Homo sapiens
agaaaaaatataccaattccctctgggaacatgagagactaataggatttgtttaatttggaacataatccagcaacagtttagagcataaagyggaagaatgagtggaaaatagggacaaggaaacaagtaggaaataagctgctgcagtacaaacacagaagaatgacaaagtcctggataaagacagagctgggggtctgccgaaagggcattgctgaattttggagagaactatttgcctattcataggatttaaattctgacattcaaagaaaatttttaaaattttgtttaataatatttgtatgaaatttggagaataaatatattcattgtgtttcccctcccctaaatatcgttttgcatcattgggaggtgaaacagatgctcaggaagcatgactgttacttgtagtttaaaaaatgacgtatttcttggttttaaaaaagaagactagtagtatagtatgatctataaaactgtattgccaacttggaaataaatgtctctatgataaaggtaagaa

SEQ ID NO: 495799 - DNA, 378 bp, Homo sapiens
gtggacctgctgacagacatcatttgtgccctagatcaacctgtgtttatagtcaccactagccatcaatattttggccatgaaagccaataagttaatcatttgtttgtttaaactggcttggttgggtttcctatcacttacaattgaaatattaataaaagccgttcattagcccaatctatttctmtttttcctctctcttattctgactctaaatgccaaaggagcacacatgagtgagtgccatcatgatgtgcaggttgtagtgattaaacataaagagtttgccctccacatcattccccaagtttagcagctcattattcatacgttagccataactcttgcagcgcatttacccatgctaagcagctg

SEQ ID NO: 495800 - DNA, 527 bp, Homo sapiens
tggggatccaaaatcttaattttattttattgttcacagagccaaatgaaattggaaaaaaaagagagcagtttactctttattatgcccaagagaacatgtgatattagtctggggataatctcatgtgtcttaattaaacaaatattatatgaatatgcattggaggctttgactcaattctgatcgtacatgcttagcccaattttagttatatcctcacgatattctagatgttgcaaccactatcagtttcccaactaaacaacagattccatatggacacatyagttttgtagagttcacatcaccagtttttattttacaaacttaatctcttttaattaattttaagtatcaacatcatgtgctgaaggctactcatacaccaatttgaagactagcttataaaaagtctgaaatatttatatattaaattatcagaagttttcataaggttaataagttagatttgcttttatggagtgttgttcagcaaattgtgtataccaattgccaatatctct

SEQ ID NO: 495801 - DNA, 585 bp, Homo sapiens
catggtacttttttactgataagcttagagttggcttcagaatccaccccatcacattacttttagcagtcactatcgaatgactagggttagcacattagtttgaaaagctcatttatctctgcttggttggaggccaagaggtatacctattattactcatgaggtatcccttaagaaatctctgctttgtagtgctcacaaaatttctgccaaacccaggtttttttttcctttgttagtgccaccttttggcaatacactttggagtacgcttggctggagattaactagcttaaaagcatttctctgatatagcacattatttcactttttcatagtactttgaaaaattttttatttgaaggtagagaactaagcactcaataaatacttattcatttgatttgctccaatgccttacatcatcgccaatgataaatgatattcagaaagtacagttctgtacaaytcagtcctcattttaatgaaagattctaatcttttgcatttagagggaagtcaggaagttcatctttagtggtgagatgtagaatctaatgccacataattattcttatgcag

SEQ ID NO: 495802 - DNA, 562 bp, Homo sapiens
tttttatggacacaggatgtggggcaaggtgggcatgggtggttttggaaaaggcaatatttaagcaggaaaacagggatgtaagtcctcactttgggccacagtttcaggcttgagggtggggctcttgccggggacccaccctcytctgcccataatttccctgcctcctgtccctgtcacttggaggtggaatgaactaaattcagtggagtgtggtgaggggaggggaatgagtgagaagcaaggatctaggatgactctcagtttctgggtgaaccattttctgagaaaatatgcttgaagagaaaaacagatttgaagggaagatgatgggttttcagcagactgggctgttcagacaggaataatacagggtggtcacagcagtttcacatgactagatgctacgggctgataagaccctgaaaaacaggatgtgggccaagctggctaagactgactggaaccaacatgggctggatttgacctaggttccaccgagaacctcattatatgctcatttacataattacccaaccaccagtgccatgacagttcc

SEQ ID NO: 495803 - DNA, 611 bp, Homo sapiens
ctgaaaaattgggagggagagagactatgcccctagaattttacactgagctaagctgtccttcaacagactagccttctggcatgcaggaatctaagaaatggagcacacataaatatttctttaaggaaagatcacagaaagacaaaatccaacaaaccaataaataatttaaaattaagaactcagaaacataaaggctatggtggtcactttagggttcactcttgggcttctacagtctgygggtttggacaaatttataatggtatatttttaccattacagtatcatacccatccacggatttttaaaatttaataacaacattttattaggccattctcacaccactataaagaaatatctgagactgggtaatttatttaaaaaaacagtggtttaattggctcacggttctgcaggctgtacaggaagcatagtgctggcatctgctcatcttctggggaggcctcaggaaacttgcaattatggcagaaggtgaaggggaaacagacatgtcttacatgatcagagcaggagcaagggagagagggagggcaggtgctacatacatttaaccacatctcgcgacaactcactcactatca

SEQ ID NO: 495804 - DNA, 611 bp, Homo sapiens
ctgaaaaattgggagggagagagactatgcccctagaattttacactgagctaagctgtccttcaacagactagccttctggcatgcaggaatctaagaaatggagcacacataaatatttctttaaggaaagatcacagaaagacaaaatccaacaaaccaataaataatttaaaattaagaactcagaaacataaaggctatggtggtcactttagggttcactcttgggcttctacagtctgtgggtttggacaaatttataayggtatatttttaccattacagtatcatacccatccacggatttttaaaatttaataacaacattttattaggccattctcacaccactataaagaaatatctgagactgggtaatttatttaaaaaaacagtggtttaattggctcacggttctgcaggctgtacaggaagcatagtgctggcatctgctcatcttctggggaggcctcaggaaacttgcaattatggcagaaggtgaaggggaaacagacatgtcttacatgatcagagcaggagcaagggagagagggagggcaggtgctacatacatttaaccacatctcgcgacaactcactcactatca

SEQ ID NO: 495805 - DNA, 605 bp, Homo sapiens
aagctcagagaggccaggaactcaggtgtgtgaccttcgactttttaataaatagaaagcaatgaagactgcctgaggttacagatcattgagatgagttttaattacccttttggggagacacaagccaaagcgttcaacaaaactacaacccattggytctctcgagtttagaacattaatgtctcatttccatagctctctcggtcatctcttaaacacaatgtttgaattcccaaggtcattttgccatgaatttctcccaaacccttaagaaaagacaatatcagcagggaaagaggccagtccactctttcaaggaagcagttttcagagaagtatcaagacccttgtcagcactaggaaggatatgtgaatttttatgattgcctctttactctttcccacatgtgatcaatgactagaggtgaagtaagtccttctcagggtgggacaagaggcatgtctaaggcttgtttccttataattttgtctttcatttactttctgtagttctgtggccagctcataggactccagggaccttgagactgaagcacattctacaaataaagtcaaatgcagtgagtaatctgagctcagtg

SEQ ID NO: 495806 - DNA, 486 bp, Homo sapiens
gaggaaagttcagggcttggagttccacaggcctgggtctgagccactccactcccttgctggctgtatgatgctggtgtgctgcctagcctctctgagccttgggttctttaactgtaaaatgggatgacagctcttgcttattgtgatggttacaagtgaatatccctcagcacgatgcagggcgtttctccaggagtttgacttctgaaaacagcagtcaagatgggaatcctgtggtgtcaaatttctcttaggaagtgccttgtaccscccctggtgtggagtgtgcatggtaatgtgtagggaggtgtgtagggcccacgctgtatgaaaatatgtatcttataaacctgggctctgtcaggacagagatgctcaccccacagaaacccatggggctcaagagcacgttggatcagcaggttgacctgtccctatatacccaccctggagcttactcagctaaagaaacacatttggtcc

SEQ ID NO: 495807 - DNA, 486 bp, Homo sapiens
gaggaaagttcagggcttggagttccacaggcctgggtctgagccactccactcccttgctggctgtatgatgctggtgtgctgcctagcctctctgagccttgggttctttaactgtaaaatgggatgacagctcttgcttattgtgatggttacaagtgaatatccctcagcacgatgcagggcgtttctccaggagtttgacttctgaaaacagcagtcaagatgggaatcctgtggtgtcaaatttctcttaggaagtgccttgtaccccccctggtgtggagtgtgcatggtaatgtgtagggaggtgtgtagggcccasgctgtatgaaaatatgtatcttataaacctgggctctgtcaggacagagatgctcaccccacagaaacccatggggctcaagagcacgttggatcagcaggttgacctgtccctatatacccaccctggagcttactcagctaaagaaacacatttggtcc

SEQ ID NO: 495808 - DNA, 486 bp, Homo sapiens
gaggaaagttcagggcttggagttccacaggcctgggtctgagccactccactcccttgctggctgtatgatgctggtgtgctgcctagcctctctgagccttgggttctttaactgtaaaatgggatgacagctcttgcttattgtgatggttacaagtgaatatccctcagcacgatgcagggcgtttctccaggagtttgacttctgaaaacagcagtcaagatgggaatcctgtggtgtcaaatttctcttaggaagtgccttgtaccccccctggtgtggagtgtgcatggtaatgtgtagggaggtgtgtagggcccacgctgtatgaaaatatgtatcttakaaacctgggctctgtcaggacagagatgctcaccccacagaaacccatggggctcaagagcacgttggatcagcaggttgacctgtccctatatacccaccctggagcttactcagctaaagaaacacatttggtcc

SEQ ID NO: 495809 - DNA, 486 bp, Homo sapiens
gaggaaagttcagggcttggagttccacaggcctgggtctgagccactccactcccttgctggctgtatgatgctggtgtgctgcctagcctctctgagccttgggttctttaactgtaaaatgggatgacagctcttgcttattgtgatggttacaagtgaatatccctcagcacgatgcagggcgtttctccaggagtttgacttctgaaaacagcagtcaagatgggaatcctgtggtgtcaaatttctcttaggaagtgccttgtaccccccctggtgtggagtgtgcatggtaatgtgtagggaggtgtgtagggcccacgctgtatgaaaatatgtatcttataaacctgggctctgtcaggacagagatgctcaccccacagaaacccatggggctcaagagcasgttggatcagcaggttgacctgtccctatatacccaccctggagcttactcagctaaagaaacacatttggtcc

SEQ ID NO: 495810 - DNA, 535 bp, Homo sapiens
gtttatttgctgtcatatgtcttgccccttaattcaaaattcaggtattcgcatgcaaggtgcttctaggttacccaacagcactatctacgtggtcgaacctggatacctaggtgagtgtgggcctcctgggccctcatggatgctgctcatgttgtgactatatgagtttaaaaaatagaaaagaagcaatagctccacagaaaatgcttccctctggccagctctgccacttgctwtgaccatcattgcccagggcactcaccagcccttccctgtttggtgtagaaataggtagaatgagccaagccaggcaggcggcaggctcagcaaggagagaaacagaaccgggtagagtggtgaggggcttgcaccctcctggttttcataccacggctttgcccagacctgaccattgctatggacatttagaggttggggcccagtgtcagctcaattatagagggaccctaaggtgacatgacagtaggcaggtaccttagcagggaggggaggaacatgatgatgatattga

SEQ ID NO: 495811 - DNA, 627 bp, Homo sapiens
tgcccaatcttccttcggggccacatgttgcatgggcaggggctgagagacctgagaagctctcagtccrtggggatgacagtggtccatcgcagtggggtaaacatccgggtgtgattggtgctatgggagcccagaggtggggccaagcaaaggcttcacagaggagtaatgtttcaggatgggaggggctggcaaaggcctggaggtgggaactcacttgatgtgtggccaaaagagcaaagaattctgagcttggggctcactgtgtctgagtggctgataatttaatcgtttgtgtttatttaacacacatagagcacccaacagaggctggggcgcccttgcacgtttttcagtattgctgcctccagtcctcaggtgaagcctgcggggcaggggctgcaggggctgccacctgctgatgcccctgaggcggggagggtcaaggtcacagggtaagttgggggtggcctcaagaggcctggggactgtgccctgtctgcatttggaaaacagcctcagagagggaggcgccttgttcagagccaggggtcaggactgcgtctagtggttctcctgcctggggtgcagccctgtgtctgtatccagcctgtccctgctact

SEQ ID NO: 495812 - DNA, 565 bp, Homo sapiens
gctggctcccatcatttctgatgaaagtcattctcttactcttggctcaggatttggaaatgttgttgttggagctgcttctttagatgatcttgaaaatgcttattcgatttcattcttgaggccagattattgcatactgagaatttatacctgataaaagaaattgcctgtgtgaactgccacttcatcgtagttaaccagccaattcttgggagagaattccagtcttttagattgggtaatggggcatggattgttacagccagattggattttaggccctctgttgatgtggaatttaaggtccttctaactgtatcacatcaggctgggtgggattrtaggggagagaggcctgaaggggtgctgggacttggaagaaatctgaaactggctttctttttctatagctctagttagaggtgatgataacagctcacttttcatttattaaagtgttattagatggaccaagtcctttgtatacttcacttcatttggtccccattattatttttatttttacagataacctctgcgagccttaattttcagaatttgc

SEQ ID NO: 495813 - DNA, 522 bp, Homo sapiens
ctggtgcctagtctagttcagcagggaytgcactgtctgtccagttttggaatcaggcttcacttgactcatactacagtcctcactgcttctttgcctagtaaatatttacaagtgttgcttgctgtattcatttagtaaaatgggatagttcatttaaatacattggtaattttaagaggcataattacaacaaacatgcacagaaagaattaaaatgttgcacaagtaaatgcctttatttgtcttctggcatttcacttattgcctgaggtttttaaaaagcaagaaaataatgaaaatagtgattctacaaggatactttatgagcataagacgtaggttcatttacagatctcatgctctaaatacattattggatgacaaaactcgtgatctccataggtgagcagttttgtgaatcataccattttttagggcactttaacacactataggattagcgtaaggctagaattgtgaaagtgggaaactttttagttcatgtttttagatttccct

SEQ ID NO: 495814 - DNA, 522 bp, Homo sapiens
ctggtgcctagtctagttcagcagggattgcactgtctgtccagttttggaatcaggcttcacttgactcatactacagtcctcactgcttctttgcctagtaaatatttacaagtgttgcttgctgtattcatttagtaaaatgggatagttcatttaaatacattggtaattttaagaggcataattacarcaaacatgcacagaaagaattaaaatgttgcacaagtaaatgcctttatttgtcttctggcatttcacttattgcctgaggtttttaaaaagcaagaaaataatgaaaatagtgattctacaaggatactttatgagcataagacgtaggttcatttacagatctcatgctctaaatacattattggatgacaaaactcgtgatctccataggtgagcagttttgtgaatcataccattttttagggcactttaacacactataggattagcgtaaggctagaattgtgaaagtgggaaactttttagttcatgtttttagatttccct

SEQ ID NO: 495815 - DNA, 528 bp, Homo sapiens
tgtgtttcataatctaaagaaattggatttttttcaacttgctagaacagcatctccttgctaattcctctggactgtcgtcagagggaactggttgtgagtggaagaactgactagctaatggctctactgggttacctagctcagtgatttccytgtgggctgattttaagatcaagggggtttatctaggacagaggttttcaactttttttttttttaacatttgtaattcttcgttcagatgaaatcactagaggttatctaataaaatagagtgtaaattggataaactcaggaaaggtctggtcaaaacactctccctcctgacttgtcctcagttcataccactgttgagctccctgaggcatctaacagagatctttactggtagggtaggggttcttggaagcttgaggttaacaatttgggaaccataaagagagcctctcttctaaaatatctgatagtcacatctggttaatatcagagacattttacctttgttagattttgagcaggactaaa

SEQ ID NO: 495816 - DNA, 642 bp, Homo sapiens
agctgaaactaaatatttatcattttgtgctaaatctgttacaaycttatactagttcatagcacagaaatgcatagtaagttttaaatgtctggaaaagatgctgaaaaaatatatatcaatattgtgtgtgtaagacggagaatacatgtaaatataatagtctagtaagactatcattataccttagtggtacaacaacattattttagttcgctaaggttctctaaaaacacattctgtgaatcaccgtttcactgttatttcctcaaacatctgttctatcaatgttccaagcaaacacattgtctaattccatttacaatgagaatggacagatttttttttcttttttttcttttattattattatactttaagttttagggtacatgtgcacaacgtgcaagtttgttacatatgtatacatgtgccatgttggttttactatatgcagatgatttctaaatatttcctgaatttcaggcaacatttcaatggcctctccagaatttctgcaaaggaaggattgaggaaggtaaagtggttgagaagggctggaaagtagaatgactagtattgatctgaagctgtattcgcaaaccaaaagtactatctctctacttaaataaaagaaactca

SEQ ID NO: 495817 - DNA, 642 bp, Homo sapiens
agctgaaactaaatatttatcattttgtgctaaatctgttacaaccttatactagttcatagcacagaaatgcatagtaagttttaaatgtctggaaaagatgctgaaaaaatatatatcaatattgtgtgtgtaagacggagaatacatgtaaatataatagtctagtaagactatcattataccttagtggtacaacaacattattttagttcgctaaggttctctaaaaacacattctgtgaawcaccgtttcactgttatttcctcaaacatctgttctatcaatgttccaagcaaacacattgtctaattccatttacaatgagaatggacagatttttttttcttttttttcttttattattattatactttaagttttagggtacatgtgcacaacgtgcaagtttgttacatatgtatacatgtgccatgttggttttactatatgcagatgatttctaaatatttcctgaatttcaggcaacatttcaatggcctctccagaatttctgcaaaggaaggattgaggaaggtaaagtggttgagaagggctggaaagtagaatgactagtattgatctgaagctgtattcgcaaaccaaaagtactatctctctacttaaataaaagaaactca

SEQ ID NO: 495818 - DNA, 609 bp, Homo sapiens
ataggcatggaagcactagtggaaaagctagccctggcccagcgccaacatatttagaaagaaggccagctccatttcatgacgtaaattgaacatttttcagatccaaaatttgtaactacagacacagaaatagactgacactaaggggaaaaaagtttgttacacttactgattccaaactttcaaagtaatgaaaccaaaaccaaaacccaatatatctctgacaagatttttcataaattatatacgttaaaggaaatatgattgacccattatattcatatataaatgaagcattattggagattttaaattgttaaacaatagctttaaagtttggaggccaggcacagtggctcaygcctgtaattccaacactttgaaaggccaaaatttgaggattgcttgagcccacgagtttaagagcaaccaaagcaacataatgagacccccttctctataaaaaattagccaaacatggtggtggacacctgtaatccaagctactcaggagacttaggtgggaggatgcttgagcacaggaggtcaaggctacaatgagctgtgatcctgccactgcactccatgcactccagcctgagtgag

SEQ ID NO: 495819 - DNA, 454 bp, Homo sapiens
ctgttcaggtgtgacttgtcatctgggaatacaagcagagctttctagtcatgccacaactcatcagccagtgagccatgagaattgtcatgcagttgactcagccttcacaacagtattcctcttcaacaccaccaaacactgcaaaataatcttgaccagcagcacaggtkgacttagacaatacacatgcagctctgtccagctactggactataatttagtaaagttctctagcaggccatgaagagtacccagaaagaaatactccaccatcaaagacaatcgacttttacgaaatttcttttctttaaatggccaataataagagtaacttgaaaaacaggctattttttctttttttttttctttttttttttgagacggagtctcgctctgtcgcccaggctggagtgcagtggtgcaatctcagctcactgcaagctctgcctcc

SEQ ID NO: 495820 - DNA, 590 bp, Homo sapiens
ggattacaggtgcctgctaccatgcctggctaaagttttttgtattttcagkagagatggggtttcaccatgttggtcaggctggtctcgaattcttgacctcaggtgatctgactgccttggcctcccatattctttcttgattaattgacttatgcctttttaaacaaggacttgttgattatactgtatgcaaaacaatttgcacacatgaaatctcatctaatgcctaacatgacctggaaatcccatactttactaataaaaagcagaaactcaaagtagttacggggcaaacatcaaatcacagagcgtcaagtggttaagaggaaatcagagccagttttctaactttgtccattatttttttcggtacaccaccccatttaaaatgtggaaaattcactagtgctctgttctcactggcctcatgtaacttttaatttcaaaccatttctggatgcctatgcttccttctggtgcttaatgaacttgaaatgtcatctaatgagagtgttgttaacctctggccccaggctctgatgactctttccaacctcttattttccttcccctttagaaattattat

SEQ ID NO: 495821 - DNA, 590 bp, Homo sapiens
ggattacaggtgcctgctaccatgcctggctaaagttttttgtattttcaggagagatggggtttcaccatgttggtcaggctggtctcgaattcttgacctcaggtgatctgactgccttggcctcccatattctttcttgattaattgacttatgcctttttaaacaaggacttgttgattatactgtatgcaaaacaatttgcacacatgaaatctcatctaatgcctaacatgacctggaaatcccatactttactaataaaaagcagaaactcaaagtagttacggggcaaacatcaaatcacagagcgtcaagtggtwaagaggaaatcagagccagttttctaactttgtccattatttttttcggtacaccaccccatttaaaatgtggaaaattcactagtgctctgttctcactggcctcatgtaacttttaatttcaaaccatttctggatgcctatgcttccttctggtgcttaatgaacttgaaatgtcatctaatgagagtgttgttaacctctggccccaggctctgatgactctttccaacctcttattttccttcccctttagaaattattat

SEQ ID NO: 495822 - DNA, 637 bp, Homo sapiens
gctgccagtggggaatcgtgtacctaaagtctttcatgttaagtagttttgggcttatagttccagtatctagaagaaaagtgtgaacagaatagaagggataaaagagaaaggaaagtccttgaagccagggactaattcaactccgtatcatgcaaaattcactggacatccaacgctgtcatatataatgtggtcccttcataaatgttcttgataatagcctgttaattttgagtcccagatcttcygtgtaatactaaaaaggtcatttcacatttctgagcttcattttcctcatctttaaatttggataacaataattcacctctcatagggttgcttgtgctggttaaatgagataatacatgtaaaattgttaggcacgttttggcaaataatattcaataaatgctagttatgactattttcactaatactactagctaccactatcctttgaaactcactgtacttgagaaacactcaaactgggattcttcaattaaaggaaacctagtgttttagtaaccaaatgtaatatattattttataagcaaagttccagccactttaggttgagcctcttcagcgcactttggagaggttattttcatctgttaactgcccccattag

SEQ ID NO: 495823 - DNA, 522 bp, Homo sapiens
tctctttcctagcatagccttgcaagaacacgagttagctttaggtagtttgtctcggaattggaaaatttcaaggggcatttggcagtagagcaaggctatttatttccaaaggaaagcgcagcccttaggtctcaatgagaattctgaagtcatatcagggattttaaacttctagtcaggcaagcctcaattccgtgttagtkctatgtagaggggtcgtttgcaagaagagccaaggcactggttaaacaggtttgagtcaacatgacatggatgattcaaggatgctggaaggcatgaagagatacacttagctttccaacagcccctggggaatcacgcagcttctatcatatatgacaacctgccaccgggcacatgctctgccctctattgggaatatcttcctctttccccttccagcccccacagacctcattcttactgtcctttactaatataacttctcacccatcaggtctccagttaagtttcacttcatctaaaaagacttctgac

SEQ ID NO: 495824 - DNA, 430 bp, Homo sapiens
ctgtcactgatcaccctaactaaatatcatgtatcttgagcatccacaacttctcccatccaagtactaaccagccccgaccctgcttaggttctgagatcaggtgcattcagggtggtatggctgttgacttgagcatccacaccttctatcttcctctgttacttgctctgtttttgtgttttttaagttattataacatattacatatacatatacgtgtatgtttatttgagtgtgtatcataaacacacacataaagtaaccctgttcatttcatttctctcacatctcccagtagaatataaactgaactacacgagggcaggtatattttcttttgtaaaaaattatttttcgtattttttccataagttaytggggtacaggtggtatatggttacatgagtaagctcttcactggtgattt

SEQ ID NO: 495825 - DNA, 492 bp, Homo sapiens
taaaatgaaatacagaaactctcctaatgtggctgcttcttctgtaatcagatctctcygctctctgcaactgggtgctgaggccccgtgacggggataccttccttctggttgctcccatgaaacttcatctaatgccgctgatgctacaatagggctgtactgaagcaattttccgtttccagttagagacataactcttcttttacttcatccaaaccctccagagtagcctctgttcttgttttgagagcaatagctcccctgtggtgtgcaaagagaggagtgaggagggaatgctgtttttgtaaaacaaaataggtgatatgaatgtggacatgggaggacacacgccagccaccacaacgatgtgaaacaggtacatttgcaaaataactcttttcaatcaccagcatttccttcagctgatacattcccaagtcatatttcccttgatcaggcacacggtaacgggcaagttgcccctggctc

SEQ ID NO: 495826 - DNA, 492 bp, Homo sapiens
taaaatgaaatacagaaactctcctaatgtggctgcttcttctgtaatcagatctctctgctctctgcaactgggtgctgaggccccgtgacggggataccttccttctggttgctcccatgaaacttcatctaatrccgctgatgctacaatagggctgtactgaagcaattttccgtttccagttagagacataactcttcttttacttcatccaaaccctccagagtagcctctgttcttgttttgagagcaatagctcccctgtggtgtgcaaagagaggagtgaggagggaatgctgtttttgtaaaacaaaataggtgatatgaatgtggacatgggaggacacacgccagccaccacaacgatgtgaaacaggtacatttgcaaaataactcttttcaatcaccagcatttccttcagctgatacattcccaagtcatatttcccttgatcaggcacacggtaacgggcaagttgcccctggctc

SEQ ID NO: 495827 - DNA, 516 bp, Homo sapiens
ggttgagtaatttgcatgacattgcacagctaacaggagcctgtgcctggattaaccctgcatctatttgctcttaattcttttacttacacagttgctgckctatcctacctatctttcattcttgggcttttgctattttcctaaaatacaggctgagtcatgcagcttcttgtctaaatatgtccgcaacccattccctcttaggtttgagcataaatttacgctgcacaaagtgttatctaaagccttttgtgacctgcaccgcctgacccttcaaccttataattttctcttatccaacaacttttggctcaaatgccacttgctctgtaaattcttacagattgctgcaatcagaattgaattccaatgtgttcccagagcatctgggtttcagtagagtacacagtgcctgaggtgttatcatatggcggttgtttggatgtctgtcatctccccgggatgcaaaacacaagtttttcaaagatgccgtcagcctgctttccaccatga

SEQ ID NO: 495828 - DNA, 516 bp, Homo sapiens
ggttgagtaatttgcatgacattgcacagctaacaggagcctgtgcctggattaaccctgcatctatttgctcttaattcttttacttacacagttgctgcgctatcctacctatctttcattcttgggcttttgctattttcctaaaatacaggctgagtcatgcagcttcttgyctaaatatgtccgcaacccattccctcttaggtttgagcataaatttacgctgcacaaagtgttatctaaagccttttgtgacctgcaccgcctgacccttcaaccttataattttctcttatccaacaacttttggctcaaatgccacttgctctgtaaattcttacagattgctgcaatcagaattgaattccaatgtgttcccagagcatctgggtttcagtagagtacacagtgcctgaggtgttatcatatggcggttgtttggatgtctgtcatctccccgggatgcaaaacacaagtttttcaaagatgccgtcagcctgctttccaccatga

SEQ ID NO: 495829 - DNA, 516 bp, Homo sapiens
ggttgagtaatttgcatgacattgcacagctaacaggagcctgtgcctggattaaccctgcatctatttgctcttaattcttttacttacacagttgctgcgctatcctacctatctttcattcttgggcttttgctattttcctaaaatacaggctgagtcatgcagcttcttgtctaaatatgtccgcaacccrttccctcttaggtttgagcataaatttacgctgcacaaagtgttatctaaagccttttgtgacctgcaccgcctgacccttcaaccttataattttctcttatccaacaacttttggctcaaatgccacttgctctgtaaattcttacagattgctgcaatcagaattgaattccaatgtgttcccagagcatctgggtttcagtagagtacacagtgcctgaggtgttatcatatggcggttgtttggatgtctgtcatctccccgggatgcaaaacacaagtttttcaaagatgccgtcagcctgctttccaccatga

SEQ ID NO: 495830 - DNA, 516 bp, Homo sapiens
ggttgagtaatttgcatgacattgcacagctaacaggagcctgtgcctggattaaccctgcatctatttgctcttaattcttttacttacacagttgctgcgctatcctacctatctttcattcttgggcttttgctattttcctaaaatacaggctgagtcatgcagcttcttgtctaaatatgtccgcaacccattccctcttaggtttgagcataaatttacgctgcacaaagtgttatctaaagccttttgtgacctgcaccgcctgacccttcaaccttataattttctcttatccaacaacttttggctcaaatgccacttgctctgtaaattcttacagattgctgcaatcagaattgaattccaatgtgttcccagagcatctgggtttcagtagagtacacagtgcctgaggtgttatcatatggcggttgtttggatgtctgtcatctccccrggatgcaaaacacaagtttttcaaagatgccgtcagcctgctttccaccatga

SEQ ID NO: 495831 - DNA, 564 bp, Homo sapiens
aggcctcttaatgttcctattatgttctttctttactttttatttatttattttttgagatggagtctcactttgttgcccaggctggggtgcagtggtgtgatcttggctcactgcaatctctgcctcttgggttcaagagaatcttctgcctcagcctctcgagtagctggaattacaggcacgcaccaccgtgcctggctaatttttgtatttttagtagagacggggtttcaccacataggacaggctggtcttgaactcctgaycttgtgatccacccccgccctcggcctcccaaagtgttgggattacaggcatgagacactgtgcccagttgcctagtattttcttgcaccaaggaaagaagccatgtgtagaaatgtttcaaaatcatgggagagggacctgtatgagtgtggcataggccagggctgcaggtagcctttagtctcctgctggagacagctgtgccaatcgctctgatggaaagaagggagtaatctggaaatagagacgcaagccttccctgatcaggaatcacagcaaaggtagaaaattggc

SEQ ID NO: 495832 - DNA, 564 bp, Homo sapiens
aggcctcttaatgttcctattatgttctttctttactttttatttatttattttttgagatggagtctcactttgttgcccaggctggggtgcagtggtgtgatcttggctcactgcaatctctgcctcttgggttcaagagaatcttctgcctcagcctctcgagtagctggaattacaggcacgcaccaccgtgcctggctaatttttgtatttttagtagagacggggtttcaccacataggacaggctggtcttgaactcctgatcttgtgatccacccccgccctcggcctcccaaagtgttgggattacaggcatgagacactgtgcccagttgcctagtattttcttgcaccaaggaaagaagccatgtgtagaaawgtttcaaaatcatgggagagggacctgtatgagtgtggcataggccagggctgcaggtagcctttagtctcctgctggagacagctgtgccaatcgctctgatggaaagaagggagtaatctggaaatagagacgcaagccttccctgatcaggaatcacagcaaaggtagaaaattggc

SEQ ID NO: 495833 - DNA, 624 bp, Homo sapiens
actgaacaaggtctgcgtcmgtctatcaagtgatataagaaatttgctagaaaaaagaaaatggtagactcatttcaggctcttggaatgagctaggataagacttgttcttatcccaagattaaggagaaaaatgtgttttttaatgatattcctaaagaatatgtatgctaaaaataatatcaagagaaaattgtcagtgaacccaaaataaattgttaccatgttttttttttaaattattttctttattatcagtctttgagtatcgactgtgcgtggaatttattatagagatctctgtgtttggcgacactgccttttttgatagtcaaaatatgatatggatatccattgccagtgccgactgctccctgtttcaaatgtccaagtattataggaggcaaagggtgtctccctgtttgtttcttcgtgttggcaagcctgagaggcctgtcttcacagacagtagtaacccaggtaccaggacattggatacagccaagggttagaaacaggcacttggaggtttcgttttccaggtcactgacttggatccagattagcttgttgcaaccaagatttttaataccagtgtgatctgcgtcacccgtggagggtcct

SEQ ID NO: 495834 - DNA, 624 bp, Homo sapiens
actgaacaaggtctgcgtcagtctatcaagtgatataagaaatttgctagaaaaaagaaaatggtagactcatttcaggctcttggaatgagctaggataagacttgttcttatcccaagattaaggagaaaaatgtgttttttaatgatattcctaaagaatatgtatgctaaaaataatatcaagagaaaattgtcagtgaacccaaaataaattgttaccatgttttttttttaaattattttctttattatcagtctttgagtatcgactgtgcgtggaatttattatagagatctctgtgtttggcgacactgccttttttgatagtcaaaatatgatatggatatccattkccagtgccgactgctccctgtttcaaatgtccaagtattataggaggcaaagggtgtctccctgtttgtttcttcgtgttggcaagcctgagaggcctgtcttcacagacagtagtaacccaggtaccaggacattggatacagccaagggttagaaacaggcacttggaggtttcgttttccaggtcactgacttggatccagattagcttgttgcaaccaagatttttaataccagtgtgatctgcgtcacccgtggagggtcct

SEQ ID NO: 495835 - DNA, 624 bp, Homo sapiens
actgaacaaggtctgcgtcagtctatcaagtgatataagaaatttgctagaaaaaagaaaatggtagactcatttcaggctcttggaatgagctaggataagacttgttcttatcccaagattaaggagaaaaatgtgttttttaatgatattcctaaagaatatgtatgctaaaaataatatcaagagaaaattgtcagtgaacccaaaataaattgttaccatgttttttttttaaattattttctttattatcagtctttgagtatcgactgtgcgtggaatttattatagagatctctgtgtttggcgacactgccttttttgatagtcaaaatatgatatggatatccattgccagtgccgactgctccctgtttcaaatgtccaagtattataggaggcaaagggtgtctccctgtttgtttcttcstgttggcaagcctgagaggcctgtcttcacagacagtagtaacccaggtaccaggacattggatacagccaagggttagaaacaggcacttggaggtttcgttttccaggtcactgacttggatccagattagcttgttgcaaccaagatttttaataccagtgtgatctgcgtcacccgtggagggtcct

SEQ ID NO: 495836 - DNA, 518 bp, Homo sapiens
gacttgttaaggctttagtgcatacagaatactacaaagaagaggaagatgtctgagttagcaccaatgmcctcagtgggctcagagtgcagaggtgaggtagacctctacacaaccattaataatgtaagacacacagtaacttccagggaagcctatgaaacaaatgctgtaaaggtaggagtggttaagtctattaaagacaaggagagaaaggtctctggaagggatgtcttctgaaaaaccttggaaatttgggaaggatttacacaggcaaaagtgagtccgtggggctagcatagattgactgcacaggatcaagggcgaaagcaggagcacagcagacagtcgagggagtgatcgccaccacatgggcagaacacaaggttcacgaaagggcgtgataagaaatgaggctagaaacaaatcgattcatattataaagggtcttcagtactaagacagttgacctctttttaagggtgtttgaaagctatgaaaaatatttttagaaaaaa

SEQ ID NO: 495837 - DNA, 518 bp, Homo sapiens
gacttgttaaggctttagtgcatacagaatactacaaagaagaggaagatgtctgagttagcaccaatgccctcagtggkctcagagtgcagaggtgaggtagacctctacacaaccattaataatgtaagacacacagtaacttccagggaagcctatgaaacaaatgctgtaaaggtaggagtggttaagtctattaaagacaaggagagaaaggtctctggaagggatgtcttctgaaaaaccttggaaatttgggaaggatttacacaggcaaaagtgagtccgtggggctagcatagattgactgcacaggatcaagggcgaaagcaggagcacagcagacagtcgagggagtgatcgccaccacatgggcagaacacaaggttcacgaaagggcgtgataagaaatgaggctagaaacaaatcgattcatattataaagggtcttcagtactaagacagttgacctctttttaagggtgtttgaaagctatgaaaaatatttttagaaaaaa

SEQ ID NO: 495838 - DNA, 631 bp, Homo sapiens
agcaaaggagaggagaggggggartgctaggctcttttaaacaaccagctctggagtaaactaagagtgagaacttactcattaccatggggaaggcaccagccattcattcatgagggttctgcccccatgacaccaacacctcccacagggccccacctccaataccggcaatcatatgtcaacatgagatttggaggagacaaaatatccgaagtataagcaccctagctggcatcataacatcgagggtttcatatagtcatttctactttatgatgtgggactggcctagggctctgggagtgtgggtgaagagacctctttggcttattcagccaatgtgcattgagtgcctaccacatgcccagcactctgttacgtgccagagagaccgtgagaataggacaggcttcaatctcgcaaaaatgactaacattaagcaaataactatacaaatcaccaagtgtccggttcaagactacaccaaatgtcatggtgagatctgaagagagttgggggatgagcagaaagaacactctgtggggcgtaggcaggtgaaagttgattttattcagtagcagctctcatcagcagcttcctcacactgtccaccgtgtctcggctgctt

SEQ ID NO: 495839 - DNA, 500 bp, Homo sapiens
taataggtttattaaatttcttagtccccctgtgggcagagatcatttaaagcctctcccaatagcagtaatgctttctggcttctgagtcatcatagttaaagagacttaactgcagagggacccccagacatttctctgatgattttctaaagacataagaaatctggcttaatgtaagagaagtactcaaacaaagcgatatccaaaaccattagcatttccaaatgcattttagaaaattatccccataaattgactcttcatttttcaagtcacatacgcgaaatgcatgagtcatacatacagagtgctgtaaaatgttagaacaatgtgttcagcccttatatcccatcggagaaaagtgaggctgagggaggttacatgaaagaatgagtaggagtatgttataaatagaatcctaaaatgtatgrtacaattatttggagaaaatgaaacagactggcctgttctatttaagctcaaaggaggtcgtcgta

SEQ ID NO: 495840 - DNA, 576 bp, Homo sapiens
aattacatttatgaatatacataccaccagtaaacactgtgaacacaaaccctcaatatttgcatttattttctcttagttactaatggtagctatccttttttctctctatataaagataatggcatttaatgttacccaacttactactatcccataataccaattatttatgatattaaacatggttaaaaagtgtttcattttaaaaccatacttagagcaatgtgaatgtttaattttaaattgtgtttattttcaaagttgcgtttgacaattatcacaagaggaaaactaacctctggaaagtaattctacatacacatacctttgaggcagtcagctcatctgcagascctcccgcctgaacggtggcactgcagttcccataaatatacctacagagggtgccagagagctggcagccccgcccaggtaccaagtggatacctcagctcagatgggcttttcctgtctaatattctaacatgagggtgaccaatgtgtgcattaaaaatgaataaagagtaagaagctagagctctcatgcactgctggtgtgaatgtaaaatgagg

SEQ ID NO: 495841 - DNA, 482 bp, Homo sapiens
agggagatactgctatacacaaatacttcaatagacaagacaagacaagacttgaatggtaagctgatcactgaacccacgctggagaggaaacaggtagtgtaggtagagcttgtggtcaaggagattactcaaaggagaaaatattaaaccccaagttattactgcttcagaggctgaataacaagaagagcccatgcacagaaaacccaggggctgggcccaggacagaggtacgcaggagcccacaggtgggaaaggctcagatggttcatgaaggagaacaaagaccagtgtgtctgcagtggactcagaacatttgagcctggaaggagaggagggttcatagaggccagagtggcaccacgcagagatttgttggtcagaattaggagtttggattttattcaacttcasattggaagccagtgacgaatcttgattagggtcctgaagtaatttgagtaacatttggaaaatat

SEQ ID NO: 495842 - DNA, 534 bp, Homo sapiens
ctaatggagaatagtcagaataatcaatctttgagaaagaagccgtgccgtttcctgtcccaattgtaattacctttcaaagcacaggtcaaatttggcctctagggagtatttcctagttactctaggttttactgacttctctcttatttgaatttatagcaattataagtttgtcttggtatctctctccctctctctgtggatacatatttattctctctatatatagatatgtatataaaaatatttatatatttataaacatatatttaaaaatatataaaaatatatatattttgagatggagtttcactcyattatgcaatggcacaatctctgcttactgcaacctccaccttccaggttcaagcgattctcctgcctcagcctaccgagtagctgcgattacaggcatgtaccaccacgcccggctaattttgtatttttagtagagacagggtttcaccatgttggccaggctggtctgggactcctgacattgtgatccgcccgcctcggcctcccaaaata

SEQ ID NO: 495843 - DNA, 534 bp, Homo sapiens
ctaatggagaatagtcagaataatcaatctttgagaaagaagccgtgccgtttcctgtcccaattgtaattacctttcaaagcacaggtcaaatttggcctctagggagtatttcctagttactctaggttttactgacttctctcttatttgaatttatagcaattataagtttgtcttggtatctctctccctctctctgtggatacatatttattctctctatatatagatatgtatataaaaatatttatatatttataaacatatatttaaaaatatataaaaatatatatattttgagatggagtttcactccattatgcaatggcacaatctctgcttactgcaacctccaccttccaggttcaagcgattctcctgcctcagcctaccgagtagctrcgattacaggcatgtaccaccacgcccggctaattttgtatttttagtagagacagggtttcaccatgttggccaggctggtctgggactcctgacattgtgatccgcccgcctcggcctcccaaaata

SEQ ID NO: 495844 - DNA, 540 bp, Homo sapiens
taaactcaactctcccctattacatctgcaggcattgtctggccctcttccctttgccccatgggacttaaattttagggactggcataaatgctggtattctgctatcctgtagcaataaactatccttcatctctgaccsaggaatcttgtatcttctgccagcattcatgtggtagacttactcattaggttgcaaatacggtaaaatcacagttctggtatccactaataaggattatcaggaagcctagaataataaatgactgtactcatagagacatttcaagggaaacaccatcccgatagctgttttggtcatgaaattttataggagtttgaagattgcttgctcttcagagtacttaataaaaatagagttgagagcactatgtgtgaattgctcacaactttgcacagcctgttgttgtatgggtaaaaccggaaagatgaactgggacctcacagctgttgcctttatttgctcaagaaaaagctcaggatttggatttgagtacagaacagagtgaaccagaagtg

SEQ ID NO: 495845 - DNA, 540 bp, Homo sapiens
taaactcaactctcccctattacatctgcaggcattgtctggccctcttccctttgccccatgggacttaaattttagggactggcataaatgctggtattctgctatcctgtagcaataaactatccttcatctctgacccaggaatcttgtatcttctgccagcattcatgtggtagacttactcattaggttgcaaatacggtaaaatcacagttctggtatccactaataaggattatcaggaagcctagaataataaatgwctgtactcatagagacatttcaagggaaacaccatcccgatagctgttttggtcatgaaattttataggagtttgaagattgcttgctcttcagagtacttaataaaaatagagttgagagcactatgtgtgaattgctcacaactttgcacagcctgttgttgtatgggtaaaaccggaaagatgaactgggacctcacagctgttgcctttatttgctcaagaaaaagctcaggatttggatttgagtacagaacagagtgaaccagaagtg

SEQ ID NO: 495846 - DNA, 623 bp, Homo sapiens
gtattagtccattttcacactgctataagtaaatacccaatactgggcaatttataagtaaaaaggtttaatttactcacagttctgcaggcttaaaaggaagcatggtttgagcgtttcagaaaacttacaatcatggcagaaggtgaaggggaagcaaggcatgtcttctcatggcggctggagactgaaagagtaaagggggaagtatcatacaatttcaaaatatcagatcttgtaagaactgactcactgccacgagaagaaaaaggggaagtccaccccatggttcagtcaactcccaacaggcttttctcccaacatgtggggattacaatttgggatgagattttgttggagacacagagccaaatggtatcactagcattattccttttttgaatacaaagttggtctaattatgctctgtgtcttgcttctgtctttttgtttagataagaactacaacctatgttcttacaatcattgtacaattctcwgttgatcaattaaaatatgcttactataccaacttctgtataatattttctttttgctttaatttttcattcatataaaagattatttaaaacagtacccacttccatatccctggatatgtc

SEQ ID NO: 495847 - DNA, 523 bp, Homo sapiens
tcaaaataatttagtgtttagaggatttatttttaaaaataaaaattttttatggctccttgaaatatcatatcaatatttataaataaacacaaataaaatttttaaaaatctaatgtagtggtatttcaaatcaatattcaataaggaagaatacccagaggcctattttaaacatcgccaataattcaatgtgaccaatcttctgatgcacctactaagaatactcagttggctaatttcttctcagtagtcagcaagatagatgaatacaataaaatccttgcccttgagatgataccagtctagaagytataagcagctataagcagcatatgtttctatcaattttattggagcatagtttactacaacatgtatatacataatttacatacagtttatgtatacattaagtgtacagtctgatgagttttgacaaatatatatacccttgtaacaatcaccttatacaaaatataaaatattttcttcacgccagaaattttccttgtatttataa

SEQ ID NO: 495848 - DNA, 523 bp, Homo sapiens
tcaaaataatttagtgtttagaggatttatttttaaaaataaaaattttttatggctccttgaaatatcatatcaatatttataaataaacacaaataaaatttttaaaaatctaatgtagtggtatttcaaatcaatattcaataaggaagaatacccagaggcctattttaaacatcgccaataattcaatgtgaccaatcttctgatgcacctactaagaatactcagttggctaatttcttctcagtagtcagcaagatagatgaatacaataaaatccttgcccttgagatgataccagtctagaagttataagcagctataagcagcatatgtttctatcaattttattggagcatagtttactacaacatgtatatacataatttacatacagtttatgtatacattaagtgtacagtytgatgagttttgacaaatatatatacccttgtaacaatcaccttatacaaaatataaaatattttcttcacgccagaaattttccttgtatttataa

SEQ ID NO: 495849 - DNA, 523 bp, Homo sapiens
tcaaaataatttagtgtttagaggatttatttttaaaaataaaaattttttatggctccttgaaatatcatatcaatatttataaataaacacaaataaaatttttaaaaatctaatgtagtggtatttcaaatcaatattcaataaggaagaatacccagaggcctattttaaacatcgccaataattcaatgtgaccaatcttctgatgcacctactaagaatactcagttggctaatttcttctcagtagtcagcaagatagatgaatacaataaaatccttgcccttgagatgataccagtctagaagttataagcagctataagcagcatatgtttctatcaattttattggagcatagtttactacaacatgtatatacataatttacatacagtttatgtatacattaagtgtacagtctgatgagttttgacaaatatatatacccttgtaacaatcaccttatrcaaaatataaaatattttcttcacgccagaaattttccttgtatttataa

SEQ ID NO: 495850 - DNA, 437 bp, Homo sapiens
gaattcatttaagaaggcaggagggcacaacaagctctctccacgtttcctctgggcatattgttgccaggtctgtggtttgtgtctagaaatttggccaatgagttgaggaacatttttcaccccttctcccactcccttccccttcccctytccttacctttacttcccttgctctctctctctttctctttctctctctctctttctttttttctttcttctttctttctttctctttctttctttctttctttctttctttctttctttctttctttctttctttcctctctctctctctttttttttttctggagaagagtggtttaaaagggagttgaatataacagagcacctcattattttcctttctttttgtttgctaactaggaaagtccatcagcttgataatggaggagaacaatgactccacg

SEQ ID NO: 495851 - DNA, 597 bp, Homo sapiens
agtggtataataaatgtgttaaaaagtaaatatatagaacaatggcacctggatgacattcagcacctactaatgtgtggcaccaaaggggaattgaggaaaaaaacatgatcattattcccaaggtcattgtaatcaaggaagccacagaaaataaataacatcaactgttttttgattgtttgattatggctattcttgcaggagtaaggtggtatcacattgtggttttgatttgcatttcctgatcattagtgatgttgagcgtttttttcatatgtttgttagccatttgtatgttggggtggatgtggtgaacagggaacacgtctacactgctggtgkgaatgtaaactagtactgccgctatggaaaatagtgtggaaattccttaatgaactaaaagtagaactaccatttgatccagcaatcccaccactaggtatctacccagaggaaaagaagtcattattcgaaaaacttacttgcacacacatgtttatagcagaacaattcacaatagcaaaattgtggaaccaacccaaatgcccatcaatcaatgagtggataaagaaactgtggtaaatatagatgatg

SEQ ID NO: 495852 - DNA, 597 bp, Homo sapiens
agtggtataataaatgtgttaaaaagtaaatatatagaacaatggcacctggatgacattcagcacctactaatgtgtggcaccaaaggggaattgaggaaaaaaacatgatcattattcccaaggtcattgtaatcaaggaagccacagaaaataaataacatcaactgttttttgattgtttgattatggctattcttgcaggagtaaggtggtatcacattgtggttttgatttgcatttcctgatcattagtgatgttgagcgtttttttcatatgtttgttagccatttgtatgttggggtggatgtggtgaacagggaacacgtctacactgctggtgggaatgtaaactagyactgccgctatggaaaatagtgtggaaattccttaatgaactaaaagtagaactaccatttgatccagcaatcccaccactaggtatctacccagaggaaaagaagtcattattcgaaaaacttacttgcacacacatgtttatagcagaacaattcacaatagcaaaattgtggaaccaacccaaatgcccatcaatcaatgagtggataaagaaactgtggtaaatatagatgatg

SEQ ID NO: 495853 - DNA, 597 bp, Homo sapiens
agtggtataataaatgtgttaaaaagtaaatatatagaacaatggcacctggatgacattcagcacctactaatgtgtggcaccaaaggggaattgaggaaaaaaacatgatcattattcccaaggtcattgtaatcaaggaagccacagaaaataaataacatcaactgttttttgattgtttgattatggctattcttgcaggagtaaggtggtatcacattgtggttttgatttgcatttcctgatcattagtgatgttgagcgtttttttcatatgtttgttagccatttgtatgttggggtggatgtggtgaacagggaacacgtctacactgctggtgggaatgtaaactagtactgccgctatggaaaatagtgtggaaattccttaatgaactaaaagtagaactaccatttgatccagcaatcccacyactaggtatctacccagaggaaaagaagtcattattcgaaaaacttacttgcacacacatgtttatagcagaacaattcacaatagcaaaattgtggaaccaacccaaatgcccatcaatcaatgagtggataaagaaactgtggtaaatatagatgatg

SEQ ID NO: 495854 - DNA, 597 bp, Homo sapiens
agtggtataataaatgtgttaaaaagtaaatatatagaacaatggcacctggatgacattcagcacctactaatgtgtggcaccaaaggggaattgaggaaaaaaacatgatcattattcccaaggtcattgtaatcaaggaagccacagaaaataaataacatcaactgttttttgattgtttgattatggctattcttgcaggagtaaggtggtatcacattgtggttttgatttgcatttcctgatcattagtgatgttgagcgtttttttcatatgtttgttagccatttgtatgttggggtggatgtggtgaacagggaacacgtctacactgctggtgggaatgtaaactagtactgccgctatggaaaatagtgtggaaattccttaatgaactaaaagtagaactaccatttgatccagcaatcccaccactaggtatctacccagaggaaaagaagtcattattcraaaaacttacttgcacacacatgtttatagcagaacaattcacaatagcaaaattgtggaaccaacccaaatgcccatcaatcaatgagtggataaagaaactgtggtaaatatagatgatg

SEQ ID NO: 495855 - DNA, 624 bp, Homo sapiens
gctagaagttggtaaacatgtctttggaattaayttgaccttgagaaagtcattgaattttcttggccttagtgctttgagcccccagataaagaggctgaatgaactatttgacatctaagatttctgttaattctaaaatgttgtaattcttagaaatgatcttttaacagaattgtgcttccacaggtaatatgattagtaggatagattttctagttcagttacagttaaaactcatagaggtaaaagggcagtaagtagagtagaaatgtttttctattctcaattctctttatttaattgttatgccattttagcatcttatacttttttttttaatttcatgcctcagtttagaaaacattaactaccactggacctgtatatgttgttctctttgctttcagttagaaatatgatttttatttatttaataaataatatagcatttaccatatgctcactgttccaagtggtgtgtgtacgtaaattcatgtgtgtatatgcttatgcatatgcatgtgtataaactcatttaactatcataataaccctatgaagtatgtactattattatttccactttataggcagggaaactaaggtacaaaaagataccta

SEQ ID NO: 495856 - DNA, 624 bp, Homo sapiens
gctagaagttggtaaacatgtctttggaattaatttgaccttgagaaagtcattgaattttcttggccttagtgctttgagcccccagataaagaggctgaatgaactatttgacatctaagatttctgttaattctaaaatgttgtaattcttagaaatgatcttttaacagaattgtgcttccacaggtaatatgattagtaggatagattttctagttcagttacagttaaaactcatagaggtaaaagggcagtaagtagagtagaaatgtttttctattctcaattctctttatttaattgttatgccattttagcatcttatacttttttttttaatttcatgcctcagtttagaaaacattaactaccaytggacctgtatatgttgttctctttgctttcagttagaaatatgatttttatttatttaataaataatatagcatttaccatatgctcactgttccaagtggtgtgtgtacgtaaattcatgtgtgtatatgcttatgcatatgcatgtgtataaactcatttaactatcataataaccctatgaagtatgtactattattatttccactttataggcagggaaactaaggtacaaaaagataccta

SEQ ID NO: 495857 - DNA, 624 bp, Homo sapiens
gctagaagttggtaaacatgtctttggaattaatttgaccttgagaaagtcattgaattttcttggccttagtgctttgagcccccagataaagaggctgaatgaactatttgacatctaagatttctgttaattctaaaatgttgtaattcttagaaatgatcttttaacagaattgtgcttccacaggtaatatgattagtaggatagattttctagttcagttacagttaaaactcatagaggtaaaagggcagtaagtagagtagaaatgtttttctattctcaattctctttatttaattgttatgccattttagcatcttatacttttttttttaatttcatgcctcagtttagaaaacattaactaccactggacctrtatatgttgttctctttgctttcagttagaaatatgatttttatttatttaataaataatatagcatttaccatatgctcactgttccaagtggtgtgtgtacgtaaattcatgtgtgtatatgcttatgcatatgcatgtgtataaactcatttaactatcataataaccctatgaagtatgtactattattatttccactttataggcagggaaactaaggtacaaaaagataccta

SEQ ID NO: 495858 - DNA, 624 bp, Homo sapiens
gctagaagttggtaaacatgtctttggaattaatttgaccttgagaaagtcattgaattttcttggccttagtgctttgagcccccagataaagaggctgaatgaactatttgacatctaagatttctgttaattctaaaatgttgtaattcttagaaatgatcttttaacagaattgtgcttccacaggtaatatgattagtaggatagattttctagttcagttacagttaaaactcatagaggtaaaagggcagtaagtagagtagaaatgtttttctattctcaattctctttatttaattgttatgccattttagcatcttatacttttttttttaatttcatgcctcagtttagaaaacattaactaccactggacctgtatatgttgttctctttgctttcagttagaaatatgatttttatttatttaataaataatatagcatttaccatatgctcactgttccaagtggtgtgtgtaygtaaattcatgtgtgtatatgcttatgcatatgcatgtgtataaactcatttaactatcataataaccctatgaagtatgtactattattatttccactttataggcagggaaactaaggtacaaaaagataccta

SEQ ID NO: 495859 - DNA, 466 bp, Homo sapiens
ttatacagttcagtaccttatactaactagggtttccaaaatgtaaagaaatgaataaaggaataattaaacagaaagtaggcacttgaatatttaatagattaaagcttaacatagttacaaaaatgtctaagacaaaattaacaaatcattgaggaaatactctaatagtatttacttttcatagtgatactttagaatttcaagaatttaaacataaaatggagacattaaattaagggtcatttacaaaaatttgcatattgagaattatcagcctggcagtagtactgacaggtgggccccttayggactcagaaactgggaagacaatgaagtcatcatttagatgagaggcaaaaggctggcagtgggaggagaacaaagctgtttagcatggagagaatgagaatggtggagtaaaggaatgttttggttgtgggagcaggaaaaattacatcatcaa

SEQ ID NO: 495860 - DNA, 655 bp, Homo sapiens
aatatgtctctcaattacctattaatacactgtattcattgtcagaaatttaactagtcattaattatttcatacatgctacttttatctctttaatgtctttatttcttttgttttatttccccctttaatattgaatatatagttagctctaagcatgactgtccctaagggagaccattttattcaaatattttatctgaaaagcatacatatgaaaagcatagattcatgcattctgattagtcaaactgcacagaaatagatttcctaccgccaacagagtcatttgaaacagggctggcctgtggcaaggggactgagaggagaaagatgggaccatgcgctaggcagtagctacragagaattcctacatcagaggctctgcaggacagctttctgcttgcaaggtggaccagagattcaaaaaacttgctttgaagctatagttaacaaacaagtacacttacttcaattataggttgtatatcaataaaaatagcagcatttcccaaggatattcttacttatacgctacataagattaggaaagcatacacaagccatattaattaaattaataattcattaaattaagcattgaggagagtggactgcaccccactaacacctcaaaattttattgagccactg

SEQ ID NO: 495861 - DNA, 655 bp, Homo sapiens
aatatgtctctcaattacctattaatacactgtattcattgtcagaaatttaactagtcattaattatttcatacatgctacttttatctctttaatgtctttatttcttttgttttatttccccctttaatattgaatatatagttagctctaagcatgactgtccctaagggagaccattttattcaaatattttatctgaaaagcatacatatgaaaagcatagattcatgcattctgattagtcaaactgcacagaaatagatttcctaccgccaacagagtcatttgaaacagggctggcctgtggcaaggggactgagaggagaaagatgggaccatgcgctaggcagtagctacaagagaattcctacatcagaggctctgcaggacagctttctgcttgcaaggtggaccagagattcaaaaaacttgctttgaagctatagttaacaaacaagtacacttacttcaattataggttgtatatcaataaaaatagcagcatttcccaaggatattcttacttatacgctacataagattaggaaagcatacacaagccatattaattaaattaatrattcattaaattaagcattgaggagagtggactgcaccccactaacacctcaaaattttattgagccactg

SEQ ID NO: 495862 - DNA, 578 bp, Homo sapiens
tgtgaatgttgaatgtgaaagttgaatcctaccaaatctctcctttgtccattttccaactccatctagattttccctggatgcaatgaatgccatccttcctaatcctcactacctatagcagaagttagtgccccacaaagaatcctcttacttgttgttacggactgaatgttttgtgccctccaaattcatatgttgaagtcccaacacccagtgtgatggtatttggatatagggcccttaggaggtaattaggatttgatgaggtcatgaggatggggtgctgatccaatgggattagtgcccttataagaagagacaccagaaaatttgtggtctctttttctgcatccacacaaagaagagctcatgtgagcacacagcaatatgktggtcgcctacaagccaagaaaagaggcttcagaacaaaacctaccttaccagcaccttgatcttagacttccctgcctccagaactgtcagaaatgaacttctgttgtttaagccacacagtctatggtatcttgctatggaagcctgagaagaataagatacctgccattgtgcccactcca

SEQ ID NO: 495863 - DNA, 578 bp, Homo sapiens
tgtgaatgttgaatgtgaaagttgaatcctaccaaatctctcctttgtccattttccaactccatctagattttccctggatgcaatgaatgccatccttcctaatcctcactacctatagcagaagttagtgccccacaaagaatcctcttacttgttgttacggactgaatgttttgtgccctccaaattcatatgttgaagtcccaacacccagtgtgatggtatttggatatagggcccttaggaggtaattaggatttgatgaggtcatgaggatggggtgctgatccaatgggattagtgcccttataagaagagacaccagaaaatttgtggtctctttttctgcatccacacaaagaagagctcatgtgagcacacagcaatatgttggtcgcctacaagccaagaaaagaggcttcagaacaaaacctaccttaccagcaccttgatcttagacttccctgcctccagaactgtcakaaatgaacttctgttgtttaagccacacagtctatggtatcttgctatggaagcctgagaagaataagatacctgccattgtgcccactcca

SEQ ID NO: 495864 - DNA, 564 bp, Homo sapiens
ctggtcaacatctttttgataatcaggcccaccctaaaagagttgtttttttttttcccctgatggccaaattaaggaaaatttttgaaaggtgaataaaatacaatgttaaatatagtttcaaataccatcactccattctatttcaaaagcatttcagaatttacaaaacttcttatatctcatttgatcctcatctcctgagctaaactattatctgaagctccttaaatccaatttaaagagcctcagagaggcaactgactgatttaagtamcctcaatctttaaaaggcaaaatcacaactgaggcaaatggcttctaaacccagtaatcttaatactataccatgccatgcttatattatgcaaatcatcaaagagaatcaattatgcagaacgtcaattgtttttcacttttcatgttggttttcttttcaaatccataatatcctttaagttcacacatgggtcccacaaaggacaggatggaatggagtgaagagtaaagtagatccacattaattccggaagcaggtaaagctctaagaactctgcacacttt

SEQ ID NO: 495865 - DNA, 462 bp, Homo sapiens
cgtgcagccatccatgcgggatggctacataggctccacctacttcgagcgctgcctgaaatagggttggcgcatacccacccccgccacggccgcaagccctggcatcccctgcaaatatttattgggggccatcagtaggggtttggggggcggccggtgggggaatcccctgccttggccttgcctccccttcctgccacgtgcccctagttattttttattaacaccatgtgattaaggtcagcgctgcctcccccgacccactcagcgatgggaaatgaattggctgttctagcccccctgctgggtgcttgttcagccaaagggcctgggtagctgggcccagacaaaccacccctccacctctggaggtcccaccaggctattaaaggggaatgttactgcaaaaaaaaaaaaaaaaaatgcggwgtttggttttttgtccttgtgatagtttgc

SEQ ID NO: 495866 - DNA, 506 bp, Homo sapiens
tcaaggaggtggcaatagggtaataaaaagggctcatggccaggcacagtggcttatgcctgtaatcccagcattttgggaggctgaggcaggaggatcatgaggtcaggagatcgagaccatcctggccaacatggtgaatccccgtctctactaaaaatacaaaaaaacttkctgggcatggtggcatgtgcctgtaatcccagctacttgggagactgaggcaggagaatcgcttgaaccagagaatcagacgttgtagtgagctgagatcgcaccacagcattctagcccaggagacagtgccagactccgtctcaaaacaaaaagaaaaaaacaaacaaaaaaagtgctcaggggttggtgtatgatgtgtttgcagtttcaatgatgaagtctttagagtaggagcctgtaaggaaaggtatacttgtaagtgcaagtgtgccgataataagggaggaggaagtgaggggcaaagtcttgaatagccctcctattctttg

SEQ ID NO: 495867 - DNA, 506 bp, Homo sapiens
tcaaggaggtggcaatagggtaataaaaagggctcatggccaggcacagtggcttatgcctgtaatcccagcattttgggaggctgaggcaggaggatcatgaggtcaggagatcgagaccatcctggccaacatggtgaatccccgtctctactaaaaatacaaaaaaactttctgggcatggtggcatgtgcctgtaatcccagctacttgggagactgaggcaggagaatcgcttgaaccagagaatcagacgttgtagtgagctgagatygcaccacagcattctagcccaggagacagtgccagactccgtctcaaaacaaaaagaaaaaaacaaacaaaaaaagtgctcaggggttggtgtatgatgtgtttgcagtttcaatgatgaagtctttagagtaggagcctgtaaggaaaggtatacttgtaagtgcaagtgtgccgataataagggaggaggaagtgaggggcaaagtcttgaatagccctcctattctttg

SEQ ID NO: 495868 - DNA, 635 bp, Homo sapiens
ctgcaatcaattattcttttagagaggcagtttaacaaacacttgagagtaggagagcccctactctcctgaacactgcacgcacaatcttcccaaacctagggttcgtggggatgaatacaaaaggggtccttgggtggaaatgaggattgggagccactgaattgtaagcgactgcagttagagttcagcctctgtagtaatcctaatgcagaaataaaaacattctgctctttataggaagttacagttcttcccaggaaaaacttcataaatgaggcttctcttgtttgccaccctgaggttggttccagccagtttcacacattcctaagttgcagttttggtctgtgcataaagtaattcttcagtgatttgcgtttctcttgtaggacatctgaataaccacacagacctttcactatagttctctgttgtgttgatgaaagggatggctgtcaggttagatgcagtttagcaaaataaaataatcaccagcctatagaacactttcattaaatcatcrtgtgggacggttgtgtacttttgttctctaaagattttgaaatgtgttcttttatctgtcactcggttccacagtcacggtgtatctgtcccttcaaaactaagaaata

SEQ ID NO: 495869 - DNA, 573 bp, Homo sapiens
tttcacaaagtctgtattccttgttttgtgtagaccttgaagttatagttctgttatctttatggtcagcctgtgaccctgacatagattcccttcactgttgaggttcatcccctcttcctccatcagaccaggtgtttacccctggttgctgggtcccatgaggttccagagttctgcacaggtgattatgattgtttttttccagcttaatagttgttttgttgttgcaattgatatctgaaatttcttactctgccatttttctgacatcagtaataatgtatttgaatttgaaaaatcgtacttaaatatagcctttaatgtttaataattacctttctcctttattgatattcagtaagaaaaaattgaaaatgaattcattaagaagaaaacaattattcrtaattataccccctaaaagcccttcattgctgttaacaatttggtctgtatctttcaacactttttcttcttcatatgttcatatttccttaacaaatatttatagagtactttcaatgtgccaggtacgctaagttcttgggttgtgaggttatgtaatatgaa

SEQ ID NO: 495870 - DNA, 560 bp, Homo sapiens
tgataaatacattatttctgrgtgcgtctgtgagggtgtttctggaaggagattagcatttgaatcagtaggctgagtaaagaagatccacgctcaccattgtgggtggacatcaccaatccattgctggcccagatgaagcaaaaaggcagaagaagggcaaattggctctctctacttgagctggaacatcagtcttttcattcccttggacctcagagcttctggttggttcttggacctgcaaactctaggacctacaccattggtttccctggttctcaggcctttgaacttggaccaaaatacaccactggctttcctcgttctccaacttgcagacagcagacaaaggttccatttctccaaggaatcttgacaagaatacttatattagtcattcgttcttcctgcatgaacatgcatctaggtcttgtgggagcactgtaagtaaaatcagaagaaaaaaacccactagtttattaaaactcttgcatgggcagaagctgctttagttctcttcttaaatatgtcctattccattacctttggccccttga

SEQ ID NO: 495871 - DNA, 560 bp, Homo sapiens
tgataaatacattatttctgagtgcgtctgtgagggtgtttctggaaggagattagcatttgaatcagtaggctgagtaaagaagatccacgctcaccattgtgggtggacatcaccaatccattgckggcccagatgaagcaaaaaggcagaagaagggcaaattggctctctctacttgagctggaacatcagtcttttcattcccttggacctcagagcttctggttggttcttggacctgcaaactctaggacctacaccattggtttccctggttctcaggcctttgaacttggaccaaaatacaccactggctttcctcgttctccaacttgcagacagcagacaaaggttccatttctccaaggaatcttgacaagaatacttatattagtcattcgttcttcctgcatgaacatgcatctaggtcttgtgggagcactgtaagtaaaatcagaagaaaaaaacccactagtttattaaaactcttgcatgggcagaagctgctttagttctcttcttaaatatgtcctattccattacctttggccccttga

SEQ ID NO: 495872 - DNA, 560 bp, Homo sapiens
tgataaatacattatttctgagtgcgtctgtgagggtgtttctggaaggagattagcatttgaatcagtaggctgagtaaagaagatccacgctcaccattgtgggtggacatcaccaatccattgctggcccagatgaagcaaaaaggcagaagaagggcaaattggctctctctacttgagctggaacatcagtcttttcattcccttggacctcagagcttctggttggttcttggacctgcaaactctaggacctacaccattggtttccctggttctcaggcctttgaacttggaccaaaatacaccactggctttcctcgttctccaacttgcagacagcagacaaaggttccatttctccaaggaatcttgacaagaatacttatattagtcattcgttcttcctscatgaacatgcatctaggtcttgtgggagcactgtaagtaaaatcagaagaaaaaaacccactagtttattaaaactcttgcatgggcagaagctgctttagttctcttcttaaatatgtcctattccattacctttggccccttga

SEQ ID NO: 495873 - DNA, 583 bp, Homo sapiens
ctgcaaagagtggtttgtgccagcacttcagagatcgctttagcctttttgttcagagaggacatatttctctctgtggattaacaattatacattctaccacaatgtgcataaaataataatattttaaatctaaagagtagactacactagaggtacagcttttataacaaagggaacaatttcatttgtattgaatatcattgaaactgttcaatgatattactctaagacatatatactttcttgacagtaaaaagcaacaaaatattaaggaatgagttgaatgttttcagataaaatgtaaggaaataggaaaatatataaaaatctctcttaaggtaaattatcagaaagaattttttagattctcttttatattgtcttctacttcctaccaaagaagtttttccctcctaagctttttttttcaatctcttacaaacatctcaagtacttttacctgaacacttgttatgcatttgaaaaaaggaggcactcatgaatgaaaccaacaagacaaatatttctcatttaacaggagatactgataatgcrtacctagagatatactctcaaaaat

SEQ ID NO: 495874 - DNA, 598 bp, Homo sapiens
ctgcactccaccctgggcgacacagcgagactctgtctcaaaataaaagaaaaaaaaaaaaaaggaaaattgtgctaattttcagttaacagttcaattgatattttgcaccttttgatagacaaatatgtctttatggccccacagctatgtctgacaagggaaatttctttcacctatcatccagcattccgttgttcttgctccgaggatgrcaaagaggctcaatcaagacccaggcctgattgttaatccaaaaatatagaaggcctctgcttagccttctcataatgtgcccattcactttgctgacacaggctcaaaaacctatttttccgtcttggaaaatgatgaaaaagtttgcatggattttactgtggatcctggtccacaagagatgcagacagcagggggacggtggcaggtggcctcagtgcaagcctcgtcataacttgctggcttgtttcactgtgctgcttcttcattgcccccacaatgctttcatgcctctgtgagagaaaaccaccctccctgagtcacggaaacaaggcctgggaatgcttttgtgtggtcttatctgcttcagtctcccccttac

SEQ ID NO: 495875 - DNA, 655 bp, Homo sapiens
tacatcagtagtatacaagacttctaattttccatatcctcactaaaatatgtattaggcactgtctttactgatattcagccttttgtcttgtataaayacttctcaggttactgggagcctttgattaaattccagggttctgacaaagttgttttgacaatttttgccaattttctcattgctattatgaaaaaaaatttagaggtccttaccccaccatttcactgatgtctatccaaaacccttattcttaattgccctactatactgcccaatacagaagtaatttataaaaaaagtccttttttttttaacaaaagtttatttaaatctattaagtactaggaagaattgtgtacagagtacagcatagagattctagacttatggtgatacccaaatcaattttagtatctggtcatttttgaaaatagatggtcactagaacgcttctcccacttacataaacaaacagaagtacatcagagttacatagtctattgagtgggatgaagaagagaaacaggttctgtggaaaaccttgaagctctctcatctgcagacactatataaagggtttcagcttctctctttgtagatgaagaaactgaaaaatactttggaccctcttgttcacgtctcatcctgatgg

SEQ ID NO: 495876 - DNA, 593 bp, Homo sapiens
atattatgaatccaaagctcatagagcttgcgattttgcttaaagttataacaccgaaataaagctgtgtctaaaatcaatactcttctcactctgtaccctttctctgtgcggctaagctcctttctgatctctgcattagtcaattgatgatgcttttgcttataagcaccasggatagataaaaaaattgcttaagatggcaagagcctgtatggtttgtgacacatgttgcgtatgttggatgaaaataatttaaagatcgtctcctttccctatatgtgtttgttaatgcttataatacttctatgacttagagttcttctggtatatttcagactgattctgagttgtcaggaaagaggattttcactccacagctcagatcttttaaagcttcttatttttctttgtacctggaaatttatttcttatccacaactcagagtggcatcagacttaaacttaagttcctactaaaaagactgtgctctgctggtctgttttttttcctgtgctcttcccccccaccctgggcccccacataattagtccctcttgcaacatcctcctcttcttctgtccccccagtt

SEQ ID NO: 495877 - DNA, 529 bp, Homo sapiens
aagttataacaccgaaataaagctgtgtctaaaatcaatactcttctcactctgtaccctttctctgtgcggctaagctcctttctgatctctgcattagtcaattgatgatgcttttgcttataagcaccacggatagataaaaaaattgcttaagatggcaagagcctgtatggtttgtgacasatgttgcgtatgttggatgaaaataatttaaagatcgtctcctttccctatatgtgtttgttaatgcttataatacttctatgacttagagttcttctggtatatttcagactgattctgagttgtcaggaaagaggattttcactccacagctcagatcttttaaagcttcttatttttctttgtacctggaaatttatttcttatccacaactcagagtggcatcagacttaaacttaagttcctactaaaaagactgtgctctgctggtctgttttttttcctgtgctcttcccccccaccctgggcccccacataattagtccctcttgcaacatcctc

SEQ ID NO: 495878 - DNA, 593 bp, Homo sapiens
atattatgaatccaaagctcatagagcttgcgattttgcttaaagttataacaccgaaataaagctgtgtctaaaatcaatactcttctcactctgtaccctttctctgtgcggctaagctcctttctgatctctgcattagtcaattgatgatgcttttgcttataagcaccacggatagataaaaaaattgcttaagatggcaagagcctgtatggtttgtgacacatgttgcgtatgttggatgaaaataatttaaagatcgtctcctttccctatatgtktttgttaatgcttataatacttctatgacttagagttcttctggtatatttcagactgattctgagttgtcaggaaagaggattttcactccacagctcagatcttttaaagcttcttatttttctttgtacctggaaatttatttcttatccacaactcagagtggcatcagacttaaacttaagttcctactaaaaagactgtgctctgctggtctgttttttttcctgtgctcttcccccccaccctgggcccccacataattagtccctcttgcaacatcctcctcttcttctgtccccccagtt

SEQ ID NO: 495879 - DNA, 626 bp, Homo sapiens
gtgacttgagcttgttactctacccttctctgtaaaggcacctcaatattctcatctataaaatggtgataataatagtatatacctcacaggattgtcgtgaagattaagtgaattaacatatgatctaaaatatttacaacagtgactggcaaatagtaagcattcaaggaatattggctggtaatattatcagctatatgctctttaaagacagtgactaattcattgttttaaaaatcccacatgtggcctagtgttgcaaataggtatcacacttgctttactgaacaatttttaaaaagcatttatgtactcctaatgcaatttcagaaatggaaagcatcctttaaatcactggycatatacaggataaaaatattgttccagtaattcttaatatataaggaatttattatcagggaagaggaatagaatatcttttaaaataatgaccctgaagatttaattttctaatttaaagaaaactgcaaggctaagaagaaagaaaactgagtagcattcacagataaatgtggactgcaggttatttcattcttctactataatagcaaggcatccttttattataagcctccacctgtgttggttattaaaaaccatgt

SEQ ID NO: 495880 - DNA, 494 bp, Homo sapiens
ataagcttgagcagtcattttccctctgtgagtttcacccaktgttgaaatggggttataaaaatggctatttcagagaggtgttatgtgacgaattgagatagcaaaaataatcactgtaaataaagcctagtacattgcaggtgctccacagatggtatctctactaaaagattcaaagcacacaattaggccataccgctagaggggtacaaagagatcataagtagaactagatggggaggggaactctactggccttttccttccttgaaatttcggggttgcacttctctctcttacctccaatgaacccagtgccagggctgcctccctgactcacgggctctagccctttgggctctacccaaattggatagagtagaaaggaggggtagagtggatggtcgtgacagcagctctgcagtgtttgaagaaccaagattagagtgtggggctgaacaaaaggaaccagggataatagttttcatttg

SEQ ID NO: 495881 - DNA, 645 bp, Homo sapiens
ctgaggattctaagtttattttttccacagtaaggcataatataaagtgacggaacaaatttaatactgctgggtctgattaaaatttataactttgaagaaataaacagatttgcatttctccaagattatgttttccctaagtggtagtttgtcaacagaaagctacactgaataaaatctcagagatatccaacttccaatacttgctgctttattcaggtctgatctgaccatctggaagaatttcattaggttttaattatcatgcactaagaacatatgcagagcattttcaaagaggagccttcatttcatgctgagtctgagaaccttatcatatgaggaatgtttgagagaataggggtagtatagcctgaagaagtggtctcaaggggccctgttcactgtcccagacaggatggacatggacaagaaagaagcagaccagttttatgtggacagagccagaatcaaacagcgagtttcaaaatggcaaatgtcagcccagcttgaaaaaatgaattgtctaaaagtgaaaaaaaaaaaaamcccacaaaacacacaaaaaaactgagaaatttctctgatgtccccttgttataaatattacagaggagatttttgcattggggtatgaggtag

SEQ ID NO: 495882 - DNA, 583 bp, Homo sapiens
tgtgtccccaggggaggctctgggcatcccaaactgtgagcctgccctttcccaagtgtgctaggccctgccaagctcctgcttcatggcctatgctgttcattccatctggaatgctctcttccccctgctttccatcctagctgagtgacattgggcaagtgaccagatctctcttgagcctcaatctcttattctgtgaaagagtgctcatggaacctactgcatgggaccatgaggataagactatagttgagtgtggtgattgcagtagcctccaaagctgtctcctgcttccaatttcatcccgctactgtgcattctttacacagygatcctgtgaccgagggtcagatcagggcaggcctctgctcagaatcctctccacagtagcttcctgtcccagtcagaggaaaagccaaatcttagcatggccctcagagcttcctggtacttctgacctcatctcccaccccaaggccatggtgtatggttgatcatgctgggttctgcacagctcattgtggtgcatgtaagtggcactcacttcctccccaacttatgcattgcacaacttgtgcag

SEQ ID NO: 495883 - DNA, 518 bp, Homo sapiens
tgtgtctagatgcatatggtttatgtgtttgtaaagtaaaatacataaataagctgatcacgtaaaagtgattgtgactatagtagctcttttggtgcaccctatcaaagcttttagagtggagtcattttagaaatcaaaagcacaatctctgcttttctgaaggccatttcagggagatgacatcrggagaagacagagtgctagtgtaaccctgaaaaccctttgtgttttaggaaaatatcaatcttttggtctcaggagatttctggttctgcaaaatgtatgctttatttatagattacactcagccacattaatcaagaaaacaacatccagtctccccaaatcacgatatttgtctttggggatgctatatatttgtggttctcatgaacatggtggccctgcacgaagaccacagtgggttcctggtgggtgtacgctgaatgagcctcctgattgtgccttgcttcaatgaattgtcagttttgctcatattccctgagtatccacca

SEQ ID NO: 495884 - DNA, 633 bp, Homo sapiens
aaatgatgtgatcagaaatttcatgatagagatttatttagattaatgagaaaaagttctctataataacttgggttgttcttgctgttcaacttcagtcgcttttaaggttgctttctattaaaaataagttaatagttcttatatacactgtactgcatatttccctgtaatgtttcttactaaaaattaccagatctgatggatttaccctaaaacacctgcagtttgccgggatattgaaatcaatcttaaaatcttaatgaaacactgtgacttaatacagtgctgaacttcctaggtttgatatgcaccasagaaaagatggtgatgatgataaaaagtgaaattgtcatgggttctgcaaagaagccctgtaacctggacagatgtgtaaagaaatctgctttcttaagtcacacatctaatgctacttatttttaaaaaatcatttgggaaagtctttacatgatagcaaaaactacacagtcttgaaaaaaatctcctgaatctttaattttaaaataccccaaatgtttttataagcataagaatttttaatgactgtcattttataatgtagaggtatttagtttttcagaatggaatgggagaatataattatgtttagtt

SEQ ID NO: 495885 - DNA, 633 bp, Homo sapiens
aaatgatgtgatcagaaatttcatgatagagatttatttagattaatgagaaaaagttctctataataacttgggttgttcttgctgttcaacttcagtcgcttttaaggttgctttctattaaaaataagttaatagttcttatatacactgtactgcatatttccctgtaatgtttcttactaaaaattaccagatctgatggatttaccctaaaacacctgcagtttgccgggatattgaaatcaatcttaaaatcttaatgaaacactgtgacttaatacagtgctgaacttcctaggtttgatatgcaccacagaaaagatggtgatgatgataaaaagtgaaattgtcatggrttctgcaaagaagccctgtaacctggacagatgtgtaaagaaatctgctttcttaagtcacacatctaatgctacttatttttaaaaaatcatttgggaaagtctttacatgatagcaaaaactacacagtcttgaaaaaaatctcctgaatctttaattttaaaataccccaaatgtttttataagcataagaatttttaatgactgtcattttataatgtagaggtatttagtttttcagaatggaatgggagaatataattatgtttagtt

SEQ ID NO: 495886 - DNA, 561 bp, Homo sapiens
tccctgagtgattagttttatgacaggatttacacacatcctgtaggcaaaggggggttatgacattccaaacaagaaatayggtagaaagatttagtattgataccatgtatcgtttctagctacaaacttaattatctcttagcagccaaaatttattttattttaggatgggtagatacaggaagggctagaagcacacaaacaaaattttcttcctttctcatctataaaacttcctaactaactctatctggaaacctctatcagccatatgctgatagaggtcatgtgtatctcctcaataatagcttttcttgccctaacaaatgacctagaagaaagaaaactggattgctgcaacatttaaaatcctctggttgttcaattacgttgagctacaacattgacaagcttatttttgttttgcctctaatattcatgatacaaactccaacaagtgttactaaaataattttgttctttaagaattcacaattatttccatcaatcagcaggtattggatgctggtgaatgactaatgctacacctgggaattt

SEQ ID NO: 495887 - DNA, 561 bp, Homo sapiens
tccctgagtgattagttttatgacaggatttacacacatcctgtaggcaaaggggggttatgacattccaaacaagaaatatggtagaaagatttagtattgataccatgtatcgtttctagctacaaacttaattatctcttagcagccaaaatttattttattttagkatgggtagatacaggaagggctagaagcacacaaacaaaattttcttcctttctcatctataaaacttcctaactaactctatctggaaacctctatcagccatatgctgatagaggtcatgtgtatctcctcaataatagcttttcttgccctaacaaatgacctagaagaaagaaaactggattgctgcaacatttaaaatcctctggttgttcaattacgttgagctacaacattgacaagcttatttttgttttgcctctaatattcatgatacaaactccaacaagtgttactaaaataattttgttctttaagaattcacaattatttccatcaatcagcaggtattggatgctggtgaatgactaatgctacacctgggaattt

SEQ ID NO: 495888 - DNA, 630 bp, Homo sapiens
tccctgagtgattagttttatgacaggatttacacacatcctgtaggcaaaggggggttatgacattccaaacaagaaatatggtagaaagatttagtattgataccatgtatcgtttctagctacaaacttaattatctcttagcagccaaaatttattttattttaggatgggtagatacaggaagggctagaagcacacaaacaaaattttcttcctttctcatctataaaacttcctaactaactctatctggaaacctctatcagccatatgctgatagaggtcatgtgtatctcctcaataatagcttttcttgccctaacaaatgacctagaagaaagaaaactggattgctgcaacatttaaaatcctctggttgttcaattacgttgagctacaacattgacaagcttatttttgttttgcctctaatattcatgatacaaactccaacaagtgttactaaaataattttgttctttaagaattcacaattatttccatcaatcagcaggtattggatgctggtgaatgactaatgctacacctgggaatttggatattttgatgaatttgattattgatgaaakgcaacccttgccttttaaaaggtactatctacttat

SEQ ID NO: 495889 - DNA, 586 bp, Homo sapiens
attgaaagttcatggacaaatgtgatataaagaccagccaaaactacaaaataaggcagtgctactgttggaaagtaattgagagacactgactcatatgaatggtcactagtcatcatggagaaaattagaaggtctagtttcctgcttctgcgcacattttcatcagttttaaagacacactctttgcacacaatttacttttttagattccaccacatccaacatgttagtacattaagtaaatgttggctatagatagattaatattcatgtttgcattctcactatatgctacttctgttttcagtgagttctgcaatttatattgcaacaataattcacatggcaactttaatgtattacctttgggtgttttctgcaatataaagtcttgctgaaaaataagtggataaaaayatataaatcaagcacatatccatccctaaaaataattacatataacacattttcttgtctagtttaatgtatctctacatgttgctgtggtaattgctgacattaaatggaggaaaatacaatcctttgtaatatgttaagatgctcgatgaaaatatgtgtttta

SEQ ID NO: 495890 - DNA, 625 bp, Homo sapiens
cctcttatccagtaatatgagccccacttaacagggagcccacatacatacatacacaaacatatatgcagtacgtatgcacatttataaaacccacctagaccagattacccataactaaggagaccatatattccggtttgcctgagacagttctggtttatgcctgtcgacctaktgaaattactaacagcgtccctttctcaatactcccagtttagccaataaaacatacggtgatatttctaccccaaaccaacatggtttatgaaagacatgatggtaaatgcccacatgagcctataagacaaccctaataatgccaacaaacaatgacaaaggaaaataaaagggtaaatgagatcctacagacagggtcacattccatgaagggtatcttgttaaacaaaggcaagttttaagctcaccttgtacaccaaggattaatttgtcctcagctaaagatgacaaaattccaaacacaaacagcaggggaagaggtgaggcttgctagagctaatggcacctgggaaggcagctcagaccctagaaaatacaagtctgtgaagactctccaaagacgctgggaaggcttaggcccacaggcaggcaagcagtcacattt

SEQ ID NO: 495891 - DNA, 357 bp, Homo sapiens
ccacctaaatcagccactaataatccttttgtataattcccatttcttgagttatctgatgctgcaggcatcatcgtctkatgttttcttttgtgtctaacaaactaattcaatattcaattttggaattttgaatctgagacctgttgacagagatcatcaaatgtggtagtaaatgaagaagttgtaatagagaaagaagccaacaaggagaagatgagttgtgaagaagtctaaattgccatgtcacaagtcactgaaattgtgcttgagcctctagcatttcttctacactctgagtcaagcctgagcatattgttcttccttgaaatcaaatgcactttgagagacaggaat

SEQ ID NO: 495892 - DNA, 611 bp, Homo sapiens
ttctatatctgtgccatgtaataccaaaaagtaaaagaagaatgatctacggataaatgttatattgtagataaatctttaaataattatgctgtgtgaaagaagccagacatgaaagagtacctactatctggtggcttttatatgaaaatcaaaaaaggcatatgaatttttaattgagctgtaatggtcattatctactgataggaaaggggtgggagggaagtacaagagggaaggattacttgattgtgttattttatggtatatacatatttcaaaatttaattatttgtacaccttaatatgtggactttatcatatgtcaattctatcaaaatctttaaacctatagcaaatatcatatttatttttaaaataattacctatttgccttsaagataaagaagaaaacaatacctgttaccaatcttattaaatatgtgatggcagttcttgttcatcaacacagtaaggaaaaaagaatatgaagcttgtaacaaatgacaaaaagctgtcactatttgtagacagtgtagttctgtatataaaaactcaaagaatctataaacagctattaacattttaaattaacaagatagtgtggcatg

SEQ ID NO: 495893 - DNA, 647 bp, Homo sapiens
attatttaaaaataattattggaggcccttaactccctcttactctcatccaatgatcctacttcttacggaacagaaaaaattaatagatgccattattttgttaactgccgagaccaggtccgtcggggagaccctaacccagtggcgctacaggaattaaagacawacacacagaaatatagatgtgtgaagtgggaaatcaggggtctcacagccttcagagctgagagccctgaacagagatttacccacgtatttattaacagcaagccagtcattattagcattgtttctatggatgttaaattaactaaaagtatcccttatgggaaacgaagtgatgggccaaattaaagggataggttgggcgagttaactgcagcaggagcacgcccttaagacacagattgctcatgctattgtttgtggcttaagaatgcctttaagctgttttctgccctgggcaggcgaggtgttccttgccgtcattcccgtaaacccacaaccttccagcgtggctgttagggccattatgaagatgttacagtgctgcagagattttgcttatggccagtcttggggtcagtttatggccagattttggggggcttgctcccagcagttgactaccatatcagcataac

SEQ ID NO: 495894 - DNA, 647 bp, Homo sapiens
attatttaaaaataattattggaggcccttaactccctcttactctcatccaatgatcctacttcttacggaacagaaaaaattaatagatgccattattttgttaactgccgagaccaggtccgtcggggagaccctaacccagtggcgctacaggaattaaagacatacacacagaaatatagatgtgtgaagtgggaaatcaggggtctcacagccttcagagctgagagccctgaacagagatttacccacgtatttattaacagcaagccagtcattattagcattgtttctatggatgttaaattaactaaaagtatcccttatgggaaaygaagtgatgggccaaattaaagggataggttgggcgagttaactgcagcaggagcacgcccttaagacacagattgctcatgctattgtttgtggcttaagaatgcctttaagctgttttctgccctgggcaggcgaggtgttccttgccgtcattcccgtaaacccacaaccttccagcgtggctgttagggccattatgaagatgttacagtgctgcagagattttgcttatggccagtcttggggtcagtttatggccagattttggggggcttgctcccagcagttgactaccatatcagcataac

SEQ ID NO: 495895 - DNA, 647 bp, Homo sapiens
attatttaaaaataattattggaggcccttaactccctcttactctcatccaatgatcctacttcttacggaacagaaaaaattaatagatgccattattttgttaactgccgagaccaggtccgtcggggagaccctaacccagtggcgctacaggaattaaagacatacacacagaaatatagatgtgtgaagtgggaaatcaggggtctcacagccttcagagctgagagccctgaacagagatttacccacgtatttattaacagcaagccagtcattattagcattgtttctatggatgttaaattaactaaaagtatcccttatgggaaacgaagtgatgggccaaattaaagggataggttggkcgagttaactgcagcaggagcacgcccttaagacacagattgctcatgctattgtttgtggcttaagaatgcctttaagctgttttctgccctgggcaggcgaggtgttccttgccgtcattcccgtaaacccacaaccttccagcgtggctgttagggccattatgaagatgttacagtgctgcagagattttgcttatggccagtcttggggtcagtttatggccagattttggggggcttgctcccagcagttgactaccatatcagcataac

SEQ ID NO: 495896 - DNA, 647 bp, Homo sapiens
attatttaaaaataattattggaggcccttaactccctcttactctcatccaatgatcctacttcttacggaacagaaaaaattaatagatgccattattttgttaactgccgagaccaggtccgtcggggagaccctaacccagtggcgctacaggaattaaagacatacacacagaaatatagatgtgtgaagtgggaaatcaggggtctcacagccttcagagctgagagccctgaacagagatttacccacgtatttattaacagcaagccagtcattattagcattgtttctatggatgttaaattaactaaaagtatcccttatgggaaacgaagtgatgggccaaattaaagggataggttgggcgagttaactgcagcaggagcacgcccttaagacacagattgctcatgctattgtttgtggcttaagaatgcctttaagctgttttctgccctgggcaggcgaggtgttccttgccstcattcccgtaaacccacaaccttccagcgtggctgttagggccattatgaagatgttacagtgctgcagagattttgcttatggccagtcttggggtcagtttatggccagattttggggggcttgctcccagcagttgactaccatatcagcataac

SEQ ID NO: 495897 - DNA, 589 bp, Homo sapiens
cattgcacaaagaaaggatgagttttgtgaaagaaaagttcagttttggaaatgcagtattcaacatgtgctagagacatttaaatggagggaaacattggaaacttgggtttagacctatagggagtgagttttaggcttgtgatatagatgtgagaattcttagtacatagatgatggttgaatttcagaaaatgaaaagttagcctgtgtgtattaacatctagaatgctgtgaaatgacatttacaggatgggtggaagaagataaagagcagtgtgctggtaaacaaagctgattcgtagatgtgtaacatttgctagtttgtatgagataaacattcctatcatgacttatttttgagctgccagtgttacatcatagtgcagttgggaagaggctcacacacttggctctcttgaatcagtgcaagctgtttgcattatagaactagggaattyaggagaaagaggcatcaccagtgaggaattaaaaacaaagcgtaagaaaaccattaggggactttgattatgaaaagaggaaagagatggggagtgcgtggttgcttttctgttttgagttggaggaa

SEQ ID NO: 495898 - DNA, 650 bp, Homo sapiens
acagctgagactttaatagagttgacagatattaggcatatgagtaagagcagcataacagatgacagtggcaattatttatatttacaaagcaaaaaatatcaggaaatatatggatatagatatattctacactatatcttaatttatgtcatatttgaaaggttattttaggcaaatagtgtaagttatctaaaactgtttgttctaatatccagaaccaacatgtcattgcagaattgttgggaaggatgactgaagattaagtgattcaatgtgtctttgctgcctagaagtagttctaaaacatcaagtacattgtgagttttcttcttcttgttatttgttttaattgtgacaatgccttacttgaaagaggttttttttacatgtgtacacatacattattctgactrtgaattaacttctttgttaggaccataatgatgcctaggggagtcacaggtcaagtaggatgtaatacttgcaacttagggcagttcttctcccctcccccaattcatgactaaacttgggtaattggtatgctattgttttggattacttatctatttttcacaacgaatttaataacattttaaataaattatttttatataaactttattaaaacattaatcttcccatag

SEQ ID NO: 495899 - DNA, 328 bp, Homo sapiens
gtgacattttcaactgcagaatcccttggctctcttccttaagtcacgaaatccatgctgtgattgacattctctcagttttcagcttcacactgagaaagtacccagaccrgtcaactacattaaaatctcaggcattgtgtttgctcatttcagcattaatattttcacatcattattctactgaatgtattacttactataagtcacttcaaacagttgctgaaggtttacagggaataaggaaataaatcaaatattagatgccattagatgattcctggggtcttatgcctaaggcatcctgggctgcacactcagcactgta

SEQ ID NO: 495900 - DNA, 671 bp, Homo sapiens
actttttcctagcatctttatgctttctacgttttcttggatttttcatgctttttctacttttcttaactttaataattgagttaaaaaacttactagttttaactgcaagttttgcttatataaatttatatatcatttaaatacttagactttttcctagcatctttatgctttctatgttttcttggatttttcatgctttttctacttttcttaactttaataattgacttaaaaaactatccctcccaatgatttgtatatactcttgtcataactcttgacatttaattgtgcctacatagcttgacaagtctaaatgtattaaatattttaaaacttcccctcatgaaaacgtaaggaccttagactactttctttccaattatccttccttytgaatactgttgatcaaacatttgtaaaaattagtttatttgtttttgccaagattttaaacagaaatcatattcacattttgctccagggaactattctgctctttatcatggtatactgggctggatggagtgtgtgaaacagacccaatctcttccctaataaagcctccatgttagtataataatcaaaaggacacgaagataaggaaaatcctgcagcagagttcgtagcacactgatgcaacttagttcagagtgtattttggc

SEQ ID NO: 495901 - DNA, 671 bp, Homo sapiens
actttttcctagcatctttatgctttctacgttttcttggatttttcatgctttttctacttttcttaactttaataattgagttaaaaaacttactagttttaactgcaagttttgcttatataaatttatatatcatttaaatacttagactttttcctagcatctttatgctttctatgttttcttggatttttcatgctttttctacttttcttaactttaataattgacttaaaaaactatccctcccaatgatttgtatatactcttgtcataactcttgacatttaattgtgcctacatagcttgacaagtctaaatgtattaaatattttaaaacttcccctcatgaaaacgtaaggaccttagactactttctttccaattatccttccttctgaatactgttgatcaaacatttgtaaaaattagtttatttgtttttgccaagattttaaacagaaatcatattcacattttgctccagggaactattctgctctttatcatggtatactgggctggatggagtgtgtgaaacagacccaatctcttccctaataaagcctccatgttagtataataatcaaaaggacaygaagataaggaaaatcctgcagcagagttcgtagcacactgatgcaacttagttcagagtgtattttggc

SEQ ID NO: 495902 - DNA, 671 bp, Homo sapiens
actttttcctagcatctttatgctttctacgttttcttggatttttcatgctttttctacttttcttaactttaataattgagttaaaaaacttactagttttaactgcaagttttgcttatataaatttatatatcatttaaatacttagactttttcctagcatctttatgctttctatgttttcttggatttttcatgctttttctacttttcttaactttaataattgacttaaaaaactatccctcccaatgatttgtatatactcttgtcataactcttgacatttaattgtgcctacatagcttgacaagtctaaatgtattaaatattttaaaacttcccctcatgaaaacgtaaggaccttagactactttctttccaattatccttccttctgaatactgttgatcaaacatttgtaaaaattagtttatttgtttttgccaagattttaaacagaaatcatattcacattttgctccagggaactattctgctctttatcatggtatactgggctggatggagtgtgtgaaacagacccaatctcttccctaataaagcctccatgttagtataataatcaaaaggacacgaagataaggaaaatcctgcagcagagttcrtagcacactgatgcaacttagttcagagtgtattttggc

SEQ ID NO: 495903 - DNA, 602 bp, Homo sapiens
ccctgtcctctcctcctgcaatccactacccacctgcctcacactgccagtgtggctatttttctttgacaccaatgaaggagaccctcagtgataagtcagttaagcctgcagactctggaatcagataaccagggttcaaatccaggtttccatatttaccaacgatgtgacttcagcagtaactgaaatttccttagtttcagttcctaaacacattaaattgggataatgatagtacctatctcataaagtcattggaaaaattaaatgagacacttccgcctcagacacaggagaaggcccctgtgaaatgtcatcaagatcgttgaagtcaatggyggggtttcttccctgatcaaaagcctctgttgactccattctgcttacaaagtgaagttgaaagaaacgttcatcatgatattcaaatcccaaaagaaaattgccttaatctacctttctagatttcttctcttgtatccaagctctcttccccagctatgctatgctctaaccagagaccagtcacaactcaacagcctcctaactctgcccgttctccttccacacctttgctcaaggtgttccttgtgcctggaaca

SEQ ID NO: 495904 - DNA, 584 bp, Homo sapiens
ttttggaagcttaaatcagccatagggaggttgttaaccctatagaagcgagagccccacactcatctacatcatcagtatagatgttaaagatttttaagagtttacaggctgggcgtgctagctcacgcctgtaatcccagcactttgggaggcygaggtgggcagatcacttgaggtcaggagttcgagaccagcctggccaacatggtgaaaccctgtctctactaaaaatacaaaaattagccaggcatggtggcgcatgcctgtagtcccagctactcggcaggctgagccaggagaatcgcttgaacccaggagatggaggctgcagtgagctgaaatcgtgccactgcactccagcttgggtgacagagcgagactctgtctcaaaaaaggagtttacaaacaagcttaaaatacaatttatcatcagtattaggtaatcaatatttgaaaagttaaactgacgagcccagtgttttaatggaggtaacagatttgctgttttcaataaagctcagttatttccagaacttcttttccattatgcctgttttcttagttacatgaattttcatatt

SEQ ID NO: 495905 - DNA, 584 bp, Homo sapiens
ttttggaagcttaaatcagccatagggaggttgttaaccctatagaagcgagagccccacactcatctacatcatcagtatagatgttaaagatttttaagagtttacaggctgggcgtgctagctcacgcctgtaatcccagcactttgggaggctgaggtgggcagatcacttgaggtcaggagttcgagaccagcctggccaacatggtgaaaccctgtctctactaaaaatacaaaaattagccaggcatggtggcgcatgcctgtagtcccagctactcggcaggctgagccaggagaatcgcttgaacccaggagatggaggctgcagtgagctgaaatcgtgccactgcactccagcttgggtgacagagcgagactctgtctcaaaaaaggagtttacaaacaagcttaaaatacaatttatcatcagtattaggtaatcaatatttgaaaagttaaactgacgagcccagtgttttaatggaggtaacagatttgctrttttcaataaagctcagttatttccagaacttcttttccattatgcctgttttcttagttacatgaattttcatatt

SEQ ID NO: 495906 - DNA, 604 bp, Homo sapiens
aatacgtttaacctgttttgtgttttgttttgttctgttttgaacatgtctccatatttaagtgtctggcttaaatgttttgacaccctcttactgaaaaactggactttcctgatactcctgaaaaccsacaccaccccatttcaacataaagggtccctgttgcacaatggctgacgtgagaagtcaaataaatatcataagcatctaggagggatcactcaggaaaaaaagaagtcacattagttattgtaataaaaataacaataaaaaatggattaaacaggtattggagaactgaaacagttaaaaaaagaaaaaaaaagacagaacagaaacagtgactaccaaaggcagctaccattccatagagccaggggaactaagggaagaggttggccttatttgaacctacacctattagtttgagccagggccagcttcacggctgcgcaacctatgcagtcacatggcaccctgtgcacagaagggtctggcttatgttctgctttcactgtctgatgaacaatttttgaacaagggaccctcatttttcatttcacaccgttatggaactggtcctggtttgaatcatatgaaatgt

SEQ ID NO: 495907 - DNA, 549 bp, Homo sapiens
cgacttccctggccctccccctgcagaccagtgaacctcgcccgagaactcactaaagaagatttttgccctytttgtctcgcctcttggccttattgatccacggtgcccctccattgcctttcaagaaccattcccccattacctacagtggctgcagcaagcccaacgcaaggatagtctaagcccagacttgcctaaccttgtccccagataatggtatttctctacccaccctggtagctgaacacaaaacattgaaactcttgagagctttatggcccctcctactacctaagaaaccaaaatacttaccctggccaacttagggcaagcttagttccccctacaactactgtagctggtgctctcttgaaagcaccacctcctggctggaggccaactgtgatgattaatattgtcaacttgattggattgagagatgcaaattattgttcctgagtgtgtctgtgagggtgttgccaaaggaaattaacatttgagtcagtggactgggagagacagaccatccctcaatctgggcgggca

SEQ ID NO: 495908 - DNA, 387 bp, Homo sapiens
gttagtgggtgcagcgcaccagcatggcacatgtatacatatgtaactaacctgcacaatgtgcacatgtaccctaaaactttaattaaaaaaaaaaaagtacacattcaatgaattaaaaactaagcaaaatcaccaagtgataagagctcttgattttaaaatatwtgtagactttgtgagtttagacataagagacttgaattagagggtagggagcatagctcaaaacacgtctaaagctccgaatctcaaaataactggatttcatctcccaaacattgtttctaagttctacatcaaaagaaatataagcatttacttgtacaatattttagtcccatatgtaattccattaaatcataccagtacaggggaggcagagat

SEQ ID NO: 495909 - DNA, 596 bp, Homo sapiens
cagctgttccatcattagcacatttgaatgcttgtctgagtagcaaatatgtgattggaaccatttattttgttcctgcaattgcatttaatatctgcaatttggttttatccctagatctttgatatataaataaaatatacttaaaaaattgtctctgagtataattttcacatttataaaaagaataaaattttcgcattttatccatgtgaaatcagaggcatctactgaacaacgattgagagaatgtgtagctttatgattagttccagtctcaggagacaagaaaggatgccaatgatgcaactggtggacactgaagactcacatctgcacaataagctgcagcctgtgtccccagtgaaaagaaactacacataaaaagtctctattcccaacaataagtcctttaaccatcatgaaatcctggttgtctgcactaggtgctctgcttaatttggactcctcttatttgtgagtatgtttaggaagtggtagtgtaagtttttttttacacttctcttawtccctgttacctcctcatgctagaatatctgtggactcctcttagttgtgagtatgtttaggaagtg

SEQ ID NO: 495910 - DNA, 595 bp, Homo sapiens
caaaattccaaatatataatacagagatcatttttcttttcaaaattgctcatcacaggattcctttgaataacagctcatcaaagttgttgtggtaaccacttggtaaaagtaaaaagggctggaatggctgggcgtggtggctcatgcctgtaatcccagcactttgggaggccgaggtgagacgatggcttgaggccaggagttcaagaccagcctgggcaacatggcaagaccctgtctccactaaaaatacaaaaaaattagctgggtgtggtggcaagcacctgtggtcccagttacttgggaggctgaggaggagaatcacttgaatccagcagtcagagggtgcagtgagcagagatcgtgccactgcagtccagcctgggcgacagtgtgagactgtctcaaaaaaacaaaaacaaaaaaaagaaaaagtaaggcttggggcttgggataagaggaacatcaayctgcttgatgccatgccaactgatctataaccagacacagaggaaaaagcatctctgaaataatgaataatacttctactgtaggtgcatttgggtgaattcccatacattctactatctgc

SEQ ID NO: 495911 - DNA, 563 bp, Homo sapiens
tatttgacaggctacaggaaataaggcatggccacaggctatgatggagtgaccatatgtaggtctaycactgacaaactgattgcattcgaccaagtgaggatccctagcttgaaattacagaaatattttaaacttctacataggaagtaagaaatttaaacatgaaaatgtttaggctatatgtgaaaattatctggacatttgtcataatatgctcggtgtatttttatctgtagactaaatatcaatggtggttaaattttgctttgataatcagatattattgcagacatatgtcttcatctatgaagactatttgttgaatatatgcagtaatgttagccactatttaaaagcacttacgaggtactagatatatttaagctctaatctcaatgctatcacctctattacctgaagagtagatgcctcgtagccagatgagcaatagaattgagatttgaatccaaaatgtgacctataagctaatattatagtttaaaactattgagtcaattattttaaaattaattacttaagttatatataacttaagtcat

SEQ ID NO: 495912 - DNA, 590 bp, Homo sapiens
ccacagttgtgggtgttgaaccctacccttacccttaggccttcggtggaaccacgtggatctccccggggcctccaggaggagaaacgtgctctgtctccttggccaggaaaggtgaagctgtgtgacctagaacacacactcctgacctctctgagccactcctagtagcaggctgtgagctgcttrtctcactacgtagctaggaaataacagcatgaaagtgcctcagaaaggaactaccagtggctgtacagttactacacatcgttagtaataacggcactcccctcccaagacgacagcagaaagggattcagcagcagaaggcacagctcttttgcttctgggtgccagcaaacccttcattgagcacatattgagcatctgctgtatatcagggcctgggcagcaccatggacacaataatgcactcggtgtgcacagcccctgccctcaaaggccccccatgttggctgttccagaaacacaggagctggggaggtggcatcaaagcagagacctaaaagatactgaggaattagccgaatggaaaagacagggtgatttcctgatagaggaactgcata

SEQ ID NO: 495913 - DNA, 590 bp, Homo sapiens
ccacagttgtgggtgttgaaccctacccttacccttaggccttcggtggaaccacgtggatctccccggggcctccaggaggagaaacgtgctctgtctccttggccaggaaaggtgaagctgtgtgacctagaacacacactcctgacctctctgagccactcctagtagcaggctgtgagctgcttgtctcactacgtagctaggaaataacagcatgaaagtgcctcagaaaggaactaccagtggctgtacagttactacacatcgttagtaataacggcactcccctcccaagacgacagcagaaagggattcagcagcagaaggcacagctcttttgcttctgggtgccagcaaacccttcattgagcacatattgagcatctgctgtatatcagggcctgggcagcaccatggacacaataatgcactcggtgtgcacagcccctgccctcaaaggccccccatgttggctgttccagaaacacaggagctggggaggtggcatcaaagcagagacctaaaagatactgargaattagccgaatggaaaagacagggtgatttcctgatagaggaactgcata

SEQ ID NO: 495914 - DNA, 628 bp, Homo sapiens
tccatgccaagcactgcactatgagtgggaaacaatgggtgagtaagctctgtccttgccctcttggagcatatggtctagtgagagacacggacagatggacacataagcccacaagtgctatatacaagcccacacctccaagtgagaagaaggattctgtaagatgaaagtccagctactcgggaggctgaggcaggagaatggtgtgaacccgggaagrggagcttgcagtgggccgagaacacgccactgcactccagcctgggcaacagaataagactccatctcaaaaaaaaaaaaaaaaaaagatgaaagggagagatgtcagtgactctcctctctggggacaatggggtcaggccacagagtcttttgttgctttcagctctgtgtttttctctgttgcatccgtcttcctgtagcggccccaatgaagtctcctagatgtcagatgtccacacagagcctatttgtttgcttctgatcacagacttgtttgcaaagcaaggcttgtgaaagcatttccagtccaactagatgattaaaaccctgcaggagaatttcatgtccttggggctggggaactcaatgttccacattggtgtttctctctccttaaggacct

SEQ ID NO: 495915 - DNA, 628 bp, Homo sapiens
tccatgccaagcactgcactatgagtgggaaacaatgggtgagtaagctctgtccttgccctcttggagcatatggtctagtgagagacacggacagatggacacataagcccacaagtgctatatacaagcccacacctccaagtgagaagaaggattctgtaagatgaaagtccagctactcgggaggctgaggcaggagaatggtgtgaacccgggaaggggagcttgcagtgggccgagaacrcgccactgcactccagcctgggcaacagaataagactccatctcaaaaaaaaaaaaaaaaaaagatgaaagggagagatgtcagtgactctcctctctggggacaatggggtcaggccacagagtcttttgttgctttcagctctgtgtttttctctgttgcatccgtcttcctgtagcggccccaatgaagtctcctagatgtcagatgtccacacagagcctatttgtttgcttctgatcacagacttgtttgcaaagcaaggcttgtgaaagcatttccagtccaactagatgattaaaaccctgcaggagaatttcatgtccttggggctggggaactcaatgttccacattggtgtttctctctccttaaggacct

SEQ ID NO: 495916 - DNA, 628 bp, Homo sapiens
tccatgccaagcactgcactatgagtgggaaacaatgggtgagtaagctctgtccttgccctcttggagcatatggtctagtgagagacacggacagatggacacataagcccacaagtgctatatacaagcccacacctccaagtgagaagaaggattctgtaagatgaaagtccagctactcgggaggctgaggcaggagaatggtgtgaacccgggaaggggagcttgcagtgggccgagaacacgccactgcactccagcctgggcaacagaataagactccatctcaaaaaaaaaaaaaaaaaaagatgaaagggagagatgtcagtgactctcctctctggggacaatggggtcaggccacagagtcttttgttgctttcagctctgtgtttttctctgttgcatccgtcttccygtagcggccccaatgaagtctcctagatgtcagatgtccacacagagcctatttgtttgcttctgatcacagacttgtttgcaaagcaaggcttgtgaaagcatttccagtccaactagatgattaaaaccctgcaggagaatttcatgtccttggggctggggaactcaatgttccacattggtgtttctctctccttaaggacct

SEQ ID NO: 495917 - DNA, 620 bp, Homo sapiens
gcaatctacaaggtgctatgagaacttcagggaaggagaaactctgtgggaagagcctaggaaaccttccccaaacaaggcattgaggaaagagtggaagttcatcaggcatcagaaaaaccattcattcatgtattaacattcaacaaatacttaagaagtattgattgtgctgggcacccttgtggctgctggggatactgcagtgggtgaaacagcccagttcctaccctcatggagctaagtctggtggcagtgataggcacacaaatagtgaatcacaaacttggagaggtctatgaaggagaagtacaaggtgtctgaaaagtatctatctggggagctgatcatgtctgagaggcagaagaagcttcggtggggatgtgacatttgagcygagacaggaaggatgctgaaagcaggggtaggctgaaatttccgggctgagtgagcatcatgtgcattcatccactccactgacatttatgaagaacatgttgttgcaccagggtccctgatgatgcacaagacacatctctgacctcaaggagcacacagtcgagtggggagacagatgattgcaatagaatgtgctaagttcatggctggtggggtgggga

SEQ ID NO: 495918 - DNA, 499 bp, Homo sapiens
ttctgagaacttttcttccggatcactggatggttctgaggaagtaggaagtgtgtgctgataatgtctcagctccctgaagggcaggattccccggccatgttccccatcaagtctccaaggtatccatgtgtgcccacattgtaaagtatttactgagcgagctggggaacaagcaacactattgtgactttttccaatttcacaatccctgacaggccctgtcagagggatccctgccccgatggcacaccagcgcttgaacctcagtgcagggcctgtccctatgtgattcagccagaagagcatcatgtttaaggacaccatcatgggtgttcttattgaataccaacgatgtgtctggcgtggtcgggtgggtgacacaagggtaaggtagtccatgtttggaggcttayaggagctaacatcatacatgctttgagcctcttcccacctttccccaacccatgtccaggggttggcatcctgccttggtatg

SEQ ID NO: 495919 - DNA, 542 bp, Homo sapiens
tgtactgtagcatccatatcatctgagtctgcttgttcatacttctcttacttcataaaatggacatcaaaaaattattagggctgttttagtctcatggcttaattccttcctagttcttctacctgaaatgcttgacccccaactttgacgcccttccctcattcttcagggacaactcaacttccacatccttgaggatacatgtccacaatacctctgccaacattgacatccacctcctctgaatttccaaatcccatagactgtcagaggtttgctgcacaggcacattggaggagctctggtcctagtcctttcttatacagatgaggaaactaggacccagagagggcaaatgactttccagttggtggcaaagctggaaatagggctccattctcttgcttcttgaagctagcmcttcccttcgactcctttctctttccttctaatgtctgtggaatgtgggttgtgtatgctcagtctggaatggatatctctcttattatccccgtaaactcagtgcacttcttgaagat

SEQ ID NO: 495920 - DNA, 542 bp, Homo sapiens
tgtactgtagcatccatatcatctgagtctgcttgttcatacttctcttacttcataaaatggacatcaaaaaattattagggctgttttagtctcatggcttaattccttcctagttcttctacctgaaatgcttgacccccaactttgacgcccttccctcattcttcagggacaactcaacttccacatccttgaggatacatgtccacaatacctctgccaacattgacatccacctcctctgaatttccaaatcccatagactgtcagaggtttgctgcacaggcacattggaggagctctggtcctagtcctttcttatacagatgaggaaactaggacccagagagggcaaatgactttccagttggtggcaaagctggaaatagggctccattctcttgcttcttgaagctagcacttcccttcgactcctttctctttccttctaatgtctgtggaatgtgggttgtgtatgctcagtctsgaatggatatctctcttattatccccgtaaactcagtgcacttcttgaagat

SEQ ID NO: 495921 - DNA, 535 bp, Homo sapiens
gggacatggtctggcaaaaacctcagccttctccctaagctcttctgccttatgaggctgatagctcagactcaaaacagttggctgagttctccagctaaatattcatttctccagctaaatattsattccttcaatattaacaccatgtcagggagccatgttaagccattgcctcaacttggcactgcagctaaacataatgaaatgccagaaattagggtctagaattgattatggtaccaattctaatcctgaattctcaaagcaatatctagaaaaatattgaatcaagagtttttttttttaaatgaagatcctatactggagggagatgggcaacttctatttggaataacaagcagtatcaatgtctttgaattcaccttgaaaaccaatcctttggagtagaaagaattcatggtatttgaaatgtccaagattactaatgaggggaaaatctgagggacctgagaaggtggggttgcttgagaagcagtaaagcttctcaaagaagaaatggagatgccatgag

SEQ ID NO: 495922 - DNA, 589 bp, Homo sapiens
gccatggctacgcacacagtcagtggctgagtaattctgatgtgaaggctccacggcgggttcaggctcagcttggcagattctccgcttcaggccggctcctgcttcccgaacgttgcttgtcttgtttacccctgtgctatccatttttcccctcctgtgtttgcaattctcagtagaattcaggacaccacccacacttttacagcacgtcatttctacttgttccttgcatatctgcttctggcaagatctaatcttctttttagaagctttactatatcttagagcaaggttttccatcctcagaactattgacattttggactggataattttttgctctgggggccagtcctgtgcattgcaggattttgagcggcgtccttggcctctacccgctagtagcactccccttcccagtttgtgacaaccacagatgtctttagagactgcctaatgtccgccgggggtcaaaattgcccccagttgaaaaccactgtcttagaggaatgttctactgccaggttcccaygaattctaaatgagtatttagatgttacttagccttggaatttcaggacaccat

SEQ ID NO: 495923 - DNA, 633 bp, Homo sapiens
atgagtagaccgctcttacctactcttcagtttgttaggtaggaaagaactaaatttccattagacattttaagttgttaaattgaaaaaagcatcttaagagtatctctaaatttttgaaacaggtaattgttgtttttttacaaactctagtgtactcaatgcacttaagcatctaaagataattcatttgtcagaacttattcatagtatacttttttttttkgcttggaatattggtctggctccctttgtgatagctatttatatatttctttatttgaagccatatttagaattttctttcatagagggattatttttttaattatttaaatgtatgtagtccatgataaatatatgtgcaatttctttacacccttgagtttggatcatatcaagttttatcattattgtcatgatatgataattcaattatattacctttaatttagctccaaaatatttttactcagatgtaaataatattctaattttaaaaaatatttttctcactatttaaattattgtaggtatgagtgaaagttcatttttatcaaaacgtccttctacttctgaagtaaataatgttaatccaaagaagcctaaacccagcgaaagtgtttctggagc

SEQ ID NO: 495924 - DNA, 633 bp, Homo sapiens
atgagtagaccgctcttacctactcttcagtttgttaggtaggaaagaactaaatttccattagacattttaagttgttaaattgaaaaaagcatcttaagagtatctctaaatttttgaaacaggtaattgttgtttttttacaaactctagtgtactcaatgcacttaagcatctaaagataattcatttgtcagaacttattcatagtatacttttttttttggcttggaatattggtctggctccctttgtgatagctatttatatatttctttatttgaagccatatttagaattttctttcatagagggattatttttttaattatttaaatgtatgtagtccatgataaatatatgtgcaatttctttacacccttgagtttggatcatatcaagttttatcattattgtcatgatatgataattcaattatattacctttaatttagctccaaaatatttttactcagatgtaaataatattctaattttwaaaaatatttttctcactatttaaattattgtaggtatgagtgaaagttcatttttatcaaaacgtccttctacttctgaagtaaataatgttaatccaaagaagcctaaacccagcgaaagtgtttctggagc

SEQ ID NO: 495925 - DNA, 503 bp, Homo sapiens
tatgcctagtttgctttcccccagatattgtatggttagctcttttgtctcctttaggcctctactttgattgagtgagtctttccttgactacaaaatttaaaactgtatcctcttccctttgctttatcccagcattccctatctcctgtttatgttttacttttctctagatcatctaacatacttttattttacttgcttattgcctatgttctctcactatattgtgtgtggtttggtttttttgtctgtgcctggcacatagtaggcactcagtaaatatttgttgaataaattaatgtatatattgaaaatgatgtacgtggaaaataggtcccatctgtgatgttagactagtagctcacagggagagaaaatatcattcaatttttaaaatgttagtactacttttaaaatatttactgaatctagggaaataattaasctacattagatgttacctttactaaaaacagttacaagagtgaatatggttttat

SEQ ID NO: 495926 - DNA, 668 bp, Homo sapiens
ctccttgacaccctcctgagataccagacaataaaaaatgtagattttaaaaagtaaccatcaccttatgctttataataagccacaattttgtgctgttcttattctattaaagacaatcgctacaatatataaacatggttaggtaagtgacaaaaattcaatggtttctaattactgtgaaaaacttggattagtttttcttccaagattaagtgtcagacttctctaaatcttttaaaaatatatacattattctctgttcttgtttccatcatttcgcttgagatttttcagagcacttttgctgtcagtcttttgccattttaaaataagacctttcactacctgtrtccagtgtcaaaaagtccctgggtataactcctattaataattgagagtcctggtggctttctttctctgctttttagtattcagctaacttatctctgccaaagagaattaataacaagctggctagtatacattttaaatgagctatgcatattaaaaggattattaaaatgttacatgagatatatactcaaaggtagaaacaatcatacatgaaaagcaagaacgttctaatactacattctatgaataaacaggaaagacatggcagaggttcactggtttgctgacactaacagcaatgaagtcaagag

SEQ ID NO: 495927 - DNA, 600 bp, Homo sapiens
aaccagctgtcagtaggaggtttccttggaggttggagagcacaggaaaaatttaatcagcttaaaacacacacacacacacacacacacacacacacttgctaatgtgatgtgtgtgtagtttctttaatgagttccccttaactcaccttctttgcacttcatacttttttccactcagccacttacagaacaacattgctactctgtttattctcagaactggctaaatcaatttccactaagaacaggggtgttctcatcctgggagtgtgttttagccttggttgctggtgttctctggggactgctttctccaggtcttacttgagctctttatttcccgcatggtaycccaccacaccataacagctatttgcagcaattctgctagatttgaatgccccctgctctgttcatttacatcttatcgggaatttgccagaaatccctaggttcttctcactaatggtgaaaattgggggaacttttgaaaatgcacattgtcacctatgtttgtaaggtgaagaaagtggagaatcatcagcactagactgctctcctgctcctaatgagtactgaaacattaatattgtttaa

SEQ ID NO: 495928 - DNA, 546 bp, Homo sapiens
ctggtttgggtcataaattacttgttaattgtgtatttcttttttagaagaaaaaggaaatgataggcttctttttttccgatctccwcctgcctgtcattggtaggtggcataatgatctgagagagctgaggaaattgctgttcagaacttggactagttttaggtcagaggattgctggtcttcatttcctaatttgccaaagaaaatctccctgcaaaatgaacctgaaaactcacagacatatcaaatactttcttgttcaggcctcgtttattcttcagcatatgttactgtgagtaatatatgtatatttgtgatcacttttcaatatgtatagtaatattagaccataaatataaataataataatagatgtttatggagtatgaaaactctgttctagtaattaccaaattagttaccaaacaggacttaaaagaaaaatgatgttaacaaatagctgctatttactaatccctgaccatgtatcagcagtatgctatgcacttcacatgtataaactttatttaaacctcaaaaca

SEQ ID NO: 495929 - DNA, 546 bp, Homo sapiens
ctggtttgggtcataaattacttgttaattgtgtatttcttttttagaagaaaaaggaaatgataggcttctttttttccgatctccacctgcctgtcattggtaggtggcataatgatctgagagagctgaggaaattgctgttcagaacttggactagttttaggtcagaggattgctggtcttcatttcctaatttgccaaagaaaatctccctgcaaaatgaacctgaaaactcacagacatatcaaatactttcttgttcaggcctcgtttattcttcagcatatgttactgtgagtaatatatgtatatttgtgatcacttttcaatatgtatagtaatattagaccataaatataaataataataatagatgtttatggagtatgaaaactctgttctagtaattaccaaattagttaccaaacaggacttaaaagaaaaatgatgttaacaaatagctgctatttactaatccctgaccatgtatcagcagtatgctatgcacttcacatstataaactttatttaaacctcaaaaca

SEQ ID NO: 495930 - DNA, 506 bp, Homo sapiens
gatctttagccacaattataacattgtattagtaaattagtcttctctgcttgtaaatttggccaatagctatggtcattacaaatattttcagaaaggctttcattagaaactgagtaaaggagcccttgcccaatgtagtaatcttaccattaacttctttgtatccctaccaggtgtcaccccttgtcaatattggcatgggatggaggggggagaaaacatacctgtatcaacttcaagaaaaattgctaattagagattcaagaaaatctctaattagataatggtgatgatgatgatgatgatggatggatagatagataattttaattaaaakttttgttgagggagaaattagaagttgtaaagatgcttagtttgggaaacagataagactgaggtggtacttggtttatttatctgtttatttatacatagggttgaattttcttgtcttttttacaatttcaacttctattttagatacagggggtacatgtgca

SEQ ID NO: 495931 - DNA, 619 bp, Homo sapiens
tgaggtacttttttccaactatgtgtcttccttacttctctggcacatgaagcctttacctattctgagcacacaacagggcaaggaggtatacacaacagcctctagggtgcaatgggccaccttcacagttagctgacaagaattcctcatggcaccaaataggcaaagagggacctccatatgtcagtgggagctcttgggcagccttgataccagaaggaggaaagttacccagtggcagggcaagatcacaaagccaacaagcactcactaacccccagccatgctcagccctcaccatttcatttggctcaccccttgtctcttggcagtcaaaacctttcagagtgcatctatgcactcagccatccttcactgtaagtacccccagtctctcagaggaggaaaccaggtccatctggctgcacctccattttgctagcagcatttgttgagcttcaagcacactrggaagccaagagtcatctttaggggaatgaggaggaccacacgaagtggttgatgatggtagtgtttgttgttttcattgttgtgtattgtttgtttgcttgttgttttgccaagtgtagttacaaggtagtatcaatcaagccag

SEQ ID NO: 495932 - DNA, 587 bp, Homo sapiens
aactttctagagatagttggatgtttcacacccctggcatccaggcactaaaggccagtaccaccctccattctttgtgacagccagacgtaccttgtgtttccagatgtgctcaggaagatggtaccactgaagaaaactttaactgttcaggagtctacctactagtatattgtttgggttacttggttctttgtcttcactaaaccttagtcttaaaagtactcttttctaccctatgccccaatctaggttggagaacgtggtggactatcctatggggaggacaatgttggaaacccctctgtcatgcagttgtctttgtgaaacarggttgtgttggcaattaaaaatgttgaggctgggcttggtgtctcatgcctgtaatcccagcactttgggaagctgaggcaggaagactgcttgagcccaggagttcaagaccagcctgggcaacatggcaagacctcatctctagaaaaaataaaaaattagccaggcatggtagcatgcacctatagtcccagctactcgggaggctgaggtgggaggagcgcttaagcccaggagttcaaggtcatagtgag

SEQ ID NO: 495933 - DNA, 432 bp, Homo sapiens
aatttgttgcttccatattgacacagcctaagtttcctgtctttcctgcagaaacaggcatctctttccaaatttctccattgttgtcaacagtaccatcatctttacaatccctcaagattataaatttagaagtttctttccagcttcttcctcctaaaccaatctatcatcatatttttgcctattgtttttctcacaaggccyagcaaatctcttcctttctaaagctgccactgtaaaataagccccaatacttcatgtttgaggactcccactgctaatttgttcttgtaccttcttgtctcttctgtctttaaatcactgttgctatagctggtagaatattatttaatgctttctacctttctatagccaaagagcatgtgttacctactccaattatttaacaagcaagtacagagtactgac

SEQ ID NO: 495934 - DNA, 432 bp, Homo sapiens
aatttgttgcttccatattgacacagcctaagtttcctgtctttcctgcagaaacaggcatctctttccaaatttctccattgttgtcaacagtaccatcatctttacaatccctcaagattataaatttagaagtttctttccagcttcttcctcctaaaccaatctatcatcatatttttgcctattgtttttctcacaaggcccagcaaatctyttcctttctaaagctgccactgtaaaataagccccaatacttcatgtttgaggactcccactgctaatttgttcttgtaccttcttgtctcttctgtctttaaatcactgttgctatagctggtagaatattatttaatgctttctacctttctatagccaaagagcatgtgttacctactccaattatttaacaagcaagtacagagtactgac

SEQ ID NO: 495935 - DNA, 432 bp, Homo sapiens
aatttgttgcttccatattgacacagcctaagtttcctgtctttcctgcagaaacaggcatctctttccaaatttctccattgttgtcaacagtaccatcatctttacaatccctcaagattataaatttagaagtttctttccagcttcttcctcctaaaccaatctatcatcatatttttgcctattgtttttctcacaaggcccagcaaatctcttcctttctaaagctgccactgtaawataagccccaatacttcatgtttgaggactcccactgctaatttgttcttgtaccttcttgtctcttctgtctttaaatcactgttgctatagctggtagaatattatttaatgctttctacctttctatagccaaagagcatgtgttacctactccaattatttaacaagcaagtacagagtactgac

SEQ ID NO: 495936 - DNA, 479 bp, Homo sapiens
tgtttctgcccatcacttctgatttctgtaagtcactttgctttctccrtccataaatccactcccaccaaaagatagtgctgcagtctgtctgagcatattctggttctgggagctgcccgtgaaacattcttcactcaattaaactttgtgaaatttaggcaaactatcccaaaatgtgaccattctacctcacctgcagtagagtcagcactgcccactatttcttccaagaagtgttggttcctttgttccctctatcctgccccctactcttagttatttcttattgtgcacttcagatctgcaatgatccaaatgtttgtgttcccccaagactcctatgttgaaatcctaaccatcaatgtcgtggtagtaggaggtaaggcctttaggaggtgattaggtcatgagggtgcagccctcatgaatgggattagtgccctcattaaagaggccccagggagctctctctttcc

SEQ ID NO: 495937 - DNA, 479 bp, Homo sapiens
tgtttctgcccatcacttctgatttctgtaagtcactttgctttctccgtccataaatccactcccaccaaaagatagtgctgcagtctgtctgagcatattctggttctgggagctgcccgtgaawcattcttcactcaattaaactttgtgaaatttaggcaaactatcccaaaatgtgaccattctacctcacctgcagtagagtcagcactgcccactatttcttccaagaagtgttggttcctttgttccctctatcctgccccctactcttagttatttcttattgtgcacttcagatctgcaatgatccaaatgtttgtgttcccccaagactcctatgttgaaatcctaaccatcaatgtcgtggtagtaggaggtaaggcctttaggaggtgattaggtcatgagggtgcagccctcatgaatgggattagtgccctcattaaagaggccccagggagctctctctttcc

SEQ ID NO: 495938 - DNA, 425 bp, Homo sapiens
tgagttaatgggtgtagcacaccagcatggcacatgtatacatatgtaacctgcacattgtgcacatgtaccctaaaactttaagtataataataataataataataataataatagaatagacctaaatcacaatctgaaaaaaaagaaaaaaaagaaagaaaaattaatagatgattaaatacaacagtgggtctattttttaatatatatacacatactataaagaaataatgtttaaaatacgggcttggtaaaagtactttatcaagrtgaaaataccatgagattttgtcttctgtctcatgaggaagaggaagttgattctcagggatgcttgaatctagaaaggtccgataggtctaataggttgctctctgtggctcattgaatgctctaccaagttagcatcaaatctcatttaa

SEQ ID NO: 495939 - DNA, 425 bp, Homo sapiens
tgagttaatgggtgtagcacaccagcatggcacatgtatacatatgtaacctgcacattgtgcacatgtaccctaaaactttaagtataataataataataataataataataatagaatagacctaaatcacaatctgaaaaaaaagaaaaaaaagaaagaaaaattaatagatgattaaatacaacagtgggtctattttttaatatatatacacatactataaagaaataatgtttaaaatacgggcttggtaaaagtactttatcaaggtgaaaataccatgagattttgtcttctgtctcatgaggaagaggaagttgattctcagggatgcttgaatctagaaaggtccgataggtctartaggttgctctctgtggctcattgaatgctctaccaagttagcatcaaatctcatttaa

SEQ ID NO: 495940 - DNA, 357 bp, Homo sapiens
cttgttcctgtgtcctcacatggcagaaagagggctagtgagctctctggagtctcttggataagggcactaatcccattcatgagkgctccactgccatgatgcaatttcctctcaaggccgcacttcctatatcatcaccttgagggttaggattttgacatatgaatttggggaggacacattcagtccataacatctatctctctgtgcactctagaggccttagaaacaccaagtccaccttcattccccagctctccattctgcttccctagaaagctgcacacagacttctccttcggccccaaagccaaagcttttatgcataagaggtcagctctgtgaccgcatcag

SEQ ID NO: 495941 - DNA, 357 bp, Homo sapiens
cttgttcctgtgtcctcacatggcagaaagagggctagtgagctctctggagtctcttggataagggcactaatcccattcatgagggctccactgccatgatgcaatttcctctcaaggccgcacttcctatatcatcaccttgagggttaggattttgacatatgaatttggggaggacacattcagtccataacatctatctctctgtgcactctagaggccttagaaacaccaagtccaccttcattccccagctctccattctgcttccctagaaagctgcacacagrcttctccttcggccccaaagccaaagcttttatgcataagaggtcagctctgtgaccgcatcag

SEQ ID NO: 495942 - DNA, 469 bp, Homo sapiens
cagctgcttatttgcttatgtagctcagtcttctgcagtgccctcccccatgagagctgagaacttcaaccatgtcaatggttacacagaacttgcctttctatcagtttccatcataactccaagcacaccaagcatttaatgagattcataaggtcatgctgcagaccacgttgcccttaaaatgacttttagacttgttcctttcctaaatcttcacttcctatgcacatattctacatatgtcccatgttacttcaaacctaggtaccatcacccaccaacacatttagcattctagttaggacactcatgtcttttagaaagattcatggattataaggtgtttttgttgttgttgttgttggagtcccactctgtcaccaggctggagtgcagtggcatgrtctcagctcactgcaacctctgcctcctgggttcaagtgattctcctgcctcagtctcccga

SEQ ID NO: 495943 - DNA, 533 bp, Homo sapiens
tacccatggcacagcaagcaastgcaacacataagttccagttaggggtattagaaagtttctgatcttgtacttttattcttcccccttttcaaaaacccctctagcatcccctacttctcctttttgttcttcagtcctcctaatcactttataaatcattcgctatattatatctcttctagtttaaatcattaaaatggttcctattttccctgagagtaataagaataatagatactcaggcttgatggagatgcattttggaaaacaacaagcttaaatattccccaaacatttctttttatctctatatattttagaaatacatgaaactactgcattttacctgcattattctctagaagactatgcatatgatcaaagtttgttaacatctggaaactagtatagtgctaacagttctagtggtgatcaatgaaaagcaatccataatccagaaactagtaatatgaaacacttaattcagtacttaaatattcagctacaaagtaaagtgttctcatgctgag

SEQ ID NO: 495944 - DNA, 640 bp, Homo sapiens
ctttagcttaatggactttggagactcagaagtaggctgggaaggggataagggacaaaaaactacatattgggtacaatgtatactatttgggtgacaggtgcactaaaatctcagattcaccactatacaattcatccatgtaaccaaaaaccactygtactccaaaagctattaaaatatttaaactttagcttagagttcaggagatatggggtccaaaccaaagccaattcactactctgacaagtgactcctgacaagttaccccagggaacttctaaaacattgtaacatctcttaagccaatacctacgtaagccgggtttaagccttttaactcacttactcttcacaacaacttagtaacattgatgctgttatcatccccattttacagatgaggaaactgaagaaaagagagaatgactttgcatatagtcacacaatggaatactacacagcctttaaaaagaagggaactttctcatctgcaacaacatggatgaacctggaaaacatttatgctatgtgaaataagcccggcacagaaagacgaacaccacatgatctctcatatatgtgtgatatgatttggctccgtgtccccacccaaatctcatcttgaattgtaatcccc

SEQ ID NO: 495945 - DNA, 640 bp, Homo sapiens
ctttagcttaatggactttggagactcagaagtaggctgggaaggggataagggacaaaaaactacatattgggtacaatgtatactatttgggtgacaggtgcactaaaatctcagattcaccactatacaattcatccatgtaaccaaaaaccacttgtactccaaaagctattaaaatatttaaactttagcttagagttcaggagatatggggtccaaaccaaagccaattcactactctgacaagtgactcctgacaarttaccccagggaacttctaaaacattgtaacatctcttaagccaatacctacgtaagccgggtttaagccttttaactcacttactcttcacaacaacttagtaacattgatgctgttatcatccccattttacagatgaggaaactgaagaaaagagagaatgactttgcatatagtcacacaatggaatactacacagcctttaaaaagaagggaactttctcatctgcaacaacatggatgaacctggaaaacatttatgctatgtgaaataagcccggcacagaaagacgaacaccacatgatctctcatatatgtgtgatatgatttggctccgtgtccccacccaaatctcatcttgaattgtaatcccc

SEQ ID NO: 495946 - DNA, 640 bp, Homo sapiens
ctttagcttaatggactttggagactcagaagtaggctgggaaggggataagggacaaaaaactacatattgggtacaatgtatactatttgggtgacaggtgcactaaaatctcagattcaccactatacaattcatccatgtaaccaaaaaccacttgtactccaaaagctattaaaatatttaaactttagcttagagttcaggagatatggggtccaaaccaaagccaattcactactctgacaagtgactcctgacaagttaccccagggaacttctaaaacattgtaacatctcttaagccaatacctacgtaagccgggtttaagccttttaactcacttactcttcacaacaacttagtaacattgatgctgttatcatccccattttacagatgaggaaactgaagaaaagagagaatgactttgcatatagtcacacaatggaatactacacagcctttaaaaagaagggaactttctcatctgcaacaacatggatgaacctggaaaacatttatgctatgtgaaataagcccrgcacagaaagacgaacaccacatgatctctcatatatgtgtgatatgatttggctccgtgtccccacccaaatctcatcttgaattgtaatcccc

SEQ ID NO: 495947 - DNA, 640 bp, Homo sapiens
ctttagcttaatggactttggagactcagaagtaggctgggaaggggataagggacaaaaaactacatattgggtacaatgtatactatttgggtgacaggtgcactaaaatctcagattcaccactatacaattcatccatgtaaccaaaaaccacttgtactccaaaagctattaaaatatttaaactttagcttagagttcaggagatatggggtccaaaccaaagccaattcactactctgacaagtgactcctgacaagttaccccagggaacttctaaaacattgtaacatctcttaagccaatacctacgtaagccgggtttaagccttttaactcacttactcttcacaacaacttagtaacattgatgctgttatcatccccattttacagatgaggaaactgaagaaaagagagaatgactttgcatatagtcacacaatggaatactacacagcctttaaaaagaagggaactttctcatctgcaacaacatggatgaacctggaaaacatttatgctatgtgaaataagcccggcacagaaagacgaacaccacatgatctctcatatatgtgtgayatgatttggctccgtgtccccacccaaatctcatcttgaattgtaatcccc

SEQ ID NO: 495948 - DNA, 614 bp, Homo sapiens
cgagaattctctgaatatttaagcttagaccaaaagttggagaaatcgtcgcagtgagtctgaagaagaatattccaggctgactaaagcagcaaatgcaaaaccttggggaaagaactttcttcaggagcagactgcctggcaagccaccctttgcagatcaagagtccaatttctgaccctgggacccggagtcytaactatccaaggaacagagtacgtatcctcttagctcaactatctggttaaaaacttgtcttttccccgaacacaattgcctttcttgtttggctctacatatgtgaagccaccaaccagggccacgctgcagacacgggcatcattcacagagcctggcttgttctcccgtcaggatgaactctcagcgaccttggacaaaggggttcccaggtgtctcccagcgagcaaggaaggaaaactggcataacatggaggagcgccatgccaggagttctgactttcgacagtttattctgaagctagcccagtcctcgtcatttcaagacaataaacaaagactgttccaagaaaaattcaaaatggcaacacaaagagcagatgaaaggcagcacaggagaaaaagcagtgagaaa

SEQ ID NO: 495949 - DNA, 644 bp, Homo sapiens
ttgctgcataacagctaccccatattgcatgtctttagaaaaaatcstgtatttttataacctacacaagtataggttggctgcaggttaggtaatctaagctgagcttgctcatatatatgcaggttctctgtagattctgtactgggcaggacttggctggggaacattatctggagtagctctgctctatgtgtctctcattctcctttcagcctgtgggctagtatgggaatattctcctcatggagatggtagagttcaggaaggcaagtggagacaataaaggcttttaaaggtctaggcttagaaatgtcacactgttatttcttcactttgtgtgttccccaaaaattcatacattggaatcctaacccccagtgtgatagtgttaggagacagggcttttgggaggtaattaggtcattagggctaaacacttatgagtggggttagtgtctttataagaagcgacacagggtttcctttctgtatgttttctgccatgtgaagatataacaagaaggctatttgcaaatcaagaattgggtctcgccagacatcacatctgttcatgccttaatcttgggcttcctagtctcaagaactatgaaaataaatttctgatgtttaagccatcccac

SEQ ID NO: 495950 - DNA, 644 bp, Homo sapiens
ttgctgcataacagctaccccatattgcatgtctttagaaaaaatcgtgtatttttataacctacacaagtataggttggctgcaggttaggtaatctaagctgagcttgctcatatatatgcaggttctctgtagattctgtactgggcaggacttggctggggaacattatctggagtagctctgctctatgtgtctctcattctcctttcagcctgtgggctagtatgggaatattctcctcatggagatggtagagttcaggaaggcaagtggagacaataaaggcttttaaaggtctaggcttagaaatgtcacactgttatttcttcactttgtgtgttccccaaaaattcatacattggaatcctaacccccagtgtgatagtgttaggagacagggcttttgggaggtaattaggtcattagggctaaacacttatgagtggggttagtgtctttataagaagcgacacagggtttcctttctgtatgttttctrccatgtgaagatataacaagaaggctatttgcaaatcaagaattgggtctcgccagacatcacatctgttcatgccttaatcttgggcttcctagtctcaagaactatgaaaataaatttctgatgtttaagccatcccac

SEQ ID NO: 495951 - DNA, 634 bp, Homo sapiens
ctgatgggttatacctgccaatggagcttcctccatatgatcagagaaaatcagaaatagaaaaaaagtaggaaaaraaagtccccatctccctatccctccaacatttactaattggacatattattttctgctaaatgcagcaaagtcctaacaaatataaattgatcagaattgtcatgtgattaatcagcttgatatccccattcagacaatgaatggcatgattggcagagactgagtatttattatctgctattcccattattctgccatcaagtcagactgtactggttggactgaatcaagatttagccaattttttttaatatcaaaataaattatttaacagtcctgcaaaccactctataaacatagtatttcagcctgggcaacaaagtgagaccctgtctcacagaaaatagtgtttgatataccagttttgaatttaaaaaaaaaaaggaaattaaccaattagtagaagcataaagtctcagaattaaaggagacgttagatacatgtagcatgagtccttcacattagtaactaaggaatcccaacatttttaaaagcatctaggctgggtgcagtggctaacacctgtgttaggaagagcagtgggaagctaaggcg

SEQ ID NO: 495952 - DNA, 580 bp, Homo sapiens
tcctgagtattttattctttttgatgttatcacaaattgggtttttaaatttctttttcagattgattgttattggtataaagaaatacaactgatttttgtatattgattttgttttctaatactttactgagttcatttattagttctaacagatatttttgtgaaatctttagggtcttctacatacaaaatcatgtcatcttcaaagaggaataatttttcttcttcctttctaatttggatgcckttatttctatattctaagaaaatcaacagagtaaatgttatgataaatcccaactgacactgagacttactgttgcggaggcaataaagactttggtgtgctgaataatccacattctgtctaagattgagattgtagctactcagttacagttgttagaagctgtgtaggattgcaagcttggtgttaccagaatcgtgcttgttaaagagaaactaaaaacctgcacttttattattaaatgtcttgactttttactgttggattactttgtaaagaacatatgtgggcctgcatgtgatatatgtactaccaaattataatttccaa

SEQ ID NO: 495953 - DNA, 611 bp, Homo sapiens
ttgattataccccaaggcataatgaaatgatgtaaacatagatcctgyagcatcttcctgtaggatgtaaatttacttttttttgtagccaaatgctagggacagatgatgccatattctccaatgacaatgtccagtgcagcaactcggtagtggactctctccagaagaaaagtttatcccaaaaatgccctggcagacactttcctgtatgtctcattggccatgagtgggtcacatccccatgtcctaaaattcactgattggcttgcaaagtgagtctctgatttttaaaggctttttttttttttagacagagtcttgctctgttgcccaggctggagtgcagtggtgtgatcttggctcactgccacctctgccacccagggacaagctattcatctgcctcagcctcctgaatagctgggactacagggatgcccaccacatctgcctaatttttggatttttagtagagatggggtttcgccatgttagccaggctggtctcggactgctgaccttgtgatctgcctgcctcagcctcccaaagtgctgggattacaggcgtgagccaccacgcctggcctaaagcctttgtaatagaaaga

SEQ ID NO: 495954 - DNA, 611 bp, Homo sapiens
ttgattataccccaaggcataatgaaatgatgtaaacatagatcctgcagcatcttcctgtaggatgtaaatttacttttttttgtagccaaatgctagggacagatgatgccatattctccaatgacaatgtccagtgcagcaactcggtagtgkactctctccagaagaaaagtttatcccaaaaatgccctggcagacactttcctgtatgtctcattggccatgagtgggtcacatccccatgtcctaaaattcactgattggcttgcaaagtgagtctctgatttttaaaggctttttttttttttagacagagtcttgctctgttgcccaggctggagtgcagtggtgtgatcttggctcactgccacctctgccacccagggacaagctattcatctgcctcagcctcctgaatagctgggactacagggatgcccaccacatctgcctaatttttggatttttagtagagatggggtttcgccatgttagccaggctggtctcggactgctgaccttgtgatctgcctgcctcagcctcccaaagtgctgggattacaggcgtgagccaccacgcctggcctaaagcctttgtaatagaaaga

SEQ ID NO: 495955 - DNA, 547 bp, Homo sapiens
ttgctctgtcgcccaggctggagtgcagtggcacgatcttggcccacttcaagctctgcctcctgggttcaagcgattcctgggcctcagcctctcgaatagctgggatgacaggtgcctgccaccaagcccagctaatttttgttcktattttttagtagagatggggtttcaccatgttggccagactggttttagaactcctgacctcaagtgatccacccactttggcctcccaaagtgctggcattacaggcttgagcgactgagcccggccaaaagacagtatttttgtgtctgagtatagtaggagcatttctaacacttagtcatactatgcataaatactgtggtatttaagaaagcttgtaatatagtggatgagacctgagttgaaaaagacataagagaaagcactatgatacataaaggaggaatgtagactttctctccagaagcactaaatggcaccacagtgagaatactcactttgcatctgaatctcagactgctctgcaatgaatgtggcatctagacacaggatgca

SEQ ID NO: 495956 - DNA, 534 bp, Homo sapiens
gttataaacatcatgtagcgttcataaatatttgctgatttaattgtgaagcaatgtaaccatattggcattgtcggcctgcatttcaagcttttaaaaagtacatctgaaaaacatctgcaggggaaagtcatttgttacaatcctactgacaasgtgggctcagcctgtcattggcccagatgttcccagccggaaagatccctaaagctggccccgcccatggctttgtgtcctaggtgcctgctgtgaagctggcccctcacttggcttatgaaaattggctaccagcatctcatgaaatgcatctcatgcatcatattttatttgtgaagtaacttttaataaaatatgcataggaagccagcccgtcaccacattttcaggcctatgaagtaccaagtttcacacaaagcaagtcatggacccagttccttcagagacattctttaccaaaagctttcaaattaacccatgtttctttttttaatttagaaatctctgtccgtctttgcaacatattttaataaaaaa

SEQ ID NO: 495957 - DNA, 506 bp, Homo sapiens
catatgtaaccacagtgcactgcagctggtagccaggctggggaggccccttaaggccacctttggagctgcacccagctgcacctttggagctgcacccatgtggctctctattgacaagaatgtctaatgccaggtgtggagctaaactctaccattagcaaaacagctgctggatggtcctttggacaattttttgagcttctggcaggctagataaaaacctgcttatgtcatgaaaacaagcaggagaaggttggtatacactgtgaaaggaaaggtaggggaatactccactgtcactctgtttcaggattagggtgtgagcattcagaatttctaacaaaagcactctatagatctctaatccctgccttgtttctcctgkgttaagtgttgtaacgtgaagctctactccacccatgtctgtgggtaaagtttagccagtaattatcatctgaattcagatctcatgttttttagtcaggacaagtgatggaaaatgc

SEQ ID NO: 495958 - DNA, 628 bp, Homo sapiens
taaacaaaacataattgaaattttaacatttaattcagcctgctaatgctattaaattataaaattaagactgcgtttttgttactatttgtatgtcaaaatttgtttcaatcatctcattttacagtgattagttaagcaataatagataagttatatataacagtaatgtgctgacagttataattattgtttcataaggccaatatttgtttagatttgtccacacgtttaccactctcgtgcagctctttgtcttacctctaagtctttctttctggagaaacgtttctgcttgatggaagtatatgctttcaagtgacttaaatggatttctgcatgttaaactttttctgttttagttttttgataattgcactayttcatcctaaaaattgaaagctactttgttggattgccatttaatttaacagtgtatttctctcataattttaaaatagtgcattgagagatcatctacctatttgctgttattgctttataggtaaattttttccctctggctcctattaaaatattctctttgtttttgatattctgagttgtctaatgataacctaggtatagatttcttattatatttcctgatcagaatgattttgctccc

SEQ ID NO: 495959 - DNA, 613 bp, Homo sapiens
aatgagataggaatccctagcataggaggtataattgacaaaacagggaatcaattgtatacctttgggatcttttaagttagatacactgatcagaaatccaagtggagatgtcaagtagtcagctgaatacagtataaggttctgaaaggtaggtaggaggtcagagctggagattaaaatttaccactcaccattatatcactagtatttaaagtagaggaagtaggtaatgagcttacctagggagtgaawgtttctaaataagaacgtgacccagtcctaaggctttccactgcttcaggttgaggaaatgggaaaaaacaaagtaagcaaagatgattgagaaggtgctaccactgaagtaaaaagaaaattcgagaatgtgttatatctgaagccaagtgaataaaaggaaagtttataaaaagaagtgaggagctgggttagagatgaaataagacacagattggtgactgaaaaaaaagatacatgtgctgtattttaaatgaataaagttgctttctattatccccttgtccaaggttatagccttataagaaacaattatcatataatgatcttgctactataaaactaatttcctatttca

SEQ ID NO: 495960 - DNA, 613 bp, Homo sapiens
aatgagataggaatccctagcataggaggtataattgacaaaacagggaatcaattgtatacctttgggatcttttaagttagatacactgatcagaaatccaagtggagatgtcaagtagtcagctgaatacagtataaggttctgaaaggtaggtaggaggtcagagctggagattaaaatttaccactcaccattatatcactagtatttaaagtagaggaagtaggtaatgagcttacctagggagtgaatgtttctaaataagaacgtgacccagtcctaaggctttccactgcttcaggttgaggaaatgggaaaaaacaaagtaagcaaagatgattgagaaggtgctaccactgaagtaaaaagaaaattcgagaatgtgttatatcygaagccaagtgaataaaaggaaagtttataaaaagaagtgaggagctgggttagagatgaaataagacacagattggtgactgaaaaaaaagatacatgtgctgtattttaaatgaataaagttgctttctattatccccttgtccaaggttatagccttataagaaacaattatcatataatgatcttgctactataaaactaatttcctatttca

SEQ ID NO: 495961 - DNA, 556 bp, Homo sapiens
tccattatttttcattgtatatggtttgtttagtacatgctttaggtgtcagcaagttttaagggagcctccagggccccttgagcaggtctaccttgaggttctacaaagcatatcaaagctatcctgctaaataattcagaaaacaggagaagtgggtccaaakaccacttggaggaagatatagaaaggcccaaagacaggaactagaagggccttgagaaaaaaataatgaaagatttttaaataaagttatatgtgctttctacgacttcacaaacattcagtaactccttcaaaactaaagataggctgggttcagtggctcatgcctgtaattccagcgcttttggaggctgaggcaggcagatcacgtggtcaggagatcgagaccatcctggctaacacagttaaacccagtctctactaaaaatacaaaaaattagccgggtgtggtggcgggagcctgttatcccagatactcaggaggctgaggaaggagaatctcttgaacccgggaggcagagattgcagtgagccgagattgtgccactgc

SEQ ID NO: 495962 - DNA, 360 bp, Homo sapiens
gcacagatgaaaggctcagtgattttactcaagggctcatattttccagtgaaaataattacacaagagtatgatacatattattataatgatacttaattacttgtatgttcttcatcaatgccaggcaacgttgtaaacactaagcctcatattgcctcatttaatcctcataataaccctgtgaagtaggtagtaatattagcctcattttccagatgaggaaaccaaggcttggagagtttaggcaccttgtccaagtttactcacttattagtggaataccctgggtaccctggtgccagagtcatasagatatgtgtagagtgttgtggaacttgagaagaggtcatctaaaca

SEQ ID NO: 495963 - DNA, 500 bp, Homo sapiens
ggtcacagctggggttgggcagtgttcgtattttatcccatctttccacgggattccgacgtgcagccaaatgtcccaacgctggactacaagaagtccaaggtccctctcagctctgtacttctataattctgtatctggattcccagcagctattccatggagccattcattggtactcctgctttctcaggggcatcttatagaggcaatggactttatccagttccctggctctccatttgtgaattgcaagttcaaggcatccagcctctctgcactgtgtcccccactataagacagragcagtaatgctgactgcttacaataatgatgagtgaatagaagaattcatgtgaagtgctttgcatatcttccacacagagggagttaataaataggtgctactgttattaatgcaggtattaaagggcagactctatataagtggcctgtttaaagagcacctaaactagtgcaatccataaagaaatttaata

SEQ ID NO: 495964 - DNA, 633 bp, Homo sapiens
taccctttccccaagtctaggtgtgagtggtgattggtctaagccagcgataatggtaatattcaccttgccaatggattctctaggtaagtgatccatttctgggcaatataatgtaaaaggagactttctggggggcttctaagaaatgtttttgtactcctaaggagaccctgggatatatagcccattttttgcctttggacatcctttggtctggatgtgatacctgaaagggctgcaaacatcttgttctcagaggtgagaatgggttgacacagaaggtagagggaaggatgaactaaacctggtttttaagacacccatgagtgttgaatcaaccgacctgaaacctgtcttatttctggacttctttttctgagatgctaaatgtctttattgttagagttttctcttatttgcaactcaataaatctttactaatttttgtctgtatgtcaaagatgtgaaaagcackggcccaagctactctaaaaatgtatgttgcatctagaaaaatttcctgtgagacaaagtgctatcaccacttgcagcctgaaggattaagtcagcctgatctcttacacatagaaaatgatattatccactgcttgaggggcacagcagctggtg

SEQ ID NO: 495965 - DNA, 472 bp, Homo sapiens
tgggttgtcctgcatggtgacgggtgtcatcccgaacaaatcagatggcatcagaggcactccatcaagtgggagatggggaggaggctgtactgaagaaagaaaacttcaacatgatgaatgcccttgaccaactgccaaaaccctttycaaaccccaagtctatgaaccggaccgtcactaccaaaggactcccactagcctcaaagggcaatttggtcaacttcttggaggatgataccatcaacctactgtaagtcacaaatctggtccctccctccctccctccctccctcccttccttcctcccttccttcctcccttccttccttccttcctttttttttttttttttgacaggatcttgctttgtcacccaggctggagtgcagtggtgcaatctcggctcactgcagccttgaattcttgagctcaagtgatcttcccacctccacctcccaagtagctggga

SEQ ID NO: 495966 - DNA, 622 bp, Homo sapiens
cacaatgttagaggaaggtatagaagatgaccctgaggcttacagaggttaaataacttagctgaggccatatggttggtagcgtgaccataactaagttatgctgattcctttagtccttttgtttttgttcattttctgttgctataacagaatacctcagactaggtaaaagaaaagagcttcattttggttcacagctcaggagggtgggaagtccaagatgagacagtgtcatctgatttgcttttrgtgaaggtcttgtgctgtgtcatagcatgatttagaagcagaaggggaagtgtgtgtgtgtgaaaaggataaaacacaagaggtggcaattggggccgtgagtggctctcatgattactagtctagtcccttgagagcaagaactcactgctgcaagaattaacacattcctgtgacagcaacattaattcctcttaatgacctaattacctcttaaaggacccacctcctaacattgccacaccagggaccacatttccaacacatgaactctggggacacactcaaacctagcaccttccttacctttttccctgcctccagacaacccagtggttggagatcctccagcggctttgcctgcacgacc

SEQ ID NO: 495967 - DNA, 635 bp, Homo sapiens
gaacagccaatacctgccaactttctaggtttttccaaccaattctcttacagaaaatctataaatatcttagaggtatgtttcttagtttcccaacatataatgggaaaattcatcatttatattattacttttaactgaagtatgttgttatcagagaacttggtctgtgtcatattaatcctttgccatttgagaagcatacagttttaaagtttatatctccaaaaggatattttgtaaaaatttaacccctttgactcttagtcttctcatttgtgaaaggtaaataataaagaatttctgttcctagtaagagtaacttgtggcaaaacaataccatgacatacaaaaattgaaaaactgggcaaaacttaaacaatctgtttaaggcaccgagagccattaaggcagtgagaccaacaaaaagggaagcaccaaggaggaagcttaactttttggtaaagttgattccatttgggatgtttgccaatttgttagcagaggttgtgagtcacagaggtttaagtgtctgagacaccatttaytaaactgttaaaagaagaaatagaaaatttgaatagtatgatacctattggagaaattacgtttgtaataacaacaacgatggtaag

SEQ ID NO: 495968 - DNA, 428 bp, Homo sapiens
ctggtggcaaggcccttgcttcacacacccacagggtactcagtagctccactggtaacaaaatttccccaagtgtcatggaggcgcaagatgcttaactgacatgagactaaatctggtctttatggtttgaatttcattttaataattatttgttttgaagaatacaaatgtaaagatcatttctatcttcatgtgagtctcaaattataatcttgattctataataaaaatttttagttttcaactggcatattcaactggaaatgggagttacccatttcctctataatttcaaattgactttcatatattaaaacccatgagttcacaatgatacttgtttttaaaaacttcatggttaaccttcataaattcaygctaggacatcagcgcattgttttgaaaactgatgaagggaagcaatc

SEQ ID NO: 495969 - DNA, 584 bp, Homo sapiens
cacagaaaagtagaggcttgttaacgcataggattggggggacatgcgaatatgcatatgagaaattactttccctatatcagcaactctaataaataaagcaaatattgataaaaaatatgttgaaaattccaagtatagggaaatagctacaatttattgacatagaattacatagtgaaaacacattcatgaacatcgcttaaggaaaagattaagtaaaagtaggaatcgaatgaatatacttgtgttattctctagcaaaaatgaaagtttgggtgaagggtaagccagattcctgttctgctccctggagagtgggtctctcaggtctaacatcagagccagctcttgagggtgccaagttcctgccaygcaggggcctctgcttgcctctgagatagacaaagcacaccatttctagctgaaactctgagcacagagcagagcatgttctgttcttggcataatatatacatatctctgtcttttctatgtgtacagagtgcgttcactaagagggcacttcacaggggcttctgggtgcccttctgatctgaagtctaatcttatcagatctgatg

SEQ ID NO: 495970 - DNA, 584 bp, Homo sapiens
cacagaaaagtagaggcttgttaacgcataggattggggggacatgcgaatatgcatatgagaaattactttccctatatcagcaactctaataaataaagcaaatattgataaaaaatatgttgaaaattccaagtatagggaaatagctacaatttattgacatagaattacatagtgaaaacacattcatgaacatcgcttaaggaaaagattaagtaaaagtaggaatcgaatgaatatacttgtgttattctctagcaaaaatgaaagtttgggtgaagggtaagccagattcctgttctgctccctggagagtgggtctctcaggtctaacatcagagccagctcttgagggtgccaagttcctgccacgcaggggcctctgcttgcctctgagatagacaaagcacaccatttctagctgaaactctgagcacagagyagagcatgttctgttcttggcataatatatacatatctctgtcttttctatgtgtacagagtgcgttcactaagagggcacttcacaggggcttctgggtgcccttctgatctgaagtctaatcttatcagatctgatg

SEQ ID NO: 495971 - DNA, 635 bp, Homo sapiens
ggaatgaacccctagttgttaaatatatagcttattgcctaaaccaggacacttttggcactagtgataattatgccaggacaattcacataaactgagaaaatcaaggggaaatatgacacgtgatcatcctattgttgatgtacacttttatttcttttctctcaccctccactgaagcaggcaggggttctcaaatccagcatatttatctccttcctggaagagttatggttggtggaccctaactccgtgtaggtgctaacattttcatttcattcatgtcttacctttgccatgttatggccttctggggtgctggaatctgtattgacctcttgtccaccttcctgtgaytttttttctctgcaaagctaacaagaatttctcccagcaacacagctctcatttatttcctggactaatgaggatgaaagcttgagtcttacacaatcctacttaaaaaaaggtctctcctagcatttactggggacaattgatatacattaatgtctttaccataacattaaaaaatgatctaaagcataggtaacagaattcaaattgaatctagtatccctagtgattcccaggggtagctgccatgggagcaacctggagaccattggacttcc

SEQ ID NO: 495972 - DNA, 654 bp, Homo sapiens
atgggtagtaagaatacctcctactacaaattacaaacttaaactacacatggaaacagaaaaattaaccaggatatggaaagtaaataaactatttatgaatgaatggctaaatgaatcagttggcctgcagtgttaaatcttattggaggtgtcttacgctttaggccatggattgtgataattacaccaatatttagtcactcctgcctctgctcacccacagagcacacagtttaaccttaatttatgtctttgtatcttgtattataatacattatttagctatcccaatcaattgcttaatattatttaactttgtattcaacatagcatttagttaacttgcacacagtaggcattgagtacatattttatgaaataacacataagcacctgtatatctaaactttctacattaactaaccagaaaataactgtgctttggatttatatgacaatatcttaggtaacaactcttctgggtcatttagctctgcaaatttacttgckcagtaattccttccaaccaaaccattcattattctagatataactggaccgtctcttctggaagagtcctcggatgagagctacagagatcagctcacaaaaatatgtacttctggcctcttccccttaagatgttaactg

SEQ ID NO: 495973 - DNA, 499 bp, Homo sapiens
aggtacaggtcaactatcacttccttactggtttcccaacttcatgttgtcaaaactgtggttccaagcaaaataaccacctcatactttttagtcacagttaatcttgatactttctgaaacactaagattggctcactgacaatctctgaaatgtcatcctgagtacagtggggctttctagcaaattctctaataatatccaatactgtcttaaactaaaaaaaggaaatgaaaaaactgtatctgtaattccaattaagttttatttccactctgtcttctggcttgcacttttgctattgattaacaaatcatgtccatgttagcccattctgaatagctcagaggaatattataaatattaagatgatgtattctttaaaattctatagcttcaagttggtattctttcacaaataactataaaataaactcaaaatctttttttcctgcattagttcackgaaaataaaaagggttagcaattagaatcaat

SEQ ID NO: 495974 - DNA, 473 bp, Homo sapiens
atttgcatgtatttttagtagttgccactgaaattttactcatacatatttaacataacaaaatctgaagttacataatatctttatctttattctgaataatatatgcaacttaaagcacattaactttctttaaccttctcccaattttagttctattgttgtcatgtcttttgattctcttctcttgagcttgcatttatgcaccacaagataactgttaatgactttaaaatttattttctacatctttatcattttctatgctcttgatttcttcctgcatctttattcttgcactatccatttgggatcamtgtttatctaaaatacactttcagaatttccttatttaggaattttgcccttgttcttgaaagatacttttttctgttggactagaaactaagttgattgtgcaatgaggatactattttactgttttctgggttccattgttactgttgaaaagt

SEQ ID NO: 495975 - DNA, 607 bp, Homo sapiens
acagggtgtttctatgccttaattacttatctgcggccagggcacaggatggcagatgaagggtgtccctgtgagcatcctgcatcagactggataagcgaggttatcaggtcgttatcaaacgacctcatcgccctggtgctttaacaaaggttgatttcctcgtcaggctgcacacctgtcacaggtcggctggggacgctgctctccccraccccatgttctgggacccaggctacttaagcagccagtatcttgaacatggtcagacaccaagccagacagaaagatcactctggaggcttttgagctggtaattaaatgttttttaggaagaactggttatttgacttactcaaccacaagggaaaagaaaaggatgatgccacaatctgggtggggagacatggaaacatttgaaaaacaacattaatacatatcaccaactcatgggtgggattcatacatatcatcaccaactcatgggtgggattcatacatatcaccaactcatgggtgtagagggtaggactgtttccagcagaagacaaacgaattacaaggcagagaaaatgatcaatgtctatcataagcaacgacaggcttg

SEQ ID NO: 495976 - DNA, 616 bp, Homo sapiens
ccatcacaggtcagctaaggtatcttatctgacctgtsaacactaaaaactctctgtgagtgacatgaactgttaaggttaatagatggatgtttgaagcctgagataaaagaagatgcagttcattctgttttcattctcttaggtgcctaatctttccctaagattaggcaccaaaaacccttatcaagagagaatttgtcttaagagacttgactagtcctatccaaagctaaggccttaagaacaaattggagaataataaatgcccgtcttaggagggtttcttgaaagcagtcaacggggtagcattttggatgcaaggtgtttgttagggataatcacatgtcaaaggaagaaagaggaaccaggatggagcagggggagaagagaccccttctgcactgagatgcaagcccaaccaagcccctgtcaccccgcagggagccttggagcaagaactgcgtgtaagaggatcccagagggcgaggaggcaggcaggtctttctaccttacctcaatgtgtcaatcactgggtgtgtgcttctctggaaagggaatgaccttggatgaggcagctcctggcactagaggtagaactgatgtctgagaggag

SEQ ID NO: 495977 - DNA, 616 bp, Homo sapiens
ccatcacaggtcagctaaggtatcttatctgacctgtgaacactaaaaactctctgtgagtgacatgaactgttaaggttaatagatggatgtttgaagcctgagataaaagaagatgcagttcattctgttttcattctcttaggkgcctaatctttccctaagattaggcaccaaaaacccttatcaagagagaatttgtcttaagagacttgactagtcctatccaaagctaaggccttaagaacaaattggagaataataaatgcccgtcttaggagggtttcttgaaagcagtcaacggggtagcattttggatgcaaggtgtttgttagggataatcacatgtcaaaggaagaaagaggaaccaggatggagcagggggagaagagaccccttctgcactgagatgcaagcccaaccaagcccctgtcaccccgcagggagccttggagcaagaactgcgtgtaagaggatcccagagggcgaggaggcaggcaggtctttctaccttacctcaatgtgtcaatcactgggtgtgtgcttctctggaaagggaatgaccttggatgaggcagctcctggcactagaggtagaactgatgtctgagaggag

SEQ ID NO: 495978 - DNA, 616 bp, Homo sapiens
ccatcacaggtcagctaaggtatcttatctgacctgtgaacactaaaaactctctgtgagtgacatgaactgttaaggttaatagatggatgtttgaagcctgagataaaagaagatgcagttcattctgttttcattctcttaggtgcctaatctttccctaagattaggcaccaaaaacccttatcaagagagaatttgtcttaagagacttgactagtcctatccaaagctaaggccttaagaacaaattggagaataataaatgcccgtcttaggagggtttcttgaaagcagtcamcggggtagcattttggatgcaaggtgtttgttagggataatcacatgtcaaaggaagaaagaggaaccaggatggagcagggggagaagagaccccttctgcactgagatgcaagcccaaccaagcccctgtcaccccgcagggagccttggagcaagaactgcgtgtaagaggatcccagagggcgaggaggcaggcaggtctttctaccttacctcaatgtgtcaatcactgggtgtgtgcttctctggaaagggaatgaccttggatgaggcagctcctggcactagaggtagaactgatgtctgagaggag

SEQ ID NO: 495979 - DNA, 649 bp, Homo sapiens
gaaagctttatctaaagcgtcttgcattttgggtacataatgctgaagaaactcaccaatttacttacgatttggcattctggaaaacatatctgagaaaacttctctgctttaaaagatgaggttgttctgaaaacaaaggaattagctatgcattaatatgttctgtgattgtaccatgcacagcacagttgcattccaaaatgaaatgacaaaaggatacttatcctttctttagatatctcatgtcaggagagaagaatggagtctaacagctttttgtttatttacaggaaatatgtgcagtaaagcaaaaactatacaaaatgaaatattaaagcaggtttaataaccatttattgatttaattatttgtgaactctaaagggagggagaaatggggagatactgacaggcttgtgttttcttaccttcaaccaactcaaattcatagtattctggctgcaaaaattttctcctattattttatgaattaatccaggttaaatattcctttttagagcatgtcgcrtttctgtttttttcttttttcttttttttgagacagtccaggggttctcattctctgaacttttctttctaggatctaaaaacacataatggctaattgcaataattttttttaatt

SEQ ID NO: 495980 - DNA, 602 bp, Homo sapiens
taaaccatgtactaaaaatattttctacatatggaaaacaaagaacatagtcaacaaattttattaagcaccagctagtactggaatgacaatgaaagtcagcatgtaagaatgatgagataattatcagaagtcacttagaattaattgtgtctttcagtattttgagtaagtgaattgaccaggttcccacgagaatatatctccactctagaaagcccatgtttaaaatgtatgtatacatgtagaaatctgttacaaaaaagtggatggggagaggagaatagaaagaggaacaattttatgctagagaagaaaaagtctctaggcgctcttgtttggaatctgcccgccgtgcacatcgtgcctcttctcagaggctcctccagttactgaccacacaactgagcctctctgggctgctctggactcttttatttaaaatatccatctcactgttgtctgtacaatatatacagcccttctactttagtgtkttgaatttctaaagcttattgtatttacatttattttattgctaaaattagattttgtgaaatactttgggaagtattactgttcactaagggagggaatatgtg

SEQ ID NO: 495981 - DNA, 638 bp, Homo sapiens
taaatacatggcattagggatcaggggttgctggcattgtgattgaggccacattccctgagctaacggggagcagaggcattcatgtcattctgagtacagggtgatgtgaatggatcagtgagcagcagggccaccaaggtagaactggcggagcccaagtgaaaaatagagcatcagtaattttatactgatttgttggtagaaaagagtctacctagtgccacatctgatttatggaacaaattggacttgtaatgagtccagatayaactgacctctttgaaaggaagtcacaacctttttttgatatacttcatgtatatactcatgaatacattatcactatgcagctatttcattttattctgcaactcatttttatggttagagttattctaattttgttgtaagaatagacaaccatagaatcaaaagtgtaatttacttcattcttttactgctccgttcatgctgagtattttgttttgtatattccttctcatgacaacaatgccaaaagaaaaactatgcttggaatgaacttgttaccatggtaatctcaaaattaaagtttcaaagtgttcaaatgttgccctcaaaaaaaaatcacaaataaaaatctactcagttttgta

SEQ ID NO: 495982 - DNA, 549 bp, Homo sapiens
ttcctccctcttgaaaacctcctgaaaaaatagaatttctttgaaagaaaggtaggaatcatacggaaagttagtacatgacatagcagacctgagaaaagtatttcataagccagcagtggaggaccctgaggactcatccaatctaaaacaaagtttccggaaatggtagtaccaggtgcccctgcaagtcagggtgaaggaaaggaaggagctcaaataaggaggatcagctgagagcctgttccagaagcagtctgactccatggggctgagttattgaaggtgtattcaataaagaagaaaaaaacagaagacatctggcctaggagatgccagaygaaagtgtgggcagtgataccttactcaaaagcaggtttcaatcaaagtgtgcatcctggaggctaaaacctccagcactttcctcccgttcatctcctagcgcactggtggccaggccttcacacatcatgcagggatcagacaattcttatttgtgaaatcctagcagtccaagaagaaagacttgcatatattgatattggcatc

SEQ ID NO: 495983 - DNA, 637 bp, Homo sapiens
gagtgaaatgaattgaatttgacagttttctacttttaaataccaaacttcctgagcagtctaattgctgctctttggaacaagaagaaatggctatttaaaagaagcaaggggcaggaggtcaagaaagtgggttttaatatctctrttcacaagggaagagatgtaatcctggaaaaaaatagcatcaaaatgaaaaccattatataaatttgatgaaattgcaaaggaatgcagaaaatataagggagggggaatacatagcattgaagattttataaaaggcagagaaaagatcaaaagtcactgaaggaggtagaagttggtccaattgaaggcagggtctatccatcttgacagatggaaggtggatgatgaaaccccccaagcagccaccagaaatctctgatcgtgttccagtctgcatgggtgagtttggataaggagaatactctggagacaggctgctgggttgaatcctttctcccttcctcactgggtgaccctggatgaattacttaaccactctggcttcagtttcttcatctgaacaatggagagagtaatgttgctcgtcttgatgtgagacgatataaagtgcttagcagagtaccgggcatttaggaagcactaaaga

SEQ ID NO: 495984 - DNA, 481 bp, Homo sapiens
cctttcaggttgataaaccattgcttctcctagtgcctggtctgcagctcccacagcctcagtactctgtgagcaaggcaaacacccactgtctttccacctagcaaatatatccttcctcctgcaacttcctcggaacctatgttttatagaatcctagaattttgcatgtggccttaataatcattcagttcatcccttcatctgatactttacctcttccttgtgcctatctataggcaacctactacttgtatacttctaggaatggagaacttactgccagactttcccgtgaaaaatctactagcttagttcaattttaagtgggatttaaagtctggtgacttacyagggagatctttcatatctaaaatctcctaagtggctttttccttggattcatatcttagtaatgggatttatgtgcggtatctcaactagagtgctaacagaatgaccttttaaggaaaaccctgac

SEQ ID NO: 495985 - DNA, 481 bp, Homo sapiens
cctttcaggttgataaaccattgcttctcctagtgcctggtctgcagctcccacagcctcagtactctgtgagcaaggcaaacacccactgtctttccacctagcaaatatatccttcctcctgcaacttcctcggaacctatgttttatagaatcctagaattttgcatgtggccttaataatcattcagttcatcccttcatctgatactttacctcttccttgtgcctatctataggcaacctactacttgtatacttctaggaatggagaacttactgccagactttcccgtgaaaaatctactagcttagttcaattttaagtgggatttaaagtctggtgacttactarggagatctttcatatctaaaatctcctaagtggctttttccttggattcatatcttagtaatgggatttatgtgcggtatctcaactagagtgctaacagaatgaccttttaaggaaaaccctgac

SEQ ID NO: 495986 - DNA, 594 bp, Homo sapiens
ccgcgcttctacggcagccgcctcgactacttccagcccagcttygagtccctcatccgagctcaggtgaggccgccaggtgctcttcccctgggcttggtatacacagctcatgccactccctgtcacccacactggaagggtggcttagccattctccgtaaagacagggcacccaccccaggcaaagccctgaaggaattcattccattaccagagtcccaggctcagcgacttgggggacctgtctgctgttagactcctcacattgctctctggtaaatcccataccaggaatggccgaggttcccttttggtccagcagttccgccatggatctctctacatttcactataagtagctcctctgccccgcaccctcaagtgggcggtttcttggcccagggtggtgccgagaagaaagggatctggagaatggaggccttttctgaggactcagctcccctcccctgcctaccgtgagccagtctttttagcaggaaacggcgggagtcctgccttggaaccactaaggaagggggctccagagccctggggagagccacaatcagggctgctcctagggccctgggg

SEQ ID NO: 495987 - DNA, 594 bp, Homo sapiens
ccgcgcttctacggcagccgcctcgactacttccagcccagctttgagtccctcatccgagctcaggtgaggccgccaggtgctcttcccctgggcttggtatacacagctcatgccactccctgtcacccacactggaagggtggcttagccattctccgtaaagacagggcacccaccccaggcaaagccctgaaggaattcattccattaccagagtcccaggctcagcgacttgggggacctgtctgctgttagactcctcacattgctctctggtaaatcccataccaggaatggccgaggttcccttttggtccagcagttccsccatggatctctctacatttcactataagtagctcctctgccccgcaccctcaagtgggcggtttcttggcccagggtggtgccgagaagaaagggatctggagaatggaggccttttctgaggactcagctcccctcccctgcctaccgtgagccagtctttttagcaggaaacggcgggagtcctgccttggaaccactaaggaagggggctccagagccctggggagagccacaatcagggctgctcctagggccctgggg

SEQ ID NO: 495988 - DNA, 522 bp, Homo sapiens
ctccatttctagaaattgatcgcaacaaacacacaggtgtaggtagaaggatgttcattccaagaaaatttaggatagagtgcaaatggagaactgggtaaataaatcatgttcatccattcaatgaatactgtgtagttgctaaaaaaaaaaaaaaaaaaaaagaactagatctaataaatgttcatacgaaataaaatctaaagtacattcagtgaaaaggcaaaccaccaaacagtatgtacaacaggtttccatgtgcttttcgttttgtaagaaaaggctgtaagaacatacatgtgcacttgcatagacgccatctyatttacataagaaactattaccagcagcaagactcagcccacctcagcctcgccactcacctgtccacagtgtaaggagtgaggtggacccggtaaggaggcaggtcatgccttggcttcttagcaccccagggctctccaccagcccgctgtttgcgtttcttggagtcatagtcatcactagaggttgacccatcac

SEQ ID NO: 495989 - DNA, 485 bp, Homo sapiens
ctgagctccctgccttatggtccatctccatggtgtctgtgtgctccacccttatcaaatatatgttcaaataattattttaacctataataaaagacttaaaaaggaatttgtaaagacaatgattcaacaaatagaggctctcaaamagagacaaaactatgaaaacagacctactgggaatccgaaaaatgaaaggtacaacaactcaattgaaaaatgtattagatagactcaacagcaatttaacatgacacgagagtcagtgatctgaaaaagaagtcaatagaaatgacctcatataaagaagggaaaaattataaagaagaatgaataaaacctcagacattataggtccctgtgaacaataccaacaaatttgtattaggaatcacaaaggagaagacaggaagaggctaaaaactgtgttctcatctttacgcccatgtgtaccccatgtttagctcccgcttataagtgagaac

SEQ ID NO: 495990 - DNA, 485 bp, Homo sapiens
ctgagctccctgccttatggtccatctccatggtgtctgtgtgctccacccttatcaaatatatgttcaaataattattttaacctataataaaagacttaaaaaggaatttgtaaagacaatgattcaacaaatagaggctctcaaaaagagacaaaactatgaaaacagacctactgggaatccgaaaaatgaaaggtacaacaactcaattgaaaaatgtattagatagactcaacagcaatttaacatgacrcgagagtcagtgatctgaaaaagaagtcaatagaaatgacctcatataaagaagggaaaaattataaagaagaatgaataaaacctcagacattataggtccctgtgaacaataccaacaaatttgtattaggaatcacaaaggagaagacaggaagaggctaaaaactgtgttctcatctttacgcccatgtgtaccccatgtttagctcccgcttataagtgagaac

SEQ ID NO: 495991 - DNA, 564 bp, Homo sapiens
aataaatacaaccagttctgaaaattaaaattagttaaatagcatagggacattatagaaaaaaatgtataactatcttaagtataaagaaaatgaagtcttcgtattttgcaaagaagctgtgtgaacgctgtgtctgcaggtttcagccccagggtgggcccctgcctttcctgtgactgagcatattgcctttctcayacctgcagtcatccagtgaagtgacaggatgggctgagctgagctgtactgttgggccaccctggggagatcttggttatataagatgcatttcagaggataacaataactgctaacagcaataaatgacagcagttcagctttgttcatgtagaatttctcccaaacaacccacaatgaatagacttgaaccccagagttgatctgggaacaaacctaatacagattggggaataggacccatcttcctgacccatgtaaaccgataccaaaagttgtccaacctgcacatcaaaccagcttccagataggttaaagaagtcacatcagaccatccagtcacaaatgaaccacagggtaact

SEQ ID NO: 495992 - DNA, 541 bp, Homo sapiens
ctgggagcatcggcaagctactgtcttaaaatcggagctccttgagtgcacaatttctgtccattttaagggctcacaacactaaagattttacatgaaagggtcgtgattgattgagcaatctaggggttatgtaacagggtcttcatgcactggtagtcagagtcaaacagaacagaacagggagtttcacaatgttcttccatacaatgcttggaatctatggataacattggttgctaagtcatgagwtgatttttaactactaggtttaggccaggcaggcccaggcctggcgccgggctgcctgtctctgatttcacttccttgatttttactcttaaaacaggtactgagtataaaacaatataaaacaatatgagagggtctctctcttccctcagtaaggagaatttgtaggctttaagaggccatgttgtaacaggtgggtgataacacgctctagtggtaacagtgattaggttttaacgggatggtaaggggtgcatgatcagttgccaaggaaggagtagaggtatcc

SEQ ID NO: 495993 - DNA, 602 bp, Homo sapiens
atcggcaagctactgtcttaaaatcggagctccttgagtgcacaatttctgtccattttaagggctcacaacactaaagattttacatgaaagggtcgtgattgattgagcaatctaggggttatgtaacagggtcttcatgcactggtagtcagagtcaaacagaacagaacagggagtttcacaatgttcttccatacaatgcttggaatctatggataacattggttgctaagtcatgagttgatttttaactactaggtttaggccaggcaggcccaggcctggcgccgggctgcctgtctctgatttcacttccttgatttttactcttaaaacaggtactgagtataaaacaatataaaacaatatgagagggtctctctcttccctcagtaaggagaatttgtaggctttaagaggccatgttgtaacaggtgggtgataacasgctctagtggtaacagtgattaggttttaacgggatggtaaggggtgcatgatcagttgccaaggaaggagtagaggtatcccatacttgtggattaaggcagggagacacaggggaggatgcaaaggaggctttgaagtgaggaaaaggg

SEQ ID NO: 495994 - DNA, 602 bp, Homo sapiens
atcggcaagctactgtcttaaaatcggagctccttgagtgcacaatttctgtccattttaagggctcacaacactaaagattttacatgaaagggtcgtgattgattgagcaatctaggggttatgtaacagggtcttcatgcactggtagtcagagtcaaacagaacagaacagggagtttcacaatgttcttccatacaatgcttggaatctatggataacattggttgctaagtcatgagttgatttttaactactaggtttaggccaggcaggcccaggcctggcgccgggctgcctgtctctgatttcacttccttgatttttactcttaaaacaggtactgagtataaaacaatataaaacaatatgagagggtctctctcttccctcagtaaggagaatttgtaggctttaagaggccatgttgtaacaggtgggtgataacacgctctagtggtaacagtgattaggttttaacrggatggtaaggggtgcatgatcagttgccaaggaaggagtagaggtatcccatacttgtggattaaggcagggagacacaggggaggatgcaaaggaggctttgaagtgaggaaaaggg

SEQ ID NO: 495995 - DNA, 572 bp, Homo sapiens
ctgctcctcctgatgcctccattggctgagagtgttgctcagatgcagccacactctgatggtgttggtagaggggtacgtgaaatcgcctctgcaccctaattcttttctctttctcagccccaactgcacagacatagcaatgcatctcctgatttgataaatacagagatcatgacacttgaggagtctagtttatggcttcagcttgaattcatataacacagaagaagccactatagatattctaagcaggaatcgtcttaatacagagaattaaagtaaactactaaagtcaaaataaaatgtagagatgaatctctaaatttaagttttatttgcaaagaaatatttgccaggtggggcatacaggaaaactcagtggtcttcaagatattggaagaacgaagagaaaattagcattttatgaaaaagggaaaatgttacctgtggctctttgagaaagttcattggctctaggaagggttgggagctggcaagctcagactggtaagcagtggtggrcaaaatgaatcctagaattatatcaagttatctcagaagttgtggac

SEQ ID NO: 495996 - DNA, 427 bp, Homo sapiens
tgaagctgaagacataaccgtttggggacatgcatgctatgccaatgaatcagagagtttggggcgcctacgcaagggctgaggcctggggggaaggagctgtgcaagaacagatttgtgttttagaaagattccwctagcagtgtacatatgggacaaattggagccaggctgacctgggagaccactcagaagctctcatcatagtccaagagctaaagatgagtatccatactatttctgcagacattccagaaacatttaaaaaacacaagagatggggcaaggtgacttaccaggatgggaagtagctgaaagagaccagggtaaccatcagggccctagctttggtaagtgagtacaggatagtacttttacctgttctaaaggcatacaggaggagaagtaagtttggaggagaaataat

SEQ ID NO: 495997 - DNA, 571 bp, Homo sapiens
gaggtgaagctgaagacataaccgtttggggacatgcatgctatgccaatgaatcagagagtttggggcgcctacgcaagggctgaggcctggggggaaggagctgtgcaagaacagatttgtgttttagaaagattccactagcagtgtacatatgggacaaattggagccaggctgacctgggagaccactcagaagctctcatcatagtccaagagctaaagatgagtatccatactatttctgcagacattccagaaacatttaaaaaacacaagagatggggcaaggtgacttaccaggatgggaagtagctgaaagagaccmgggtaaccatcagggccctagctttggtaagtgagtacaggatagtacttttacctgttctaaaggcatacaggaggagaagtaagtttggaggagaaataattggtcgtctataaccataccaccttgaacacctgcttgatcttggaagctaagcagggtctggcctggttagtacttggatgagagaaataataggttgaattacaggagtcttgaaaacatgcaagtaaatatattgaa

SEQ ID NO: 495998 - DNA, 594 bp, Homo sapiens
ttcctctagaaatgaagatggattcacagatacgattacacgtaggtgaagttctggaacaggtaaaactaattgatggtgacagaaatcgcaacagtggtttccttcttggtagaactcattggaaaggggcacgagggaactttctggggtgttgaaamgttgtttaacttaatttgggtggtggtttacatatgtgtatacaattgtcaaacccccttgaatcacaaagatctctacatttcataatatttaaattatacttcaattaaattagtggacagtgctgagatgagcacgataaagcccatttctttccaaacacacttgttccctgttacatattaatttatgcctgacccaatgcccagtgagctccccttcacaatggcaccgatgtagagggatgacaaattctcaggttggtttagattacaacagtgggcagaataaatgttatttctccaaaaaaagtgatgggcttggaccttgcctcaagttatggacctcaatctttcacagacctcaatctctcagaaatccaaggcccagatgaatcacggcatttttcctaaggccacacagtcaaccagt

SEQ ID NO: 495999 - DNA, 372 bp, Homo sapiens
ttaaacatctaatgtgcagaaaaacgaattccaccatgaccrtcgtttcacagactgccaacagcttccctcgggttctttttcctgtaaaagctgcccctctttattacaaaatcacagcgtctgcttataaggtctgcgttttattttcattaatcctgaaagcaaaaaaaaaaaaaaaaaagtcatcctttccttttgaactttaaaactattctgaccagtgtagaaaatacttctgcgtagatggtattaatctcttcatcataaaacaacatgaaatgaaatgcattttgaaatgcaaaaaaccagtttcacaagaaacaaatgaaatactcatgctaatctatttcatgttaatttggaggatga

SEQ ID NO: 496000 - DNA, 425 bp, Homo sapiens
gtaaccttcacccagagggagagccttaaatctcaaggaatctctcttacttgcacaaccaatttgtcaggggaagcttgtcttactgcagatcacatatagggtggcacgctatttagaattctgataataaggcagtgtttagagtggttaaacttgggcatttttctggagttcacttaccgattggtacgggtagtgaagattcagttataaaggtttcatgcaatgtgtctctgtacctagaacctcagccataaagaaratacataaacttccagaaagacaccgtatagaggaagagcctagctcagttcctccacaatattttttcctctgacccacctggccctgagtggaatgaatgagatgaggggcacagccctttgttcctaaaagatgaggcaggacagggccagcaaccg

SEQ ID NO: 496001 - DNA, 628 bp, Homo sapiens
agtaagcagatgaggtgatcaacctagttcttccattcacactagctgagtagcttagggcagatatttcaaccttgtctaggcacagatgcttcatctcttccataaagggaaagggatctaggtcaggtctttggttcaaattctatcctgtttcgtaaatcaggccgatcggaacactgccacatccattcatcatttgccgcttttgcactacaaaggcagagttgagtagtgacagaaaccatcttgcctgcaaagcttaaagtatttactatttggccctttatagaaaatgtttgacaatctctgggctagatcacgctccagccttcttcctctgactgcaaatctccggtcatgacagaatataaaaatatatataaattctgtaatagccctgataaacaagaagaagtgttcttgggcacttaaatttatgaggaatccctgacagacayaaggcaaatgggattagaggaaaatggaaaactacaacacataatacacccagaaaaaaaggcaggcataaaaggcaggaatgactccagggaacatctggctcagaaaaacaattagagagagtagaagggtccatcagcagctgggagagtggttggtcaggacc

SEQ ID NO: 496002 - DNA, 679 bp, Homo sapiens
tgatctttgttattttctcctttctgttctcaaagttttctgaactcaaaaacatatgacttttgtaatttggaaataatttacatcatgagttggacaaattaaatagggtttaattagataacctctaaagttgcttccagttctaaactctgaactctgacatttcatttaaaataaacacaaaattatcaaattagcagaaagctacaaggaaattagaagtttgcccaagtaatagtggrcttgaggaggataaatgacacataaatattcagaagaggaaaacatacagaagaaagccatctacagctattcagagacactcagctacttctgtgagtggggactgggtagatgaacacagccttctctctactggtaagtattcaaattctggggcctggtgtatgtcacaaggaaacagcacatggatcaatcaattctcctcctgtgagtaagagggaatgaagaataaggcgtccaaggcctaagtttggcttgtgtatggatcaaagacaaatcagtctatcctcctaagctaaacacaagtgccaaaacaaatgggtgttgatagcaactggcaaaaaggtactttccatccactgatggagagcctgtaggactataattaaaaaaaatatttaatgttgtggaaaaagcaattgggacaccacag

SEQ ID NO: 496003 - DNA, 679 bp, Homo sapiens
tgatctttgttattttctcctttctgttctcaaagttttctgaactcaaaaacatatgacttttgtaatttggaaataatttacatcatgagttggacaaattaaatagggtttaattagataacctctaaagttgcttccagttctaaactctgaactctgacatttcatttaaaataaacacaaaattatcaaattagcagaaagctacaaggaaattagaagtttgcccaagtaatagtgggcttgaggaggataaatgacacataaatattcagaagaggaaaacatacagaagaaagccatctacagctattcagagacactcagctacttctgtgagtggggactgggtagatgaacacagccttcyctctactggtaagtattcaaattctggggcctggtgtatgtcacaaggaaacagcacatggatcaatcaattctcctcctgtgagtaagagggaatgaagaataaggcgtccaaggcctaagtttggcttgtgtatggatcaaagacaaatcagtctatcctcctaagctaaacacaagtgccaaaacaaatgggtgttgatagcaactggcaaaaaggtactttccatccactgatggagagcctgtaggactataattaaaaaaaatatttaatgttgtggaaaaagcaattgggacaccacag

SEQ ID NO: 496004 - DNA, 679 bp, Homo sapiens
tgatctttgttattttctcctttctgttctcaaagttttctgaactcaaaaacatatgacttttgtaatttggaaataatttacatcatgagttggacaaattaaatagggtttaattagataacctctaaagttgcttccagttctaaactctgaactctgacatttcatttaaaataaacacaaaattatcaaattagcagaaagctacaaggaaattagaagtttgcccaagtaatagtgggcttgaggaggataaatgacacataaatattcagaagaggaaaacatacagaagaaagccatctacagctattcagagacactcagctacttctgtgagtggggactgggtagatgaacacagccttctctctactggtaagtattcaaattctggggcctggtgtatgtcacaaggaaacagcacatggatcaatcaattctcctcctgtgagtaagagggaatgaagaataaggcgtccaaggcctaagtttggcttgtgtatggatcaaagacaaatcagtctatcctcctaagctaaacacaagtgccaaaacaaatgggtgttgatagcaactggcaaaaaggtactttccatccactgatggagagcctgtaggactataatwaaaaaaaatatttaatgttgtggaaaaagcaattgggacaccacag

SEQ ID NO: 496005 - DNA, 610 bp, Homo sapiens
ctgtgttctagtgacaaagacataacacaacacaccgcactaaaaagagccaatgctgatcctcctgttcaaaaatrgagtgagcagagggtgtagcagcagtccactaatacctcacagccatttggctatgagaatggaaaaacctggaaaggccaaagaaatcctatagaaatactatagaaaatgagccagtagcaatcaaaccaagattgatgtgtttgcatcaagataataaaagtaatattatcataacatgtaagagtgctatttttcctagaacacaaaggaacttaatttcactcatttctattctgttctggtttaaatccctggctggatcgtcactgtctgtgtgtccttggggcaaattccttcacttctcatccttcggattgcatatacagtgtgtgctacatggtagattctatattcacatccttcccccacttctcattttttcccttttcttcttatatatatagctttatgcagataccagatatatttttagcattattttcaacccactaaaataaattatgctatagaaagcaacttgtttacaaagcagattcacgaatctgaatgctaaagagaaagaggaatt

SEQ ID NO: 496006 - DNA, 649 bp, Homo sapiens
agatactagagtaagtacactccggtagagactaaaccaggagattagaggaggcttatttggttttgctagattgtaaactgcttgaggacaggaactttgtcattgtgaatgtcacactacctataatagtgtcttgaacatggttagactcaatgattcctagctsaatagaattagatgatgacctgcagaatttttcaatttaattcattctcggaggagggaaagaagtggattttctgatcaaattcaggggagtgcttttaaagccttgttttttggggaacagtttgtgtaagcttgccaatgtttgactgcagactggctccttgaaaagcttgggaaaaagccaggcagagcaataagagagaactggaggttgagggctgagtaatcagaattcaatctgatgtgcggctctggcaaagggatgctcaaaggttaatagcacaaagctattggctttgaaaaagaacattctttgaaagaatccaaaagggcacgggaacaaacttgattggaattgattgtacagagaatctctattgtgtaaaaagaggagacaaatagaaagcacttaagaaggatagtattccactttcgccgcaggaatatacaagtgacaaaaacagccagtgtttatagc

SEQ ID NO: 496007 - DNA, 623 bp, Homo sapiens
agactaaaccaggagattagaggaggcttatttggttttgctagattgtaaactgcttgaggacaggaactttgtcattgtgaatgtcacactacctataatagtgtcttgaacatggttagactcaatgattcctagctcaatagaattagatgatgacctgcagaatttttcaatttaattcattctcggaggagggaaagaagtggattttctgatcaaattcaggggagtgcttttaaagccttgttttttggggaacagtttgtgtaagcttgccaatgtttgactgcagactggctccttgaaaagcttgggaaaaagccaggcagagcaataagagagaactggaggttgagggctgagtratcagaattcaatctgatgtgcggctctggcaaagggatgctcaaaggttaatagcacaaagctattggctttgaaaaagaacattctttgaaagaatccaaaagggcacgggaacaaacttgattggaattgattgtacagagaatctctattgtgtaaaaagaggagacaaatagaaagcacttaagaaggatagtattccactttcgccgcaggaatatacaagtgacaaaaacagccagtgtttatagcag

SEQ ID NO: 496008 - DNA, 649 bp, Homo sapiens
agatactagagtaagtacactccggtagagactaaaccaggagattagaggaggcttatttggttttgctagattgtaaactgcttgaggacaggaactttgtcattgtgaatgtcacactacctataatagtgtcttgaacatggttagactcaatgattcctagctcaatagaattagatgatgacctgcagaatttttcaatttaattcattctcggaggagggaaagaagtggattttctgatcaaattcaggggagtgcttttaaagccttgttttttggggaacagtttgtgtaagcttgccaatgtttgactgcagactggctccttgaaaagcttgggaaaaagccaggcagagcaataagagagaactggaggttgagggctgagtaatcagaattcaatctgatgtgcggctctggcaaagggatgctcaaaggttaatagcacaaagctattggctttgaaaaagaacattctttgaaagaatccaaaagggcacgggaacaaacttgattggaattgattgtacagagaatctctattgtgtaaaaagaggagacaaatagaaarcacttaagaaggatagtattccactttcgccgcaggaatatacaagtgacaaaaacagccagtgtttatagc

SEQ ID NO: 496009 - DNA, 553 bp, Homo sapiens
tttttgtcctttagccaaactatctgtcatcaagggagctgattcctgatgagctgatttaaagccaaggtttaggagggtggactgaaaggcagatgaaggaaaacaagtaaacctgttaatgatctgtacatatggagttttatagcttccaaaatgtacctaacggttttcatttttgtgagccatagtctaaaggataatggcaaaaccaacttggatggcaaaaaatgaagactgtttaaaccaagtaggtttgraaatgtctcaaaatgcaaattactactgtatttgttaatgaggttgctatttttaaagacacacagtaatacatccaatattcttcatagcacaaggtgacttctttgctattgctccttctcttctttattttttcatttttattactttcttccatgtacacatttcatatctttttttcttctggtaggctctactcagatactgtaattgggctaggaagcacacattaggaaatgtacttggttttcctaagctaattatttataaagaagtttcagggatcttccag

SEQ ID NO: 496010 - DNA, 553 bp, Homo sapiens
tttttgtcctttagccaaactatctgtcatcaagggagctgattcctgatgagctgatttaaagccaaggtttaggagggtggactgaaaggcagatgaaggaaaacaagtaaacctgttaatgatctgtacatatggagttttatagcttccaaaatgtacctaacggttttcatttttgtgagccatagtctaaaggataatggcaaaaccaacttggatggcaaaaaatgaagactgtttaaaccaagtaggtttggaaatgtctcaaaatgcaaattactactgtatttgttaatgaggttgctattkttaaagacacacagtaatacatccaatattcttcatagcacaaggtgacttctttgctattgctccttctcttctttattttttcatttttattactttcttccatgtacacatttcatatctttttttcttctggtaggctctactcagatactgtaattgggctaggaagcacacattaggaaatgtacttggttttcctaagctaattatttataaagaagtttcagggatcttccag

SEQ ID NO: 496011 - DNA, 566 bp, Homo sapiens
gtgcagtcttgtttaaaagaaggatacgaaggaatcaaagaagaacaattatatacttatatatttgtatttgttcttattaatgcacagaaaacctttggaaggagaaaagctaattgagaacccaaaccatccacctctattctcagccaagacactaagaacagaaaccacacattackgtttaaactaaaataactttgcttttccactatctccattaccattttgttaccctgatgggaatttccttcccaaattattcattataggtacttccaaaagactaacctactcatgtttttcccctaagattattgaatccttggtctcaaaatcctcactttggtgattccacccatcctgggctgttgtattgtgattcttacttggtctagtcaagtctctacattgaaagacttaccttaaaccacacttccaatactgaataagtttttacttcaccttatgccctctgagacactacaaagctttgcaatgtgttctctcctgctgcagtaagcaattaacttagcttcatcttttcaacagattttgttggtgat

SEQ ID NO: 496012 - DNA, 566 bp, Homo sapiens
gtgcagtcttgtttaaaagaaggatacgaaggaatcaaagaagaacaattatatacttatatatttgtatttgttcttattaatgcacagaaaacctttggaaggagaaaagctaattgagaacccaaaccatccacctctattctcagccaagacactaagaacagaaaccacacattacggtttaaactaaaataactttgcttttccactatctccattaccattttgttaccctgatgggaatttcctkcccaaattattcattataggtacttccaaaagactaacctactcatgtttttcccctaagattattgaatccttggtctcaaaatcctcactttggtgattccacccatcctgggctgttgtattgtgattcttacttggtctagtcaagtctctacattgaaagacttaccttaaaccacacttccaatactgaataagtttttacttcaccttatgccctctgagacactacaaagctttgcaatgtgttctctcctgctgcagtaagcaattaacttagcttcatcttttcaacagattttgttggtgat

SEQ ID NO: 496013 - DNA, 636 bp, Homo sapiens
attttcttatttgttcctccattagattaagttgaataaaatatttggcatgcattcagtctacatgtgtacgaatgtcatattttaactttttgaacttttcactgtgacaaggtgctactaattattatactgggaaaacaaggataaccaggactattccaggacaacaaggctgtatagtcaccctaaatatgagaaatgtttgaaggaattcagagtatttatcctgaagaaggcagaatgtgggatgtttgacaggggatttgagtggcaaaatgttatatttttgtgtactttgaaggccttcagggataaggakgcagcctgtatgtgggtaccagaagagacaggaagacagtggcaacagttcatagttctttggtgttgaagcagaccaagagtgaggcccttgtgcagtgctttggtgagtgggtctatggcagacctgtcaccctgtggttcagctacctgggacctggagaagctgggacctggaggacaatgtggctggggaaaccaactctgccaaaaaggcttacagggattaagcatcttacccatagcttgacaggttggaattcagaccttggtttctaggcttccaggctagtgtccatcccaccactgcatccc

SEQ ID NO: 496014 - DNA, 560 bp, Homo sapiens
ctcattaatttataaagtaaaaaggtttaactagctcatggttctgcaggatgtaccatgaagtatatttgggaagacttcaggaagattccagtcatggctgaaggcaaagcaggagcaggcgtctcacatggcaggagcctgagcaagagagagtgagagggtggtgctacacacttttaaagaaccaaatctcacaagaactcaggattatgagaagagcaccaagaagatggtgctaaaccattcatgagaaacccacccccatgatttaattatctcccmccaagccccaccttcaatattaggaacaacaatctgatatacagcttgggcagggacacagatccaaaccatatcagtatgttagaaaaacttaagaaataataagaaaccagcaatatttagggagtatcaaatctaatatgttctctgtttacattagcaactttgaaaagtaaagagaaagagtgacatggtgagaatggtaaagtaagaaaggctaaaaaataaatctgtccttccatagaagcaacaacaatatctgtcaaaattctcag

SEQ ID NO: 496015 - DNA, 605 bp, Homo sapiens
atactcattaatttataaagtaaaaaggtttaactagctcatggttctgcaggatgtaccatgaagtatatttgggaagacttcaggaagattccagtcatggctgaaggcaaagcaggagcaggcgtctcacatggcaggagcctgagcaagagagagtgagagggtggtgctacacacttttaaagaaccaaatctcacaagaactcaggattatgagaagagcaccaagaagatggtgctaaaccattcatgagaaacccacccccatgatttaattatctccccccaagccccaccttcaatattaggaacaacaatctgatatacagcttgggcagggacacagatccaaaccatatcagtatgttagaaaaacttaagaaataataagaaaccagcaatatttagggagtatcaaatctaatatgttctctstttacattagcaactttgaaaagtaaagagaaagagtgacatggtgagaatggtaaagtaagaaaggctaaaaaataaatctgtccttccatagaagcaacaacaatatctgtcaaaattctcagaatcaactatttcagaatactggacattaacacaaaaactgc

SEQ ID NO: 496016 - DNA, 550 bp, Homo sapiens
tgtgagttcagggaatgaaaggggagttggggagaagaggacactgaagacggttttgccagccacacagttttgcttaagtcctaaggggagaggagactggcacttggctttggctgtcctcctgtgcattgcatttgagcagagcaatgcccttgtcccaattgtatccycagatacgttagtgtggggggacactctgaatttcccctaggccgtcacatgtgggctggacttcccaggaacacatttcttggtaattcacaactccctttcggagaagaaacttggcctgtgggtaacagaccccaacccaatagctcttgggcctctcctggaaagacacagctttctctcagccaggctgcatgaattcaggatttgcattctcttggttggggctgggctgagagaaggtggaatgcgtgtttttgagattctaaataagaaaagcaggcgtgactatgcctgcttgattctattactttggggcattttcaaagaatttcttgtctccacttatttttctaatattcatgtttatgttgaa

SEQ ID NO: 496017 - DNA, 550 bp, Homo sapiens
tgtgagttcagggaatgaaaggggagttggggagaagaggacactgaagacggttttgccagccacacagttttgcttaagtcctaaggggagaggagactggcacttggctttggctgtcctcctgtgcattgcatttgagcagagcaatgcccttgtcccaattgtatccccagatacgttagtgtggggggacactctgaatttcccctaggccgtcacatgtgggctggacttcccaggaacacatttcttggtaattcacaactcccttycggagaagaaacttggcctgtgggtaacagaccccaacccaatagctcttgggcctctcctggaaagacacagctttctctcagccaggctgcatgaattcaggatttgcattctcttggttggggctgggctgagagaaggtggaatgcgtgtttttgagattctaaataagaaaagcaggcgtgactatgcctgcttgattctattactttggggcattttcaaagaatttcttgtctccacttatttttctaatattcatgtttatgttgaa

SEQ ID NO: 496018 - DNA, 595 bp, Homo sapiens
acttattcaaatggaacactaatgaaaagttaaccgcaatgtactattggttataaaatgttactgtaacattaaattgtttctgatgttgatctgattaatttaatgattcattaagacttgaaaagtgtctgatacttagtaggtggtcagtaatgattacttaatgaatacttttgctccaaagcttaataataataataaacaatcatcatcatcattgcaaatacttttatttgctccaagtgttttatgtgcataaattcatttagtcctctctccattttacaggtgagaaaagtgaaaccaagtggtgccaagtaacctgccaaggacataaatctagaaagtgagagccaagaattttaacccaggcaatctggttccagagtctgtgctcttaatagcacattatctgcttgtcttaagtgaatgaaacataggtttttaaaacctaaggagcatacgataatttaaatattttcccaaaatattatactgctataactagctctgcatgcttaatttttccagtaatataacggcrttattaacttatgattttgttctgtctgtgctctttctacacataatt

SEQ ID NO: 496019 - DNA, 641 bp, Homo sapiens
agttcattttcatgctgctgataaagacatatcccagactgggcaatttacaaaaggaagaggtttaatggactcacagttccacaaggctgggaggcctcacaatcacggcagaaggtgaaaggcacatctcacatggtggcagacaagagaagagagtttgtgcagggaaacgccccttgataaaaccatcagatctcgtgagacttactatcacgagaatagcaaaggaaagacctaccctcatgattcaattgcctcccactgggtccctcccacaacacgtggggattattggagctacaattcaagatgagacctaggtggggacacagccaaaccatatcgatacagaagagagtgaaaggagatcccaagacacacctgagcatgaggttgagcgagcaagccgttctgatgggagcaggcaagaagaccccaggagagacttcatcaactccacactgacacaacacctaatgtgtgtgaaggckccagggagatttacacaactgaagaagagttcaaggataaattggggatcatagaaaagtatgtaaataaatttacaaaacaagagaattatttgttataaaggaaatgaaaagataagcaggaaaggagacataatcataatggct

SEQ ID NO: 496020 - DNA, 466 bp, Homo sapiens
gggaatgaaccgagaagcaccgggacccggatcccggcgtgaaaggccgcgcgcggggcacggcgggaaaagacgctgcgcgcagaaacacccgccccgcgccgcgctctagtgggcggccctgccgcgggcggctctgattggactgccgaaccccgcgcgctgattggccgcgtgggcgaggcggaggagagccgtgcgcagcggcgtatgtggggccgtgtgcagacccgcgtgtggcgcaggcaaggaccctcaaaataaacagcctctaccttgcgagccgtcttccccaggcctgcgtccgagtctccgccgctgcgggcccgctccgacgcggaaggtgagggctgggggaggggmccggcgctgacggagccgcagtgcgggtcgggtctgtggcggacagagagggtagggagcggcgaggtggcgatggcggccgcactttggcctgcgcctctgc

SEQ ID NO: 496021 - DNA, 614 bp, Homo sapiens
tctgatgaatcataggttggttattaaacccaatgcattaaaaaagaaaccctggggaataataaragatatcaccatttccatggcttcaagttgccattgcagggattcccattaataattttcatgatctctttcctcacttccccctgcccgagggtaatatctttggctctacatccactaatttcagtaagttgaaagtacagtcaccttactggtacctaaagcaatagtgttgtcacactcaattcttaacttcaattcttaactcaattcttaactcaattcttaaccaatcatggtcacactcaattcttaacttctaaattaatatttttaacctcattctttgagcaacacaatattaaaattaccatatgatccagcaatttcacttctgggtatataaccaaaagaatcggaagcagggacacaaacatatatttgcatctcatgtcattgcaccagcattcacaatagcccaaaagtggacacaacctaagtgtctctctatggatacatggataaacaagacatgatacatatatgtagaatagaatagaatattattctgccttaaaatagaaggataggattttggcacatggtac

SEQ ID NO: 496022 - DNA, 614 bp, Homo sapiens
tctgatgaatcataggttggttattaaacccaatgcattaaaaaagaaaccctggggaataataaaagatatcaccatttccatggcttcaagttgccattgcagggattcccattaataattttcatgatctctttcctcacttccccctgcccgagggtaatatctttggctctacatccactaatttcagtaagttgaaagtacagtcaccttactggtacctaaagcaatagtgttgtcacactcaattcttaacttcaattcttaactcaattcttaactcaattcttaaccaatcatggtcacactcaattcttaacttctaaattaatatttttaacctcattctttgagcaacacaatattaaaattaccatatgatccagcaatttcacttctgggtatataaccaaaagaatcggaagcagggacacaaacatatatttgcatctcatgtcattgcaccagcattcacaatagcccaaaagtggacacaacctaagtrtctctctatggatacatggataaacaagacatgatacatatatgtagaatagaatagaatattattctgccttaaaatagaaggataggattttggcacatggtac

SEQ ID NO: 496023 - DNA, 653 bp, Homo sapiens
ttcaaaaagttgactggctagttaataactcttaactgtctcctcagccgagcaaaatgagtgcctctcacacgcttatttaaaatctgatgcratgcttcaatctgcccatgagactggaagaaaataccttctaaatattgcaggagtttttcttaatggtaaactataatctagaagactgtaggaaaaaagattctcgaaaatgaagtttcctgcttctccttgagagtgcagaggacacctcaaaacagtggtgaggttgatgtcaagttgatattagactacccaacacagtctctagcagagatgaatcacactcattccccacaggtacttctacaacccagcgccgcgtgagatttattctaaagacaatgcctttgaagaattgttcacacagaaaattacaaagcacagaaatacttcatttcctctgaaagtgacttagcagaaaaaagggaaaattcacacccacaaatccacacgtatataagccagaaatttattttacaaaaaaaaaatagctaaagtattcatagagagaaaggagaactagataatgcacctagaacatttaaacaatgcataaattccagaaaagattaatattgccctttaaattgaaaagggatcaattacagaccaaatta

SEQ ID NO: 496024 - DNA, 653 bp, Homo sapiens
ttcaaaaagttgactggctagttaataactcttaactgtctcctcagccgagcaaaatgagtgcctctcacacgcttatttaaaatctgatgcgatgcttcaatctgcccatgagactggaagaaaataccttctaaatattgcargagtttttcttaatggtaaactataatctagaagactgtaggaaaaaagattctcgaaaatgaagtttcctgcttctccttgagagtgcagaggacacctcaaaacagtggtgaggttgatgtcaagttgatattagactacccaacacagtctctagcagagatgaatcacactcattccccacaggtacttctacaacccagcgccgcgtgagatttattctaaagacaatgcctttgaagaattgttcacacagaaaattacaaagcacagaaatacttcatttcctctgaaagtgacttagcagaaaaaagggaaaattcacacccacaaatccacacgtatataagccagaaatttattttacaaaaaaaaaatagctaaagtattcatagagagaaaggagaactagataatgcacctagaacatttaaacaatgcataaattccagaaaagattaatattgccctttaaattgaaaagggatcaattacagaccaaatta

SEQ ID NO: 496025 - DNA, 653 bp, Homo sapiens
ttcaaaaagttgactggctagttaataactcttaactgtctcctcagccgagcaaaatgagtgcctctcacacgcttatttaaaatctgatgcgatgcttcaatctgcccatgagactggaagaaaataccttctaaatattgcaggagtttttcttaatggtaaactataatctagaagactgtaggaaaaaagattctcraaaatgaagtttcctgcttctccttgagagtgcagaggacacctcaaaacagtggtgaggttgatgtcaagttgatattagactacccaacacagtctctagcagagatgaatcacactcattccccacaggtacttctacaacccagcgccgcgtgagatttattctaaagacaatgcctttgaagaattgttcacacagaaaattacaaagcacagaaatacttcatttcctctgaaagtgacttagcagaaaaaagggaaaattcacacccacaaatccacacgtatataagccagaaatttattttacaaaaaaaaaatagctaaagtattcatagagagaaaggagaactagataatgcacctagaacatttaaacaatgcataaattccagaaaagattaatattgccctttaaattgaaaagggatcaattacagaccaaatta

SEQ ID NO: 496026 - DNA, 653 bp, Homo sapiens
ttcaaaaagttgactggctagttaataactcttaactgtctcctcagccgagcaaaatgagtgcctctcacacgcttatttaaaatctgatgcgatgcttcaatctgcccatgagactggaagaaaataccttctaaatattgcaggagtttttcttaatggtaaactataatctagaagactgtaggaaaaaagattctcgaaaatgaagtttcctgcttctccttgagagtgcagaggacacctcaaaacrgtggtgaggttgatgtcaagttgatattagactacccaacacagtctctagcagagatgaatcacactcattccccacaggtacttctacaacccagcgccgcgtgagatttattctaaagacaatgcctttgaagaattgttcacacagaaaattacaaagcacagaaatacttcatttcctctgaaagtgacttagcagaaaaaagggaaaattcacacccacaaatccacacgtatataagccagaaatttattttacaaaaaaaaaatagctaaagtattcatagagagaaaggagaactagataatgcacctagaacatttaaacaatgcataaattccagaaaagattaatattgccctttaaattgaaaagggatcaattacagaccaaatta

SEQ ID NO: 496027 - DNA, 615 bp, Homo sapiens
gtaaaaaatgcctctacttatgaaagaaaagataatcgtcacaggaatacacagagctcaacctttgagcaaggtatcactgtatcagaaatccaactacaacatacattagccctgtgatcttggataattcactgcacctctctgcttcactgcaaaatatcagtgacgacattgccctgcagagttgttgtgggtgtagtagaattctgaggctggattgtgtttctcctagggacttaatgtacctggctacatttatgtctaaagctctttaaaatggctgaatggattaaaaaaataccattatcagtcaaaatatcctactgcaaattatagattaaatgtactacagctaactgaagtagaaaataaaatcattggaaagataatagaaaggtcacagaatgkatggaaatctgagagaagcctagaaataaaagctaatcaggagagtggttcagtagtaagaagcaaatccaaggacacaacccagaaataattggttgagaggtcatgtcagtgatattgctgtagaacacctgatattgccattactgacctcatggtgccaccatctctgatgtgcacactcaatttattgagacttggtca

SEQ ID NO: 496028 - DNA, 615 bp, Homo sapiens
agtgcttatcacatatgtctttatccatcttgctattcatttactaatttgtctcagtgtttcaagaatctcaaaggatatttcagrcagcatactccttttctgtaaaaacgttaggtacatatactgaatttctcataatattttgtaaacttattctagatttcttttatgtatcagtaactttgttttattactgacatttttaaaagatgcaaaaaaggcctttgataaaattcaactgccatccctgagtgaaaaaaatcttagaaaaataggattagaaacaatatttgtgtgtgtgtgataaaagataccaacaaaaatcatacagcaaatattatattacagtgaaatattggaggcatgcctcttgagattgataaaaagaaaagttcgcttgttaccatcacttcagttcaaggttgtactagatgtccttgccagtggaataagaacaaacaaagaaataaacatataaggattgaatggcaagaaataagacttactgctttgccggattgcaaaattgcatagaaattcctaaacaatcaatagataagcaattgaaattgataaaatgatttagcaaaatctttggcttcatggtcaatt

SEQ ID NO: 496029 - DNA, 615 bp, Homo sapiens
agtgcttatcacatatgtctttatccatcttgctattcatttactaatttgtctcagtgtttcaagaatctcaaaggatatttcaggcagcatactccttttctgtaaaaacgttaggtacatatactgaatttctcataatattttgtaaacttattctagatttcttttatgtatcagtaactttgttttattactgacatttttaaaagatgcaaaaaaggcctttgataaaattcaactgccatccctgagtgaaaaaaatcttagaaaaataggattagaaacaatatttgtgtgtgtgtgataaaagataccaacaaaaatcatacagcaaatattatattacagtgaaatattggaggcatgcctcttgagattgataaaaagaaaagttcrcttgttaccatcacttcagttcaaggttgtactagatgtccttgccagtggaataagaacaaacaaagaaataaacatataaggattgaatggcaagaaataagacttactgctttgccggattgcaaaattgcatagaaattcctaaacaatcaatagataagcaattgaaattgataaaatgatttagcaaaatctttggcttcatggtcaatt

SEQ ID NO: 496030 - DNA, 615 bp, Homo sapiens
agtgcttatcacatatgtctttatccatcttgctattcatttactaatttgtctcagtgtttcaagaatctcaaaggatatttcaggcagcatactccttttctgtaaaaacgttaggtacatatactgaatttctcataatattttgtaaacttattctagatttcttttatgtatcagtaactttgttttattactgacatttttaaaagatgcaaaaaaggcctttgataaaattcaactgccatccctgagtgaaaaaaatcttagaaaaataggattagaaacaatatttgtgtgtgtgtgataaaagataccaacaaaaatcatacagcaaatattatattacagtgaaatattggaggcatgcctcttgagattgataaaaagaaaagttcgcttgttaccatcacttcagttcaaggttgtactagatgtccttgccagtggaataagaacaaacaaagaaataaacatrtaaggattgaatggcaagaaataagacttactgctttgccggattgcaaaattgcatagaaattcctaaacaatcaatagataagcaattgaaattgataaaatgatttagcaaaatctttggcttcatggtcaatt

SEQ ID NO: 496031 - DNA, 594 bp, Homo sapiens
tggggcagtttaaccccttcctccctgaagatgtatttctatcttagatattgggactagcaatatttttagscagaatgatgttataaacagattccacataactcagaagcttataatcaagtcagcttccctacaagttctctctgaactaattttctgattccatgaaatggcatgcttttacaatagtcatcattccaaacacgttcattaagttctattaacagtaaatgctacatgacattgaccctggattttaaatagtgaacttcctggctacttcaagaaacccatataatatgtacgtatgttggttattgtgggaaattctttatttctgctctgcttcaatggcgtggagcttggggaagggagggagatttcttagagggcaacaactaggtcccagttttttcttctaggtctattttgcattgttactcctatttctaacaccatgtctccgcctaccaggattgtgttaatatctgtgtttttttaattaaaaaccctcagatttaacatctatctaattaaaattccactaacaactttgttagaaatatctccaatcatatgattttacaagtt

SEQ ID NO: 496032 - DNA, 544 bp, Homo sapiens
ctttttggaagggatagatctctgttagctgaatcgtataaatgtcacaatgtccattggtttctttgtggttgttgtttgtgttcctggcctgttcagtgtttgtattctacatgggatacaatcaccaacaaactttatctctttcccactcatgaagctactaaagagataccagggaactgtttccactcacacacatccttatctggcgtgtcctttgtgtcccttatttgctgggacagtggtaaactgcaatgatagcaatttcagccgagtttgagttgtcattcttgctagtctttgaaccctgattaggctttgcagttcacctcacaaactgacagtgctatcaaaggcaagtattccatatttggaacaccagtgaaaaaccaggatgttacaagaaaaaagttttttttttttttttttttttttgacaragtcttgctctgtcatcaggctggagtgtagtggcatgatctcggctcactgcaacctctgcctcctgggttcaagcaatcctgcatcagcctctcaagca

SEQ ID NO: 496033 - DNA, 560 bp, Homo sapiens
ttaaaaatgaattaattctatgatataggccctgcttatagtttaaaaatcatctttaaaataagcaacgtggatgctttctcaagtgtaaaagaacatatgtagagggaggctagcatgagtgaaagaacatggatrgttgacatataccagttatatcaaatgatttgcctctttcagttctaatagcatcccacacttaaatcaattctagaaaaacattaattcaagattgactttctcccaagcctaaaactgaaatggtttataaagaaaacattggataaattgatgagtagttgaaaaagataaactaatcttaaataataaggtcaaaataaatcaataacgaatggaaaaaaggcccaaaataatatttataatgtattttggtattttttggtggaccactgtagttaacaaaaagggaggctgaatttagatagctttggaattttctttttttttattattatactttaagttctagggtacatgtacacatcgtgcaggtttggtatatatgtatacatgtgccatgttggtgtgctgcacccatt

SEQ ID NO: 496034 - DNA, 684 bp, Homo sapiens
ataaattactgattacttacaggataagccttatgagttggcaaaatctgaaggtctcaaagccttacaaccccaccaaagccagctttatctgctatctgatacataaactttcatagtgtttcacaacattatcatggagaatattaaaatatgaatatttttagaaaaggaaacaccttcatatttctaagtcaggtctcattatgatgaaaaaaatggttctttcctacacacaaattttggagtaaggggattcaaagacatgaggaaggtattgagaaaccatacagatagctggggaaaaattcatggtatgggtaagatctacaactagactgggaggctgtgtcataaaaacataaaaatatgttagtttcccaattatcagggctgatcctggcacctatgcttaagagctaacagtygcattgagaagataagatgtaaactcctaagatctgtatatggcaaggtgtatgaactaatgtaataagagagcaaaaaaaaaaagaaaagattaaatggaattctttaacttcaagtgacaaaatcccaaatcaaactggctttaaaaatgtaaaagcagtggaatatattgtctcacataactacagagtactggctagatctggtacccagataatcaataatctatatttctctgtcacttatatttacatt

SEQ ID NO: 496035 - DNA, 642 bp, Homo sapiens
ttaaaatgaaaggtagtggttgactacatcttctacagcwgtatgttcctgattacgtttccaaaacatgatatttaagcggccacgagaaggtgtgtaaacccagatcaaggagcttaaagggaactgctggatgggatcttctggaccacgtgacttctaaggtttcttctgggtaatataaatataactagcaggaaaaaatataaaaattgtcaacagagataatttttactttctcctttttactattctgtatgtgttacatgaccttttatcatccaagaaaaataatggtaactctcaccctaccagggactggcagcaaacctgaaggcatacagttgacagtctccctgagggaagccccaggtatataacatggccttaaaggagaaatttaccacctggggtatcgaatactgaatactgattaatgaaccaattggagcctctcggagagtctgaaggggagacacactgaaggcaagatcctgaagcccaggcactcacagagaggagagacactatccagaactcatgatgtggtagaagccaggaggctgagaaaatagtagagcaagtaagcaacaaaacagtaaaagcacctccacacttcaatcccaaatacctggcctagaa

SEQ ID NO: 496036 - DNA, 414 bp, Homo sapiens
ccccattctgcccaaacctctcagggcacgaatggtgctgaatcatttgcacgaacgcagcagctccscgttccgcggctcccagcggggacggtgtccccagagcagtgacagtccggggatgggggcccggaaagagggccagggcggagcctttggggacgtggggacatggaagggggtcgggggaggatggcggcagcaggtactcacccgggtgaggaaagcccagcccgggtcctcgcgtccccgctgcaagcggtcccccaggtgctcccgcgcctcgcagcttccccgtgggcggccgccccgactcggcagcctgcactggtggtccggtgctctcctccgcccgcccaccgcccgtggcagccacggctcgggactccggtgctcgacgcggagtgcctggaa

SEQ ID NO: 496037 - DNA, 592 bp, Homo sapiens
atgaatacatacagtatattatttacataaagtttaaaattatacaaaataatatatttcttataaattatgaaataagcatataaagaaatacataggaatgataaacaccaagtctgataccccttgagaggaaggatgatgcaataggcagttctacagagagtgagcacctgtgttcttatgcaaagaatgtaattcttaatataaagaataaataygcaattatcatggtttaggcatttgaaataagaggtagaaatgaaataaccacaatacttttgcttgaatcattatgtgtctttttgtaagtattgtgatataaatcatactgctgaaacttaggtctgatcctgactcataagcaatgtgaagtcactgaaggactctaagaggagtaatataatccagatttatttttgatagattacactggcagttattgtgggggcagtagtggagacaatcttaagaggatattacaaaagtccaagagagagaagataagagcttgattacagataaaagcaacagacataaggagacagaattctgctattgcagtattagcagaatagcagcaggacttggt

SEQ ID NO: 496038 - DNA, 529 bp, Homo sapiens
ctcacaggttcatacaagtgaattgcatagttcaatgcttggcacagagtgagagctcagcaaatggaagcttgtactgttattagccatcgcaaggctaccctcatgatggggacaggtgatggattcgagtgggaggaacacctgtggcctgggccctgtccggcaggtgtcagaaaagtccaggagagtcatgcttaggccttctccaaagatggaggtgcaagagccccacagcatagcagcctctttttgaagtgatgtcaatgtgcttcttcctctttgggcccttgaagctcaggctcagtgttgagtcccaacctgacttctctgcccatctcattggcgctttatgccagagacagggggagcatgattggcacctactcaccctgaagggactgccttggtaaggcaactcaggggaggcctggggagccagaaccgtgtgagggtgcccraggcagcaagggaaagactcagagcacgatggccacattcagagatcacatgccctgcccccaaagcc

SEQ ID NO: 496039 - DNA, 538 bp, Homo sapiens
cctatttttacttcctaagtatggatacttgaaaatgtaaaatcgcacgtggcttgcatatttttctgctgggcagggctgtgccttacaaagcacttagaacaggctgtaacacatggtcgtttgctgtatacattctcttgctttgtcattttctcaaaagcatggaagcgtctttaccttgtcccatctgaaagccaagcccaatcgatttgttcagaaccacaaatgcttaaacaaaaagatcatcatttgttcaagggaggctgatttcatgattgccaaccaccaagtgagcccactgaggccaaatgcctgatgcaagggatggcaggctgctcccacgcagccttagaacgaatccgttcccacttgaagcaggggggctctggggtccgaagctgctgtgtgcacagggcttgatggagcargtggtcattgcagctgagccaactttccagcgccttaaaaaatacactcagtttagcaagtacaggcagaaagcccaaagagatggcccatccccttgagggaggta

SEQ ID NO: 496040 - DNA, 550 bp, Homo sapiens
ttttagttgaaagaaatggccattgccacaggaagagataggggttacttggcttgagaaggttattttaaaaatttttattttaatttttcttattttctgagatagagtctcactcttatcacccaggctggagtgcagtggcacaatcatagctcaatgtatcctcraacttttgggctcaagtgatcctcctgccttggcctcccaaagtgttgggattacaggcatgagccaccgtgcctggcccagtttgagaaatttaaaagggcctctgtttcaccaaagtttaaaaaaagagatctaggatttcttggtttgtaaatcactatggtggcttaactcctctgtttaaagatcacttatcttcagagtatttcttttgaggcagcgtcttgctctgtcacccaggctggagtgcagtgacgtgatcatagctcattgcagttttgaacccctgggctcaagctattctcctgcctcagcctcccaaagtgctggtattactggtatgaaccacttcgcacaggcttctgagtgtctcttaagg

SEQ ID NO: 496041 - DNA, 459 bp, Homo sapiens
gcgcaatgttggctcactgcaacctctccctctggggtcaagcgattytcatgtcccagcctcccgtgtagctgggattataagcgtgcaccaccacgcgtggctaatttttgtattttttgtagagacagtgtttcgccgtgttggctggctggtctcaaactcctagcctcaagtgatctgcccgcctcagcctcccaaagtattgcgattacaggcatgagccactgtgactggccgatacttatgtcttgattgtatatgagcccaacagtgatttgatttttttttttagttttttaaattataaattatatttatagtataaacaaattataacatacatggaatttacacattcttagattatttggtccgtaaaattagattaagaagaagcgaaaggaatgattagttaatacataggatactaacaagtatcctatgagttaattgcac

SEQ ID NO: 496042 - DNA, 531 bp, Homo sapiens
tgcaaatcccctgaacccattcctaaacatctctgtgggtgtctgggtgtctgaaatatggctttagcacatcccttgggtgccaacatagtgcttggtatttttactcttttgaactgttgcagctttctctggtgaggtctttctycaaggccccaaaaccttccttacaactatcaatacaaattttgttcctaagaagatggatggtgttaaatgactctgccaagattactgtttttattgcttctgaatcttcatgaacttcctctgctatggtgaagctctcattttttttcatgctggatactatcactgtgcatcttactgatatgctgcagatgggccagaggggcaaactggactgtatgccctctggacgccccaagaaactggtgagagttgggagtttcatggtggctttacttttcccctctcagagatttctgcgtgaacacatctctttgacgtatcttcttactcaagcctccctctcactggagaacacaatcaggcccatatcagagttgt

SEQ ID NO: 496043 - DNA, 672 bp, Homo sapiens
ctgcaaatcccctgaacccattcctaaacatctctgtgggtgtctgggtgtctgaaatatggctttagcacatcccttgggtgccaacatagtgcttggtatttttactcttttgaactgttgcagctttctctggtgaggtctttcttcaaggccccaaaaccttccttacaactatcaatacaaattttgttcctaagaagatggatggtgttaaatgactctgccaagattactgtttttattgcttctgaatcttcatgaacttcctctgctatggtgaagctctcattttttttcatgctggatactatcactgtgcatcttactgatatgctgcagatgggccagaggggcaaactggactgtatgccctctggacgccccaagaaactggtgagagttgggagtttcatggtggctttacttttcccctctcagagatttctgcrtgaacacatctctttgacgtatcttcttactcaagcctccctctcactggagaacacaatcaggcccatatcagagttgtactagagggtaaataaaattacctaacatatatttattaagccctcactatgtgctaggcacattcataatcttatttgattttcaaaattatctaatgaggcacatactattattatctccatcatttgatgtggtcat

SEQ ID NO: 496044 - DNA, 498 bp, Homo sapiens
tgggaggggtttccccacgccagcccctgggggtcttttgggaggcagagtgtggtaggatccctctgttgttgcttccacagctatttctggcagggagaagatagtctcaggcctgcagaacagaggggcttcctgggccaggcagcttactatgccagggtcccttgctgtctctgggtgcaggaggctgacactctcaggttctcagagataagaaggttttctgaaccagagatctgctgtgcctgggtacctttctccagtgtaatctgtcaagtccatgtctcygggtggggaaggggtctcctcctacagggataaaggggcttgttgagcaagctgcctggtgtagccaggactctctcaacagttttgccctccagcagcctcagggcctctggtgaagggagcctcgggcctgacaggaaaggagagggcctccctggctgctaatttattcagggatccaggtcaatcttcctcatcagcagcatc

SEQ ID NO: 496045 - DNA, 542 bp, Homo sapiens
tattactagagcaggggtccccagttcccaggccacacagcaggaggtgagtgaccacctctcctataccccataaatatataaacctactatgtacccacacaaattaaacatttttttttaaattgcttacttcacagagcttcatggtacttaaatgagatcatccacataatgtccttgacacatagaagggctcaaaaaatatctttagtcattattatttctgcatataatcaaccattaaaagccttgatttccttatgcataagttagggataatagtagtacctgcctcatagcactgtgaaagattttgattacctattactatataacaaacccatcacagcttagtagcataaaatatacagcattttaagtgttcccaggagatgcagatcaggaattcagaaaaggcacagcagatagggcytcagctagggagacttgaatggctggggctaaaaaattctgaaggtatctttgcttacaggactggcacctacactttggttactcaaagggtgggcacagattca

SEQ ID NO: 496046 - DNA, 566 bp, Homo sapiens
tgtttttaaaattttcccttcaccatgcatgttttaaagggaaacttttggctttgatttctttaataaaaatctggcggtaaccrttccagaaacccattatgaagttgtttttttccggcaatgacaattgtgatcattgtgcacctcaggccagtgtccaggtgggctcttgaccaagaagccttcctcctttaccagaacctgggaccaaggaaaccccagacacaaacaggctgaagctatttgctttttgtcagctcctcgactgcagaacagtccactctcaccacacttatactgtgcacccctcacttacactgtgcaccccattgcatctggctgtcaggaaagcagcataccttaggtccagaggcaaacacagcactagttgtcttattgggggcatctctctactggtactacccatcaccaaggcttcatgcttcatcttggaaggaacagcagggaagtggcaggggatgaagggacaccaattatttctccagagagagaggggacatgtgtaaaggctgatgctctcaaagaggctctacaacctgata

SEQ ID NO: 496047 - DNA, 512 bp, Homo sapiens
tgcagatccaagcagattgtaacgtttctgatttattcacaaaatcacagtggatgtggagcccaaagtatggaagcctccagtattatgccccaacaatgaataactaagttggatgtgcaggaagctggagtttctggtaacactaagagaaatgtccttggctcccccatcttgggtaaaggcaagagtagaatgcttcccctgttcagttggaggcatttcaaatgtggagaccagggtctctgtggattacttgtagcaaagtcttcgccccaaattcacgttcctttgttacccatatggcctgaaacagccccactgccattgggtgtgcaatgaccttggatgggaaccatggggtgtgcaaccccataggactcctgataaagtggactctgccataggaccccagataaagtgagytttcccataggacctcagataaagagagctcttccatatgaccccagataaagtgggctcttccataggaccccagagaaagtggg

SEQ ID NO: 496048 - DNA, 512 bp, Homo sapiens
tgcagatccaagcagattgtaacgtttctgatttattcacaaaatcacagtggatgtggagcccaaagtatggaagcctccagtattatgccccaacaatgaataactaagttggatgtgcaggaagctggagtttctggtaacactaagagaaatgtccttggctcccccatcttgggtaaaggcaagagtagaatgcttcccctgttcagttggaggcatttcaaatgtggagaccagggtctctgtggattacttgtagcaaagtcttcgccccaaattcacgttcctttgttacccatatggcctgaaacagccccactgccattgggtgtgcaatgaccttggatgggaaccatggggtgtgcaaccccataggactcctgataaagtggactctgccataggaccccagataaagtgagttytcccataggacctcagataaagagagctcttccatatgaccccagataaagtgggctcttccataggaccccagagaaagtggg

SEQ ID NO: 496049 - DNA, 576 bp, Homo sapiens
catgacatgggacaagccatattaaatagaggtacagaccagccrtatatttttctgaaagggcgtttttgtaaacttcaatgggccccttttgacatccatccttcccttcatctctgccagggcagagttaatatatcaccacaaaggcactaagctcccccaaagaattgtagttttcagatttaggagggtgttttggggtcactttttttttcttttttttttaaattatactttaagttttagggtacacgtgcacaatgtgcaggtttgttacatatatatatgtgccatgttggtgtgatgcacctattaactcatcatttaacattaggtatatctcctaatgctatccctcccccctcccaccaccccagaacaggccccgaataggagggcgttttggcttgctttcgttacattgatggttccaactctgttgctttctggggaacacagggtggaatgctgtgaatacacggataatgtcattgctgccgcacacaaaaagcttagggagacagacgtgtgaacaatgaactgaggtaagagttgggaggcagaggtaccagt

SEQ ID NO: 496050 - DNA, 576 bp, Homo sapiens
catgacatgggacaagccatattaaatagaggtacagaccagccatatatttttctgaaagggcgtttttgtaaacttcaatgggccccttttgacatccatccttcccttcatctctgccagggcagagttaatatatcaccacaaaggcactaagctcccccaaagaattgtagttttcagatttaggagggtgttttggggtcactttttttttcttttttttttaaattatactttaagttttagggtacacgtgcacaatgtgcaggtttgttacatatatatatgtgccatgttggtgtgatgcacctattaactcatcatttaacattaggtatatctcctaatgctatccctcccccctcccmccaccccagaacaggccccgaataggagggcgttttggcttgctttcgttacattgatggttccaactctgttgctttctggggaacacagggtggaatgctgtgaatacacggataatgtcattgctgccgcacacaaaaagcttagggagacagacgtgtgaacaatgaactgaggtaagagttgggaggcagaggtaccagt

SEQ ID NO: 496051 - DNA, 576 bp, Homo sapiens
catgacatgggacaagccatattaaatagaggtacagaccagccatatatttttctgaaagggcgtttttgtaaacttcaatgggccccttttgacatccatccttcccttcatctctgccagggcagagttaatatatcaccacaaaggcactaagctcccccaaagaattgtagttttcagatttaggagggtgttttggggtcactttttttttcttttttttttaaattatactttaagttttagggtacacgtgcacaatgtgcaggtttgttacatatatatatgtgccatgttggtgtgatgcacctattaactcatcatttaacattaggtatatctcctaatgctatccctcccccctcccaccaccccagaacaggccccgaataggagggcgttttggcttgctttcrttacattgatggttccaactctgttgctttctggggaacacagggtggaatgctgtgaatacacggataatgtcattgctgccgcacacaaaaagcttagggagacagacgtgtgaacaatgaactgaggtaagagttgggaggcagaggtaccagt

SEQ ID NO: 496052 - DNA, 650 bp, Homo sapiens
ttatgtattaaaaatatattaaataagtygaatttaatcctatgatattttcattaaaaagataattttctatcaaggattgtcttgtctcatagcattattctgacactgataattattatagtcttaaaatatattttaatatctagtagaataaattagatatcatcactcttttattaaagtgatataactatttcatctattgattctcttaaataaatttaatttgtttgcaagtcacattaaactaataaaacaaaattttcatatgactcaaataattaactgataattcttatggtaatctcatcatattgggtctggtatctcatattttgtatcatacaattgatacatacttccatttgaacaattccaagatatttcattagaggtacctattgaatgctcttcaataaccaacacaacaatattaccttctgctatgttctgaatgtctatgttctcccaaaatgtatatattaaaatcttatcaccaatgtgatggtattattaatagaaaatggggactttgggagatgagtaggtcatgaggcagaactctcatggttattagtgctcttataaaagaggccccagaaagctgccttgaccattccaccatgtgagggcacagcaaagaggca

SEQ ID NO: 496053 - DNA, 197 bp, Homo sapiens
ttaaccaaaaaccaggtcctcaccagacactgaatctgcatcaactttaattgactccccagcctgaagaactatgagaaataaatttctgatgtttataggctacctagtttatggtattctgttgtagccacccaaatagacagagactttgtaaatttgtgatgcagcatratagatatcctagtactggactc

SEQ ID NO: 496054 - DNA, 634 bp, Homo sapiens
agttaattcctatctgagcctgtttctaaatctcaatgattcattcagtttgtttgagataataatctcagagaaagaaaggaccttggtatttttaccagtacaacattggctgcaagtgggtacttgatatattggatgactgatagaaaaggccagtgtgaggaatgatgaactaccttgtgattaaattacactgatatacatataaatatatatatatatttatatatatatgtgtgcatatgtatgtgtatatatacatacacatacatatacatatatagatatatgtgaatatataggaattttattttcaaaatgagagaatatatgtttctctccctctcagtgaagctacacccggggatcactggctttcagctttttccttcttaacatatagaacagatgatacgtactgtaagaaaaactattaatgggtctcttagtccattttctactgctgtaacagaatacaacagagtggrcaatatagaaaaagatttatttggctcacagttctggagactgagaaatctaagagatggcaccaacatctagtgagggtcatcctgtaatagaaggcatcacatggcaagaacatgagtgtgcaagtcagagagatgaaatc

SEQ ID NO: 496055 - DNA, 373 bp, Homo sapiens
ctgttgcctgtaatgtgacacctgggggaattcctggccctttttgcagatccctataaaagcaacagtagaaggtcaaaactcatctcaaatatcacctcctttgggaagccttccctgaaccccgcccactgcctccttatgtagttcaacagtgtttcatggtttttacctcaatcacagcattcatcaagctgtattatactgtgttgatttctctgcctcatccactaggctgtgagatctttggggatgtgaacyctgtcctttatttctgtatccccagtgtgtagcacagaacctggcatatagctgactttcagtaaatgtttgctgagtgaatgacagtttcacactaacatctgtctgtatc

SEQ ID NO: 496056 - DNA, 373 bp, Homo sapiens
ctgttgcctgtaatgtgacacctgggggaattcctggccctttttgcagatccctataaaagcaacagtagaaggtcaaaactcatctcaaatatcacctcctttgggaagccttccctgaaccccgcccactgcctccttatgtagttcaacagtgtttcatggtttttacctcaatcacagcattcatcaagctgtattatactgtgttgatttctctgcctcatccactaggctgtgagatctttggggatgtgaactctgtcctttatttctgtatccccagtgtgtagcacagaacctggcrtatagctgactttcagtaaatgtttgctgagtgaatgacagtttcacactaacatctgtctgtatc

SEQ ID NO: 496057 - DNA, 614 bp, Homo sapiens
ttcacacatgagcactaagaaaaagttctttaccaaattcctttcctctaggcagcaaagaagataaactgggttttgtgtaaaacttgcacaactgggtatggctgaaactcacctcgttgagaactggcatgcatgattagatttgtcttaaatgttgactttcccagttgagcaagttgaccatcttgatttgttatatttggagtcaattccccaataatgacaagttttacacaagttagattatatggcctcagtgaaagtacattataatgaaagggtagaagagcccacagcctatcagaactctagtattaaaacttctgttctattcagcagaaataaaactgagctaacatcttgtttaagatttgaaatcatttcccaaaagtgaggygtctgtatgggggcaaaagagaagagtgattgctgccaagaattgttaatagaataagttcctccaacttcttgctccaccaccttcaataaaaaatgacaactttgactttcctcttgatgctgtcaacaaatctcattcaatactgatagaagaggaacatttaaaaaatctatggtctctcaagcaggccaaattctgagtccccatgtca

SEQ ID NO: 496058 - DNA, 631 bp, Homo sapiens
tgtttgagctcctaagtgctatcaccacccctacattgttcatttctgcatctgaggcctcacatgggccgggttttttggtgaaacctaggtaatatttaaaaccttggcctcaaggaagtctgagaaggggcttttggctttctaaactctgtagtaccaaaacaaatgctggaaaaggatattggaattaatgttgaatgagccagtgtctattatagaatctgccatacctcccacacacccttccatgtatactgattgcctatagcaggaatttcgggagagaggttatgagactctcctgcagtaagatcagaggagatatgcagttttgaaaagcatatgcaataccataaatagttgtgtatttttaaaataagaataactttcaaaatttcaaataacrttaaaggccggaaaacttaacataacaccagcctgccaaaagcattcaaactcttaggtggcgtatgagacctttcatgacctggctgctgctctctatacatgttgcattctccagtcctgtgaaattatttcaagtttctttttttttttttctttttgagacaggtctcactctcacccaggctggagtgcagtggcatgatcttggctcactgcaacc

SEQ ID NO: 496059 - DNA, 411 bp, Homo sapiens
ggtctgatgttgggcatcaaaagtttccayagcattatgataaggcagaatttgggatctgggcaacggtatcctggtaagttagctctctggggcgggggtggggggaaatccaaattggtagcgtttgtttttggtaccaaattggtagtattttgtgatgtaaatactcctcccatgtccagtttcaacttactaacacgatgtcactgaacacaatgaagtgttgcacagaattggcttttgtgagccggtgtgagccagtatagcacaccgctggacctgaggccgaggtgtgggtgaggatttgggactcagaaccaggagtcctccttccttgcaactcaataggaagaacactaggttctttcagggaaggtaaatacataaaagaacatgagttcgggccgt

SEQ ID NO: 496060 - DNA, 411 bp, Homo sapiens
ggtctgatgttgggcatcaaaagtttccatagcattatgataaggcagaatttgggatctgggcaacggtatcctggtaagttagctctctggggcgggggtggggggaaatccaaattggtagcgtttgtttttggtaccaaattggtagtattttgtgatgtaaatactcctcccatgtccartttcaacttactaacacgatgtcactgaacacaatgaagtgttgcacagaattggcttttgtgagccggtgtgagccagtatagcacaccgctggacctgaggccgaggtgtgggtgaggatttgggactcagaaccaggagtcctccttccttgcaactcaataggaagaacactaggttctttcagggaaggtaaatacataaaagaacatgagttcgggccgt

SEQ ID NO: 496061 - DNA, 471 bp, Homo sapiens
ttttttcttaagggagagaggaaagcaagtargtggcaaataaaacaactacagaaagactgcagtaaataccttaattagcagacttaattaaaccttaaaattaaaaaaatattttttttgtagagccagggtcttgctatgtagttcaggctcgtctcaaactcctgggctcaagcaatactcccacatcagcctcccaaagtgttggtattacaggcatgagtcaccatgcccggcagcaagtaccaagaagtgataaaaataacgctaataaatcagaaaaaaacagaactaatgatacagttttactgtgataaacgaaaagcaggaattaaaaggaaactaaataataccttgattattttctatctatgaataatagttccctaatcaccaaaacttcaaggaatctttctttttatagtaaaagaatatatagacattctcagctaaattctaggaaatagt

SEQ ID NO: 496062 - DNA, 471 bp, Homo sapiens
ttttttcttaagggagagaggaaagcaagtaggtggcaaataaaacaactacagaaagactgcagtaaataccttaattagcagacttaattaaaccttaaaattaaaaaaatattttttttgtagagccagggtcttgctatgtagttcaggctcgtctcaaactcctgggctcaagcaatactcccacatcagcctcccaaagtgttggtaytacaggcatgagtcaccatgcccggcagcaagtaccaagaagtgataaaaataacgctaataaatcagaaaaaaacagaactaatgatacagttttactgtgataaacgaaaagcaggaattaaaaggaaactaaataataccttgattattttctatctatgaataatagttccctaatcaccaaaacttcaaggaatctttctttttatagtaaaagaatatatagacattctcagctaaattctaggaaatagt

SEQ ID NO: 496063 - DNA, 471 bp, Homo sapiens
ttttttcttaagggagagaggaaagcaagtaggtggcaaataaaacaactacagaaagactgcagtaaataccttaattagcagacttaattaaaccttaaaattaaaaaaatattttttttgtagagccagggtcttgctatgtagttcaggctcgtctcaaactcctgggctcaagcaatactcccacatcagcctcccaaagtgttggtattacaggcatgagtcaccatgcccggcagcaagtaccaagmagtgataaaaataacgctaataaatcagaaaaaaacagaactaatgatacagttttactgtgataaacgaaaagcaggaattaaaaggaaactaaataataccttgattattttctatctatgaataatagttccctaatcaccaaaacttcaaggaatctttctttttatagtaaaagaatatatagacattctcagctaaattctaggaaatagt

SEQ ID NO: 496064 - DNA, 471 bp, Homo sapiens
ttttttcttaagggagagaggaaagcaagtaggtggcaaataaaacaactacagaaagactgcagtaaataccttaattagcagacttaattaaaccttaaaattaaaaaaatattttttttgtagagccagggtcttgctatgtagttcaggctcgtctcaaactcctgggctcaagcaatactcccacatcagcctcccaaagtgttggtattacaggcatgagtcaccatgcccggcagcaagtaccaagaagtgataaaaataacgctaataaatcagaaaaaaacagaactaatgatacagttttactgtgataaaygaaaagcaggaattaaaaggaaactaaataataccttgattattttctatctatgaataatagttccctaatcaccaaaacttcaaggaatctttctttttatagtaaaagaatatatagacattctcagctaaattctaggaaatagt

SEQ ID NO: 496065 - DNA, 377 bp, Homo sapiens
aggggacgtgccaggccagggctgaactgcctgcttggtgcttttctaactgaaaggtgagtccacactagccaagatctagttccaaagggaacacttttgagagtggaagaggacactagtgactatgctgggacagcaggagtgagccgggcctggccatggtccctcacgcttacttgcttctggtccttccgggtgagcctagcttcagacccaccggaggtgctgtgtaatagtcactttttatcctggaggcttcaaaagtcaacatraactaccctaatcaacagtgggagtgatgggggtggggcatgaggttaggggccgggagcttagaggtagaattactgaacagctttgctttgaccaagtaa

SEQ ID NO: 496066 - DNA, 570 bp, Homo sapiens
tagcattgaaaggagatgaaagagacagggtgacgaaggtgagcaccaggtttctgtctttggatgactgcttggagagtttccatactgagaataggacttcggttttggacgtaatctctggagttttgtggtacttgtacagtgtccactttgagagacccatttaaatagttgaatttgaacctgcaactccagagatgatcaacgcaggagtgggagtggaacccagggagtgggtgatgccacgggctgattgaggagtccaaggatgtcgtcttggaataccaccactgaagggctgggtagaggaagagatctgaaagggaaactttgaaggcaaatgtatataactcttcaggtaactagatggtaaatggaaagagagagagggcaggagctggaagttgcagagtggagagctttttgtatttttctgggggatattaagagtatttatagactcctttttatacctttggacaatgattccgagccagtcttgaatgaaarcattcatatgtgatgtgttgtaaacctccaggacgatcggtctcacatttcattttg

SEQ ID NO: 496067 - DNA, 626 bp, Homo sapiens
tgtcaaccttgaaaaagtaatattgatgatatattgataaaactagtatcccgagagcagttgaaagggagtaatattaactttgctgcacacacattatataacatgctgtctgcattattttcttgtgttgtaagaacataaggagtattcagaaaatattaaatgtatgataactatggacataaaacaaaaaaggaatacaggaatacactctactgagttgacttctattattttagtttcatgaatttgattaggcttagagttctgatgtgcagaaaagatcataaataaccaaagggaagaaaaaagaaaatgggaagaaagaaaagaaggtgagcgtatttggatatgagttgtaattttttacgattgaattttaaaatttttagaaaaaaaagtcttttttgggggggcactggggagggtgggggagggagtgtagctctctagcccaagctggagtgcaatgctgtaatctcagctcactgcaactttcgcctcttgggttcaagtgattctcctgcctcagcctcccaagtagctgggattgcaggtgcccrccaccacccccagctaataaaatatcttttcaatatatgaacagatggaaggaaaaaagg

SEQ ID NO: 496068 - DNA, 637 bp, Homo sapiens
ggttcttcttgttgttattgttttgatgatccgttcatatcctttgccagtttttttttctattgggttattgaattttttcttactgatttgtagaaatcctttatattttagggaatttagtcctttgcctattatgtgagtttcaagtattttccccagtcttttgttggtcttttgagctggcttatatggcctttgccataaatatattttttaaatgtcattaaatttagcattccaggaatgggctattttagctttggtggtcagtgaaggctcctctgaaaaggtagcatttgagtgaaaacctaaatttcatgccacaggcaggagacaagtgctgtagtcaggaggctctggggcaagaatgtgctcggtgtctttggggaactgaaagaagccctgaagaacacaatatacaatggcacaccaggaagcagcgagtcacaccaggcccaggtagggaggtttggaagccagggacagacatgggctagcttttgggccccagagagaaaccaaaatcaatggggraaaaaaaaatgatgtgaaggcaattttaggttctatttaactattagacgaacattccaataattatcacagtccagtgtgcagcgggctccaggggtat

SEQ ID NO: 496069 - DNA, 547 bp, Homo sapiens
ataagtttaggtatcaactctgacgtctccatcacaaacttttttgcttttaaatgatatatatttaggtatttatttatttagagacaggatcttgctctgttattcaggctggagtgtggtggcccaaccatagtccactgcagccttgaactcctgggatcgagtgacccttttcaactattttgctttaattttttgtagagatggggtctcactatgtttcccaggctggtcttgaactcctggcctcaagcaatcctcccacctcagtctcccaaagtgctgagattattggcatgggccactgtgccagcctaggcatttattaaatgtttaatttttggtctacccctagtagatcataggatggtgaacttattgaggacagagatcatgcctagtttgctcaacaacatgctcctaatgcctgaacacaaagggggcactcagtatatatttgatgaggcaatgaatcattgttttaattaattaayggaagagttgttcagaaaagggagatgtaattaggaaaaaataatgaaag

SEQ ID NO: 496070 - DNA, 515 bp, Homo sapiens
ctaccaggaaaaaggactgcagtaactacatttgtggacaagatgatacctaaagatcaggacaaaacaaacaaacaacttcttgcaagtccctctgcttctatggacttgcctcatcaaggcaggcagtgagtgtttcaatactaagggaaggaagcagtagtcagtagtccccgtggtgggttttgagtgggtctttaagcatttggatgtcaatgggtggtatgggtaacaggaagaataaagacaatgccgttgtaaatgccagagttatggtttggcagacaatgtcacagaggaacrgaattatacaactttttaagaatacattcttaactcattttttttttttgaatagaagaacaaaatcggacaagagagagccattatgggatatatcagcacaccgatagaagatgggatagagaacaggaaaaaatacctatgtttgtttacggatagtagaataggcttagagccccgaggagacagcagtgaatggggaatcacacttg

SEQ ID NO: 496071 - DNA, 515 bp, Homo sapiens
ctaccaggaaaaaggactgcagtaactacatttgtggacaagatgatacctaaagatcaggacaaaacaaacaaacaacttcttgcaagtccctctgcttctatggacttgcctcatcaaggcaggcagtgagtgtttcaatactaagggaaggaagcagtagtcagtagtccccgtggtgggttttgagtgggtctttaagcatttggatgtcaatgggtggtatgggtaacaggaagaataaagacaatgccgttgtaaatgccagagttatggtttggcagacaatgtcacagaggaacggaattatacaactttttaagaatacattcttaactcattttttttttttgaatagaagaacaaaatcggacaagagagagccattatgggatatatcagcacaccgatagaagatgggatagagarcaggaaaaaatacctatgtttgtttacggatagtagaataggcttagagccccgaggagacagcagtgaatggggaatcacacttg

SEQ ID NO: 496072 - DNA, 515 bp, Homo sapiens
ctaccaggaaaaaggactgcagtaactacatttgtggacaagatgatacctaaagatcaggacaaaacaaacaaacaacttcttgcaagtccctctgcttctatggacttgcctcatcaaggcaggcagtgagtgtttcaatactaagggaaggaagcagtagtcagtagtccccgtggtgggttttgagtgggtctttaagcatttggatgtcaatgggtggtatgggtaacaggaagaataaagacaatgccgttgtaaatgccagagttatggtttggcagacaatgtcacagaggaacggaattatacaactttttaagaatacattcttaactcattttttttttttgaatagaagaacaaaatcggacaagagagagccattatgggatatatcagcacaccgatagaagatgggatagagaacaggaaaaaatacctatgtttgtttacggatagtagaataggcttagrgccccgaggagacagcagtgaatggggaatcacacttg

SEQ ID NO: 496073 - DNA, 641 bp, Homo sapiens
ctgaaactattttccacttagtaatattgtagtcctttaaaaaaggagaacaccagaagatactagatgaagtcactgaagtcacagagctgtttagttgcaaaactaagagtagaaccctattcctggactcttttcttttctcatatcttgctgcttggttagtgcttaagagttttcaggtacatattccagagccccaattcttcaagtgagttgaataaaagtaaaattcagagctgggtaacagtgtgtggtgtggcctaaggaaaaaaaattcaggcccaatatgatgtgctgtcttaacatgtggtgaaaacaggaaggccttacccagcctaaccacaagtttccctccctactctgctcttgtggatggataaggtcctgtagccaaatgtttcttagcaaggagaccaggcacagcttctgctttaccctgaatagtgggattcaatcccttctagaccacagaattattcaaacaagccaatcacatcctcccacaagaaccaaggggcacctcactctcttgacatcacaaagtctgcctcccctatcacctggttgcttgttctgttcccaagtgcaacctctgtgtggycctgcatggcgtgcagtgtgctcctcctctgggcagt

SEQ ID NO: 496074 - DNA, 549 bp, Homo sapiens
tttatttttcagtctaatttgatcccagtggcacaccctcactggaagccttgtccgccactattgaacccttgttaaatgacaaagatgtacatacaatggatctaagtgacctgaagtatcttccacttggaactttctgtgcttctttttgactttcttcagtgtctctataccttgaagctttgcactactcatgtttgtgccttacttctgagtttttaggaggcatcttrgtatgttaactattctatacaacacgcatttgtatttccttgatttttacatttataatctctaactgagatgaaaactttaccaattagggatgtgctgatgggttcctgaacatgacatactcaagttctgctgtaataatatttcttagaaacgtatcaggaggaaacttcagttaccatcagctataaactaatgtgaaacaagtttctcatgcagtggagtcctcaacaattgtgtgttctcatctgtgaactattaaaggataataatagcagctaacgattactgagcacttacaaaggcactatg

SEQ ID NO: 496075 - DNA, 638 bp, Homo sapiens
tgttaggctggcaatgatctaaaaacaaaagataacaagtattgacaaggacatggaaaaattggaattcttgtgttctattggtaggaatgtaaattgataaagtcattayggaaacaatatgagggttcttcaaaaaactaaaaatgcattgtggtcagtgctgccacagggagagaagcatgcattctcctgagcctgagagctgcctgcctgagactgcttatagcaaccccacctccaccatcagcatggcctcagtgctctagcatgcatcctgagttcaggctctccctgcatactgtggctgctgctactgatgctgtcactgagggctgaaacacttaatcccctgagcctgagaacttcctgcctgcctgggagagttgacagcaaccctacttccaccagcagtagggccacttttcccctgtgttagcgcaagccctgaagacaggctgtactctaaaggaacgcctgagacagggtaatttctaaagaaatggagtttatttggctcatggttctacaggcttaacaagaagcatggtgctgacatctgcatctggtaagagcttcagactgcttccaggggagcaggcaaaataagagggacaaagaaaagagaggaggaagca

SEQ ID NO: 496076 - DNA, 651 bp, Homo sapiens
agtgctttaacattttttttttacaaaattcttctaaatttgaaaataaatttattggtaagtggtttgcatggtaattctttcacatgattttcagcttggctccttaaagctaattagcacatttatttctaaattataaataaagctattcctaagaatttggctttaatcctaacccttgctttaaccctaatgtttgtcaaacagataaggatctgtttatttaagagatatcaaataaaaagccctttggtaaacaaccatctgtgtgctcacttacttattggatgagtcattcattaaacaagtacttaatggatagcaacatataacagacagttttataagtcctaaggatactgctatgaatgagtcaaagtcccagtacttttcaccattctgactagcatatggcaaccaaaaaatggccatgttagtaaataaataaattaaacaaatttccatatttatgcatatatattttatattaaatttaagaaataatkaattaatatgtaaataatttaaattcagcaagtgatagaaaatgaagtatatgggatagaggaggttggttgcttgagctatttacaaaggcctcactgaggaggtgaattttaatctataacttaaagaatgagagagaat

SEQ ID NO: 496077 - DNA, 619 bp, Homo sapiens
gagtaactttcttcaatggcactgtgtccacactgtctgtatatgcctatgaatcaattaccaatttctcatactttgaatacatcctttatttataaccacaaactgtttgctttcagctactaaagagaacaaaatatgtggttcaataagcttcttgtcttaaaacttgacatttcaagactacaatataaatattctaattcattatgtgagcaaaatggtccctttgaaataagtgctacttttgggatgccaggctaataaataccatgtttgataatggaaatactaaatactaatactaatattaaatactaaatactaatatttcatttcaatatttcaaaaagccatagaaatcaaatgaattcagttacagatcacagaactggaaaatgctgctagattctggtcagagaaaataagagcttacagagttaaactatgatctgatgttaataaatgtcagattaacaaacaaatattaatgataaatttaaaactttatgtcaggtcatcagcccgtaactttaaaaaaamcccagttttcctatttatgaagatttacgtatgagtcaacatctactgtacactgaatatagtctcccatttgatt

SEQ ID NO: 496078 - DNA, 334 bp, Homo sapiens
tcaaactgaaaacaaccctgggagagataacattgtcatcttttcccctttaatgttaataaaaaaaaattcagctttataacaggattaggagaagctagctagatgggatgttctgtttttgtctgtaaagggaaagggatcatttatgttcaaagagtgaaaggggaattagggaagtaattaagaggctgtgccctctgtcacatccaagtttctgcccactagatatttttgcccagagtcgaccccagaacaggggtctgatwtatctgagagtgttgtaagtggagtctaatttttgttctcagaatgatcatttttcaccacccaa

SEQ ID NO: 496079 - DNA, 514 bp, Homo sapiens
gctagtaactccttacatggcatccaagtatctgtactatacattttcttctactggggctttgtccaggcaagcaagtctgaatgcactttacatttcaggcatcttggatatctgttccttccagatgatatcccagttaccaaatggccctgattggttaatgaggaatgcaatcctgttccttgccctggctatttgtcacttgttaaatgatgttaggagattcccaggtgatttcacatctgaagactgtaatttgtggcctccttatcagatgccatgcaaaatgttttctgtgggtcacaacagtttcccaagtatcctatcttgaytcccaagatagattacactggaattatcttttcaaagaaaggaaggaagccctacatttcaaacagtctaaagtaggttataaggactgaaaaataatcatttggggacaatcttacatgagaaaaagaatatattgtaaaaactggctaagtcaattctaatctataatgtcttttag

SEQ ID NO: 496080 - DNA, 629 bp, Homo sapiens
gtgcactgaattttcctacctttcatctcttgctttctcacttatttttgtgtctgccaagaggatccccttataaatgagactacatttttttgtacacagtgggactatcttatacaaatgaaaggatcagagtaaatcatttttacagggcatactgaacaagtaaagttattctaagaaatgaaagctttaggtttccaaacagtactggcacaagtgcaactggagaaagcarcaataaacaacaagtaataagttatgttctttcctgagaacactgtttttaatcaactgattcgccttgtctgagttgttaccctatccttaattaaacatccttgggcagtatttctactcaaaaaacaactgttttaagttctttgtctgcactatgaatgtcagtgtctaagggctaacagattagtccatagcaacttagaaaaaagggatgaatagggaacagcattggagagtatatgtcaaatgaattagggcagtagtttagtgagccaatgtgccaatttagaaatggattcttcttcctgctgaagagctctttttaaaataaattacaatcataaagctgccacagtttactgtgcatagacatgttcagaattggctct

SEQ ID NO: 496081 - DNA, 629 bp, Homo sapiens
gtgcactgaattttcctacctttcatctcttgctttctcacttatttttgtgtctgccaagaggatccccttataaatgagactacatttttttgtacacagtgggactatcttatacaaatgaaaggatcagagtaaatcatttttacagggcatactgaacaagtaaagttattctaagaaatgaaagctttaggtttccaaacagtactggcacaagtgcaactggagaaagcaacaataaacaacaagtaataagttatgttctttcctgagaacactgtttttaatcaactgattcgccttgtctgagttgttaccctatccttaattaaacatccttgggcagtatttctactcaaaaaacaactgttttaagttctttgtctgcactatgaatgtcagtgtctaagggctaacagattagtccrtagcaacttagaaaaaagggatgaatagggaacagcattggagagtatatgtcaaatgaattagggcagtagtttagtgagccaatgtgccaatttagaaatggattcttcttcctgctgaagagctctttttaaaataaattacaatcataaagctgccacagtttactgtgcatagacatgttcagaattggctct

SEQ ID NO: 496082 - DNA, 689 bp, Homo sapiens
cttatgaggcaccttgatagatctattgtctgccctgtgttgtggtctacatttcctatctctcaaaaagagaacagacatggagataataattgattggcagaggttaagtttttagatcaatgtgtaaagtcttgccactaactggtttccttcacagcacaaagatcattcttgttctacaaaacgttcctgtatcatacatttgaaggacttttgacctagcattatgcaaattcccggtgcccccaaggaaacaaggcaaaataagccacgaaaggtagttatttaaatcttggaatgttaaggttcaagttagaattaagacccagagaggctccgtgtaatgaatgttaacctgagcccaggccatgttaggaaaacagagtaactatcacacagatgtaatttatttgttgatcttggcgtaccaatcrtcttatctccccaagttttggtcctggtggaattgcagacactttcaactccagttcaaggtgatacctaggatgaataaaagccatttcattaccagctgataccaagcaaagagggagggggaacaggaatgctctaagattccaaaggcattttctccagagcagctctcatacaagtccatctgcaattcattttctatttcaaaaaggctcaagacagtgggctcttcaaaattacacacaacggca

SEQ ID NO: 496083 - DNA, 575 bp, Homo sapiens
agatgaggaaactgaatcacaaagaggcgaagttaggagcctcaatccacaaaagaatgtaaaggtggagtcagattccaagtcatttagttcaactccaatgcctgcatttattaaactacattgaaatggtgcttcttaaatctgaataaaaaattaatggcaagctcattttatttatacaataacaaaacttgatattggtactaatcatgagtaacacgctcagaggtaagaaatatctagttatgttttctagtctccattagtaacctgcttaggatgctttatgtacgttttcttcctggcacggtagatgaggcatttttaccaccatgtctttgccgcagaaataaatttaaaatataaactcattgtcccaaataacaattccaggcaaagcacacaccgaaaataactagtycggagctgacaattgctgcagttagatgaaaataagcacaatgccagtcatctggagaacgctgtaagaatttttaactaaagtcttttgtaaagacagtatataggtgttggtggcgacagttcttctggagtagctgctgtgaggatgc

SEQ ID NO: 496084 - DNA, 498 bp, Homo sapiens
ggtccttgcagtttcaggaagagagtaaagattaattttagactaagataaatatgcatgctaaaatgtatagattagcactaaaaagagtagagatttaaaatgttcaaaattagtgggaaaaaaaatctttggaaaaaaacttagtccaaaagaagaaaagataggtaagatgaaaagaagaaacagaaaaagagaaaaaaaaaactcaaaatagtatgttagatatgaatacatataacaacgggcagtattaataaattcataacaataaatcactgtaaatgaaatagaaacaatacttcatagaagaacaaattttaggactttacaaagtatcaacactaattataaagcaataataattaagatgctgaagtgacacacatgtagacaaactggaatagaaggttcagaaacagacccatacatacatgcaaactgaaacatgagagrgcattacaaataagtgggaaaagaacagactactcaaaacat

SEQ ID NO: 496085 - DNA, 603 bp, Homo sapiens
ctttttacctccatctccagtagctacccagatcctgctagtcttgcttcagctatagccttctcagctatgccgtcctttctttgtcagtgccttagtttgtctgacgcctaatatattgactctcatggaaaagacacttaataaatatttgcttattccaaatcactttgcttatgatctacctttgtccaatacatggtatgtatatatatatatwtttttttttgagacagagtcttgcagtctcacataggctggagtgtagtgtcgtgatcttggctcactgcaacctccacctcctaaattcaaatgattcttgtgcctcagcctcccaagtagctgggtttacaggcacatgccaccacacccagctaatttttgtatttttagtagagatgtggtttcaccattttgcctaggctggtcttaaactcctgggctcaagtgatcctcccaccttagccttccaaagtgctgggactacaggcatgaggcaccacacccagaaccatagtacatattgaacagttttaatctttgcacttcaagattcacaggtttttttctagtgaaacatgttatgacctatttggaagtagc

SEQ ID NO: 496086 - DNA, 634 bp, Homo sapiens
aaaatggaatacctctcaaatctgtaatacaagcatgatatagtcttaaacaagaaccactcctgttatgacaactattactcttcctccttttaaagtttactcagattctgaattatggataattacaaagaagcttggtgaagttacataggggaagaagtttcatttttcaacttcccagtgaaaaataagtaacacagcatcacagaagggaaaatattctgtcccagaggacagtaccaggactttagcttatttcttttgcttctgtggttggttgtctttggccatttctcaagatgtgtaagcctctgataatattaataaaagcactttatttgcaacccatattagtcctggtttattacayatacccctaattatgattttaagtggccaaaataagaaattctggagactgtagaaaattttttttttctgggctccagatttagactaagggagagtgaccaatacaagtcatgggaccctgagaatgggaaggagaggcattgaattaaatatcactagtagagattcaagaatatgagaatccctagtcccaaccctaccattccatgatcttaatcgcctgaatggaaataaacaacataagaatacattttaccag

SEQ ID NO: 496087 - DNA, 319 bp, Homo sapiens
gtcacattccaggaggtgaaattgcgataggttttcaaagcaaggcctctctatataatacaggcaaacagatgtttaataagaagcatttctatggaaacagaagaaaaaataaagattcatgtctggagaagtctgtaagttagtttttctacagactctgaagcatattcagttggaataggcaggcagtggcaaagtaactgatttttctgagttgtagyttgaatcagatgtttcagtgaactttctgagtatccatacaccctccaggcatgaaggttgttcatatacaagttactgtagtgatttcccccaa

SEQ ID NO: 496088 - DNA, 593 bp, Homo sapiens
ctttcacaagcataaccatggcaaatgtccccaaaccaacttcacattctttctttctttttatcctggaatgaggacaagttttcatcctcactgtagctcagtctcttcttctgtaattaaaaatattgtgatcacaggtctatctcataatcgtgtaagattcttaaatgatttaatatacataaagtgcttaggacaatgccgaggacagcaatcaatgtctgttatacattattattgtcaatgttgttgttattttcttattaatattataatttctcacttcatcattggttacttgtaattctagctcatttctttgacttatactggccatatattcccttggtttggagtccttttgggcatttgccatcctaatttgatttttgggataccctggagagtgtctcctggtttttgcctttggcttcacaggcaaagaaaccacatgtgaaaaccacctatgaattgcataggctgaactggccctcattcttccacaccttggcattcaaagccacaggatgttcctagagycatacttgctacagggatttcaaaatgctgaagatccatactgtgataat

SEQ ID NO: 496089 - DNA, 457 bp, Homo sapiens
aaaaaaaaaaaaaaaattaaatattatccaggaatggtggtctgcgcctgcagtcctagctattcagaaggctaaggagggagaatcgcttgagcctaggagttccaggctacaatgagctatgatgatgtcaccacactcaagcctaggtgacagagcaagacttgtttccaaaaaaaaakttaattttaattttaaaaattaataagtcaactaagtcagctaatcagcatgactgtgtaagttcattttctcttttcaggcactagattgtggttgccactgggaaaatacaatactaaggaggatggaatattcatctgtactgctcagtgaaagggtcaaattgttctaattagctatatttttttttttttgaggagaaagaaaaacatgtatacatccttgagtttaaggctaacaattccttctcttactctcaaattggtgtgatgaa

SEQ ID NO: 496090 - DNA, 457 bp, Homo sapiens
aaaaaaaaaaaaaaaattaaatattatccaggaatggtggtctgcgcctgcagtcctagctattcagaaggctaaggagggagaatcgcttgagcctaggagttccaggctacaatgagctatgatgatgtcaccacactcaagcctaggtgacagagcaagacttgtttccaaaaaaaaatttaattttaattttaaaaattaataagtcaactaagtcagctaatcagcatgactgtgtaagttcattttctcttttcaggcactagattgtggttgccactgggaaaatacaatactaaggaggatggaatattcatctgtactgctcagtgaaagggtcaaattgttctaattagctatatwtttttttttttgaggagaaagaaaaacatgtatacatccttgagtttaaggctaacaattccttctcttactctcaaattggtgtgatgaa

SEQ ID NO: 496091 - DNA, 223 bp, Homo sapiens
gatttcattcgagtccattcgacacttccaatcgattccatttgatgattccattcgagtccaattgatgattccattcaattccattcgatgatgattccgtacgattccaytctgtgatgattccatgtgattgcattcaatgatgattcctttcgattgcattcgattatgattcatttcgtgttcattctatggttccacaggtttccattcgtgtcca

SEQ ID NO: 496092 - DNA, 566 bp, Homo sapiens
tgtacaaggtctgaggagaaggttgaggtctccccaagacttctctagaacacttggtgagaggcgccatgaggacaggtgatgcttgggcttatagctctgactcaggacatcactgctcaacagcctgaagcccacatccaaagctcatgtcatgctggcaattgaaggggtagcagagcccaaaagtccagaggggctcagcacagggagcagatgtctgtgagcaggagagacagcggctgtagggatcgatgagacttggtaagcatgatgtgctcttgtcagcatagcatctttgagctcacacaataattgatgtagaattgtccatttcagtaaggagtttccacatccactatcttccacgattctcacaagggccttgagtaaatattacctgcatgttatgggtgagaaaggggtagtttagagagctgaagggatttggtgaaggccacataatkagtaagcctgaaatcaaggaccagacccccaggcttctaaatgttagtcttgggctccttgtttcatgggactattatcatcccttgtactgagaagga

SEQ ID NO: 496093 - DNA, 620 bp, Homo sapiens
gggccccgcacgggtgccgaagtagccacagaggcgcgcgtggaactggcggaaggtgagctccggcggctcggcgcgcagcgccaggcgcgcctcttcatcggtatctgagtccccgtccgtggccaactcagcggccgcatccccgggggtcacatctctggagttcccgtcacctgctgcctgcccggccgtggtggccccctccgcgcgcagccccagcacagcgcagagcgctcggaagtcggcgcggggcagacggccggcgccgcggcagtccaggtggtggaagacctcctgcaggtactggtccaggccggtggccagcaccacgatctcgttctccacgccgcggtccagcccgtagtggtgcgccagggcgctcagcagccactgcgtgcgccgcgcaggtcgccggtacgggtcacctcccgcgccctccatgccggcctccgcgcccgygctgaccggctccatcgctgcgccgcgcgcctcgctcctccggtccctcctccggtcccttcgccccgccacttccaggggcggccccagagtttctcgaaaggaggggcttagcggtcgcggtctggttggagcggcgccggggaccgtgtccagca

SEQ ID NO: 496094 - DNA, 463 bp, Homo sapiens
tccccaacaccagatgatctgcatttatttactgcattcagtaaatatagattaatctcmatgttccttgtgttaccggtgggtccttgtccttagagctcccaagatggtggcgggcgctttcaagatggtggcaagccttttgttctctgacctggggttcttggcttcatggattccaaggaatggaatcttgggccatatggtgagcgttatagctctattagaagccgtgggtcacagaagagaaccgtggaacccagcgactagtgttcagcttgattaggacgaagccgggcacttagccctgcaggaacaatggcgagtctttagcccgattgggagtggcaatggggccttgctggatcaggagcacagcagacaccgacggatccagaggggtggaagtcagcagcgggtctgcaacggtggcaaacagcagtggtggatggcaagcaaaagc

SEQ ID NO: 496095 - DNA, 504 bp, Homo sapiens
ctcccctgaaatagcttatactaatggagtgacagacatataaagaaaaattataatgtaatatgataatgttatcttcagtcagggttaacataaatccagccctttccctggcctatatcagacatcggtggccatgctggaaacttgttctgttccttatacatctgcaggacctcatagtccttcacaacattgtcctccaagctgctgctaccagttattcagtgttggcatgtgagctgaagtctgtttgccaacgatggtatgttcttattkcaggtgtttagaaaagtctgctcagaaagcgaagtgcttcttcctaaaattgttgaggaaaacaatttggtaacaaaacatttttactattgattctcctttttttcaatttgcttgtagttgagtaaataatagatgagacttagacagacaaggcagcataaataccagcttcgtaagatcagccctttgcaactggagcaaatttccttgttaatgagggat

SEQ ID NO: 496096 - DNA, 369 bp, Homo sapiens
aatttaacctgttacactgagtttgaatttcagttccactatttattaatatgcaaaaacacttcacattccatagcttcattattccccacatgaataataactatttcatttcaaagggttttatgagaataaataagaacacattagaatttttttgcattatctgtcagagcaggtgtcaactaaatatgagggttttatttttgttttccatttttaataacaattcaactgaaacaactgaactgggccrtaaaaggtagctatgttgtcaatagcagagagattgaggaggaggaagcatagcttctctaagccattctaggtttatactctgagtttaaattaatgaatgatttagttttt

SEQ ID NO: 496097 - DNA, 369 bp, Homo sapiens
aatttaacctgttacactgagtttgaatttcagttccactatttattaatatgcaaaaacacttcacattccatagcttcattattccccacatgaataataactatttcatttcaaagggttttatgagaataaataagaacacattagaatttttttgcattatctgtcagagcaggtgtcaactaaatatgagggttttatttttgttttccatttttaataacaattcaactgaaacaactgaactgggccgtaaaaggtagctatgttgtcaatagcagagagattgaggaggaggaagcatagcttmtctaagccattctaggtttatactctgagtttaaattaatgaatgatttagttttt

SEQ ID NO: 496098 - DNA, 662 bp, Homo sapiens
gagtaaattgtaaaagagattgaagcctcagtttttgtgcctataaaatgaaaatgataatatcaacttcataagattgtgaagattatgttaaatccaacatattcaacatgccatgcaaaggcactggcaaaatcctggcacagaatgcacaataaactgtagagatgttactgctattaatgagagaagtacycttgagagcatgagatgcttcttgattcttccccaaaacaggattagtcagctttaggtttgtccctattacctccaaaccaaagaaaattagaagataaaaggacaatttgagctgctatataatccccttcggcaaatctcaactcgttaataacaaacacatgaacagagtcccaagtccctcggtgtactttatctcttctaaggctatattgaaagaaagaaaggaaggaaagaaggaagggaacaaagcagtctttgcctgccatctattctagttatatatatttttcctaatccccaattacctctttagtccaattaagtctgtaaagggcattggagacagtgaagcaaaaataaatattcatttttgaagcaaagcaatttttgttctccttttcaaagcactaaagtacctctctaaattcaaggcttatgctgagtacctctcactgctgaag

SEQ ID NO: 496099 - DNA, 662 bp, Homo sapiens
gagtaaattgtaaaagagattgaagcctcagtttttgtgcctataaaatgaaaatgataatatcaacttcataagattgtgaagattatgttaaatccaacatattcaacatgccatgcaaaggcactggcaaaatcctggcacagaatgcacaataaactgtagagatgttactgctattaatgagagaagtacccttgagagcatgagatgcttcttgattcttccccaaaayaggattagtcagctttaggtttgtccctattacctccaaaccaaagaaaattagaagataaaaggacaatttgagctgctatataatccccttcggcaaatctcaactcgttaataacaaacacatgaacagagtcccaagtccctcggtgtactttatctcttctaaggctatattgaaagaaagaaaggaaggaaagaaggaagggaacaaagcagtctttgcctgccatctattctagttatatatatttttcctaatccccaattacctctttagtccaattaagtctgtaaagggcattggagacagtgaagcaaaaataaatattcatttttgaagcaaagcaatttttgttctccttttcaaagcactaaagtacctctctaaattcaaggcttatgctgagtacctctcactgctgaag

SEQ ID NO: 496100 - DNA, 574 bp, Homo sapiens
gatggtcagatggtaatttgaagagcaattgttgaattatctttctccaatacttagttatgtttatggattctccttcgctcattgaaaagggtccaaattccccagataggtttttaatgacctcagaccctgcacctaattcatacttctaactttatttcttctttttgtttacatatcatttgggttgaatgagactatktaacccagagggagaacacagaggaacactgtgctgtattgaaggagagaaacatgttaggaatagtgagttgaaatagaaaataaatcagtgaatttaggagaaaggaaggacgtaaataaaaacttatcgataaatgggacctagaagaagtaactgctaatatattattttcttgaaaacacgaaattaaggttaaccaagacaaaactggagtttgaccgcataagacaaagagtctagctgaggattacctcaacatgccatgcttatttggctacgtaaacaagaggttgattcattgtaatgagaagaaatcgtgttaaaaacataaatactctattttgccagaatgatacattgtccagt

SEQ ID NO: 496101 - DNA, 574 bp, Homo sapiens
gatggtcagatggtaatttgaagagcaattgttgaattatctttctccaatacttagttatgtttatggattctccttcgctcattgaaaagggtccaaattccccagataggtttttaatgacctcagaccctgcacctaattcatacttctaactttatttcttctttttgtttacatatcatttgggttgaatgagactatgtaacccagagggagaacacagaggaacactgtgctgtattgaaggagagaaacatgttaggaatagtgagttgaaatagaaaataaatcagtgawtttaggagaaaggaaggacgtaaataaaaacttatcgataaatgggacctagaagaagtaactgctaatatattattttcttgaaaacacgaaattaaggttaaccaagacaaaactggagtttgaccgcataagacaaagagtctagctgaggattacctcaacatgccatgcttatttggctacgtaaacaagaggttgattcattgtaatgagaagaaatcgtgttaaaaacataaatactctattttgccagaatgatacattgtccagt

SEQ ID NO: 496102 - DNA, 574 bp, Homo sapiens
gatggtcagatggtaatttgaagagcaattgttgaattatctttctccaatacttagttatgtttatggattctccttcgctcattgaaaagggtccaaattccccagataggtttttaatgacctcagaccctgcacctaattcatacttctaactttatttcttctttttgtttacatatcatttgggttgaatgagactatgtaacccagagggagaacacagaggaacactgtgctgtattgaaggagagaaacatgttaggaatagtgagttgaaatagaaaataaatcagtgaatttaggagaaaggaaggacgtaaataaaaacttatcgataaatgggacctagaagaagtaactgctaatatattattttcttgaaaacacgaaattaaggttaaccaagacaaaactggagtttgaccgcataagacaaagagtctagctgaggattacctcaacatgccatgcttattkggctacgtaaacaagaggttgattcattgtaatgagaagaaatcgtgttaaaaacataaatactctattttgccagaatgatacattgtccagt

SEQ ID NO: 496103 - DNA, 541 bp, Homo sapiens
gtggaaggtgaagggtgagcaggaaccttcttcacagggcggcaagatggagtgagtgcccagtgaagggggaagccccttgtaaaaccattagctctcatgagagctcactcwctattatgataacagcatcaaggaaactgcccccatgattcaattatctccacctgttataccctcaacacgtggggactataagtattacaattcaagataagatttgggtggggacacaaagcctaaccatatcaaaaattttatgtaatatagaaaagaggataagaaacatatatgatgtggtaggatgaactagtatataaataataataatttgacttacagtaattcaaatgggagaagagaatatcaaaataatatgagtattctgggtatgccataaagacaaaatgattcttttctacaaaaccatttgctgttaatattctgatggtgatagacctagagccatgtgtaaatgaccagttttaagccatactaattgagagacatgaaaataactattcttttttctctgccttcg

SEQ ID NO: 496104 - DNA, 616 bp, Homo sapiens
actcaaaatttaatgttagaactcctgccccacagagagtatgctgactaggtactgttgggcaagagaacaccacagacagaaccagctcagtagaattcatttccctcttctctaatctttgcacctcctcctgccccacccacctgctgcatgaagtatggaggcagatatacatgaaaaataaatactgaaggtacaactattttatttctccaccttatattccttaacttggggaaaaggagatattgtgaactagattgaagattgaaatcttggatattcctgaatccaaagtgttttcatttctaaaatgacctgtgttcttatgactaaaaagtgattgggaaacctatgggctatgtctaaaataccttcaacagggaatggagggakaacctatgcaacatgtctcaggacagcagttggtgaagaaaaataaactttaaacaatttttgttgttattattttcataaatctttgaattaagtctctttattaaatgaattataagagtaaatctaccatggtagtctgtgatctgttagaagaaaaatttaagtagactcgatgattcaacaacaaatggcatttaaagtatgaagcttcagt

SEQ ID NO: 496105 - DNA, 540 bp, Homo sapiens
ctgcacaagaatatttaacagatttcttggcatcatccccacttttaatattacttttaaaaggctagctatggaaataagtagtgagtggttattttatgcttttcacatcagaaactgaaaaaacaacctgaaagttggcaaagaaaggattctgtggtttttctaagtctctcaagccagtggacagccacggcactcagcataattgggtaagtgtggtcagcaagtcctgagagatgagatgagatcagttcaaactgcatgataagggaggtctttgtggyggattctttcatctaacatacatatattcagctttgactgtgtacttatcattgtgttagaactggggtcccagggcaaaataaatgatgacttctgcctcagaggggcttatagtatgatggtggagatggtctggttcatcagtggcttcagcttaatgcagaggatggcaaactatggcctgaagccagcctgccagtttctgtatggcctacaagctcagaatgatttgtatgaagaaaaaagaaaaca

SEQ ID NO: 496106 - DNA, 540 bp, Homo sapiens
ctgcacaagaatatttaacagatttcttggcatcatccccacttttaatattacttttaaaaggctagctatggaaataagtagtgagtggttattttatgcttttcacatcagaaactgaaaaaacaacctgaaagttggcaaagaaaggattctgtggtttttctaagtctctcaagccagtggacagccacggcactcagcataattgggtaagtgtggtcagcaagtcctgagagatgagatgagatcagttcaaactgcatgataagggaggtctttgtggtggattctttcatctaacatacatatattmagctttgactgtgtacttatcattgtgttagaactggggtcccagggcaaaataaatgatgacttctgcctcagaggggcttatagtatgatggtggagatggtctggttcatcagtggcttcagcttaatgcagaggatggcaaactatggcctgaagccagcctgccagtttctgtatggcctacaagctcagaatgatttgtatgaagaaaaaagaaaaca

SEQ ID NO: 496107 - DNA, 540 bp, Homo sapiens
ctgcacaagaatatttaacagatttcttggcatcatccccacttttaatattacttttaaaaggctagctatggaaataagtagtgagtggttattttatgcttttcacatcagaaactgaaaaaacaacctgaaagttggcaaagaaaggattctgtggtttttctaagtctctcaagccagtggacagccacggcactcagcataattgggtaagtgtggtcagcaagtcctgagagatgagatgagatcagttcaaactgcatgataagggaggtctttgtggtggattctttcatctaacatacatatattcagctttgactgtgtacttatcaytgtgttagaactggggtcccagggcaaaataaatgatgacttctgcctcagaggggcttatagtatgatggtggagatggtctggttcatcagtggcttcagcttaatgcagaggatggcaaactatggcctgaagccagcctgccagtttctgtatggcctacaagctcagaatgatttgtatgaagaaaaaagaaaaca

SEQ ID NO: 496108 - DNA, 540 bp, Homo sapiens
ctgcacaagaatatttaacagatttcttggcatcatccccacttttaatattacttttaaaaggctagctatggaaataagtagtgagtggttattttatgcttttcacatcagaaactgaaaaaacaacctgaaagttggcaaagaaaggattctgtggtttttctaagtctctcaagccagtggacagccacggcactcagcataattgggtaagtgtggtcagcaagtcctgagagatgagatgagatcagttcaaactgcatgataagggaggtctttgtggtggattctttcatctaacatacatatattcagctttgactgtgtacttatcattgtgttagaactggggtcccagggcaaaataaatgatgacttctgcctcagaggrgcttatagtatgatggtggagatggtctggttcatcagtggcttcagcttaatgcagaggatggcaaactatggcctgaagccagcctgccagtttctgtatggcctacaagctcagaatgatttgtatgaagaaaaaagaaaaca

SEQ ID NO: 496109 - DNA, 524 bp, Homo sapiens
aagtgattctccccctgcagcctctggagtagctgggattacagatgagcgccaccacgcccggctaatttttgtatttttagtagagacagggtttcaccatgtttgccaggctggtctcgaactcctgaccacaggtgatccactcatcttggcctcccaaagtgctgggattataggtgtgagccaccrcgcccagccttgtgtgatgctttggtgtgactataagaagcttcaagattgagtagggcaggcttggctgattggctgattgcaaatttatgcacatgggcctgtgtgtgtgtgtgtgtgtgtgtgtgtgtgtgtgtgtgtgtgtgtgtatagtcagagatgatggtagtcatgtgttctgagctatgggtagtttccattcttcttctgttttcaggatatttcaagatggctgtaggaacaagtttctcttgacccatttgcctgtcaattcagtacacaatcaggcaaaggaaatatctctatgcaatattccagtgcctcctgttcta

SEQ ID NO: 496110 - DNA, 525 bp, Homo sapiens
tggagaagtgttgtattgttatttgtacttttctgtatatattaagcaatttggaaactctccaggtgattctgatgtacatcccagcttggtttctgcggtgctgtgtaaatgatcatctgaaaatgcagatgaggctatatcacacctcagctccaaagccttccatggctcccatctcctgtagactcaatttcaaattccttattgtgatattccagatgctggcctcactttctagccttgccttccactactcaccattctgtgctttttacagatgcttttggttctgtatttaactcttttccctcactctcygacatttgctcatcaaaatattgtttttcctcaagatctattttaagttctacctccttcataaaactcctctcttttcaaaagctttcttttctgtgctgcctacagaatttcttttatgtttcttttatgatacttagaatattatggtataggtcattgttattcacttttatgcttatctcattatcccctatcaccaaa

SEQ ID NO: 496111 - DNA, 472 bp, Homo sapiens
ctcaccaaaagcttgtgcaataaggacaacagcacaatgtagcccaaataatacagtgcagaaatagagaaattccttcaatttaaataacaggaatgctttgattgagatggccttcaacattcccctcagcttaagtaaaattaagacaggtgtttttttttttttttttcctgactctaggtccctgacctcccttttcttaaatcactggaraaaacttgtaattgcaaattttttctctgcctcctttgaaatgtatgtaaatctgcttaaaagcctcttactagttttaaatgtaaacatcaaaagaaatagctccttatcttccagtctccatgggagggtaggagcctaacttcagtagacattttgctccaagttatacaagtacctcctgttataagcagagaaagtttgctttgggttcagccaattagtgaacaccactgtcttatgattccctctactc

SEQ ID NO: 496112 - DNA, 472 bp, Homo sapiens
ctcaccaaaagcttgtgcaataaggacaacagcacaatgtagcccaaataatacagtgcagaaatagagaaattccttcaatttaaataacaggaatgctttgattgagatggccttcaacattcccctcagcttaagtaaaattaagacaggtgtttttttttttttttttcctgactctaggtccctgacctcccttttcttaaatcactggaaaaaacttgtaattgcaaattttttctctgcctcctttgaaatgtatgtaaatctgcttaraagcctcttactagttttaaatgtaaacatcaaaagaaatagctccttatcttccagtctccatgggagggtaggagcctaacttcagtagacattttgctccaagttatacaagtacctcctgttataagcagagaaagtttgctttgggttcagccaattagtgaacaccactgtcttatgattccctctactc

SEQ ID NO: 496113 - DNA, 621 bp, Homo sapiens
tttgcccccaaaccatttctttctttcaaaatcattcactggaagagactgggaatgacggacatatttattttgaatatagcaagttccggatcctttacattttctccatattctgttaaaaaactgaatagtttgttctttagcttatttttctctactagtattttattatatgcagctaaaagaaatcagctcttatgatattctgcctgggaatatccttagtcagatctgccattttattgatatatttttttattttctacattgctgcagtgatgattttgttaactgtttggccaaggcatcttttgggtgttctttaatccagcatctgataacattttcctcactgtctgcaagttctatatcaacmgtctccttgaagctcttcaaactttcatcagcaatatcctcaagatgcttgctgattctgtcctttctcccatcccaaagccaatgtctacttttagttttttcttatggttgcattgttgacgtgacatttgaattaagtagtgaaggatgagtgttatttgtatagagactatatttggtgcatgtctctctttctttctctgtgtgcgtgtgtgtgtgtgtgtgtgtatgtgtgtgtgt

SEQ ID NO: 496114 - DNA, 621 bp, Homo sapiens
tttgcccccaaaccatttctttctttcaaaatcattcactggaagagactgggaatgacggacatatttattttgaatatagcaagttccggatcctttacattttctccatattctgttaaaaaactgaatagtttgttctttagcttatttttctctactagtattttattatatgcagctaaaagaaatcagctcttatgatattctgcctgggaatatccttagtcagatctgccattttattgatatatttttttattttctacattgctgcagtgatgattttgttaactgtttggccaaggcatcttttgggtgttctttaatccagcatctgataacattttcctcactgtctgcaagttctatatcaaccrtctccttgaagctcttcaaactttcatcagcaatatcctcaagatgcttgctgattctgtcctttctcccatcccaaagccaatgtctacttttagttttttcttatggttgcattgttgacgtgacatttgaattaagtagtgaaggatgagtgttatttgtatagagactatatttggtgcatgtctctctttctttctctgtgtgcgtgtgtgtgtgtgtgtgtgtatgtgtgtgtgt

SEQ ID NO: 496115 - DNA, 621 bp, Homo sapiens
tttgcccccaaaccatttctttctttcaaaatcattcactggaagagactgggaatgacggacatatttattttgaatatagcaagttccggatcctttacattttctccatattctgttaaaaaactgaatagtttgttctttagcttatttttctctactagtattttattatatgcagctaaaagaaatcagctcttatgatattctgcctgggaatatccttagtcagatctgccattttattgatatatttttttattttctacattgctgcagtgatgattttgttaactgtttggccaaggcatcttttgggtgttctttaatccagcatctgataacattttcctcactgtctgcaagttctatatcaaccgtctccttgaagctcttcaaactttcatcagcaatatcctcaagatgyttgctgattctgtcctttctcccatcccaaagccaatgtctacttttagttttttcttatggttgcattgttgacgtgacatttgaattaagtagtgaaggatgagtgttatttgtatagagactatatttggtgcatgtctctctttctttctctgtgtgcgtgtgtgtgtgtgtgtgtgtatgtgtgtgtgt

SEQ ID NO: 496116 - DNA, 263 bp, Homo sapiens
ctaaatctttctcaaggttgttctctgtattttgtatttttctatcactaatattcaaatctttatcctttgtctactggagtattgtagattgtttcctaatcaggcacctggaaaatcgggtcactcccaccctaataatgtgcttttccaatggtcttagcaaagggcacaacaggagattgtatcccgygcctgcctcggagggtcccatgcccacggagcctcgctcattgctagcacagcagtctgagaccgaattg

SEQ ID NO: 496117 - DNA, 259 bp, Homo sapiens
atcctccacccccacacacggttgagttaggagattcctctctttcagagcattacccacagtgaattgtaactagttacttacatgtatgtttctcctaccagcctgtgcattcattgaaggcagacatacgttttattcatgtttgggtcaccttcacttagcatagcatctggcacattgaagaggggcaatatgtgtttgataagtgaaygagaatgaatgaatgaagcttttccatttccaccatccacattca

SEQ ID NO: 496118 - DNA, 624 bp, Homo sapiens
ggatctgttgagttagtgctgactggtggtagcttcttctgggatccttctgccagctcctggactgagcactgtcccatcttycagttgctggaatgtcaccagcacagttagaaccctggtggtgcagggcacagcagcaaggcccacggggaaggaatgcccagcttgggcagagccaagcaagggtgactgtagcaaccttgttaccccaagcttaactgttcctctgtgacccttactggtatcactttgggccacttatctgcctggcacatgtcaaaactacctattaatgtccaagggccagacttgctgcagaatccaaagtttatattgataaggctgccacaaaataaattcagttcttctgtatcagccatgttacattctggctctgattatcaaaggtagaccttaaattgccttccgttccatgccactcttgtcctagctttccaactacaccctcccacactctgtatccagcctccccaccctgccagaaggtagtggtgtttctcattttatgactgtattaatgatagagctaagctggctgtcagtcatgatgcttcactccacatggattagtagtaacataactatgacagaacttagaat

SEQ ID NO: 496119 - DNA, 588 bp, Homo sapiens
atgaatgatgaatgggtgtaaagaaatgatcaaatgctgaatcaggcatgaagtgaaataatgatgatggaccacatgatgttaacaggtgtccttctttctaagataaaaatagaagggaaggaaaatagacagaaatagagactaggatgacaatggctcattctaagcccatctggacttgaagaatccacaagagagagggggaaacactatgggtaattagatctgtttatcaatagccctttatgtgattatgattaggaccattctatcaacatagcaggtcttagactctgcccatcagggctttgtgagggtgataaagctgactgaggacactgaggcatggagaagttcagtaggtgggcgtgccaacgaggtaatctatggcacagtggggaccagaatgcaggtttcccaatagtcagccagcagcctccgttctaaacaatatcatcctctaatgatgtcattggaccatagtaagatggttggttacaaccaatgcragattttttccaaagcatcttttgggtatagttccataggcacaattgtacctgtcaggccatgcctagggaaata

SEQ ID NO: 496120 - DNA, 577 bp, Homo sapiens
tgcttttctcatttctttgagtgctagaaggcctctggctatagccctatatataacataaaakaatagaagcaatgcaataaatgctattgttgcaagtaaaaccttcattattgggctactttaagacataatatctgctaaaatctgcatctactttgagtatgtgtaattgtttattccaaatacaggaaaataaggcttattatgaaagcttaattgcattaaacacaaatataggtaactcgttttgttgcatgagtagtcttaaggaagacacaagctgttgagtggagtaagttattcaaaatattgatgacttggagagagcaaactatcttattttattcaaagttgtgctaattaataaacttcctgagtagtaaaggctgatgatatcagaaggttttgatgtttaacaaacccagtactgtttgtttgttctctttgaaatcccaggcctttactgaggactgaattatcagtggtttatatttttaaaatttcgtatcactttaacagacatgatttcctagtagctcatccacactcacataaagtgtcatgcatgtttata

SEQ ID NO: 496121 - DNA, 689 bp, Homo sapiens
tgcttttctcatttctttgagtgctagaaggcctctggctatagccctatatataacataaaagaatagaagcaatgcaataaatgctattgttgcaagtaaaaccttcattattgggctactttaagacataatatctgctaaaatctgcatctactttgagtatgtgtaattgtttattccaaatacaggaaaataaggcttattatgaaagcttaattgcattaaacacaaatataggtaactcrttttgttgcatgagtagtcttaaggaagacacaagctgttgagtggagtaagttattcaaaatattgatgacttggagagagcaaactatcttattttattcaaagttgtgctaattaataaacttcctgagtagtaaaggctgatgatatcagaaggttttgatgtttaacaaacccagtactgtttgtttgttctctttgaaatcccaggcctttactgaggactgaattatcagtggtttatatttttaaaatttcgtatcactttaacagacatgatttcctagtagctcatccacactcacataaagtgtcatgcatgtttatactaaatattgaagctaagcaactgtataattgggaatttttctgaatatgtaatgtgtacctctgatcctcaacagtaaaatggacacaggattggttatttgttgctatgt

SEQ ID NO: 496122 - DNA, 502 bp, Homo sapiens
tttcaaggaatgtacttactggaaacgcgtacaagtggacgtgctagtatgtatttgtgtgtgcagtttaatcattcattccagctctccctggaaacttgaccgtggtgatttagtgggcacagagctgggatacttggatatatacgacctgcacatcaaacccaagcatcacaagcaccacacaagcctttggatacgtgggcctgtgacacagccgcccctcttcacagtaatgttcagcatcctttgggcatggcttccattacataggtcaccrcataaacccagacactttgccactcattcttagcaaggtgtaaatacgaagaaacactgtcatccacatgttaattggaaaaacaattaaaataggttttattggagtcccttagaaatgcaaaaggggattctattaattaaaaatgaataaaatgtgggaggccaaagagagaggatcgcttggggccaggagtttgagatcagcctgggcaacatagcg

SEQ ID NO: 496123 - DNA, 498 bp, Homo sapiens
catatttagaatacatgggaataaaacagccacagaagatgaaagtgtgccaagtcagaatatacataacttaaaatttaatgcgaaggaagtgactgaaacttttycctcattcttgtatctctctctctctctttttttttttccctcttgatcatgttcccaaaaagctagaccaagttttggcatcttttagggttttattcctgtactgcatgatgacttttttgatgctgagagtttatgagctttatcaagcaggagaaagaaggcaatagtcattgtatatgagctcctaggaacgagaactttgtcataataaattctatagcctcagggcctagcacagtgcctcgcccagagctggtaagcaactgaggttggccgttcctgtagatacatcgcaattctgtttgcagtagggatagagagggatagaattgtcaccgatgtgcacacatgtgattcctcttcttattcccattgtttttcacagca

SEQ ID NO: 496124 - DNA, 498 bp, Homo sapiens
catatttagaatacatgggaataaaacagccacagaagatgaaagtgtgccaagtcagaatatacataacttaaaatttaatgcgaaggaagtgactgaaactttttcctcattcttgtatctctctctctctctttttttttttccctcttgatcatgttcccaaaaagctagaccaagttttggcatcttttagggttttattcctgtactgcatgatgacttttttgatgctgagagtttatgagctttatcaagcaggagaaagaaggcaatagtcattgtatatgagctcctaggaacgagaactttgtcataataaattctatagcctcagggcctagcacagtgcctcgcccagarctggtaagcaactgaggttggccgttcctgtagatacatcgcaattctgtttgcagtagggatagagagggatagaattgtcaccgatgtgcacacatgtgattcctcttcttattcccattgtttttcacagca

SEQ ID NO: 496125 - DNA, 472 bp, Homo sapiens
ttaaatggtccatatgtaattcctcagagtgggtttcactggaccacctgaatcagtatcatgtggggagtgcattaaaaatgtgattgcttggagccaccccagacataaatatagaaccagattatctgtggaaaaggagcccagaaatctggtcctgaggctgagtctgtgggagaggccatactgtaatatagaattttagcaagctacccatgattcttatgtagattggagtgtgacaaccactatttcaatgattcaccaggtctcactcccttctctgtgttttaattaattccgaggaaggtcctgtctatcccatgcccaccagcatcaccactcaattgctcttcacctgggttattcctcagtagagtttaccctttctactatcctttctaygtattacctttcaggaattcctagaaatttctcaccataaatgacagtctttcttttaaggcttatt

SEQ ID NO: 496126 - DNA, 628 bp, Homo sapiens
aacagagtttgaggaaaccaggcaggtttgactgagaatctcttccttgtcttccatccagtgcaagataggccacatttttacagagaactgtcaaaaaagaaagttcacattagagtcactcagctccacgtgkgtcctctggtggcatctctctcagtgtcaaatcctaattgttaggactccatgaatcctgagtacttcaatgatttaagaactcttccgaagctggtaatttggaaattgcattgttagtaaatatgaattaataaaaaagcaaagtcaagaattttactggcaatgaaactatgtttactggtcatctcttaattccatttgaattccacaggccataaactgtggtatattgcaaaataccctgaagtcagacgtggattcacatcctagatttgctgcttattaattgtgtgactttagccgttacttagcctctctgagtgtccatttcctcagctgtcaaagtgggaatgataccatttcccaaattgtattgcagtgaatataacaagagatcatgagtgtgagagatgctagtacagaggctggcccataaatgctcatgtcttttcctgtctgttgtttttttctgtaacttaaatgagcatca

SEQ ID NO: 496127 - DNA, 582 bp, Homo sapiens
ttgttgttactttttgcccttgtggtttcccggcatgaccccaggcacctgttagtagctgttgtgctccaagaccacaacctcctaaacaaaggtatttatatttcaaaggggatgaggccttattcagttccttccttccccacctcctttaagaaaattccagcatttgggctgggcgtggtagctcactccggtagtcccagcactttgggaggccgagatgggtggatctcttgaggacaggagttcgagaccagcctggccaacatgatgaaaccccatctctactaaaaacacaaaaattaactgggcatgatggtacatgcctgtagtcctagctactcaagaggctgaggcaggagaattgcttgaacccaggaggcagaggttgtagtgagccaagatcttgccatgcactccagcytgggagacagagtgagactccatctcaaaaaagaaaaaaagaaaagaaaattccagtgtttgactagcgtgcactgtgatagcctgtcagggagaaatatttggccagaggtgtaagtggctgctgtgcactgttgtgttaaaatgacggtgact

SEQ ID NO: 496128 - DNA, 623 bp, Homo sapiens
ataaatctctttctgtattttttcttggagtttaccaagataaagataatacagcatctaagaatgcaaagggtatgagagctattataaacagtgtgtgttctggctgtatggttgtaggccacatgctggtgtaagcgaatttctccaagtgctatatgtaggcagtcttcaagcttaaacacatatgtccttataaaatatatttgtacatttgttatagagaatttaagacatattttactatagaaatagttttccctaargatggaattaggtgcccctgtcagccaacaggacactttttaacccacaatatgcctgaaggagtgttgcacattcacagttctgggcagagttctgaccttggccaccgagaccttgtgtcccagtaggatgggagctgagggctgtctttacaagaattttaaaaatggccacacttttctctgacatcatccttatgccttgctgcatccctctccatccataaaggaaacccctttcaccagtcccagtgtgtccgtgaccaagctggccagactgtctttacctgcagaatcccatgattcgagaagacctacttcttttcctttcactgaagattcttccctacctttcac

SEQ ID NO: 496129 - DNA, 524 bp, Homo sapiens
atggctccaaaatattttttccagaaagaatatagtgatcatagcaaacacttttgccaataatgtctctgtggcagctccatcttcttcagtttagagagcttttgtaaatgctatctttattttgtattttttaaatccaaagatgtttttgaaatgtttcttaatgcaggaaaaaatatattggacacacttgagaatgaaatcagggacaccatgtaaagtattctgatgtattgctacaccttcaatatctaaattgattgaggcagggcctctgggaagaaagtgaaaaattcagtctgtcttccacatgttttgtctataccagtggtttccaactggagggcaattttgcttactaaggaatatttggcaattgctggagacacttttggttgtgatggctggggtgcggggctgctcctggcatgcagtgggtagacaccagggatgttgcttaacatcgtacmtggcacaggacagctctgcaacaaagatgcatccagcccgatatgtcagta

SEQ ID NO: 496130 - DNA, 625 bp, Homo sapiens
cccagggctcctggagagacctggcacacaagctcaggtgggsttcgatatgtgctccctttcagatctaggaagcccagccccaatgtgtcaagcggggcagtgattgataaccccgggaaaatttgtttttcttattttccagaggaaatgttgccaagaccaacctagaacagggtgagatgggaggagagggagagggtaccaaggggctggagttgtcatcattcctctctgggggaaaacaagcccaatctggctagcctagctggtctctaggagcactgaaaatagtacatgaaatttctccttgtgaaggataaggcaggattgctatgtccattttacagaggagaaaactgaggcacaaggtatttataggcatatattttatacatacatatatatgtctattttgccttgctaccgttccatcatcttccatgatccccaacagctctgagaggcagaaaggccaggctgacagtgtctcagcccacaaaagaggctctgctacaacagggctcccttgtttctggctggaaaagctgttagttgcttgactgctttcatttccaacccaccttcccccactttcctagcagagtccagtctgggcctgggc

SEQ ID NO: 496131 - DNA, 625 bp, Homo sapiens
cccagggctcctggagagacctggcacacaagctcaggtgggcttcgatatgtgctccctttcagatctaggaagcccagccccaatgtgtcaagcggggcagtgattgataaccccgggaaaatttgtttttcttattttccagaggaaatgttgccaagaccaacctagaacagggtgagatgggaggagagggagagggtaccaaggggctggagttgtcatcattcctctctgggggaaaacaagcccaatctggctagcctagctggtctctaggagcactgaaaatagtacatgaaatttctccttgtgaaggataaggcaggattgctatgtccattttacagaggagaaaactgaggcacraggtatttataggcatatattttatacatacatatatatgtctattttgccttgctaccgttccatcatcttccatgatccccaacagctctgagaggcagaaaggccaggctgacagtgtctcagcccacaaaagaggctctgctacaacagggctcccttgtttctggctggaaaagctgttagttgcttgactgctttcatttccaacccaccttcccccactttcctagcagagtccagtctgggcctgggc

SEQ ID NO: 496132 - DNA, 510 bp, Homo sapiens
agctctctggaaatcagaacattatctgcaaccacacacaattcaaataagaggctggcrttcagaggcctgaatctccaacttccccccaaccttgctgtgatggtccctggttttctcttttcctacgtgactatatacaatagtagcaaagctattttagggattaaaacagctaattgcagatttccatcatggccagccactcagaacacaggtttgaagagcgagctgtggtctttgcctctggggatggttttggctcctttgcctgtgaagtccacatcgctggtccttaaagttgttaacgggggctcttccatgtggcccatgtggttctgggcttgaggaatttggtggaacttagtgagaaatagtgtgtgatggtctcttggctctagaagtgtggctagaagggcctttaaacatcatctactctgcctgctttactggatcaagaaatcaggctcaaaaagactcaccactcttgaagtggcatgaggctccacg

SEQ ID NO: 496133 - DNA, 543 bp, Homo sapiens
gctgggactacaagcatgtgccagccaccatgtccagctaatttttgtatttttagtagagatagggtttcaccatgttggccaggctgggctcaaaatcctggcctcaagtgatctgtctgcctcagcctcccacagtgctgggattataggtgtgaggcaccatgcctggcctcaattcacaaacgtttatttggaacattcactgtaggccagtgtggtgccaggagatgtaagggtgagtgagaaacagttccaggccccaagaacaacccctgggtcaggagggctgacagcttctttgtgttccactctcagagccacccagagttcccttgctgaggatctgagcatgacccgggatgaggcactgccggactctcattccgcacaggacttccatgacaattattagcccaacgagatcctgggcaggtaaggcccaagctttccccatgaagtgctgtcctaggctctagcaggccctgtaggctatagcyacctctgcagcacaccaagtactgaccccactttcattcccaa

SEQ ID NO: 496134 - DNA, 555 bp, Homo sapiens
gcttttctatgagctgtgcattggttccagtgtccaagtgtttctccttctctttgggccagcagatgagccagggcagggtcatctcaaggcaatgatggaaacacaatagggcaagcccaaccacacaaccagatttcaagggtgtgcttgcatcatgtctgctaatatcccattggccaaagcatgtcacatgggcaagtgcaaagccaaggtgaagaaggacattctgcccttagtaggaaaaatggcaatatcacatggcaaagagtgtgaatacagagcragatgaagaattgggaacaacagcacagtctaccagaaacatatccataccatcccttgcaaatcaccaccaaggctgcagcagctaggacttggtttagctatcagtaaccaaaaaaaaaaaaaggcttaaacaagatgtaactttgtttctttcaaattcttaaagtccagaggtggccagtataaagcaggtatgatgctgcatggtgtcaggaacccagattccttctattttgttgcctccagttcccaagtcactttatagtc

SEQ ID NO: 496135 - DNA, 363 bp, Homo sapiens
cgtcctctaaggcatgggtcagcaaagttttccgtaaagggtgagacaataggaaatagtttaggctttgcaaaccatacaacawctctgttgtagattcttctctttttttccatttaaacgtacaaaaaccattcttagctcaagggcctttacagaaactggggatgggctggacttggcccatgaactggaatctgctggcccctgcctaagaaacagctctgctcatcccaaaataacacctccaagcaaatctgtgagagctccctggacgttatggagcagcaagcacagcatggagaacagagaaaaccagggggtctgccatcagtcacgccctggggtatgggtctgccatcg

SEQ ID NO: 496136 - DNA, 580 bp, Homo sapiens
aaggtcagtagagttcctggtattcaggagatccagggattgcatggatccagtcatccagctagtcttgcattgatttcgcatcggtttagtcttgactgatttttgcattgattagatcttgcactgaataagctttttactgtggtttttcaggcctgaggcaggtgacagtraaacaacctgttgaggttgtttcagtgagattgttaagcatcatatgtccaagggaaatattaatttcaccaagtcagacatatgtaagacagccatcctttcctctatatatcacacaaagctaaatggatctattatttgaaagaaacttgaaagaaaattttgcatatctacaaggagtgtggtatgaaggaaaaaagattaacatatccaaataatggtcctggctctgtcactaactaaccttgtgatcctgggcaggtttaacactctgggccccagtttacagacacctactgcctccagaacagttcttcccagtctgacttcttaacccatcgtattcaggctttcatccccagcacaacctacctgcccattgagaactgttagtgactccaaa

SEQ ID NO: 496137 - DNA, 503 bp, Homo sapiens
agctgccaccactgctctgacacattttcatgacctgcttgtccacagatgtagcagcagggagatagctgctgtcttactgctgtggtttaggtcttgcctaagtgcatccagaaccctagatccaagagagtctgggaaatgcagattttagctttccagactgcagtacagaaaagtacatagaaagaggtggagtgaatggagagtgtcaatcaaccatacccagcaaagttataccgtgggttacatggattttaattagtaaaacagaaggaatcagtgaagaccgctgggaacactgaatggagaggcttcaggtttctttagtatggagttgaactcaggcccagtggagatcatttcttaaaaatggtaaatggataactttttccaacacatacgccttctgcaactagagtcagcatgcgatataccaacaaataaatcaagaatkggattatctgttttcaaaatttgcctgggaacaaaaagtatttgta

SEQ ID NO: 496138 - DNA, 556 bp, Homo sapiens
tttacaccaggtgacgctagccttgggaaaacaactactggcccgaatagctgccccgtgggtacttagctcacctgcttcctcatactgcttgccttcaccacgtggaaaattctctcagcctttacccataatttgtctttcttctttttgttttctggagggtaaaatgtagtttcaactgagagatcaaacaaagataccctaaatggaagcactctgtatagaaggaagctcaagattgcaattaaaatgttggcagcatcattggaaggcagagaaactatcaccttggaacaaagattgggctaaaataatccagaatgaggaaaattgtttaaaagaattatctacaccatgaagaaattcatcagcattttgtgtaaaagatggaaggtcagaagtaacgtacctttcatttatrctgtgttcagatgtagcatttctcaatgggtatgttattgataattaggcagtactgtgttatatacaatttttccacattggcagccacctcgcatccccagcacctcctccaaagtgccagcagcactct

SEQ ID NO: 496139 - DNA, 603 bp, Homo sapiens
aggaaatatttcatcaaaggaagagtcaagagatatgacaaatttaattgtgatcttattttgccatagccaccccaacttgcagcaactaccatcctcatcagtcagcagccatcagcattgaggaaagatccttcaccagcaaaaacataacacttcccagaaatatcctacaatattttaacattttgtggaaggctcagttgattgttagtgtttttagcaataaagtacgtttaaattaaggtatytcagatataatgctattgcacacacaatagactacagtacggtgtaaagataactttaatacttactgaaaaaccaaagaatttgtgtgactttattgtgtgcatctgaaactgaacgtgcattatctcggagatatgcctgtattagcaaatataattcagcaatatagtatagacagataagtgaagtttatcccagaaaaggaagaatagattatttgtactaaatgtgttaatgcactttaccttcctaatatagaaaatggacaaatacaatacagagaaaattcacaaaagaaaacaatgacaataaacattatggggaaaaaaagagagagaaagagaatggacc

SEQ ID NO: 496140 - DNA, 485 bp, Homo sapiens
tgtttaagatatggttactaggcaacttcaaattgcacccgtggcttgcrtttgtggcccttccattgcacagaacgctgtagaagatgacgggggaagatgaaagaagagatctttgggaatggtgttgacaggtgtttggtgtgtacagccagggcgttttcaacaacagagaaacaaatgcctaagactaagggtttatagggcagggaggagagactcgaagacacaacagttctgagcaaagggccacgagtcatggaggaaaaccttcaggttggctcagggtccgaggaggacctgtcgacctgggtcagatgttggactagttgactagatagcacctcctctgggccaggtgtctccagggagcaactgatgggacgtcagagaggggcagtgaagtagtcactgactgacagcggagagggttacaggcagggaggagattatctcaggggctctatgataatcacaatgcccag

SEQ ID NO: 496141 - DNA, 535 bp, Homo sapiens
tgggcaagcaggcccccggcatttcaaagcgggggtgcgggtgggctgttccccgagtccacctccggaatgggtggaaataaagcagccagaggccgcytgtacctggtgtggggtcacagaattctcacctcccctttctgaggtaaaaacggtcctcagacaaccaccaggcctctgaggtggttctgcttatttcaacagggatggaggccaattcctggtgggctgagtagagtttaacgaggtggaaatcttcatgaaagtggccgggtgtgggcaggtggggggtggagagcctgaggctgccgcttgcccaccacggtgctttctcagggaaacctatgtatgaagatctggctgctctagatggtgagacaggaacctacggcgagtcatcgtgcctcttggggaagttttgggtcaccccaactcccacctgcaatgtcataacttattatctgggttggcgcctcatgaaacaccaccatgcaccactcctaagtggctggggtgctctgggcctgggagctaa

SEQ ID NO: 496142 - DNA, 535 bp, Homo sapiens
tgggcaagcaggcccccggcatttcaaagcgggggtgcgggtgggctgttccccgagtccacctccggaatgggtggaaataaagcagccagaggccgcttgtacctggtgtggggtcacagaattctcacctcccctttctgaggtaaaaacggtcctcagacaaccaccaggcctctgaggtggttctgcttatttcaacagggatggaggccaattcctggtgggctgagtagagtttaacgaggtggaaatcttcatraaagtggccgggtgtgggcaggtggggggtggagagcctgaggctgccgcttgcccaccacggtgctttctcagggaaacctatgtatgaagatctggctgctctagatggtgagacaggaacctacggcgagtcatcgtgcctcttggggaagttttgggtcaccccaactcccacctgcaatgtcataacttattatctgggttggcgcctcatgaaacaccaccatgcaccactcctaagtggctggggtgctctgggcctgggagctaa

SEQ ID NO: 496143 - DNA, 535 bp, Homo sapiens
tgggcaagcaggcccccggcatttcaaagcgggggtgcgggtgggctgttccccgagtccacctccggaatgggtggaaataaagcagccagaggccgcttgtacctggtgtggggtcacagaattctcacctcccctttctgaggtaaaaacggtcctcagacaaccaccaggcctctgaggtggttctgcttatttcaacagggatggaggccaattcctggtgggctgagtagagtttaacgaggtggaaatcttcatgaamgtggccgggtgtgggcaggtggggggtggagagcctgaggctgccgcttgcccaccacggtgctttctcagggaaacctatgtatgaagatctggctgctctagatggtgagacaggaacctacggcgagtcatcgtgcctcttggggaagttttgggtcaccccaactcccacctgcaatgtcataacttattatctgggttggcgcctcatgaaacaccaccatgcaccactcctaagtggctggggtgctctgggcctgggagctaa

SEQ ID NO: 496144 - DNA, 535 bp, Homo sapiens
tgggcaagcaggcccccggcatttcaaagcgggggtgcgggtgggctgttccccgagtccacctccggaatgggtggaaataaagcagccagaggccgcttgtacctggtgtggggtcacagaattctcacctcccctttctgaggtaaaaacggtcctcagacaaccaccaggcctctgaggtggttctgcttatttcaacagggatggaggccaattcctggtgggctgagtagagtttaacgaggtggaaatcttcatgaaagtggccgggtgtgggcaggtggggggtggagagcctgaggctgccgcttgcccaccacggtgctttctcagggaaacctatgtatgaagatctggctgctctagatggtgagacaggaacctacggcgagtcatcgtgcctcttggggaagttytgggtcaccccaactcccacctgcaatgtcataacttattatctgggttggcgcctcatgaaacaccaccatgcaccactcctaagtggctggggtgctctgggcctgggagctaa

SEQ ID NO: 496145 - DNA, 549 bp, Homo sapiens
gcagatcactggggtgggtcgggggctgagttcaaagaggcatgaaccctaatggcctggaattggcaggatggtccagcctggacacagaaacagccttggggtacagattttggatctgcttggtctggggagtctgcttggtctggggagtgtgtcaaaaaattctagcaggaaggagtcttgaatgattgaggctttgtttttaccctcagactccatcccatatggtaaagctgccctgagtttgtaaagggaaccatcgtccatttccatgacagggcaggaaagtgaggggaccctgctttctgcaggagatttgggagcacacaagcttggcaccctcgatcagcatgagagggcagcctccgaactccgagctgtgtccttgactgtgggtccacgcgagcttccattcgaggcagcgaggcctggaggcggaggcagtgaggcctggaggcrgaggcgtgggctctggggccccaaatcccagctcctccccgcattagctacaccttgggtacagtccttaatttccctctggattaa

SEQ ID NO: 496146 - DNA, 507 bp, Homo sapiens
tgaaatcaaacatggaagtttcattcttgcacaaacaagcactttcaaaaggcgtccttagtgagcactctctgggcttcggtgaaggtaccccagggggacccccgcccctgtctgctttcgtgcatccgggcactggagttatggtctctgtaagattgttgctgggtgggaaggagccagccaccttctgcaggaaattgtcgggactgggggcttctgttggtgagagcttgtaaacatctttcactgggttatatgaaacctgcctgcctgcctgccttcctctcagaatgttaaggaggttcaaggaggtgatggaggagakagtctgtgtaagagcttaaagacgatcacatttcactgtgccctttgccctcgggttggctggggccagacccccgctaccctgggggtacggtccagccaggtcatacagtcccccgagagccctgcttgtgccagcccctccgcccagccactcagtaccagcaccttcatttctga

SEQ ID NO: 496147 - DNA, 576 bp, Homo sapiens
gtgagaattggctcacacaattatagaggttcagaggtccatgatatgccatctgcaagctggagaaccagggaagacatggtataatttagtctgagtccaaggcctgacaacttggagttacattgcttgagggcagaagaagatggatttctctgctcaaggagagacagagaaagagtgaatctgcctttcctttgtctttttgatctatccatgcactcaaaggatgggatggtacctgctagcattgttgagggtggatcttcctttctcagttcaytgattcaaatgcttatctcttctggaaacaccctcacagatatacccaaaaataagatataacactttaccagataccttggtatccctaatcccagtcatgttgacaccaaaattaagcatcacagggcaactgtagcatttgatggcctattgtcttgaagcaggactctctcccctggttttaattttctttatgaaattcatttaatatttcattgttggctattttatactttctgttgctattgttaaggggacatttttcccaaaacattattattctatgttggg

SEQ ID NO: 496148 - DNA, 576 bp, Homo sapiens
gtgagaattggctcacacaattatagaggttcagaggtccatgatatgccatctgcaagctggagaaccagggaagacatggtataatttagtctgagtccaaggcctgacaacttggagttacattgcttgagggcagaagaagatggatttctctgctcaaggagagacagagaaagagtgaatctgcctttcctttgtctttttgatctatccatgcactcaaaggatgggatggtacctgctagcattgttgagggtggatcttcctttctcagttcactgattcaaatgcttatctcttctggaaacaccctcacagatatacccaaaaataagatataacactttaccagataccttggtatccctaatcccagtcatgttgacaccaaaattaagcatcacagggcaactgtagcatttgatggcctattgtsttgaagcaggactctctcccctggttttaattttctttatgaaattcatttaatatttcattgttggctattttatactttctgttgctattgttaaggggacatttttcccaaaacattattattctatgttggg

SEQ ID NO: 496149 - DNA, 594 bp, Homo sapiens
tctggaacaggaagctgtgggtggaagggaacccccggaaggcactcctaggtgaaggaggggcaaatacttgggagctggtgtcagcaggcaggatcgggatgggtggaggaccagactgcaaaccagctgacccttgtcttccagtctccttccctggtaggggagtctcactgtggaagcctgaattatgctctcctgaaacattgctctgggggagacaaggggtaggtggggtggcagctgggaagggtggggaagaggggtgtgtgtgtgtgtgtgtgtgtgtgtgtgtgtgtgtgtgtgtaacgaggactgggyttgtttgtaagatagagagcaaacaggaggggagggagcatgcgggggctgggacaggaaggtctgattagggaaccccagatgctgaaggaggcagatgaacaaggtcagctttggtccgggaggcaggatgtcccatccaagaaaaacggaagaagactaaccccactgacaaaagctgctctctctcctgagatctcgaacacacacacccgactctcccagcaggccctctagtgctgaagtgctcctgagggcagcctgcagtcttca

SEQ ID NO: 496150 - DNA, 505 bp, Homo sapiens
cagggagaagcaggaccttatgctggcaggtctccagagcagggacagaaaactgagacagctaattgccaaagccacagactcttcaagcccacaaatggaacagggyctgggcctgtggaaggagatctccagcacacaggactcattaaatggagcaggtacagagaatgagcaactgagaagcaggtctttcctgactttccctgctcaatgcagctaggttcccatcccaatgctgggacaggtttccctggcctgaaaagaagtggagagaagggacaacagccatgctgaagaatgcacaaccgcagaacccctttttactacttagcccctgtggatggcaaaccacacatgtaaagtaagagttcagattcgctcagagaggtgacatcagtgagaacggctgggcgaggacctccaaaatttctctcttccttcaaagcaatgagaatcctggcaaaaaaaacagtcagaatcaacatttcagaacgctgcaaat

SEQ ID NO: 496151 - DNA, 552 bp, Homo sapiens
ccagctgggcaggagtggtgggcccatagcaggcccaggggcacagtgcctgagggggaatgccatatgtgaggccagtgctagatggaccagcccatcagtgtggacagtgggggtgggggggtttctgagcaccaggaggggttatgagagatgtggtggagacatcccaatggcatgtttttcagatgccctcccaagtgcccaatgctagtcaactgagcccgtcctgcagaagcagaggagccccgaggtctcctggcacaggctggctatcagctaggcattgtgagcaggcatgaggtgtggtgagagaggccagatacaaatgggctcctattggttgcrtccgcatccatgaaggtcaagggcaggcagcgctaacctcctgccagaatagtggttggcctgtgtggcagatatttccctagcggtgccacaagtgacctcacaggtgcaggcagtgttctctctctgggcctggatgacgtcacccatgtggtgcatgaaagattgcaagcttactgcatggaacttagatgtcaatagaaa

SEQ ID NO: 496152 - DNA, 444 bp, Homo sapiens
accacaccacatacagatgcccagcccgggggcacagcaggacatgcagactcttactcactcacatgcttacttccagacacacacacatttatacatgtgcacagacatccagatagaaagatgcatggtgacgygctcactcccagacaccaaggcacactcagacacactcatgtatgaatgcacatatgcacatggacacagacacacatgcacacacacagatgctccataaatatacaaggacacacacatgcacacaaatcacacctccagacacacactgccagaagcacgcctgtgggcaccatgagcagacgctccccccaacaggcatgtccacacaggcacccacatgcacccgttcacacacacaccatgggcagcacagctctcatgaagaggcccctccccagcccccaatatcccagccctgtagca

SEQ ID NO: 496153 - DNA, 614 bp, Homo sapiens
ctgcacctgcatgctggcttgtttcaagcttagcccgagtttctaagcaagtatgtattcatagttagatgagcgtgcatggcacaaggaagggtctggtgggaaagggagggaaacaaagaatttcaaagtacatttcaaggccatattctaagattagagaaaagaagttctaaaatggattttaaagctgaggtactcgggtacagacaggggaggtggagcaggattctgcgttggatgcagacacctcagttctgcactggcccttatggctatgtgaccttgggtgttagctgtggctctccgggcctcagctcctccctcaaagctgggctgaggattgactgagaagatgtagcgtggcacctggattcaatttttacttactcatttaccaagttattctctggtgccttctatgggccaggcatggttctctgggcaggaacaaggtccttatgctccagaggaagggaaaggaggtgaacaactgaacaagcagmgtgagatcttcgcagacagcggtgagtgctatgtggacaggggctgggactgtcctagagcagcacaacccgatagaatcttctgcaatgatagaagcggtctctact

SEQ ID NO: 496154 - DNA, 620 bp, Homo sapiens
ctacagggttctgagcagcaaggatggaggacggcagagcagtgagcaggtagtgtggggcggcgtgggagctggggagacgtggacagccatgccagggaccctgtgcactggaccaagaccagccagggccagtgtgcaggcgatcgacaacaggctgcgagctcgggagcggggcacagggctcggggcaccctcagcccacactggaggaccagcagcagctcctggagycccctggccagaggggtctggttatccacagaagtttcctctttaggaatggggtctgtgctttttgaaggaagaaactgagattttactagcaacttttcagttcgtgaccctcatgttactgtattgatttgtatgttaacttgaccttccctgccttctgcctctccctctccccttcctctctccttcctggtcctgtttacttggaaggcggttgggtaacttgtgtgtttttggacaggagagaatcgtttaaaatgttgctctgtgattatactttttctttggttgttatattcctttttactcataactccctagcccttaattctcatttttgacctatggtttcatctacttaaaaaattacctcgtggcgatga

SEQ ID NO: 496155 - DNA, 438 bp, Homo sapiens
ttacacctatagtttcttctaacagttttgtagattgagctcttacatttaggtctttgatccattgggttaattttagtgtatagtgtgaagtaagagtttaaatgcattcttttgtatgtgtcaacaatatacagttgcagcataatttttaactgtgattaaaaattaattgatatccagttctatccatgtcattgcaaatgactgaagttgcttgagagaatggataccccattctccatgatgtgcttatttcacattgtatatctgtatcaaaacatctcatgtaccccataaatatttacacctactatgtacccacaaaagtraaaaataagaaataattaaataattaaaacattgataaataataattgtgtttttatggggtataaggtgttgttttgatatatgtatacattgtagaaaaattaa

SEQ ID NO: 496156 - DNA, 560 bp, Homo sapiens
atctgcaaaataagtgtattgatagtgcctacttcccacaataatcatgaaaattaaacagttaatatttgtaaaatgcagcacataatgagcaatatatatgtgtgttaaattgaaaataggcaataaacaaagaaataaacctataggacaacagatgatgataaatgctatgaagaaaactaaggtatgaaaaacatacatgttattgtggtgttctaggaaacagcaaggaggttattgctgctggaacagagtgaggaagaagggaagrcagtaggagtcattaataccactttaaatttctgttcaaagtggattgttctatagtaatacatacatactcttctaggaagcagcatacttcaacggcaaaccatggaagttgtaggctgccaggatattgctaacacctgttggttacctacaaacagaaagtcccttgaagaaagagaagatagtgtttctgtttaacagaagaatataaagtgactttctgattagggttaggggaggagatggaggaaacacatactattacttttgtgtgtcttcagttt

SEQ ID NO: 496157 - DNA, 624 bp, Homo sapiens
gaatggaatggaatggaatgaaatggaatcaacccgagtgcaattgaatgcaatggaatgcaatggaatggaatagaatgtaatcaacccgaatggaatgaaatggaaaggaatcaacccgagtggaatggcatggaatggaatggaatggaatggaattgaatggaatggtacggaatagcatggaatggaacgaaatggaatggaatggattatacccaattggaatggaatggaattgtgtggaatggaatggaatggaatggagtgtaaaggaattgaaaagaatcaacccgaaatgaatggaatggaatggaatggaatkgaatggaatggacgggaatggaatggaatggaatggaatggaatcaactcgagtgaaatggaatggaatggaatggattggaatggaatgcaattgaatggaatggaatcattccgagtggaatggaaggcaatgtaatcgagtcgaatagaaaagaatggaatcaacccgagtggaatggaagggattgcgatggaatggaaaggaatggattggaatcaacccgactggaatggaatggaacggtatgcaatagaatggaatggaatggaattaacccgggtagaatggcatggaaa

SEQ ID NO: 496158 - DNA, 563 bp, Homo sapiens
aaaggaagtctgtccccttctcagatgtctgagttccacctcaacagggccctacctccaaagttctatattctgataaccccaaatactttcctttttctcctcacttccatgggtggtaactgattcttttgtgtgtgtgtgtgtatgtttgtgtcaatggatgtttctgggttccctgtttcctctttgttctttcaatactccaattcttgtgtaatcacttccctatattaaattctgtccgttaaaatacgtattatgatttctacctgcatgactacagcctaagtaatacattattagtagcagtcctaggaaacagactttcaagcaaggatgggatactggttttcagctatttttctacaaaatatgttgcctccaataccaattttcaaggcctgccagaagaagattgctttcacctggcaggaacaaccrtagattttaataaccttgcctcagatggattttgattctcctgatctctgccataatatagtcctcagagaacttaatcatcttgacattccacaaacatcaccctggtccactactat

SEQ ID NO: 496159 - DNA, 575 bp, Homo sapiens
tagttcttgactcactgcaagctccacctcctgggttcaggccattctcctgcctcagcttccgaagtggctgtgactacaggcacctgccaccatgcctggctaatttttttttttttttttggtatttttagtagagagggggtttcaccgtgttagccaggatggtatcaatctcctgactttgtgatctgcccaccttggcctcccaaagtgctgcgattacaggcrtgagccactgtgcccagccccctagaagtaaactctttagaaatccagtagaatcatatttgctgcacttgagaatttgagaactgtttctctctttcttgattagaaacatcatgggattaggtccacagttggctccttccagtgggtttgtggttgctgacttcaagaatggagccagggaccttcatggtgagtgttacagctcttaaaggtggcacagacccaaagagtgaacaacagcaagatttattgtgaagagcaaaagaagaaagcttccgcagcatgcaaagggatctgactgggttgcccctgttggctgcggggtggccagcttttattcc

SEQ ID NO: 496160 - DNA, 598 bp, Homo sapiens
aatctaacccctagcctccaagtcatccaactgatgtccagaaagggtgaaacagagacatgccatccccgctcggccttgtccaaatgtctggcacatagaatcataagcatagtcattttacaccatgatgttttggrgtatttgttatacaaccaaagcaactgaaatgccagatatcttgtgcaagtttgcacagctattaggcagtgaagctgggctttgcatcatcaagtcagactggctccagatcctgtacccttaaccgtccaatatattcccttcgcaaacatgagccagcacttttaaacactatatgcaatgcagtcttcataaaatgtaatgacattaaataattaaatcaaataactgaattccatagttctaagtccatttctgccaagaaactgtcttattataatccggttaacacagcattttgacataggtaaaacaggccacttatggaaattagaatgtggtcccaggctactgttaattatacataaatatgggcatattggttatatattgttagtttcttgtgctttttgatctacatgattccatatctcagtatttgattaggtctgacgca

SEQ ID NO: 496161 - DNA, 598 bp, Homo sapiens
aatctaacccctagcctccaagtcatccaactgatgtccagaaagggtgaaacagagacatgccatccccgctcggccttgtccaaatgtctggcacatagaatcataagcatagtcattttacaccatgatgttttggggtatttgttatacaaccaaagcaactgaaatgccagatatcttgtgcaagtttgcacagctattaggcagtgaagctgggctttgcatcatcaagtcagactggctccagatcctgtacccttaaccgtccaatatattcccttcgcaaacatgagccagcacttttaaacactatatgcaatgcagtcttcataaaatgtaatgacattaaataattaaatcaaataactgaattccatagttctaagtccatttctgccaagaaactgtcttattataatcyggttaacacagcattttgacataggtaaaacaggccacttatggaaattagaatgtggtcccaggctactgttaattatacataaatatgggcatattggttatatattgttagtttcttgtgctttttgatctacatgattccatatctcagtatttgattaggtctgacgca

SEQ ID NO: 496162 - DNA, 594 bp, Homo sapiens
atctttccacaggttttatgtgtaagaaaatgaaagatgagttctttacttgttatttcagtgccaataaatagctgataccatacagtctttccccaaaagctcctaaattatttatkttctagttactaatactagttttcccagaacatttgtgagtaatgataactaactttagtttaattactttctagctttttccctttttaatctctactttcagatatataaattgtttgtatcttctttctctttcaaaacttttgacagtggtgatttactgaaggataatactgaaggatattattgaagtaataattcataatacgtgcaaaagaacattttccttaaatgggaggttacttaattgacctgttatttgcttttctccacaaaggctgtgtcagagtatgctatttattatcaaaatagcagtagcgtttataaactgtttgtgtatacaaaggcttgtgcaaacaagtaaaacaatgaaataaggatacctgtaagcatgtgcattggttttagtatctgctaacgctggaagtagatttttgagacatggtccctgtggtccccttagtttatgcctca

SEQ ID NO: 496163 - DNA, 594 bp, Homo sapiens
atctttccacaggttttatgtgtaagaaaatgaaagatgagttctttacttgttatttcagtgccaataaatagctgataccatacagtctttccccaaaagctcctaaattatttatgttctagttactaatactagttttcccagaacatttgtgagtaatgataactaactttagtttaattactttctagctttttccctttttaatctctactttcagatatataaattgtttgtatcttctttctctttcaaaacttttgacagtggtgatttactgaaggataatactgaaggatattattgaagtaataattcataatacgtgcaaaagaacattttccttaaatgggaggttacttaattgacctgttatttgcttttctccacaaaggctgtgtcagagtatgctatttattatcaaaatagcagtagcgtttataaactgtttgtgtatacaaaggcttgtgcaaacaagtaaaacaatgaaataaggatacctgtaagcatgtgcattggttttagtatctgctaacgctgraagtagatttttgagacatggtccctgtggtccccttagtttatgcctca

SEQ ID NO: 496164 - DNA, 594 bp, Homo sapiens
atctttccacaggttttatgtgtaagaaaatgaaagatgagttctttacttgttatttcagtgccaataaatagctgataccatacagtctttccccaaaagctcctaaattatttatgttctagttactaatactagttttcccagaacatttgtgagtaatgataactaactttagtttaattactttctagctttttccctttttaatctctactttcagatatataaattgtttgtatcttctttctctttcaaaacttttgacagtggtgatttactgaaggataatactgaaggatattattgaagtaataattcataatacgtgcaaaagaacattttccttaaatgggaggttacttaattgacctgttatttgcttttctccacaaaggctgtgtcagagtatgctatttattatcaaaatagcagtagcgtttataaactgtttgtgtatacaaaggcttgtgcaaacaagtaaaacaatgaaataaggatacctgtaagcatgtgcattggttttagtatctgctaacgctggaagtagatttytgagacatggtccctgtggtccccttagtttatgcctca

SEQ ID NO: 496165 - DNA, 640 bp, Homo sapiens
tttttcctttaaatttatttttaatttttgtgggtacatagattaatatatttatggggtacatgagatgttgaaataataccttttagtttcattaatatgttttctgaataaagacaaaaaacttatatgcacttattgatctgttgcagtcatttctagttgtttctagtttcagtttctttacagttcattataatgcatttacttctagtgcaccatagttttctagtttagagccttaacgcctacaaagttgccamtgactttgtctggagagccctttttattaagtttcattttgaaaagtttctttcacatcagcaagcagatatacaaataggaaaaatcttaattataaggtaagattggaagagatttttaaaaatcctactctacagtaaattctggaaattgcaatatagtccatatctttgtttctttgggataaattctaggggctttcaaatgtctctatgtcaaagaatatttaatacaaaatctccaagtggtcatataaattgttagcagtgaagaaactcaagttctgtttcttggtcttcataatcatggtgagattattgtttattttaaatctacctttaaaagtgaaattatgtaatacctgtgctttggagat

SEQ ID NO: 496166 - DNA, 571 bp, Homo sapiens
ttacctggtaagcccacttagtaaacaagttccacatggccagaggtgactgttaaggagtccaagtggcagtaaacaggcattcgctgccaattctgtgtcttgggaattccccaggaacaactcttgtcttgattggtggtcagagcttgttgtccagcttccctctcagtgtgctgtttgctggccattcaccatgaggggacaagtgtcacctgcctcctgagtggcatgtgccaccctgggcagtggcgctgagcayttatgaagcctgacactctaccactttgagcctgaggggaagctgtgaggactcagcatgtcagagagactgcatgtatgggagaatgcacgcacgggagccggagggacgcagaggaaccagtgtgaggcaccagggaagacacaccgcaggcttgcctcctcagtgctcccagaggttgaccatggactcctgtgaggactttttcttccctgttacctaagtacaggcagaggtggatccaggcctccacctaattcctgtggtatcaggctggggctgaagcatccactgtggccgggtgaccag

SEQ ID NO: 496167 - DNA, 486 bp, Homo sapiens
cgctgccaattctgtgtcttgggaattccccaggaacaactcttgtcttgattggtggtcagagcttgttgtccagcttccctctcagtgtgctgtttgctggccattcaccatgaggggacaagtgtcacctgcctcctgagtggcatgtgccaccctgggcagtggcgctgagcacttatgaagcctgacactctaccactttgagcctgaggggaagctgtgaggactcagcatgtcagagagactgcaygtatgggagaatgcacgcacgggagccggagggacgcagaggaaccagtgtgaggcaccagggaagacacaccgcaggcttgcctcctcagtgctcccagaggttgaccatggactcctgtgaggactttttcttccctgttacctaagtacaggcagaggtggatccaggcctccacctaattcctgtggtatcaggctggggctgaagcatccactgtggccgggtgacca

SEQ ID NO: 496168 - DNA, 571 bp, Homo sapiens
ttacctggtaagcccacttagtaaacaagttccacatggccagaggtgactgttaaggagtccaagtggcagtaaacaggcattcgctgccaattctgtgtcttgggaattccccaggaacaactcttgtcttgattggtggtcagagcttgttgtccagcttccctctcagtgtgctgtttgctggccattcaccatgaggggacaagtgtcacctgcctcctgagtggcatgtgccaccctgggcagtggcgctgagcacttatgaagcctgacactctaccactttgagcctgaggggaagctgtgaggactcagcatgtcagagagactgcatgtatgggagaatgcacgcacgggagccggagggacgcagaggaaccagtgtgaggcaccagggaagacacaccgcaggcttgcctcctcagtgctcccagaggttgaccatggactcmtgtgaggactttttcttccctgttacctaagtacaggcagaggtggatccaggcctccacctaattcctgtggtatcaggctggggctgaagcatccactgtggccgggtgaccag

SEQ ID NO: 496169 - DNA, 524 bp, Homo sapiens
ccacaccagccacagggatcacgcccaacctgcctggagcaccggtgagacgtacggagccataaggagaggtgagcagtgtcgcaaagctgttcttggttgtcatttttgggtgggtgggtgggggtggcaccagtgctgacttaaaaatacatatataggccaggcgcagtgtctcatgcctgtaatcccaacattttggaaggctgaggcgggcggatcacgaggtcaggagatcgagaccatcctggctaacatggtgaaaccccatctctactaaaaatacaaaaaattagccgtgtgtggtggtgggcgcctgtactcaggaggctgaggcaggaaaatagcttgaacctgggaggcggaggttgcagtgagccaagatcgtgccactgcactccagcctgggcgacagagcaagagtgtgtctctgtgagagagagagaaaaaaaaatatatatatatatatatatatatayacacacacacacacacacacacacacacacacacacacacacaca

SEQ ID NO: 496170 - DNA, 555 bp, Homo sapiens
aaatccttatttgtggagtataaatttcactgtggccttatcagttaagccttttaaagtcttaccaattatatggtttatttcatctctctccttttatagtttattagtttaaatttttgagtattacattttcatggttcacaattcaaaagttatgaaagagtaattatacataaatacagtgaaaggtttcctccccatactgttaactagccaagaagatccactttctctttttattttttattagggcataattgacaaaaatttaatatatatacagtatacaacatgatgttttgatacatgtacacattgtggaatgattaagtcaagctaactaacatgtccatcaccttacatgcttagcattttttgtgtgtgatgagaacatttacaatctattctcttagcaattaaaaatatacamtataatattgttaattatggtcatcatgctggacaatacatctccagaactttttcctcctgtctaatggaaactctgtaccctttgaccaacatctctccattccctgatcttcccctccc

SEQ ID NO: 496171 - DNA, 546 bp, Homo sapiens
aaaaaatccattcagccatgctatgtcttttgattggagaatttaattcatttacatttgagataattattgataggaagaacttattgctgccactttattactttctgattgtcttgtaaatccttctttcattttgttctgctattattttcctgatttcattaactagtttatttgtattgtcttgtaatttgctgagcttctttagaayacttattttgaattctctgtcatgtaattcatggatctccaattctttagggtcagttactgaaagtttattgtgttccgttggtggtatcatgtttccctgattcttcatatagtcttataaatgagtctgcaaatttcaagaagtagtcacctcttccagactttatggactggctttggtaaggaaagaccttcacctgtgggcagcagggtggggggacagaggcatgctgggggcactgtagcatcaggtctggtgttgtgaggtaccaagtgttggggtatgtggtggctccgaatctgggggagcgttcagtcttgccatttcag

SEQ ID NO: 496172 - DNA, 603 bp, Homo sapiens
tgtccttaaaggtaaagttaatctcttgtatgcagcatatagttgggtaatttaaaaaaaatccattcagccatgctatgtcttttgattggagaatttaattcatttacatttgagataattattgataggaagaacttattgctgccactttattactttctgattgtcttgtaaatccttctttcattttgttctgctattattttcctgatttcattaactagtttatttgtattgtcttgtaatttgctgagcttctttagaatacttattttgaattctctgtcatgtaattcatggatctccaattctttagggtcagttactgaaagtttattgtgttccgttggtggtatcatstttccctgattcttcatatagtcttataaatgagtctgcaaatttcaagaagtagtcacctcttccagactttatggactggctttggtaaggaaagaccttcacctgtgggcagcagggtggggggacagaggcatgctgggggcactgtagcatcaggtctggtgttgtgaggtaccaagtgttggggtatgtggtggctccgaatctgggggagcgttcagtcttgccatttcaggc

SEQ ID NO: 496173 - DNA, 380 bp, Homo sapiens
ttggacttaatataataagaaataagactgtgaaggttgttgagaggcagaggatatgataaaagcagtgcttggggaagattaatctgtcaacagtttacaggatagatgctattttaaagaytgtatattgttatggtactttatgtttccttgggggtgttttgtatatatttttctctcctctgttagattataaactcctgtaaggcatagcctgtgctttcagcttacattttcaatttcccacagtgtttagccggtgctggtctgttactcttgatggttaggagtgcagaaaagccacctaatgatgggaaatattcaaatatttcaagctactaagtacaaagcaacagtgtctttcctaggctaaatta

SEQ ID NO: 496174 - DNA, 586 bp, Homo sapiens
ggtttcagttaacattgcaccatgcaaagtgaggaatagctggagtttagtttgagataagacagggtggaacatctgttgggcaatggtaatacactgaattactagtattaagctgcattttggagcattttgaaagctagtaacaagatgtcagtttcggcatgacgggattttaaggtacccccatgacatctttttgctgttaagtgatgtctccttgatgctgctgaaagtaggaatggtaggtggggcgatgtttactgtgttaaggcatttacccattaaatataagtcacatattaaaggccgcatagatgtatttttagttcattggataatttagcacaacttattaaaatagtagttaagagcctgggaacyagaaaaggctagcacagttcaaatcctatctcggctgaatcaccttagttgggcaagtcactatcagatttgttgaaaagcttaaacgagttgatatttgcacagaacttacagcactatgccattcatgcagtgagtgccaaataaatgtgagcttctgcttgctatctcagtggcaggttcttggaatacacagataata

SEQ ID NO: 496175 - DNA, 515 bp, Homo sapiens
ttggactagcctagcttggttgcaactcctggctccaccacttgtaaccacagcctggttaacccttttcagtctcagtttcttgtctgcaaaatggggataagattaataatagggtgacttggaggcttattgtgaggattccatgagattgtgaatgggatgtagcctgttggaactcattccccgatgctaacatcaccatcttcagtgtgcaagtgcggaaagtgaggcctgggaaggagacatccctaagagaaagcggcactgtcaggatgtgatggaccaaatatgacttcaaaaccattcttayggggaggtccccaaaacacagagataatgacatcgcatgaaggttcgaggcaaacgggaagaacatgtagtcactttatgtagtttctttatagactaaatccatcgaatcttttaaatagaatagtgacttttttcttttttgcgaagaaaataaacggtaatggggagagagctcaggtggaatgagcaggagacgagaa

SEQ ID NO: 496176 - DNA, 614 bp, Homo sapiens
ggtcctcttacaggcctggagatttggacaattgccaaggctttctgagcttcagttttcaccctgtaagaaaaggaacacagggccaggcgccgtggctcatgcctttaatcccagcactttgggagrccaaggcgggcggatcacaaggtcaggagatcgagaccatcctggttaacacggtgaaaccccatctctgctaaaaatacaaaaaattagccgggcatggtggcacgcacctgtagtcccagctactcaggaggctgaggtaggagaatctcttgaacccaggaggcggaggtttcaatgagccgaaactgcaccactgcactatagcctgggcaacaaagcaagactccatctcaaaaaaaaaaaaagaaaaaagaaaaggaacacagtagccagcagtgtgggagtgttgcaagagggacttgctataatctccatacacagtaccagctcatagacactctcaataaattgttatgggtgtgatttttatcaacagcaaagttcctccttcctcccatgagtaccctctcttctccctcctctcctttattctctagtcacccctttgactccccaaaatgttgaacaggctagtgtcatag

SEQ ID NO: 496177 - DNA, 566 bp, Homo sapiens
cttacaggcctggagatttggacaattgccaaggctttctgagcttcagttttcaccctgtaagaaaaggaacacagggccaggcgccgtggctcatgcctttaatcccagcactttgggagaccaaggcgggcggatcacaaggtcaggagatcgagaccatcctggttaacayggtgaaaccccatctctgctaaaaatacaaaaaattagccgggcatggtggcacgcacctgtagtcccagctactcaggaggctgaggtaggagaatctcttgaacccaggaggcggaggtttcaatgagccgaaactgcaccactgcactatagcctgggcaacaaagcaagactccatctcaaaaaaaaaaaaagaaaaaagaaaaggaacacagtagccagcagtgtgggagtgttgcaagagggacttgctataatctccatacacagtaccagctcatagacactctcaataaattgttatgggtgtgatttttatcaacagcaaagttcctccttcctcccatgagtaccctctcttctccctcctctcctttattctctagtca

SEQ ID NO: 496178 - DNA, 381 bp, Homo sapiens
tgctcctgatgccatcctggaggggcagcccagatatgcggtacaaaaacacaccagcagcagcccatttcataacatgacgtgtccaaataaatggagctgttgactcaarctaattggatgagaggtctttcctaaaaagcaatctgtgtgaggctaagaaaaacaggattctcggcggaattaggcccctaatccctggcttccccagcagagctgtggtctgaaggagccggggggcctcccagagatgccctgtcaagagctggagagaaggctgcattcctgtcctgccacctgcctccaggctggctcatcctgcctaggcaggaggatgggagactcaaggcctcagtgggaccaggatccctgagctgtgga

SEQ ID NO: 496179 - DNA, 381 bp, Homo sapiens
tgctcctgatgccatcctggaggggcagcccagatatgcggtacaaaaacacaccagcagcagcccatttcataacatgacgtgtccaaataaatggagctgttgactcaagctaattggatgagaggtctttcctaaaaagcaatctgtgtgaggctaagaaaaacaggattctcggyggaattaggcccctaatccctggcttccccagcagagctgtggtctgaaggagccggggggcctcccagagatgccctgtcaagagctggagagaaggctgcattcctgtcctgccacctgcctccaggctggctcatcctgcctaggcaggaggatgggagactcaaggcctcagtgggaccaggatccctgagctgtgga

SEQ ID NO: 496180 - DNA, 521 bp, Homo sapiens
tcagtgggtcactttcttgttatgaaatctgagagtgtacaggtctccgcctggctggccaacctgtggcctcccttccggcctcttctggagctgctctcaggctgagctcttgccggcctggacggcctgcagcgccttgctcctgatgccatcctggaggggcagcccagatatgcggtacaaaaacacaccagcagcagcccatttcataacatgacgtgtccaaataaatggagctgttgactcaagctaattggatgagaggtctttcctaaaaagcaatctgtgtgaggctaagaaaaacaggattctcggcggaattaggcccctaatccctggcttccccagcagagctgtggtctgaaggagccggggggcctcccagagatgccctgtcaagagctggagagaaggctgcattcctgtcctgccrcctgcctccaggctggctcatcctgcctaggcaggaggatgggagactcaaggcctcagtgggaccaggatccctgagctgtgga

SEQ ID NO: 496181 - DNA, 400 bp, Homo sapiens
ccgttagagcgtggaggagtggagggcgggttcacgttagagtgtggaggtgtggagggggggttcagcgttagagcgtggaggtgtggagggcgggttcaccttagagcgtggaggtgtggagggcgggttcaccttagagcgtggaggagtggagggcgggttcacattagagtgtgraggtgtggagggtgagttcacgttagagcgtagaggtgtggagggcgggttcacgttagagtgtggaggtgtggagggcaggttcaccttacaggaaggacgtggacaccagaggggctgtgggccttatcctggccaccccgcctgtgggacggggcccatgggctgctcctctcagagtgaagcctttgtgggatgagaaagtgccgtgctcatgagt

SEQ ID NO: 496182 - DNA, 570 bp, Homo sapiens
acagggattatgcttttccagatatcatttgaggatgtggctgtggatttcacgctggaggaatggcagctacttaatcctactcagaagaacttgtacagagatgtgatgttggagaactatagcaatctggttttcttgggtaagaacattcttatgtaacttagtgtatggccagtaactggcctgtgaggtgtttgyttattttggatgtaagttttacatgtcaaagattatttgacttttatactgaattgaaagattttcattcacttgctttattttgcagcctttataataaaacattctacatatttaagactcttagcccaggcagttaggtccaagtcctctgtgtttccaatcgacaggttttcaaattctcaaacctgatgcaatgttcaaactggaacaacaagatccatggataataggtcaagaaatcctaaatcagaacttttcaggtgaggaataatcaggtttatgagatacagtgaacattttatctcaggtttttgatgacaggtgggcacttttaaagtgttgtttataaaactgtgtttaaagttc

SEQ ID NO: 496183 - DNA, 590 bp, Homo sapiens
cctaaaatatttaccgtctgcttttttttttttttttgagatggaatttcgctctttttgcccaggctggagtgcagtggtgcagtctcagctcactgcaacctccgcctcctgggttcaagtgattctcatgcctcagcctcctgaatagctgagattacagatatgcaccaccacgcccagctaatgtttgtatttttagtagacatggggctttgctatgttggccaggttggtcttgaactgctgacctcaggtgatctgcckgcctcagcctcccaaagtgctgggattacaggcgtgagccacggtgcccagccaccatctgctctttacagaaaaagtttgctcacctctactctagactagagtataatctctattaggacaaagatgatctcttcctacacactactaaaatttaaagaatttccgtaaaaactagtgaaataaaataaatggtaatcgctctgctaagtactttatatgtattacccacatcaattttatgagaaaaatattattatctacaatctacacatgaggaaactgaggctcagagccatctggtgagttgccctaaggtcaca

SEQ ID NO: 496184 - DNA, 568 bp, Homo sapiens
ccggcattcacccatgcaaggttccagcttgcttatctatgtctgcagctcaattttacaggctgactttttcaaaaagaaatgacttggggactgcttttcattaaaaggaaaaccttactgaggactttcttaccctyactatctgcctaaatcatttctttttaactcctatatcaatagcctcccaagtagctgggactatacgtgtgcgccacgacactcagctaatatttgtattttttgtagagacagggcttcaccatgttgcacaggctggtcttggaactcctgagctcaaagtgatctgcctgccttggcctttgaaagtggtgggattacaggcatgagacaccatgcctggccttcaaaaagttaatctaaaaatatatatacatatatcccagaaggagaagcagaagggtcagataggtgagaaccagggctttgaatatcagaaaaaccaggaagagataatatgtcaagtatggagtgatcaatactctcaaatgccgtaagaggatttgtgagcaattgagaaagccatgggatttgttcattagaatgc

SEQ ID NO: 496185 - DNA, 568 bp, Homo sapiens
ccggcattcacccatgcaaggttccagcttgcttatctatgtctgcagctcaattttacaggctgactttttcaaaaagaaatgacttggggactgcttttcattaaaaggaaaaccttactgaggactttcttaccctcactatctgcctaaatcatttctttttaactcctatatcaatagcctcccaagtagctgggactatacgtgtgcgccacgacactcagctaatatttgtattttttgtagagacagggcttcaccatgttgcacaggctggtcttggaactcctgagctcaaagtgatctgcctgccttggcctttgaaagtggtgggattacaggcatgagacaccatgcctggccttcaaaaagttaatctaaaaatatatawacatatatcccagaaggagaagcagaagggtcagataggtgagaaccagggctttgaatatcagaaaaaccaggaagagataatatgtcaagtatggagtgatcaatactctcaaatgccgtaagaggatttgtgagcaattgagaaagccatgggatttgttcattagaatgc

SEQ ID NO: 496186 - DNA, 577 bp, Homo sapiens
cttaaatattgtctaatataatcctagttataaacacccttcttgctgatccaaatgctgtcactagaattatttttccggacttcattgggttcctttaagatggcaagatgaagtagatagtgttgttcatatttttttggaagaagaattamgtagcaggacattaaatggccttccttcaagcacttggaggcagtgttaggggatgctcccagtatcggaccctgagtttttagtggaggtctggagtggggaagggaaatgagaggctgctcaatgttttctccttgctctggtttttcttcttgggtttggagaaatacacttgtgagactggtcaccacttcacccgtacgagcagtgctgtattatagagattgacattaacagaaaaaatacctaacaggtctatagaggctacccagggccctcaggcccatcaggtcccatgatgtgcaccctccttgatggctgtcagcctttggaagagtacttggggccccttcccttttctatagccctgtgctttgggatggcagggagccagctcactttggatttggttattctgcta

SEQ ID NO: 496187 - DNA, 577 bp, Homo sapiens
cttaaatattgtctaatataatcctagttataaacacccttcttgctgatccaaatgctgtcactagaattatttttccggacttcattgggttcctttaagatggcaagatgaagtagatagtgttgttcatatttttttggaagaagaattaagtagcaggacattaaatggccttccttcaagcacttggaggcagtgttaggggatgctcccagtatcggaccctgagtttttagtggaggtctggagtggggaagggaaatgagaggctgctcaatgttttctccttgctctggtttttcttcttgggtttggagaaatacacttgtgagactggtcaccacttcacccgtacgagcagtgctgtattatagagattgacattaacagaaaaaatacctaacaggtctatagaggctacccagggccctcaggcccatcaggtcccatgatgtgcaccctccttgatggctgtcagcctttggaagagtacttggggccccttcccttttctatagccctgtgcttygggatggcagggagccagctcactttggatttggttattctgcta

SEQ ID NO: 496188 - DNA, 617 bp, Homo sapiens
gaatatttcaactgtcattaggtttgcagtaagacaccatacacaaatataactttttaagtttaaaatgaattaataccgagtgtatgtctgtgtctatatgtaaatatagacacatacatttggcttataatagaagctgatttgttacttgtttaaatttgtggaatgctataccctcatcacaagatagttactactattattaagtgctcattttgtttctaaaactcacacaatattgcaagatctttattattctataatttttacagataaaaaatcttagtctctrtctttaagtgacttttaggtcatatagtaaatggtaatctggaatggccttcatggtgcagctcttttgatcatacaacatgaatcccatataaccatggaaccattatttgtgtttctgtcatagcccacatcacacatctgccatgtacttaaattatttctaagcatgcttgtctttcccattgtattttagagtccacgcttccctacttaatagctttttaacattgcaaaatgtataacttccctatttcttgtttctcatgtatgcaaaatgagggggctgaactagaaagtcttcatggtcccttttaatccta

SEQ ID NO: 496189 - DNA, 653 bp, Homo sapiens
tgggaccaccagggggacccagataaatttttttactttttgtagagatggtatcttcctatgttgcccaggctggtatcaaacttctggcctcaagcgatcttcccatctaagcctcccaaagcactaggattacaggcatgagtcactgtggctggttgcattttaaggtcttaatcctcctggacaaccaaaagaagagagctctacccatttgtttgtcygtatctttgagtctagttcaatctcttttagaactgccagagccaaaagttgcttttgttgttgctttatcatctgggctgcctgtgtcatctttagcactgcaggaagatgcacaatgatatagtagtggtatgatggacaaggtcattgacttagagattgggtgttttagtgaaaagaacattatattggaagccaagaaatgtgggtcatagctttgcatctgtcactaattggcagttagacaattcagcctctcttatataacttatggatgaagcaaattgaactaggtggtctctaagttccttctaaatctaacaagtttgttactgtgcaagatgacttcctcagaaacagaagacatttaagcttgttttaatggatgaatagaacttaggtaagaaagaaagatgtcaggaggttta

SEQ ID NO: 496190 - DNA, 561 bp, Homo sapiens
gcttccctccctctcttcctgttaaccttgactcatccttcagatctaaacgctggcaacattaaggtaaagccccttatcataggcattcccagctctgtgtkcttgatgtcctagcacttaccaagactgtggctttatattgacatgtatgagtatttgtttaatgtttgcttctcgtgcaacagcaagcgtcactagggcagatgttgtgtttgttttattcacgcagtgcctagcctagcttctggcacatactaatcactcaacaaaccattgtgggatgcatgaatgatgactgccctataccccatggcgaatttttttctctactttggtgaagtctcatttggtcacccagagaagaaaccctctgtgccctcatcatggattttttcatgacctggacacagcaagaggggaaaagacgaggcaatcagttacgttcaggctacctggcttccaggaaagagaaaagcttaaacttcaatcttgatcattcttgtcctaaaccattatgtaaaccaaattcctgctaaacgggcttccaatccaaataag

SEQ ID NO: 496191 - DNA, 561 bp, Homo sapiens
gcttccctccctctcttcctgttaaccttgactcatccttcagatctaaacgctggcaacattaaggtaaagccccttatcataggcattcccagctctgtgtgcttgatgtcctagcacttaccaagactgtggctttatattgacatgtatgagtatttgtttaatgtttgcttctcgtgcaacagcaagcgtcactagggcagatgttgtgtttgttttattcacgcagtgcctagcctagcttctggcacatactaatcactcaacaaaccattgtgggatgcatgaatgatgactgccctataccccatggcgaatttttttctctactttggtgaagtctcatttggtcacccagagaagaaaccctctgtgccctcatcatgrattttttcatgacctggacacagcaagaggggaaaagacgaggcaatcagttacgttcaggctacctggcttccaggaaagagaaaagcttaaacttcaatcttgatcattcttgtcctaaaccattatgtaaaccaaattcctgctaaacgggcttccaatccaaataag

SEQ ID NO: 496192 - DNA, 561 bp, Homo sapiens
gcttccctccctctcttcctgttaaccttgactcatccttcagatctaaacgctggcaacattaaggtaaagccccttatcataggcattcccagctctgtgtgcttgatgtcctagcacttaccaagactgtggctttatattgacatgtatgagtatttgtttaatgtttgcttctcgtgcaacagcaagcgtcactagggcagatgttgtgtttgttttattcacgcagtgcctagcctagcttctggcacatactaatcactcaacaaaccattgtgggatgcatgaatgatgactgccctataccccatggcgaatttttttctctactttggtgaagtctcatttggtcacccagagaagaaaccctctgtgccctcatcatggatttyttcatgacctggacacagcaagaggggaaaagacgaggcaatcagttacgttcaggctacctggcttccaggaaagagaaaagcttaaacttcaatcttgatcattcttgtcctaaaccattatgtaaaccaaattcctgctaaacgggcttccaatccaaataag

SEQ ID NO: 496193 - DNA, 625 bp, Homo sapiens
ccagctggttacatagtcttaggaaagagtcataaagactttttgggccaggtgcagtggctcacacctgtgatcccagcactttgggaggccaggcttggtggcacatgcctgtagtcccagctactcgggaggctgaggtgggaggatcagttgagcccaggaggtcgaggctgcaacaagctgsgatcatgaacctacagtctgggcaaccaagccacaccatctcaaaaaaaaaaaaaaaaaaaaaaaagatattttcccctccactatgggatctgatcttccctccattttgtttgtcacgagatatattctttgaacctggtatattgggcagtgtagaactcactcacctggaaaatctaggtgaagtccctctaactggagtgggaaaaagacctattcagagagcacctcagttgctcttacctgaacaaatgagggttttcttttttttttaaacatggggtaacccaactatttctcccagagaagcaaatatggacctagtatgggagggtcagggagtgcatgtaaggattttagcaccaggtaggagaaaacaggctgtttcaagatcagcaactcagaataggagagggcaagaaaatggaggtgtatg

SEQ ID NO: 496194 - DNA, 555 bp, Homo sapiens
gtttgccacaacaagggaaaaactggagactatcaacttgaagtagagaaggtaacagtaggaactggttattgtcatagtgtttttaaatctgagaacttttaactttgccaactaagkatgattgatggggaaagagtaaaatatctgggaaactggtctctgagaaagaaatttgttcggtggaggttgtgggtgagatggatgcggcagagactgctactatcccctaggttccattctctccttctttagaaataggaccttcagtttttagttcagcatgtggtcctctggtacaaaggctacatttcccagtctcccttgcaactacatgtggtcatgtgactaagttttgtccaatgggatgtaagtggaactgccttgtaaaattgatggtaaaagtccttaaagggcatagctatgccccatcagccctttcctttttcatactacagtggaagtccaatgtgaggatagcagaactgttaagagaggagttttaatcccaaacaactttctatggcctcatcccctgacctactccaatcctgg

SEQ ID NO: 496195 - DNA, 578 bp, Homo sapiens
atagaccccctggatcttccatgaaccyctctgaaaaccttttactgatttgatagctgttcatctttctaaggacagtattaatagctttttcatcatcttttcaaatagatccatcacaactacccttatcttccctcaaatttaagaagctcatatacaattgaaaaactgagatttagccataacaaaatagaaaacataaacagataaattaataaagttcaacatagataatgtgtgattaggtgtctggaatgaggtagagtttgagattgtagggacccccgtgggtaggatgattttggagggtttcttttaggaagatgcatttgagatgggtcatgttgaaggatattgctgtacatgtgtcatggaactgggtgccagacttgtgcaccgtgactggactcttcctccctcccctctccctttatagtagcatttgacagcaaggaagaattaattaccacacatttccctctgcctagagctgattacctgcaaggctgctccatgaacattaggctgagaacagcaaggaaaatgccatttggaagcattccactcagaacgga

SEQ ID NO: 496196 - DNA, 578 bp, Homo sapiens
atagaccccctggatcttccatgaacctcyctgaaaaccttttactgatttgatagctgttcatctttctaaggacagtattaatagctttttcatcatcttttcaaatagatccatcacaactacccttatcttccctcaaatttaagaagctcatatacaattgaaaaactgagatttagccataacaaaatagaaaacataaacagataaattaataaagttcaacatagataatgtgtgattaggtgtctggaatgaggtagagtttgagattgtagggacccccgtgggtaggatgattttggagggtttcttttaggaagatgcatttgagatgggtcatgttgaaggatattgctgtacatgtgtcatggaactgggtgccagacttgtgcaccgtgactggactcttcctccctcccctctccctttatagtagcatttgacagcaaggaagaattaattaccacacatttccctctgcctagagctgattacctgcaaggctgctccatgaacattaggctgagaacagcaaggaaaatgccatttggaagcattccactcagaacgga

SEQ ID NO: 496197 - DNA, 412 bp, Homo sapiens
cgatccacgacattcagaggtgaaggaaggagatgcagaagatgccgtggattcagtgtttggaagactaaccataaccatatcaataggagggaatagtgagaaagcccaggagcctgccacatggacgaattcagtaggcaacaggactcgctgcattcattacacaaaaaggagcgaaggcttatccagatccagagatggttagaattggaaggaagtttaaatgtcatattagtccaacttccgtatcttacagataagaaaagtggtggccagaaggggaagtggctcttaaaaatcacaaagctaattaggggctctgcaatcctgctgaaggggtgtgtatgtgtggccttacccagagcatatggggacctgcrgtcacccccactccccttaacatccctct

SEQ ID NO: 496198 - DNA, 650 bp, Homo sapiens
tgtaatttttaatacctctttccaaaattttcatttcattatcttgttaactaatgatatccctttgagccactacatgaagttgtgataattttcatagttttcatgtactctgcagtatcagggaacataaagtaaaatgatagttctgaaaaactgagaaaagaagtcagtgaatagaaattaaactccacatcaaactaccaagaagtaccaataataggagatatacatatatacatatgcaggtatatacatacacatgcatatgttttatatatacatatgtagttatatatacacacacatgttttatatatacatatatacacacacccatgcatcacttaacaatgggaacacattttgagaaatgtgtcattagacaatttcatcactgtgcaaacatcatggaatgtactttcacaaacctagaggaaatagcctactatacacctaggtaatatggtatagcttactgcttctaggctacaaacctgtacagtatgttactgttatgaataccaaggcgagtgtaagtcaatgtatgtatttgtgtatctaaatatatctaaacatagaaaaagtacagtcaaaaatggcrtcataaacatgcaaccactgttcttggctgactgcaatgtcattat

SEQ ID NO: 496199 - DNA, 650 bp, Homo sapiens
tgtaatttttaatacctctttccaaaattttcatttcattatcttgttaactaatgatatccctttgagccactacatgaagttgtgataattttcatagttttcatgtactctgcagtatcagggaacataaagtaaaatgatagttctgaaaaactgagaaaagaagtcagtgaatagaaattaaactccacatcaaactaccaagaagtaccaataataggagatatacatatatacatatgcaggtatatacatacacatgcatatgttttatatatacatatgtagttatatatacacacacatgttttatatatacatatatacacacacccatgcatcacttaacaatgggaacacattttgagaaatgtgtcattagacaatttcatcactgtgcaaacatcatggaatgtactttcacaaacctagaggaaatagcctactatacacctaggtaatatggtatagcttactgcttctaggctacaaacctgtacagtatgttactgttatgaataccaaggcgagtgtaagtcaatgtatgtatttgtgtatctaaatatatctaaacatagaaaaagtacagtcaaaaatggcatcataawcatgcaaccactgttcttggctgactgcaatgtcattat

SEQ ID NO: 496200 - DNA, 660 bp, Homo sapiens
ttcctatattcactaggcaatcactatccgtcacttttttttttttaccaaacatatccaataaactgctaagccatagcagcaagaattatcctttcgcaacctcattcagatcatgttactcttttcctaaaaaccttcaatgacttcccatttcamtcatcagagatatatttttctttccaatggactataaaatgctgcatgatttgtcttccttctttccatttccttcctctttgacattattgtctaatacccctctaccaaagcaacaattgagctggaaagagagatttacaattaagtaattcagaacagtgatacctgcttaaacacttacaacaacaaacagagtattggatgaagggagaggttcctacacgtaggcaaaaacgtggcatgcataaccaagctaccatttcccattcctcagtatataacaaaagctcaggaagaaggagtggcctgcacttcaggagcagctggcctgtgccagagcaggcaactggattcatgttctccgaaactttgggattgtgcactttagtggatatggcagtgccctgaggaactggcatagatttttgccttggttttagtcctctaggacaccatagctttcccagatacattgatcaagaagatttaaaggaccag

SEQ ID NO: 496201 - DNA, 660 bp, Homo sapiens
ttcctatattcactaggcaatcactatccgtcacttttttttttttaccaaacatatccaataaactgctaagccatagcagcaagaattatcctttcgcaacctcattcagatcatgttactcttttcctaaaaaccttcaatgacttcccatttcactcatyagagatatatttttctttccaatggactataaaatgctgcatgatttgtcttccttctttccatttccttcctctttgacattattgtctaatacccctctaccaaagcaacaattgagctggaaagagagatttacaattaagtaattcagaacagtgatacctgcttaaacacttacaacaacaaacagagtattggatgaagggagaggttcctacacgtaggcaaaaacgtggcatgcataaccaagctaccatttcccattcctcagtatataacaaaagctcaggaagaaggagtggcctgcacttcaggagcagctggcctgtgccagagcaggcaactggattcatgttctccgaaactttgggattgtgcactttagtggatatggcagtgccctgaggaactggcatagatttttgccttggttttagtcctctaggacaccatagctttcccagatacattgatcaagaagatttaaaggaccag

SEQ ID NO: 496202 - DNA, 645 bp, Homo sapiens
tccagcctgggtgacagagtaaactctatctcaaaaaataaataaataagtaaataaaatccacaagccaggacctcaaatgttaactgttactcgggatccatagttgtcactctttgtttgatgaatgaatctggggcgggccaacaggaatccccagaaggaggttctacaaacatttctaaaatcacagtggctggagatcccaatattgaggtggaacagactcctttccccactgaccaactcacagagttccccggagagttatacgactctcctagtatcccctattgtgaccttatctataagaggccctccccataggcactcatttccctggtacatgctatggagattctaagttgtttactccattcatagwtcttcaaagatgctccaaacaggagtttaaatcctctgctataaagatggaaaatagcatcaaaaatgaatattaagtgctcctatataaatcctgaggcctgcctatgtaaagaacacacagcaccaacaggggccagtacctatttgcacacaagtccctcaccccctactcttgcttcagcctgagacactgataacacacatgaagaatgagacttaacaactgcctgtcagtcctgatttctttattagcaaaca

SEQ ID NO: 496203 - DNA, 543 bp, Homo sapiens
ttctctcgcctatgttaagtacctcagttcaggattctctggccacctacatgacaaactcaaaatttgctcttgaaatgtgatctgctttttcctttttaaagatgcagagggctggcacagtgcctcatgcctgtaatcccagcactctgggagaccgaggcaggyggattacccgagcccaaaagtttgagaccagcctgggcatcctggagagaccctgtctcttattttaaaaatgcaaaaaataagccaggcgtggtggtgcatgcctgtggtctcagctacttgggaggctgaggtgggaggatcacctgaggctgggaagtaaagggtactgtgagccatgattgcaccacctcactccagcctgggagactctgtctccaaaaaataaaaataaaaaataaaaagacacagaggtcaaataactttgtaatgcataagataaattaatatggctatttaaatctgcagtaaattcaacagccaaaagaaagttttcctctttttgcctgcaatgactcagtgaagaagtcacct

SEQ ID NO: 496204 - DNA, 385 bp, Homo sapiens
ggtggctgagttattaaaacaaaaactaggaggttaagttgtctagtgaaaatggtgaggccgaaacaatgttatgtgttcctcaacctacctctttatcctcgggcacacagaagccgaaaacatttagactcccttgcagtaaaaacagcaggcagaggccgggcactgtggcttgcgcctgtaatcccagcaccatgggaggctgaggcgggtggattacttgaggtcagaagtttgagaccagcctggctaacatggtgaaaccctgtctctactcaaaatacaaaaattagccrggcgtggtggcgcacgtctgtaatcccagctacatgggaggctgaggcagaagaatcacttgaacctgggaggtggaggttgcagt

SEQ ID NO: 496205 - DNA, 238 bp, Homo sapiens
aatgaccaggtcagagatccacccaggtcttctgccctttattccatagtgtgacatctataaaatgggaatcataatttgttcttcatagagttggaaggamcacgtgaaaatgatgtgaaaatacctataacaatgtcctacactaaaggggctctcagatattttattataattagtaaaaactagtaatagaaactaaactacctaatgctttttcagtgctcactaggcatcc

SEQ ID NO: 496206 - DNA, 617 bp, Homo sapiens
atgaccaggtcagagatccacccaggtcttctgccctttattccatagtgtgacatctataaaatgggaatcataatttgttcttcatagagttggaaggaccacgtgaaaatgatgtgaaaatacctataacaatgtcctacactaaaggggctctcagatattttattataattagtaaaaactagtaatagaaactaaactacctaatgctttttcagtgctcactaggcatccatcactcctctaagcatttttaatgcattcaccatttcattccctagcraccctgcgggatgggtacagttaagattaaacccatattacaaaagggagcctgaggcacagcatgggggtgtggcttccccaaggtcatatccccagcaagcatcagagcagtgttcaaacccagatactgtgtttctagaaccttcccatttatgctacactctgtctgaggtagtctatggggaaagggactcagtcattaaacaaatgccaggttttatgaacaagtatcttagtatgacatctagtcctccaaacctcacagctcttaaataaaaaaaaagacattaagtaaacgtttaaaatagaaaaataaaagcttttctccc

SEQ ID NO: 496207 - DNA, 543 bp, Homo sapiens
actggcacaagctttgcaagcttccccctggcgcgcagtaagacactatctatctaattaatcaatcaatctagcaggcagtaagagtctattttgtgacacagggtctgttgctctggagcgcagcggtgcaatcatggytcactgcagcctgtacctcctgggctcacctcagcctccagaatggctggaactacaggtgcataccaccacactcagctaagttttgtagagatgaggtttcaccatgttgccccggctggtcttgaactcctgggctcaagcagtcctcccacctcagcctcccaaagtgctgggattacaggcttgagccaccgcacccggccaaatcctatttaaaacagggaagcgcagacaaggctgtgcctgcaacacaaataggaattaataccaccagacaactgcttcacaggtctagctcagtggatctcaactgggagtgattttgctcccctgtcattcagcaatgtctgcagacctttcgggttgtcacaacttgggggatagggttaacaattactg

SEQ ID NO: 496208 - DNA, 543 bp, Homo sapiens
actggcacaagctttgcaagcttccccctggcgcgcagtaagacactatctatctaattaatcaatcaatctagcaggcagtaagagtctattttgtgacacagggtctgttgctctggagcgcagcggtgcaatcatggctcactgcagcctgkacctcctgggctcacctcagcctccagaatggctggaactacaggtgcataccaccacactcagctaagttttgtagagatgaggtttcaccatgttgccccggctggtcttgaactcctgggctcaagcagtcctcccacctcagcctcccaaagtgctgggattacaggcttgagccaccgcacccggccaaatcctatttaaaacagggaagcgcagacaaggctgtgcctgcaacacaaataggaattaataccaccagacaactgcttcacaggtctagctcagtggatctcaactgggagtgattttgctcccctgtcattcagcaatgtctgcagacctttcgggttgtcacaacttgggggatagggttaacaattactg

SEQ ID NO: 496209 - DNA, 543 bp, Homo sapiens
actggcacaagctttgcaagcttccccctggcgcgcagtaagacactatctatctaattaatcaatcaatctagcaggcagtaagagtctattttgtgacacagggtctgttgctctggagcgcagcggtgcaatcatggctcactgcagcctgtacctcctgggctcacctcagcctccagaatggctggaactacaggtgcataccaccacactcagctaagttttgtagagatgaggtttcaccatgttgccccggctggtcttgaactcctgggctcaagcagtcctcccacctcagcctcccaaagtgctgggattacaggcttgagccaccgcacccggccaaatcctatttaaaacagggaagcgcagacaaggctgtgcctgcaacacaaataggaattaataccrccagacaactgcttcacaggtctagctcagtggatctcaactgggagtgattttgctcccctgtcattcagcaatgtctgcagacctttcgggttgtcacaacttgggggatagggttaacaattactg

SEQ ID NO: 496210 - DNA, 513 bp, Homo sapiens
catatgttcagtggtccactggctcaagctcaacagacatggctaacctcccccaaacacctgttacttcacacatagtgacaacttgacaaayggcaccacagcctacccaaatgagtaatccagtaatcctacagaaattcagcttacttggcccccaaacccagttaaacacttagcatctacctctcggtatctcacacagtaacccctcctaactggaagcccctcctttctcatccaccaccctgtgaccaagtgacgcttccccaaaacgcatgcttaaagttatcccctacagctttcatgagtccgttcaagctcactgagttgcacagagccattccttcctccattgctctcgaccgccttgccagccagcagcatgcaacctttgttctggcatctagaatgtcctgcgttggatattaaataacaatgcatcacaatatttccgtctttccacatgatgatctgctgccaggacagctatcctccttcttggccaaattc

SEQ ID NO: 496211 - DNA, 513 bp, Homo sapiens
catatgttcagtggtccactggctcaagctcaacagacatggctaacctcccccaaacacctgttacttcacacatagtgacaacttgacaaatggcaccacagcctacccaaatgagtaatccagtaatcctacagaaattcagcttacttggcccccaaacccagttaaacacttagcatctacctctcggtatctcacacagtaacccctcctaactggaagcccctcctttctcatccaccaccctgtgaccaagtgacgcttccccaaaacgcatgcttaaagttatcccctacagctttcatgagtccgttcaagctcactgagttgcacagagccattccttcctccattgctctcgaccgccttgccagccagcagcatgcaacctttgttctggcatctagaatgtcctgcgttggatattaaataacaatgcatcacamtatttccgtctttccacatgatgatctgctgccaggacagctatcctccttcttggccaaattc

SEQ ID NO: 496212 - DNA, 654 bp, Homo sapiens
gctttaagattgcctgaggttctgaaacatacactttaaaaaattggtccagtttgttattctactgtggtggcaagtcaaagaggaaggcaggaggtggcttctccagaattcctccagttttcctagattcatagctacctatcagatggacacatcattctcctgctcctattttattcggcagcaaattgaagcccactctcaattgtgcacatgcaccatctcctatccaccctgactgagggtgcagaagataagaacaggactccagtgcctgctctctgagggggcragagatcctgggagacaaggccatccttctggagacctggagcaaaaagcaggtcactgattattgcaataggacaagggacttcccttgtgccaggatatggggcaaactaaaggattcttattcacatttttgcagtttctttcccagaagctgggcccagcaccaaacctcaactttgtgtatatttctggactcctccacttgcctcctttcccactgccaccaccgtggttttgatcaccaacatttcatgccagagttactgcaacagcttcctaagtggtctctccacgtccactttcccccctgtggtttgttttttactttattatttttaattgacacataataattgt

SEQ ID NO: 496213 - DNA, 608 bp, Homo sapiens
agcatcggaattggtgcaggaccatcctggacttggaacttgctgctgggagctttgtttctctaagggaagctgcccaggagagggctgcacaccgggagggtcttgtgttctggggacagccagcctctgcacctcaccagtaccttgttatgtctggtgcctagctggttttgcaccacatgtgcccggccttggaaaggggctgcgtatgcttggcactggctggacgagacccagggctaagggccacccagtgggaggtgtttgggctggcaaggggactggactgagattccctgcaggctcttagtcctctgaacgttttagaggagggaaggaaggtggaagatgagacaggagagaaaggcacagaatccagaaatgccggcagccagtggtcccagccaggcctgcctcctgtggacaggtaagccctagacccctttgctgcttccccgtggtgctgcttggcagccctgctyagccctttttctgctgagctctctcaaggactcaggagtgaaattctttttgcaccttccacctcctctctcagcagaccctgcgaggagaagacaagtgatggcaggtgaggggctcatgtg

SEQ ID NO: 496214 - DNA, 658 bp, Homo sapiens
tgcccagaggccctgctcttaatcatcctactttgctgcacatatatgactgggatgaaagaaaaaaattaattttaaaaatatgctgcggtgaatatccttgtatacatattttatgtgcttgtgtgaggatatcagactcctagaagtgaaataacctcaagttttacaacagacaaaacatggcattsaattcatcttttggatataaaaactattagaacactgatactgacattgtactcattttattatagaattgaagcacagaagcaaacgacctctctttgtattcatgattttcaacaggtctcctggttcttctagcccctctaacttcctctcatctctcctgtaacaacaatgatcagaatgatacctgaggaataaaccataagaaaaatgagcattgagagggtaaatcaagcttcctttagaaagagaggaaaataattttgcagttgcgaaacatgttgaaatattatttttacagtgaaaacagttacatcacaagtttaaattacatttccatttgaaatggagtcgatttgcaccacctactggaatatacagctccatatagtcagaggtttaaaattacaaaaccacttttaagaattcagagttacatttctagttatctttaagagaccagctc

SEQ ID NO: 496215 - DNA, 658 bp, Homo sapiens
tgcccagaggccctgctcttaatcatcctactttgctgcacatatatgactgggatgaaagaaaaaaattaattttaaaaatatgctgcggtgaatatccttgtatacatattttatgtgcttgtgtgaggatatcagactcctagaagtgaaataacctcaagttttacaacagacaaaacatggcattcaattcatcttttggatataaaaactattagaacactgatactgacrttgtactcattttattatagaattgaagcacagaagcaaacgacctctctttgtattcatgattttcaacaggtctcctggttcttctagcccctctaacttcctctcatctctcctgtaacaacaatgatcagaatgatacctgaggaataaaccataagaaaaatgagcattgagagggtaaatcaagcttcctttagaaagagaggaaaataattttgcagttgcgaaacatgttgaaatattatttttacagtgaaaacagttacatcacaagtttaaattacatttccatttgaaatggagtcgatttgcaccacctactggaatatacagctccatatagtcagaggtttaaaattacaaaaccacttttaagaattcagagttacatttctagttatctttaagagaccagctc

SEQ ID NO: 496216 - DNA, 630 bp, Homo sapiens
ttgtgacagattctgtcatagggaattcatgttatttagagaaatggcaacaaagaagaaataggtgggaggtttgaaagtggttgttgtagaaagtgggatttggggatggatggagccagatgggggactcatttttgtctgctttctcactaagacwtgcagagcaatttgattcttttttaaatttaattttatttatttatttacttattttctgagacagagtctcgctctgtggcccaggcaagagtgcagtggcgcaatcttggttcactgcaacctccgcctcacaggttcaagtgattctcgtgcatcagcctcctgagtagctcggatcacaggcgtgcgctaccataccagctaatttttctatttttgtagagacaggatttcaccatgttacccaggcttgtctcgaactcctgacctcaagtgatcccctggctcagcctccaaaagtgctgggattataggcataagccactgcgcatggcctgattctttaaactatatttacatataactttgatgaaaataaaaattaaaactaatgggtcttttttctagctaattcttaatttaaacccatttttagccagactcagagacacatgcctgtagtcgcag

SEQ ID NO: 496217 - DNA, 630 bp, Homo sapiens
ttgtgacagattctgtcatagggaattcatgttatttagagaaatggcaacaaagaagaaataggtgggaggtttgaaagtggttgttgtagaaagtgggatttggggatggatggagccagatgggggactcatttttgtctgctttctcactaagacttgcagagcaatttgattcttttttaaatttaattttatttatttatttacttattttctgagacagagtctcgctctgtggcccaggcaagagtgcagtggcgcaatcttggttcactgcaacctccgcctcacaggttcaagtgattctcgtgcatcagcctcctgagtagctcggatcacaggcgtgcgctaccataccrgctaatttttctatttttgtagagacaggatttcaccatgttacccaggcttgtctcgaactcctgacctcaagtgatcccctggctcagcctccaaaagtgctgggattataggcataagccactgcgcatggcctgattctttaaactatatttacatataactttgatgaaaataaaaattaaaactaatgggtcttttttctagctaattcttaatttaaacccatttttagccagactcagagacacatgcctgtagtcgcag

SEQ ID NO: 496218 - DNA, 356 bp, Homo sapiens
actgtatcgagacatgctggtctcgaattcctggcttcaggtgatccacctgactyggcctcccagagtgttgggattacaggtgtgagccaccgcgcctggcctgaaagttacttctaaaattgtgattagattcaggctaattttattttgcaagactacttcttaggtgatgctgattacttcatactgtagaatactagaaggtacataacacctgaaatgtctcagctttaatgatacaagaaataatctgtgggttcagcttgatcctttctttataaaggtcctggtcaacctttactaatgattttaccactcactgattgccattgtcatgatcatatctgtcatta

SEQ ID NO: 496219 - DNA, 621 bp, Homo sapiens
ctttacatgcaaagctccagtgaagtctagtgctgtataatgctttaaatccacaatcaagcccttgttgatgcaaatgttagtcgcccaaagcagaatgggttaacgaattactgcagtggttttaggtgcatgggtttgacccatgtaaatcattttaataagtaaaattgaatctttgatacatatttgttgaggagcttgtcagatcactacctttcactgaacagtaaaacatggatcatttatttcacctcattttgcacttcaatgcaatttcactctttargtggttgtacttggacagttaaatgaagactgtctttaagggtgcagggatggagaacacagcatatatgagaggtgggagggcagagacgccttgcgattcctgtgaggagggacttaccgtctcctccaaaacagaaattcagtgctgcagagacggtagcaaagtgcagttctcttgttaaaacacaggctaaaagcagtgactgcttaacttattaagcagagaaaaccaaaatgtcattttcaaccaaaattgagtgttagagtttatggtctctgttatgatacttttcaagacctgggaaatatttgtatcctttagtgaaaagg

SEQ ID NO: 496220 - DNA, 617 bp, Homo sapiens
ctctgtagtagctgggattacgggcacacgccaccatgcccggctattttttgtttgtttgtttttgtatttttagtagagacatggtttcaccatgttggccaggatggtcttggtctcttgacctcatgattcgctttcctcggcctcccaaagtgctgggattataggcgtgagccaccgcacctggctgggatacaagcttttaataaaggccccagaaaatctctctgcagaaaaagttttagtgttgtgctgcataatctttttattatttctccttttctcctttcatgccatctccctgaatgacttcagtccctccacagctttgctcatcatctgtactttgatgwctcccatcattgtatctgcagctcagatttcccttcttctgtagcctccaacctaaatgtgtatccacctactggatacctctacttgaatgccttccagaggagccagagtcaaactgttccaaaaggaatttactgtcttccctcttcacctgcttcccctctgtgttttctgtatggggattcatgtcatcctttactaaacaaacgaaaacttgaactgtatcatttcttcctccctgtgatccctcatagccacgc

SEQ ID NO: 496221 - DNA, 662 bp, Homo sapiens
actttatgctcacaaatacacaatttaaaagtttatgttatactatggaatactgaaactccttgtcacttattttattaacttaataatgtaataaaaaccacatatcatttaactgcttataatgagcatatttgaagctgcaaagtgatattgcaaatggagaaaaataagcagctaaaaattccagtgcatatactgtcacgtgccaaataacaatgtttctgtcagctatggaccacatacacaatcatgttcccatatgtttataatggggctgaaaaattcccattccttagtgactgatagccattgtaatgtcatagcacaatgcataactgaaatgctcgtggagatgttcgtgcaggcaaacctactgtgctgccagtcatataaaaagcatagtacatacaattacctacggtatataaaactcgatagtgataataaagtactattttattggtttatgtatttactatattatgccttttattgttattttagaggrtactagttttacttataaaaataagttaaccgtaaaacagcctcaggcagtttcatcagaaggtattccagaagaaggcattgtattcataggcgaggactgttccatgcttgttattgtccctaaagatcttccagtgagaaatgtggca

SEQ ID NO: 496222 - DNA, 521 bp, Homo sapiens
actttctatcgtttaaatcatgtggttataaagtcactcctatcttgcagagggggaaattgaggcacacaatgataagtcrctagctcaagtttagcatcttcaacacacggcggtgtcagaactcaaactgacctcttctggcttcggagcctacacctgtattagtctgttttcatgctgctgataaagacatacccgagactgggaagaaaaagaggtttaactggacttacagttccacatggctggggaggcctcagaatcatggcaaagggtgaaagggacttcttacatggcggtgacaagagagaatgaagaaaaagcaaaagtgacctgttgcccaggctgaagtgcactggcgcgatctcggctcactgcaacctccgccacctggggttcaagcaattctcctgcctcagcctcccaagtagctgggattacaggcactcaccaccacactgggctaatttttctatttttagtagagatgaggtattgtcaccttggccaggctggtc

SEQ ID NO: 496223 - DNA, 521 bp, Homo sapiens
actttctatcgtttaaatcatgtggttataaagtcactcctatcttgcagagggggaaattgaggcacacaatgataagtcactagctcaagtttagcatcttcaacacacggcggtgtcagaactcaaactgacctcttctggcttcggagcctacacctgtattagtctgttttcatgctgctgataaagacatacccgagactgggaagaaaaagaggtttaactggacttacagttccacatggctggggaggcctcagaatcatggcaaagggtgaaagggacttcttacatggcggtgacaagagagaatgaagaaaaagcaaaagtgacctgttgcccaggctgaagtgcactggcgcgatctcggctcactgcaacctccgccrcctggggttcaagcaattctcctgcctcagcctcccaagtagctgggattacaggcactcaccaccacactgggctaatttttctatttttagtagagatgaggtattgtcaccttggccaggctggtc

SEQ ID NO: 496224 - DNA, 521 bp, Homo sapiens
actttctatcgtttaaatcatgtggttataaagtcactcctatcttgcagagggggaaattgaggcacacaatgataagtcactagctcaagtttagcatcttcaacacacggcggtgtcagaactcaaactgacctcttctggcttcggagcctacacctgtattagtctgttttcatgctgctgataaagacatacccgagactgggaagaaaaagaggtttaactggacttacagttccacatggctggggaggcctcagaatcatggcaaagggtgaaagggacttcttacatggcggtgacaagagagaatgaagaaaaagcaaaagtgacctgttgcccaggctgaagtgcactggcgcgatctcggctcactgcaacctccgccacctggggttcaagcaattctcctgcctyagcctcccaagtagctgggattacaggcactcaccaccacactgggctaatttttctatttttagtagagatgaggtattgtcaccttggccaggctggtc

SEQ ID NO: 496225 - DNA, 521 bp, Homo sapiens
actttctatcgtttaaatcatgtggttataaagtcactcctatcttgcagagggggaaattgaggcacacaatgataagtcactagctcaagtttagcatcttcaacacacggcggtgtcagaactcaaactgacctcttctggcttcggagcctacacctgtattagtctgttttcatgctgctgataaagacatacccgagactgggaagaaaaagaggtttaactggacttacagttccacatggctggggaggcctcagaatcatggcaaagggtgaaagggacttcttacatggcggtgacaagagagaatgaagaaaaagcaaaagtgacctgttgcccaggctgaagtgcactggcgcgatctcggctcactgcaacctccgccacctggggttcaagcaattctcctgcctcagcctcccaagtagctgggattacaggcacycaccaccacactgggctaatttttctatttttagtagagatgaggtattgtcaccttggccaggctggtc

SEQ ID NO: 496226 - DNA, 545 bp, Homo sapiens
ataatagtataatataattaatgctcaagttgtgctatctttggccacttggagtctcttcaagttggtttctgagtcttttgacatgtccctggttgtgtgtgtgtgtgtgtgtttatgtgtgtgtgtttgaagagacagggtctcactcttttaccctggctggagtgcagtggtgtgatcatgcacctgggcctcaaacttaagcaatcctcctgcctcagcctcctgagtagctgggactacaggtgtgagcyactgagaccaccctagtagtctttgattgctttcttattgtctggtatgacaagatgctctaggctcatcttgtacatttcttgccccaaatgtggaatgagccatttctccaggcagccctgcctatgttttgtaggaaatgacatctggagaccataatctggatttctggggttagaggacaggctttttgttttggtttcggctttttaaagcagggctctgcatgtttaaagattgtttagaactaaaggagttaatgttaccattatcaattaagaaaacca

SEQ ID NO: 496227 - DNA, 545 bp, Homo sapiens
ataatagtataatataattaatgctcaagttgtgctatctttggccacttggagtctcttcaagttggtttctgagtcttttgacatgtccctggttgtgtgtgtgtgtgtgtgtttatgtgtgtgtgtttgaagagacagggtctcactcttttaccctggctggagtgcagtggtgtgatcatgcacctgggcctcaaacttaagcaatcctcctgcctcagcctcctgagtagctgggactacaggtgtgagctactgagaccaccctagtagtcttygattgctttcttattgtctggtatgacaagatgctctaggctcatcttgtacatttcttgccccaaatgtggaatgagccatttctccaggcagccctgcctatgttttgtaggaaatgacatctggagaccataatctggatttctggggttagaggacaggctttttgttttggtttcggctttttaaagcagggctctgcatgtttaaagattgtttagaactaaaggagttaatgttaccattatcaattaagaaaacca

SEQ ID NO: 496228 - DNA, 545 bp, Homo sapiens
ataatagtataatataattaatgctcaagttgtgctatctttggccacttggagtctcttcaagttggtttctgagtcttttgacatgtccctggttgtgtgtgtgtgtgtgtgtttatgtgtgtgtgtttgaagagacagggtctcactcttttaccctggctggagtgcagtggtgtgatcatgcacctgggcctcaaacttaagcaatcctcctgcctcagcctcctgagtagctgggactacaggtgtgagctactgagaccaccctagtagtctttgattgctttcttattgtctggtatgacargatgctctaggctcatcttgtacatttcttgccccaaatgtggaatgagccatttctccaggcagccctgcctatgttttgtaggaaatgacatctggagaccataatctggatttctggggttagaggacaggctttttgttttggtttcggctttttaaagcagggctctgcatgtttaaagattgtttagaactaaaggagttaatgttaccattatcaattaagaaaacca

SEQ ID NO: 496229 - DNA, 497 bp, Homo sapiens
aactggaatgacaggagctttcttgtgtgtgactgtcacttaacatatacaatcacacacttgcagggtagggtaacaccttgaacgtcatctggcccagccatcatttgatgccctcatttcctcaacagtgtgcccaccagttccatccagtgagggttgagtgactgcattgatgctgtactcctctctgcatctcttagacctccctactcttgtgtttgtatcataggtttctccgcagacatgtggcagttgccgcccatcaggccttgtgccgagtgctttacatagattaactcaatcacacaagagtccttcacgtactaggtcctattaattcctgtgttgcaaaaraggaaactgaggcaccaagagggtaacttcccgaggtcaccctgctagtcgagtggcaggagggggactacaacctgatcagcctggctgcaggctgttctgacccactcacctcctcctaactgttgtccagttgggac

SEQ ID NO: 496230 - DNA, 612 bp, Homo sapiens
tttgtatgatttctgaggtgacactattaacaccagaaagtaacagacctaaacatcctgagagagaaaaattatagcacaaacaattttagggtatcagattaagtgactaattgactgttatgctgggcgcaatggctcacgcctgtaatcccagcactttggaagactgaggagggcggatcacttgaggtcaggagttcgaaaccagcctggccaacatggtgaaatcctctctctactaaaaatacaaaacagccacgtgtggtgccaggagcctgtaatcccagctacttgggaggctgaaacagaagaatcacttggacctgggaggcagaggttgcagtgagccgagatcgtgccactgcaatgcagcctgcgctacagagtgagatttagtctcaaaaarggaaaaaaataaaaaataaaaaaaaaattgactgttaggctaggcacggcggctcacacctgtaatcccagcactttgggaggccaagggaggtggatcatttgagctcaggagtttgagaccagcctgaacaacatggtgaaacccatatctacaaaaaatacaaataattagctggttgtggtggctcgcacctgtagtcc

SEQ ID NO: 496231 - DNA, 524 bp, Homo sapiens
tgtaaaagcattcctatttctccacagcctygccaatatctattgtttcctgactttttaataatcgccattctgagtgtcatgagatggtatctcattgtggttttcatttgcatttctctgatgagcagtgatgttgagctttttttcatatgttttttggccgcataaatgtctccttttgagaagtgtctgttcatatcagaaaggattcttattggggctactcgtgcatattaaatcatggaaaaagaatctcttgatgtttgcttactgatctcacgtactcacaaatgcatttgaaatgcaatatttggtgattcccacactttcattttagagatgaagctctgtccacctgggcaccagtagcagagtacttctgatccacagtgatcattacatcataaatctgccattgatcaaaagccagatgcaaatcttataattattctgaactgattttattagcttttattccatttgatctcaggatattattaaattcatgtgcttccaagaat

SEQ ID NO: 496232 - DNA, 609 bp, Homo sapiens
agtgagagaatgagatgagagaaaaggatgtattcatatgtatcaccgtattatctcataattaaagctgcatggatgggccaccaagaccacagaaaatttgcttaaactcatggtcttgaaacatgagttggattcacgtctttgttttcctgttgtaaatgatattgttttatttgtctgcttgtagaaccagttaaattaagcttgacattctatgaaagaaatctggctcaggaatgttttttaaatattgacaataagtctttatagccatatttgcaaaaaaaaaaaaaacatttaaatgctagaaagaggaggtgactggctcagtgatgttgataactttaaatttagcatrtatgttttcacatataattttggagcaatcaggttgttagtgtgccaagattgttatcaaagctgtttaataatatcatgaccttgactttacaaaattctggaggaatatacatttgcactttccaggagataattgctaaggtgcacatggccaaggattctatggtattggtttctaacaaagttgttttgtacacattttataacagaaagtctttaatctccatttcaaatatcaattcataa

SEQ ID NO: 496233 - DNA, 558 bp, Homo sapiens
tgcaaagtgcctgagtttactgttcaattccaatattatctatctacttttattttcttccctctgctttatttggatacctatatattttaaagtaaagagctgagcatagcattatgctccttaggtgagggattattttcctttttccacaatatgctaatagattgatgttcttaccgggttttgttgttgttgttgttttaacaggggctattttgttgtttttgcaatcatgaaagaatgtcttaaaatttgttactcaatatttttttttctctggaaaattcaagttactttaaaacggactcaggcattttccatcaatatctagtcttcttattataaaaagcatcaaactattatctcacaaagcaatgatataacagttgctgtgccaaattackatttgggtaaaggctcaaaatacacttcaggggaaagtgactgcatttaacagtccgagtcctatctttcttgaccttttcctccatctgtagcatcccatcctaccctctggtaaacttcaccccaactgctattatacttttccctcca

SEQ ID NO: 496234 - DNA, 614 bp, Homo sapiens
ctggggagatacactccaaggatgtaagatttctgatcacaaggaactttccacaggctcrgtgaagaatgaggctatagaagaatgtacactgctaagtgtaggtagggaggttatccccagagctggagcttccaactttataaaaaatccccacagtccaagaatggcccaaagctgccaaactgatgaacatgaggaaaaatatggaagacttccagggaaggcactgctttagattatgaaattcaaagtaaagataaccaaaaaatggttatacttaaattaacatgtaatagttaaatttctaagaaaacttaatgccacatgttatagactgaatatttgtgtcctcccaaaatccatatgctgaaacctcctccccagtgtgatggtatgtcaggatggggtctgtgggaaatgagcaggttcagagaacggagctcacataaatagaattagtgtctgtataaaagtggccccccaaatctcctttgtcccctccatcatgtgaagacacaatgagaatagggccttctatgtaccaaaaagtaagccctcaccagacactgaacataccagggccttgatcttggacttctcagcctccagag

SEQ ID NO: 496235 - DNA, 678 bp, Homo sapiens
ccctctccttgtattctcacgtggtggagaggcagaactttggtaacttcatcttataagaccagtaatcccatcatggggactccatcctcatgacttgatataaaccaaagtaacctcccaaagtccccacctccaaacaccgtcacagtagggattaaagcttcaaaataggaatttggggaggacataaacattcagtccataccagtatacaaatgaatttattggtaggaatttcaggaaaaaaaaagaatataatttttttctgggttaaaatacagtattaaattgttaaacagttctcaaaaactcagaaacaaaagcaggaacaggagcaagaggaggagaaggagacagagaaggagaattagaagaagaagaaaagttcttccatcagtttatccatatccgtatcttctttgcaaatccagactaacataatttctctctcttgtttaaaaataggcatcatagcttcataaccaatttttaaatgaacttatttttgygttatttctttacctctaccagttgtttctacattgagttaaccagacatggtgagatcacgaagcttaaagacttgtgttttagaacaaagttcccaggggtaatgtaatatgctgatttgaaaacagaaaggacttattctggaaacctgataatatttcccag

SEQ ID NO: 496236 - DNA, 567 bp, Homo sapiens
atgagtattattcccatatgtcagataatgcattggaacacaaaaagagtgaattattcattctgggacttatatagtatgaatttgagcccagcagggctgactcatgatccagtctttgagcagccctttacacccagcacgactctgtgtcgattatacatgttagagcgggtaaaggagaggagggattctcaagattaaatccaagttggcggcaaaattgtgggttgaaaaaaaaaaaaactaacctaaaccaacttcagatagagaragagaagcaggtcaaatagggaacaaaatagagaagagtgaaagccatttagtaacaaattcaggagttcctttttgcctatcagaggccacctttgctctggaatcccgagaatgcacagggacaggaggcctccaggtggaaagaagactcaccctcctctgggattacagaggagcatcaggagtgagtgcatccatcatgagctctcttagagagacaagctgccacagccttgcttggcccaaaaaggaaatgggaggaaaaggagaacctctgttatccacaggcag

SEQ ID NO: 496237 - DNA, 524 bp, Homo sapiens
atgagaggggtcaaacttgtattctaaacaaaagaaatatgttctctttttaaaattacattttattttctatgcattttkgatgaatgcaaacatttctgcatagaagtgacagtagagaaagacatgccgaacattaaagtagtctgaaagagctgaaatgagacaggaatcaatcacctgtagacagagactgtcccaggaattaggaggatataagaaggagagagggatagtctcatttgctatgatgatttgctttccattcttctctatcctgtttgacaccccaagagagtggcttctatgcaccacatcagtgggattctttttaattccagtttctggtggaattgagacactgggagacacctggatgagactggaagacagcaggagagccacttgggatttccacctcctggctctctgcctgtgtattagttcattcttgaattgctacaaagaaatacctgagactgggaaatttatgaagaaaacaggtttaattggcttatggctct

SEQ ID NO: 496238 - DNA, 515 bp, Homo sapiens
acaatatgattccaacaaatgagagaatgaatgtgcaccaggtgactgctcatgcaagacaacaatctcagcaacagttctataattgatgacattacaagactaataggctaaatcttacaatagcgctcagtctatagtctaacatcacaccaatgcacaattcctgaaagcattttctagagaccctgcagatgcttaggtcacaggcattgcagaactacctactaccactaccttgcattcctgcagaagaagcccttgcctccaggcaaacccaattcagcatctacaaatcccaggatatggagggaagaagaatgtgcaagcgctagaatgggaagaacacytgacctggtttcagggatttgggattctcaagctgactgcatggccaacgtggatcacatgctcattccaggcaaactaagcagaagtgaggttatgggattgccccagtcatttgtgcatttgtgctcaggtatctcttttcagaacatgtgggtaaagtgtga

SEQ ID NO: 496239 - DNA, 526 bp, Homo sapiens
tgcccccgccatctgggaggacatcgcaaacctctacatcgggcttgaaaggttaccctggacamtggaccctacggcagatggatctcccagtccaaaatggtttacttggtttagctcacaagcgcatgttctgatcattctccatcccaccccatgcccactgtccccaaggccttcctccggccttcccctctgccagattcacaacgtccatttttctttttcggctcttttatgctttaaacatcattgtgatcaaactgggggaaacgttgtcttttctaggggtaggaaggagactctgcttcaggtgatcgaggtggatttgcctttccttcatcgaaagcatcatgactctgaccaagcgcacccaaccagtgcctccgacagccagcgccacgagggtcataacgcccggggcatttgttaccccctcctcaccaccatccccattaaaggcttcgggggcggccgccaggtgtttcagtacagtgggggtggggtgagaaaaaaggtcggtact

SEQ ID NO: 496240 - DNA, 591 bp, Homo sapiens
aactgctctaaagaaaaaagtctattagaaaacatttcttaggccaggtgcaggggctcataactgtaatccttagcactttgggaggccaaactgggaggttctcttgaggccaggagtttccaaccagcctgggcaatatagtgagaccttgtctctactamaacaaaattagctggtgtggtgatgcacacctgcagtcccagctacttaggagtctgaggtgggaggatcacttaagcccaggagtttgaggctgcagtgagcttataatggagccactgctctcctgtctgggcgacagagtgagagcctgtctcttaaaaaaaaaaaaaaaaaaaattttgacagagttgaggaggaagtcacatagactcatagttgttatttaatataaaagtaattgtggtttttgccattaaaagtaacaacaaaaaccgcaattacttttgcacgaacctaatagtattatcaactataataatgaactataattatcattaataatagctattatttatctattgaatgcttactatttaacagacactgtgctaattacatagatataaaacttcatttaatttttac

SEQ ID NO: 496241 - DNA, 600 bp, Homo sapiens
tgcttataaataaatgacccccttttgggattttacctagtacaattctaagagactctcagcttagctgagtttctgtaatcaatagmaacttcctagcctgtgctttgcctcaatgtaaaaagcaatttgaatctctccaggaatttaaaaacatgaactattgaaattcaggatcatacgcttggagttggccttgatgacattttaaacactcttccaggtacatcattccatgatgttcgaatgtagaaaaaaaaatctgaagacctgttagtctgttggtgtccccagatccagtcaatgtaagttttctataatgtatttttacaataaaatgcaagaaaaatgcaacccaaataaaaatacaatggaattaacttactagaattctcattattttccacaaaataattttatttttcatggataattcaaacaggagactttctttctttactaatttttaacaagtactttatctgacattcccacaaatttgaatcacagagatgaatcagcttatcattttcatttctgggcatataaatccattatttgtctacattgtataccactcacactgattacattttctct

SEQ ID NO: 496242 - DNA, 597 bp, Homo sapiens
tttatgaaaaggcatcattaaagattccagaaaatgaggggaataaaatatacttaaactcactattctgacctcaagacctttacccttttcattagtcatacctgttgttaaaatatgagtaggttctgtgtttatcttctctaatcacacaaattgttaccccagattatttggctccagagctgcttcatggcatttttcacctctgtgtttctgagggtgtagattaaagggtttaacatgggtgttaccacagtataaaacacagacacagctttatcaatagggarggtgatcatgggtcgaaggtacaccaatatacagggaacaaagaataggacgactacagtgatatggaaggcgcaggtagagagagccttccgctgtgagcagaggattaggacgtaagaggtaataagaatagaaaaaatgagcatacacatcagcccactgttggcggcaacaaagagtccaaagacgtgagtgtcagtgcaggagagttttagcagagggaaaaggtcacagatgaaatggtcaatgacattggggccacagaagggcagccagactattaaaagcatttgaatcagagcg

SEQ ID NO: 496243 - DNA, 269 bp, Homo sapiens
tttttattagcctgacctcaaaaatattcttagaagacatgggacacccagaagagagagattccatttcctagagggtagttgtttcaaaacttcacttagacatcaatatgatggattaatgcattcattaaaggtaatagttttggagactaataagactttaaaatgtatgtatgaaataacatgaactaaaaaccataaaatagtctgtatatcttaattataaatatgcaaatattctayaggttaaaagttagcgataatag

SEQ ID NO: 496244 - DNA, 643 bp, Homo sapiens
tgctgcacagaatgagatgggggatctrggggactgtaaatctggtgtgggtttctttttcctcaacaaaacccggacatctaaacttaaagacaaagcaaacaacatcccccaaaaacgtaaaaatcaaactgccaacaggccacacaaaagactgtggagggtgtgcagagcccacaagccttgggtttgtcacctgtgctttcaatcaaaaattcctataaatcctcgctctccagtggaacccgcagatccagacccttggaagccggagcccagtggattcgccgtctgtgaggatggtgagaagctggagcctgggtggagcgtctctgggagctaacaaagaaagatttctgaggccagatctcaaaatgttaatcagattcagagacataaaacatgacaatttaatggtgtttggtggaaactgaaaattctttaaagttctaactatccaaaattgaattctaatacttttttaattattagatataaaatgcttataattttagggggaaattagacttggtaatttatatttcttgtttatacagtgcaatttgctgatgaaaaaatgtgctaaacttattgattcatgaccataattgtttaattatttatcattgcagaatggtattag

SEQ ID NO: 496245 - DNA, 582 bp, Homo sapiens
ggggatctaggggactgtaaatctggtgtgggtttctttttcctcaacaaaacccggacatctaaacttaaagacaaagcaaacaacatcccccaaaaacgtaaaaatcaaactgccaacaggccacacaaaagactgtggagggtgtgcagagcccacaagccttgggtttgtcacctgtgctttcaatcaaaaattcctataaatcctcgctctccagtggaacccgcagatccagacccttggaagccggagcccagtggattcgccgtctgtgaggatggtgagaagctggagcctgggtggagcgtctctgggagctaacaaagaaagatttctgaggccagatctcaaaatgttaatcagattcagagacataaaacatgacaatttaatggtgtttggtggaaactgaaaattctttaaagttctaactatccaaaattgaattctaayacttttttaattattagatataaaatgcttataattttagggggaaattagacttggtaatttatatttcttgtttatacagtgcaatttgctgatgaaaaaatgtgctaaacttattgattcatg

SEQ ID NO: 496246 - DNA, 332 bp, Homo sapiens
tgtcttccccccgtcaccttgatcatgagccatgcaggggatgggaaaggatgggagtggatggcgtgtccacaggccaggcgtccacgtgaccaggagagactggaggaggaaggagaccacagcacttggttttcccagcctccaagccttagtcctcaggctctgcttgaaatgtgggtttgtgggtctggctcatgtcatgattttgagaagctggtctgcagtggtctattcctagggaaccccttccctagagctcatctagagtcagcatcccttgttcccactgtgctgaggagaggcagggractgcctggggtgggaatggt

SEQ ID NO: 496247 - DNA, 613 bp, Homo sapiens
ggtgagccattcacattgacagaatgctcatgacaaatgaacaaccacagaggcaaagccaggctaaaaatcgtcacaaaacagaacagatgttcccaccctctgaagacagagttgtagtttcataggcctcaagatggaaagattcatccggggagcataaactaaggggacactgagcagtgccgcttctggggctttgagaaactgagtactacttgttcccttctatggcagamtgctaaggagaggagccgtcattgcaatgtgaatagaggcaactgggaattgcattaaagggacttcaaggatctcccagcttcattctgcggacagccaatgtagaaccctgcctcagtcccaatctatgtaacattcatctctaaccctttcttggcctcgtggtagctttcctccaatactccaattggggcctttgccatgatgacatcaggatattttttaagttccccttggattgcatcgaggcttctctatgttgcttgagaggggctgcccatcttgcaaactttaaagcacagtgaaaacaaccttccacaagctcccggaaactccctgatgcctttctctgaggtaaaggtctttagatggt

SEQ ID NO: 496248 - DNA, 485 bp, Homo sapiens
cctccctccctctctgtcatttttagggactgggcttgccacactaatgatgtctgggggctgctggttcatgtccccagtttagtgaggaaaacagaccctgacccaggcctgggggtccaagcgaggggccagcaagggcagggtagagcgtggtgtccccacagacccggggtccctccggagttcagcaggctgtggagtcgctggccagccagccatgaatccctgcacagtgcctgtgcaagtcacccacttgcctgycctgtcacgatgctccatgaggccgggtccgctttttctgggagttatcactgtccagcttggtggtttactcgtcctaggtctgtctcctccaaccagaccttaagctgctgggagcagcaggagcagggatgtcctcctggaaggacatgggcacaacggacaatctcatcaggagagaggggacttgcagtggcacctgcatggaaatcaaaagagca

SEQ ID NO: 496249 - DNA, 535 bp, Homo sapiens
gcatccctgaattattttattagcttgagttacatactgacattttacaatctacttaatgtgctatggattttatttctggcatttcttttcctgcccccsaaaggtgtatgacatctgagcaaatctgagaccaagcatgcccatctggtgacaatgacaattgcctttctaatgggtagcctcctctcaggcactgagatgcagtagcatgtaggatggaaagagtccacatctgtggacaggtcaccctgttctctaacctcagctttccaccctgcctcccaccacagcgagtctagctcagacagcattatctcagggcatcattgttttgcagacaagaaaccgacactggtcactggtgatgtttattcattcactgttttgattgatgaagtagtcaaacttcctcttcccacactagctatctaaaatgtggccacacaagggtcagagaggactgtgtgtatgaagtgcacatggccatccccagcctgcaggcctgcgtgggtggggtgggatctgaccctgt

SEQ ID NO: 496250 - DNA, 535 bp, Homo sapiens
gcatccctgaattattttattagcttgagttacatactgacattttacaatctacttaatgtgctatggattttatttctggcatttcttttcctgccccccaaaggtgtatgacatctgagcaaatctgagaccaagcatgcccatctggtgacaatgacrattgcctttctaatgggtagcctcctctcaggcactgagatgcagtagcatgtaggatggaaagagtccacatctgtggacaggtcaccctgttctctaacctcagctttccaccctgcctcccaccacagcgagtctagctcagacagcattatctcagggcatcattgttttgcagacaagaaaccgacactggtcactggtgatgtttattcattcactgttttgattgatgaagtagtcaaacttcctcttcccacactagctatctaaaatgtggccacacaagggtcagagaggactgtgtgtatgaagtgcacatggccatccccagcctgcaggcctgcgtgggtggggtgggatctgaccctgt

SEQ ID NO: 496251 - DNA, 557 bp, Homo sapiens
ctgtgactacacttgagatgactacctcccttcaccatcacctcccttcaccactcccttcttcatggtactagtagaggtcccacctgaagtgtccaggtattgtgactttttgcctgggaagaaggagccaaagcaagaacaaatatrtgtgtgtgtgtgtgtgtgtgtgtgtgtgtgtgtgtgtgtgtgtgtatgtaagcttgcctgtctgtctatactctgtggaggagaacacagagtaactacagttataaatgcagagaaaagaatgttgctttaggatttcatatcatatttttattttgacatttgtagaattatggaaaatcatcaatttgaactagaaacacttagactcttgtgagtcagaagagatcataaatttcacttccaccctccagccaccttcctatattactcagcaacctaaatttttttgcagacatgaataagttacatatatatatatatatataaactcaaaatttaaaaatctgataagttgtgatgcatcctataatgaaatatttctaatgatgaagaactcatcattt

SEQ ID NO: 496252 - DNA, 576 bp, Homo sapiens
aagggaggttgagcccagctcagctcatggactggttgaggcgcgtgtgagagcagcgtatgagagtagcagcacctttcttcttattaaacatttaagtaagtctcacttttccaagatcattacacttctttggtatcatacgaagtaataatatatgtgggcactataaagataaatgtcttgttatgggttaaatcgtgtccccttcatatgctaagttcatatgtcaaagtcctaacacccagtacctctgaatgtgactgtcttttgagatagggcctttaaagaggtaattcaggtagcacgaggtcatagaggtgggcctaatccagtatgcccggtgtcctygtaagaagaggagagtaggacacggacaggcacagaagggagaccgcatggagacacaaagagaagacagccatctgcgaaccaaagagagaggcctcaggagaaaccaagcctcaagacaccttgatctcaaatatccagcctccagaatggtgagataataaacgtctgctgttgaagccactcagttgatggcattttgttataacagcaagagtaaatgaa

SEQ ID NO: 496253 - DNA, 568 bp, Homo sapiens
ttgagcccagctcagctcatggactggttgaggcgcgtgtgagagcagcgtatgagagtagcagcacctttcttcttattaaacatttaagtaagtctcacttttccaagatcattacacttctttggtatcatacgaagtaataatatatgtgggcactataaagataaatgtcttgttatgggttaaatcgtgtccccttcatatgctaagttcatatgtcaaagtcctaacacccagtacctctgaatgtgactgtcttttgagatagggcctttaaagaggtaattcaggtagcacgaggtcatagaggtgggcctaatccagtatgcccggtgtcctcgtaagaagaggagagtaggacrcggacaggcacagaagggagaccgcatggagacacaaagagaagacagccatctgcgaaccaaagagagaggcctcaggagaaaccaagcctcaagacaccttgatctcaaatatccagcctccagaatggtgagataataaacgtctgctgttgaagccactcagttgatggcattttgttataacagcaagagtaaatgaa

SEQ ID NO: 496254 - DNA, 568 bp, Homo sapiens
ttgagcccagctcagctcatggactggttgaggcgcgtgtgagagcagcgtatgagagtagcagcacctttcttcttattaaacatttaagtaagtctcacttttccaagatcattacacttctttggtatcatacgaagtaataatatatgtgggcactataaagataaatgtcttgttatgggttaaatcgtgtccccttcatatgctaagttcatatgtcaaagtcctaacacccagtacctctgaatgtgactgtcttttgagatagggcctttaaagaggtaattcaggtagcacgaggtcatagaggtgggcctaatccagtatgcccggtgtcctcgtaagaagaggagagtaggacacggacaggcacagaagggagaccgcatggagacacaaagagaagacagccatctgcgarccaaagagagaggcctcaggagaaaccaagcctcaagacaccttgatctcaaatatccagcctccagaatggtgagataataaacgtctgctgttgaagccactcagttgatggcattttgttataacagcaagagtaaatgaa

SEQ ID NO: 496255 - DNA, 547 bp, Homo sapiens
gaaggggcagcctgcagaaagaagtccagcccttgactttagctcatttcagactcctgacccatagaactgtaagataatacatttgtattgtcttaagccgccaagtttgcagtaatttattacaccagcaataggaaagtaatacaataaagatttatcaacacttgatcttaatttcaccgttctatcaactcraataactaattcaaggtcatccacataccagaaacacataaatttttaaacaatttgggaggttgtggtagagcagatggaccagccgctgctcctaccagcattcctgtgctcactccctggtggtgaaaaatgagatgcaacattctaattcattaggaacatttagagtccacctggatggtctcatgtgagacctaataagaaactaaatggtcctttgatgtggtgagatgggaaactcaaacaccaggagaagcccattacagaggcttttaatgagctggagtggtgcccaaagattgtgctgttctaattcttaaacgtgtcatttctcctaaactagagg

SEQ ID NO: 496256 - DNA, 547 bp, Homo sapiens
gaaggggcagcctgcagaaagaagtccagcccttgactttagctcatttcagactcctgacccatagaactgtaagataatacatttgtattgtcttaagccgccaagtttgcagtaatttattacaccagcaataggaaagtaatacaataaagatttatcaacacttgatcttaatttcaccgttctatcaactcgaataactaattcaaggtcatccacataccagaaacacataaatttttaaacaatttgggaggttgtggtagagcagatggaccagccgctgctcctaccagcattcctgtgctcactccctggtggtgaaaaatgagatgcaacattctaattcattaggaacatttagagtccacctggatggtctcatgtgagacctaataagaaactaaatggtcctttgatgtggtgagatgggaaactcaaacaccaggagawgcccattacagaggcttttaatgagctggagtggtgcccaaagattgtgctgttctaattcttaaacgtgtcatttctcctaaactagagg

SEQ ID NO: 496257 - DNA, 603 bp, Homo sapiens
tgcttccagacatttccccctctgcaagcttaaatttgcacacagtmccccacagcactcgagcgcgtatctctatcgccaaagtgatttctatcatgtcctaacctcattagtgaacacactcacagactctcaacacccattctaatcaagaagcaagaaaacaaaatgcatcaatcttaaaacatcatcaatgcaacaaattaagcacaaggtcaaatttcattagggttatttggcatttgctggtagtgaaagattgcattaaaccaaaaaaaatgcatcacacgaatttttttgtaacacataccctttagtaagtcttctaagtcaacaaaattaattttatctcgtaaagaagctttgataaataaagagctgttggtcagaatataaagatagttcaatcacatacatgattatagttacaataattttaatgtaatattgtattgactcatccatgtatatttaaatttttattatatattgaaattatttttaagacatgcagattagcaataaaactaaaaaattacctatgtcttagaaatcttggtgtgctcctccatatacttgaaagcatttccatttaatgtgata

SEQ ID NO: 496258 - DNA, 539 bp, Homo sapiens
ctccacatatctgatggacacccctgatttgctcgtgctccagagactaacacacattgtgcctggttttcttctgttggaagcctcagttgcttccaccatcctgtccagttctactgccaagtcctcaggcagaccacttgggctgaaagagcagggagcagagtctacccagtgaggacaccagcaaactggagtatgtccaagcaacagcagcctatgaggggaagggggttgaaatcaggccaagtgcggagggaatgaagaaacaggctgcgtttatgcaggaggagagaagcctcagcatcccccgagggccctctctagatttgcttttggacaaaggattaatttgattaagtgttggtcgacagagcagttggttgcaaagtgcaggaaaggagatttaaaggctacacaaagctctgraggagtgagccttgttcaggagataatataatgctaataaaaagaaaagtgactacatttactgagcacttactatagctggacattaagtcaagtcgtgtatgggcatt

SEQ ID NO: 496259 - DNA, 422 bp, Homo sapiens
ctgcatttctcccagaggctactaatttacaacctctgaagtctaaagggataccatatactgaggcatgtgccctgaaaagaggctagtccaagcatttcatttttttttttttttgagacagagtttcactcttgttgcccaggctagagtgcaatggggtgatctcagctcactgcaaactccacctcccaggttcaagcgattctcctgcctcagcctcctgagtagctgggattacaggcgtgtgccaccacgtccagctaattttgtatttttagttgagatggggtttcaccaygttggtcaggctggtcttgaactcctgacctcaagtgatctacccgccttgacctcccaaagtgctgggctcacaggcatgagccaccatgcctggcctggtgcaagcacttctagcaaac

SEQ ID NO: 496260 - DNA, 585 bp, Homo sapiens
attcagactcttagctgctcaactccttcccaaacacagggataggcctcacagtttctcaaagatttgcagtcttcacagattagcatcgtggaccacacatgagaggactcattctctccaaagcacctcttgtttattgaggagccctctttaatcccaaaagggtccctgactttatgttgtcgagaattaaactcagtttaagagactgctaccatgaactgttctctccawtggaagtggatccggtttgactaatttccttctaggtaacaaaaatttcagagctattttaaaagaaggcactgctagcttcacgggtaacaaacaataaatacgttttctcttgtcctgaggagcccttggtctttaacctagtggccagcccaggccttcactggatacaagtttgcatatttaagtaaaagaagatattatcttagcatgctgttatttactggatggccaaggagaagatagattttattgtagcataaaccaacctgcaaaaggatggtagttttgtattgacttttcatcagattgttgatggattcaaagagccgtctcatggattcttca

SEQ ID NO: 496261 - DNA, 507 bp, Homo sapiens
catgtattgtccaaaaccaagcctgtttttggacaataaaaaaacaccctctagtttccaagcacagcctaaaggccccactsgtgcccaagtcaaagccttgggctaagaagggactatcttgaattgcttgaaagttattgagtcatcaagacccattaattccaccccaaaagccatttacccctctccatcttcatcagtaccatggaggaccaagcctccatttcctctcacctgtgggggtctctgaaccagtgccccttccctctctcttattttctttcaatccagtttctacataatggtcagagggacctttctaaaaacacagatgcgatcatagcattttcctgttgaaaatcctttaaaaattcctaagtggaaaaaacacacgctactttccctctgctcccatgccgcaaccatgaacacagaagacatctgtaacaaatgtgcgagagtctatccccaccaccaagcaagcaatgaattctgcagtggaca

SEQ ID NO: 496262 - DNA, 507 bp, Homo sapiens
catgtattgtccaaaaccaagcctgtttttggacaataaaaaaacaccctctagtttccaagcacagcctaaaggccccactcgtgcccaagtcaaagccttgggctaagaagggactatcttgaattgcttgaaagttattgagtcatcaagacccattaattccaccccaaaagccatttacccctctccatcttcatcagtaccatggaggaccaagcctccatttcctctcacctgtgggggtctctgaaccagtgycccttccctctctcttattttctttcaatccagtttctacataatggtcagagggacctttctaaaaacacagatgcgatcatagcattttcctgttgaaaatcctttaaaaattcctaagtggaaaaaacacacgctactttccctctgctcccatgccgcaaccatgaacacagaagacatctgtaacaaatgtgcgagagtctatccccaccaccaagcaagcaatgaattctgcagtggaca

SEQ ID NO: 496263 - DNA, 610 bp, Homo sapiens
ttgtctcatctaatcctcatggttccgtgtcactaagatgagaaaatgaggctcagggaagtcaagcaacttgcccaaagtcacaaatatttgtaaacagcagagctgggatttatatacaggcccatctaactccaaagacaagctatttcccacgtaagtctgtcaccaaggaatgagttgtgtcaaatattctaaatggttttcaccagggtttcagcaccattatggtggaaaggtaatttttattatgcaccaaagtccctaacctcaaagagtcagcccaattcacctggcttagccttggtggacccygataatgagtgtccctggtcccttacgcccaccttgaaatggtttgggagtcagaggcaggggccccttgctgttccctgtcagttactcccaaggttcctgaaaggctcactggctgcagtttcaggagccttagaagcaaccgagaggaaacagtatggggcctatgacacacagcagatctgaaagtgctcactgcctgccacattgacaagggagtgtggtcggctggccccatctcagtgatggatggctggaccagctctgtggagggagaccatgaatcagcgaggtg

SEQ ID NO: 496264 - DNA, 586 bp, Homo sapiens
aataggattgtttgtaactcaaaggataaatgttttaggggatgaataccccattcttcatgatgtgcttatttcacattgtatgcctgtatcaaaacgtccatctyatgaagcccattaataaatatacctactatgtacccacaaaataaaaataataataataaatcttttttaaatgagtacatctgaaggggaacatgatgatgatgcttgacaggaaaatttttcacctgatcaacataactaaaaactgaaatttgagagaaagcagaaaggatgaatacctgtcttccatgataattggatattgttgaaaacaagcctggcatccctgaaaaatagaagcagcagcaataacgatatttctgtggtcttagtgtggggctggacacctttactttctcctctggatcttcgggccatctactgactggtctgccccaggccctggaggctgatctttatggatccatcaaagggctctcagggcttctggctttgatggggttcaaccaatcagagtcaaccagcaggagactggaaagtgggaggagagtgaagtcaggatatttattttctggct

SEQ ID NO: 496265 - DNA, 640 bp, Homo sapiens
tggggaggctatagaatcactgtaatttcaagggagtactgtcttgacaaatatgacctgagttagggctcctttggttgaatggtaactgaaaccttacttgaactgcctgaagctaacagggaaatttattgggaagacactgtgaacaggtgtgttcctgggcctctggagcagactcagggtctggaggagkctggcaatcctgagaaattctctctccatctgtcacatgtgcctcccctgctcatctgcttgcttcttccttctcacttgcttttctccacagacatttagtagagaagaacctccatttctagctgtatctagctcttctctcgatccacagggccaaggaagatgctgttacttcagcccaggaccaaaatgcacccaaatttgaagtactcctaggggtccttaagtgtcacaactttttctaagatgcacatgtacaatatcttttacaattctcttttaagaatagaagtactactttaattctgttcccatctacacacagccagaagagtttaatcaagtgtctcagtctgcgagcgatatttatgataagttgtcttggtgttataacagtcgggatagaaataagacagtaatgttagggaggtgtacaatgctg

SEQ ID NO: 496266 - DNA, 640 bp, Homo sapiens
tggggaggctatagaatcactgtaatttcaagggagtactgtcttgacaaatatgacctgagttagggctcctttggttgaatggtaactgaaaccttacttgaactgcctgaagctaacagggaaatttattgggaagacactgtgaacaggtgtgttcctgggcctctggagcagactcagggtctggaggaggctggcaatcctgagaaattctctctccatctgtcacatgtgcytcccctgctcatctgcttgcttcttccttctcacttgcttttctccacagacatttagtagagaagaacctccatttctagctgtatctagctcttctctcgatccacagggccaaggaagatgctgttacttcagcccaggaccaaaatgcacccaaatttgaagtactcctaggggtccttaagtgtcacaactttttctaagatgcacatgtacaatatcttttacaattctcttttaagaatagaagtactactttaattctgttcccatctacacacagccagaagagtttaatcaagtgtctcagtctgcgagcgatatttatgataagttgtcttggtgttataacagtcgggatagaaataagacagtaatgttagggaggtgtacaatgctg

SEQ ID NO: 496267 - DNA, 320 bp, Homo sapiens
tagccggctcctgtttgcctggtcagctttgttactagcacttaacataatcactgccckcttggttctgggggacttgccgcttgtctttgccattcctttcttcttagccttttggagacattttgttttaaggtgtagctcttaaattgcataaatcagtatttatttatttttaaactaaaagtgctagcctttaataggaatatttcttcctttcacaatcctggcataggtgttcagccttgctcctgcattcttgcgcgttcatttatatttatatgcacacattcatctattctatgtggcagctctgtgtg

SEQ ID NO: 496268 - DNA, 635 bp, Homo sapiens
gagggctgccattgagtctctcccttcctgccaagccccggatccacatgccccagtcttgggctgttgcccagacagagaaaacaggagtcagtctcaggaatctcctgctgctgctcccagcagccccacgtggsacccccatgaaggtggtggccccacatatggacaccattccttggccatctgccctcccagcctaggcaaggtacgtggcctttattccaggccagagctctcagggaggagcctggtggattttgcctctgctattttctggctgtgtgaccttgggaagaccactttacttctctgatctcctgcatcctcaactagataatgcctactacccaaggtttactaaaaggaccaggtggcatgatgtctgtgggtgtgctttagaaactgcaaaaagtactgcaaaagtgagagcttgtcacccctgcatcagagaggccctaacaccaggccctctggtcagacagcttgcatccggtcgtggccccaccacatccaacctgagtgacttcgggcaagtgactgaacctctctgagcctcaattttctcatctgcaaaatgggactgattatagtagctatcacatagtccaaggatgagatgaaatactgcaaat

SEQ ID NO: 496269 - DNA, 551 bp, Homo sapiens
gagtttttacttttgattaaaatgttttattgtgctatataattcatgaacttaacatcaatttgagttctagtatcctgtcatttgaaaaaccgtactataattttaatgataacatgtgacttagtgttaaatatttatttactgctttttaaaacctctttaatttgggaggccgaggtgggcagatcacaaggtcacaagttcgagatcagcctgaccaacatggtgaaaccccttctctactaaaaatacaaaaattatccaggygtggtggcatgcacctgtaatcccagctactcaggaggctgaggcaggagatcatttgaatccgggaggaggaggttgcagtgagctgagatggcaccactgcattccagcctgggcgacagagcacgacaccgtctcaaaaaaaaaaaagaaaaaggcctctttatatatcagtgtcccttcatttttagtaaaattggatgccataatagaaagtgccttcatgttggcatagcttaaaagtatttttcatgttgctttcagagtaatatgtctctgtt

SEQ ID NO: 496270 - DNA, 504 bp, Homo sapiens
tgtctgcatgcatttgatcttgatgtgatctctacaggcatgagttagatgactctttgcatgtgcrtggcacggtactaggccaagtgcatgtgtgacctgggaaagtttgtgtgcagttgtgcacacaggtctaccagagaccttgtctgtcttgttcagactctatcgccagtgtctgaatagtgtcagccacacagtgggtgctcaatacagtgtcagccacacagtgggtgctcaatactgaatgaatgggggaaggaatgaaagaccgtacacctgggtgctgcctccagaaggctttgctttcagggcctttcaagccacatgatctgcatggagatgagaaacacatcctcatgggtagggcctgagtgggggcaggtattctggccaggccagattttcctggtccctgatggagtccctttaagtaggcaggggtttcagaaacccattgaatagagcaggagtctcagagccagggcagaggctggctcagta

SEQ ID NO: 496271 - DNA, 504 bp, Homo sapiens
tgtctgcatgcatttgatcttgatgtgatctctacaggcatgagttagatgactctttgcatgtgcatggcacggtactaggccaagtgcatgtgtgacctgggaaagtttgtgtgcagttgtgcacacaggtctaccagagaccttgtctgtcttgttcagactctatcgccagtgtctgaatagtgtcagccacacagtgggtgctcaatacagtgtcagccacacagtgggtgctcaatactgaatgaatgggggaaggaatgaaagaccgtacacctgggtgctgcctccagaaggctttgctttcagggcctttcaagccacatgatctgcatggagatgagaaacacatcctcatgggtagggcctgagtgggggcaggtattctggccaggccagattttcctggtccctgatggrgtccctttaagtaggcaggggtttcagaaacccattgaatagagcaggagtctcagagccagggcagaggctggctcagta

SEQ ID NO: 496272 - DNA, 648 bp, Homo sapiens
ctgaggtttcatccattggacactcttgtgtttctgagaactaggtcccgctgaggttgctgggacccaatgtgctcccatactctggaggatgacgcatttctagagaatcctgggctttggttcctcttcagcctcctttccttttctcttcccctcttccttacccacagcctgcaaaatgaggtgcttttgaccaattagggtcaatagagccacaaaaagaaatatatcacctttctcagttattgatatatttaaaatgagttgtcatcagtatttgttcataaatgtattaaaggtatccagaatattaaaaaaaaatttttaaaccactttaaacrttaaaaacacccagtttttataatccattactgaccatgttggaatattgttcaggctgatctctctacccgagctggttatagcagtgttgttttgttgcttctgttcatggttgtctttgactgcatgctggttattgcacatagagaattatttatggggattcccctagggctaggatacatgccatctcctccacaaagccctttaggtttatttctgtcaggcatttggggcctctgctggttaggtatgattacagagttcaaggcttgaggttccctggcttacacagactggaag

SEQ ID NO: 496273 - DNA, 479 bp, Homo sapiens
gtgcacatttcctcagcatctgctccagacgctgaactttgacagttgacgccttggatcatctgccactgatctctagtcaacatttttacttgcccaacacaaaagaggcagaaatttattgagttacttattttttaacaacctgatcctttcatcttttgctacacatactcttgtaattgatctctccctgaattgttttctgtttaaaatatctagaatgtttcctgcttcttgacttgactcttactaatattgtatagacactagaaattgttctcaaaatagatctttacagatgagaatctggaagtggtttgctgacctgtttcactttgaatgaaaacctgaccttcttgttggtagaagacagaaacctggtcatctgtactgtacggtggtatcatgattacttaaatcatcaaatgtggtyattgggaatgatgtgtgttttaaagtgatatatgagagataaa

SEQ ID NO: 496274 - DNA, 602 bp, Homo sapiens
ctgctctgagtgtggcctgagagagctggagggccacccttgggtgggcaggtcctgggctctgcctcaccctcctggggcttctctgacccactgtctcctccaccctccatgcagtcctggggtggtccccacgcatacctcctgctgggcaggccgggggtaggggaagccatggagcctgtgggctgtcagggctgggccccaagggttggtggctgggaggaggacctggctggccggtgttggagcatctggtgctcctgagtgagttgtatgttcatggagacctggtttccctttctgagcagtgggatctgtaaccaggactgtcttcccaggctgctgggcaggcggaatggatgcggtgggggatgcgagtgcgctttgtaaactgcgaagggaggtgcacagtgagggatgggtgccgcagtgaggggggtgatagtggtaagaggaaccccctccccatggcctgttgggttgattgtagcccttatcctacgtgagttctcattatccccacaaccctgagccaagagactattgctcatcaggaaatgggggkgctgaggctcagaaaggtcaagtgacctgcacag

SEQ ID NO: 496275 - DNA, 571 bp, Homo sapiens
aaagatattatagaagtgcaatatctttcttttgaagaaaatgcttattatacagatttttaattttcaaacagtctctaggctggccacagtgtctcacacctataattccagcactttgggaggccaaggcgggaggacagcttgagcccaggagcttgtcaagatcagccagggcaacatagtgagactctatctctacaaaaaataaacaaaattatccaagcatggtgatgcatggcctatagtcgtggctaattgggaggctaagatgggagaatgtcttgagcctgggaggtagaggctgcagtgggccaagaytgtgcccctgcactccagcctgggcaacagagagaccctgtctgaaaaaagaaaagagtctcattattacaagtgctcattcaaaagtctgaaatttcgttcattatatcatactcagcagatagcggagactcagaatcaggattaaatcccaacactgaggcctagcttgcacccctgcccttgattgccaatcttctgagtcttcacctaaagataaacaaaggggccgtctgaaaaaatgtggcag

SEQ ID NO: 496276 - DNA, 482 bp, Homo sapiens
gccagtgtcccagcagctcattatgtaagggctgagccagccaagtttgcagagcaaaggtcagaatggcaaagatttattggaaagtctccttgcactcatacccatgagtgccctttcatgtggggacattttgtgctcctggagcacactgcagttggtcttgggtacttccttgggacagggaagctgggcacgtgggctggtggaagtcttgggctctgagtttccacccctgcatcgggcttgggyatggccagcactctggttcctacccgattggctccagagacccaggaagcattcatatgaatcatataggtcatggcttcattttcccactcatttaaaggtgcctggtgcactcacacctgcctccagcctttgctcttactgtttcctctgccttgagtgaccttcctccagatcttctcccctccagtttctgcctggaaagccctctttccaagcttcatttccca

SEQ ID NO: 496277 - DNA, 417 bp, Homo sapiens
tgtttaccacgccagcagttttcctgtttcacaccccatatccttaatatagggcattctcttaagggacctatcatgtcccttccagtacactcattgtcagtctttccttttttctcctcccttcactctttccacatttcatccaaattgttctcttttcctccccctccaggggagaacaggaggatggcctgtgcctgtttccagtcttaccatgagcacrgccagttggtgtttacacatgaaacggaactaactgatctcctatgcatgtacatcagagggaagtacctgttttcctttgaattcaataggcagctaatgagttttccattccttctgatctcaacctgctgtcacgtccactagtgggtgatcttctttctgttgcaaaagaagactttctgaactcct

SEQ ID NO: 496278 - DNA, 349 bp, Homo sapiens
tcctcctgggatcctgaaatgattccttaaatgatgtggtctatcctatctccccttcctgcctacaatggccttgggctctgtcctaattctgctgcctttaagattggtctaccctaaactatatccacataaccccaagattgtcccttcatgcctaacccacaaagagaggtgataggagttaggctgaggagtggggatagggaaagacaaggctcagcatggtccctgataacctcatagcttccaggcagatgaaggyagggtggaggcaggctgctctgagcccagctggttggtgctcaatcagaaaggatatgggttgagctcagaaagcctgagagca

SEQ ID NO: 496279 - DNA, 259 bp, Homo sapiens
tgacccaagtgtagaagcagttgccccatttagaatatttggaacattttccctcccattatcaggrccctaacaccgggctgccctctgttctaccctctggaaaatccaagggaaaaagctaccaaagcagacaagcaaggatagaaacggtggtggcattgcaggctggtctgcattgcggctatagaacaaaaatttccaacccaaaatgataagctaataaaattctaaacacaaacttcctctagccagttaa

SEQ ID NO: 496280 - DNA, 259 bp, Homo sapiens
tgacccaagtgtagaagcagttgccccatttagaatatttggaacattttccctcccattatcaggacyctaacaccgggctgccctctgttctaccctctggaaaatccaagggaaaaagctaccaaagcagacaagcaaggatagaaacggtggtggcattgcaggctggtctgcattgcggctatagaacaaaaatttccaacccaaaatgataagctaataaaattctaaacacaaacttcctctagccagttaa

SEQ ID NO: 496281 - DNA, 259 bp, Homo sapiens
tgacccaagtgtagaagcagttgccccatttagaatatttggaacattttccctcccattatcaggaccctaacaccgggctgccctctgttctaccctctggaaartccaagggaaaaagctaccaaagcagacaagcaaggatagaaacggtggtggcattgcaggctggtctgcattgcggctatagaacaaaaatttccaacccaaaatgataagctaataaaattctaaacacaaacttcctctagccagttaa

SEQ ID NO: 496282 - DNA, 259 bp, Homo sapiens
tgacccaagtgtagaagcagttgccccatttagaatatttggaacattttccctcccattatcaggaccctaacaccgggctgccctctgttctaccctctggaaaatccaagggaaaaagctaccaaagcagacaagcaaggatagaaacggtggtggcattgcaggctggtctgcattgcggctatagaacaaaaatttccaacccaaaatgataagmtaataaaattctaaacacaaacttcctctagccagttaa

SEQ ID NO: 496283 - DNA, 451 bp, Homo sapiens
cagcccttcccggaaggtgccctgcacataccagcagatgcctgtaactatttctgyagtatgacgacctcactgctggcatcatcaactctaggaggggtggaaagaacctgggaggaagtcagaaatcctggaatccagtcccagccctgccaggaggcaggtctctccccttctatggttttcctttttttttttttttttagacggagtctcactctgtcacccaagctggagtgcagtggtgcgatcttggctcactgtaacttccacctaccaggttcaagtgattctcctgcctcagcctccctagtagctgggattacaggcgtgtagcaccatgccaggcttgtttttgtatttttagtagaaacggggttttgcggtgttagccagtctggtctgaaacttctgatctcaggtgatccacccgcttcagcctcccaaagtg

SEQ ID NO: 496284 - DNA, 451 bp, Homo sapiens
cagcccttcccggaaggtgccctgcacataccagcagatgcctgtaactatttctgcagtatgacracctcactgctggcatcatcaactctaggaggggtggaaagaacctgggaggaagtcagaaatcctggaatccagtcccagccctgccaggaggcaggtctctccccttctatggttttcctttttttttttttttttagacggagtctcactctgtcacccaagctggagtgcagtggtgcgatcttggctcactgtaacttccacctaccaggttcaagtgattctcctgcctcagcctccctagtagctgggattacaggcgtgtagcaccatgccaggcttgtttttgtatttttagtagaaacggggttttgcggtgttagccagtctggtctgaaacttctgatctcaggtgatccacccgcttcagcctcccaaagtg

SEQ ID NO: 496285 - DNA, 451 bp, Homo sapiens
cagcccttcccggaaggtgccctgcacataccagcagatgcctgtaactatttctgcagtatgacgacctcactgctggcatcatcaactctaggaggggtggaaagaacctgggaggaagtcagaaatcctggaatccagtcccagccctgccaggaggcaggtctctccccttctatggttttcctttttttttttttttttagacggagtctcrctctgtcacccaagctggagtgcagtggtgcgatcttggctcactgtaacttccacctaccaggttcaagtgattctcctgcctcagcctccctagtagctgggattacaggcgtgtagcaccatgccaggcttgtttttgtatttttagtagaaacggggttttgcggtgttagccagtctggtctgaaacttctgatctcaggtgatccacccgcttcagcctcccaaagtg

SEQ ID NO: 496286 - DNA, 451 bp, Homo sapiens
cagcccttcccggaaggtgccctgcacataccagcagatgcctgtaactatttctgcagtatgacgacctcactgctggcatcatcaactctaggaggggtggaaagaacctgggaggaagtcagaaatcctggaatccagtcccagccctgccaggaggcaggtctctccccttctatggttttcctttttttttttttttttagacggagtctcactctgtcacccaagctggagtgcagtggtgcgatctyggctcactgtaacttccacctaccaggttcaagtgattctcctgcctcagcctccctagtagctgggattacaggcgtgtagcaccatgccaggcttgtttttgtatttttagtagaaacggggttttgcggtgttagccagtctggtctgaaacttctgatctcaggtgatccacccgcttcagcctcccaaagtg

SEQ ID NO: 496287 - DNA, 593 bp, Homo sapiens
tgtgcgaactctgctcttggacagccccccaccccacctccctgcataacacaagcacagaaggtgggaaaagtgaagcaacagaggccagcccacggccctctgccctctacccacacggcccaagcactggctggcccagattcacgtccaagccaacatccacatattcagtgaaacagtttggaaatctgttagccggttatttgtgaacttagccttctggaaggctgaaatggcacccatgagctccccaaatgtctgagtgtaaaaccactgaggtttagaacaacagttctgaggttctgagcgccactgtcctcctccagaagggaagggaacgtctaagacagagaatatcacagatggcagaatgcaacgtggacatgcaagaagaggcgtggccagaaggtatttcaggaacatctgctcattctagccaacaggacaaagacacattaactatggatgtggcagccccggcagtcctccctctccagggcccctgaacaaatcagcaaacagaacgaaagggagcatgcagccagccctttctaaaacaactsgagtccagtcaccttgccctgggttcc

SEQ ID NO: 496288 - DNA, 234 bp, Homo sapiens
ttccattcaccatctgggataatattcccctccccagtaatctagatgcttacaaacacygctggttgcggatgtgccagactccctggtggtggtaccctatcacaatattctcccctgccgccggtgcaatcctgtttcagcaacaaatttaaatattaagttttcacgtagaaaaggctcttaatgatagtagcactggacttacattgttatcagatgaatttgctcagc

SEQ ID NO: 496289 - DNA, 647 bp, Homo sapiens
ttgagtatttattatctttagtataacttcaaaaataaactgaaaatgttaaaaagcaaaaagtaaaaactgcctcccacatttgaggtacactaaagaaaaaacaattctctgaatcttgcacactccaaaattaatacacccagttaactgctaaccaaagctaagttgatcttagaggccaaaggaaatgttatcactagaaacaaggagaaattaaaggcttcactgtgctacaacattaacttctacttttacttaaaaaccactaacaacaatgaaaaggctctaagttgtttacgcccttttagaagtgctctcactaaaacacctcaggctatgtacattacttcttttctttttttttwaatttcaacttttattttagatcagggggtatatgcacaggtttgttacatgggtatactgcatgatactgaggtttggaatatgaatgatccctatcacccaggtagtgagtatactacccaacagtttttcaaaccttgctcccctccctccccattctagtaggccccatctttatgtccatgactatccagtgtttagcttccacctgtaagtgagaacatgcagtatttggttttcttttcctgggttaattcactgagtataatggcctccag

SEQ ID NO: 496290 - DNA, 592 bp, Homo sapiens
tccttgggagaacaaaggaagaacagccaacccatcctgggaggatcagagaacactgtggaggaagactggctcaacctccatgttccactcctaatagatccacttgcagtggcctggactcactgggctatgaaaccactgttgtcttcttgggaatccctcctcccctgcttgttctgatgaatctccctattctgatgaattactgtgcctactcaagacacagtgcaaggctctcatcttctaggaaggcttccctgatatcccaggtagcaaaaatcactccctgcttttttttttttttttctgatgcaggagatgaacctggaatctcgtaaaaatgagtattattattattttttagagactcacaggctggcctcaaactcctgcactcaggagtgcaggtcctcccacctcagccttccagtagctgggactacaggcacatgccaccaccatgcccagcctcacttattactttatgctgccacacagcatgagctccttgaggacargaccttaccatgtctccagtgctattttagagtctggcacactgtaagcattcaacaaatgtttgctgaaa

SEQ ID NO: 496291 - DNA, 632 bp, Homo sapiens
aaccatactatctgttctctctcctttttaagtcttaaaggaaagaaagaacatgtcatgataagaaacttaaaacacaacaggacccagtaatgtgaaagggagaacagcaataaacaatactggagatatataggcaaaacctgcttcttaggaaataataaatgctatacaattgatggcttatattaggataatcaggaaaatttaaatataaactaggtgtgataatggtattgtattatgtccaagaaggtcatttttttagacttttcttaagagatgaggtctcactctcttgcctaggctggagtacagtggtgcagacatggctcactgtatccttgacctcttgggctcaagccatcttcccacctcagcctcccgactagctaagactacaggtgtgtatcaccatgcctggctaattttttttttcttttttctttgttttttttttttttttttttttttttttgagatggagtctaactctgtcacccaagctagaattcagtggcacaatctcgactcaccrcaacctccacctcctgggttcaagcgattctcctgcctcatcctgcctcagtctcccgagtagctgggattacaggcacctgccaccacgccca

SEQ ID NO: 496292 - DNA, 581 bp, Homo sapiens
ggaggctatgctgaggtaacaaattaacttcataatctcagtggattaacacaacacagcttgtctctcaatcatgccatgtgctcatatggtcacagtgatctatacccacatgtcaaggacccacattgacagaggctccaccrtcttgaacttggaacccaacaccttgaggttactgcagcagggaagagagggatggaggagttgcatggggtcctagctgagtcagaccaaaagtaacacacaacacttgtattcacagcctcaacctaactgcagaggaagctgaaaaatacaacgtgtctttgccatcatttctttaattgcatgcaacagaaatcaactagcttgcttatgcaaaaaggaaaaatttttggaaatgcctggggaaggaagatcacagcatcaaagggaagactgaagagccagctttgaacacacaggactcaggaagccacagaggttcttgagaataggaagtccttgaatgtctctcctgggcaccactgctagaatgaatgatgtctagtctttcttcagtcctgtgtatgttcactcaagagtcaaaataccaggga

SEQ ID NO: 496293 - DNA, 566 bp, Homo sapiens
tgccacccacagtacaactttctatctcactaggctgcccctgttcatcacaacatattttaaaggaatagtaatttaaatagtgttatatttgagcaaaattagagaaatcaaccaaaataayacattagaggacctgtaaataatatatggaaatttgatccatgacatggtggccaatagatcagtaggaaaggacaagtctttcaataaatagtgctggagcaactgaggaaccacaaagaaaaaaatgatattatatgtctttctcacgccatgcataaaggtcagtttcaggtagatgtgatacttatactgaagagtaaaaatgtaaatcattgaacatattctgtggaatatctttataatattttaggaggtaaatatttcttaaataagttgaaagaactttagttatctaaaaaataagacagcaatttgcctacactaaaatttcaagcctctactcatcatatgacaatgattttctaagtgaaaaggcaagctacaaatttgattttcagcatatatagctgttctgaagtatccaaaatatatttcaaact

SEQ ID NO: 496294 - DNA, 496 bp, Homo sapiens
aaagcttgccatagtgtgtgtagtctagtgacgctcaaccttagcccctctccatgtggaatagggagagtgcaggggatcactgtgctctactactcttcaaaaaaaaaaaaaaaacygtaaccccttttattttctccacttaaaatcaaatagaaaacaaaaaccactaatatcttcaaaagacattgttagtgtaagagaaagactaagaaccacttaaaatcaaatagaaaacaaaaaccactaataacttcaaaagacattgttagtgtaagagaaagactaagaacaaaaattgggtttatagagtcaaacataagtgagtgtcactcttatacttccaagtttttccacaacaaggcatgtggttcaactggatttacacacgcacgcgtgcttgtgtgtgtgcgcattttgtacaaaaggttttgtacatcttgggttcctgtgggatgttcaggtagaaatatccaacacacaggcattagggtca

SEQ ID NO: 496295 - DNA, 493 bp, Homo sapiens
gggctttctaaggggatattttctttcccagatatcaaccagggcatttgagcagaaacaagccaattcctgaacttgtcttggacctggggaggtaggaggaggccccagaagggagataagagggaaaagctttcttcaaagccggtttcctgttgagccctcagtagtgaggcgctttctctcctggggacttgttagtgggggacacttggactgtgtcttggggatcctataatgattctagaggtggtgggagatgagccctatgatgctagcaggactactgggaaggtgcctatcaacatgattttctaagtccggccctgaggaattgagaggcctggtgaaggtggcaggttaatgaacagaagctgtgggaagatgtaggcrtgtgttcctctgactcctcttcccactaacattccctcgcctaagagagagggctccttcttctcccaccagggagttgtggtgcagtagaaaaagcaga

SEQ ID NO: 496296 - DNA, 519 bp, Homo sapiens
ttaggttctcatcacctctggattacctcttgtcttgttctgctcagagccattgcacagcacaggtccaagggggcactgtgtcatttacactgactacaaagtgaatggtgccccttggggttggcaatataatggccttgcacctgccttccttcatttgccctcttagtcatcttttaatgcaaacatggtaatggtgttccatttcttaaaatcttaaaaattaatggaaatgataatgttgaagatgataataataayggcagttacatgccacatgccatgcacaatgctacccaagcattttacatttgttaatttgtttagttcttacagcaattctatgaggcaggcactatgattattcctggtttacagatgatggaagaaggttcagtgttgagtaatttgcccaaggtcatacaatttctatggctccttttcacttggaggtggaataaccgtagttcagagcatgactcaaacagtggcttacctgggctgaaacctcatcag

SEQ ID NO: 496297 - DNA, 614 bp, Homo sapiens
gaaacctagcagttaatcaagtccctctttattgtccttacccatgagatctcttgttccccaatatctgtcaccagtttcttctctgttcccctcatttaggttctcatcacctctggattacctcttgtcttgttctgctcagagccattgcacagcacaggtccaagggggcactgtgtcatttacactgactacaaagtgaatggtgccccttggggttggcaatataatggccttgcacctgccttccttcatttgccctcttagtcatcttttaatgcaaacatggtaatggtgttccatttcttaaaatcttaaaaattaatggaaatgataatgttgaagatgataataataacggcagttacatgccacatgccatgcacaatgctacccaagcattttacatttgttaatttgtttagttcttacagcaattctatgaggcaggcactatgattattcctggtttacagatgatggaagaaggttcagtgttgagtaatttgcccaaggtcatacaatttctatggctccttttcacttggaggtggaataaccrtagttcagagcatgactcaaacagtggcttacctgggctgaaacctcat

SEQ ID NO: 496298 - DNA, 579 bp, Homo sapiens
tttttctttgaactgcctgtttatatcatttgccttcatcagggccactgtgaaccgctgactggacacctttgtgcaacaaagaaagtgtgcctccaggtggacacaccctcaggccaggaaggcttgatgaacacgatgtagactagatttcagttcctttctgccagttaacaaacccccytgtgcaaggcacaacctatgcatatttatatggtaatctttattcaacattttgcataacttctttatatattaattataaatattcctttatgatatgatagatacgatatataatacatatatgtgtatatacatttatgtagcagttattttttcactttgttgctttcttttcatgtcttatgtattaaaattttaatatctaaggtgaaatgttctaatagtctcctctttaatatattcattagctagaaagatatagacatacatcatatacattttataagtgtttattcctcatattgccattaaagtttactttctatccactgccttaaaataacttcattatatattattttatatatatatatatatatataggtatttttg

SEQ ID NO: 496299 - DNA, 590 bp, Homo sapiens
tctctaactcatggacacgtcaagaaattaagagacatttcatgatgagctggagtattaggactatatttgctgaatttattttttcatggttcaatgatgaaacagtaaattccacaaatagatttcaagtttggtcaagcattttggcttttgaacattaatctcctgagcagtgagctctgtacatgcctgggaaggttcaacacaacaatgacatgtgacagccaaacatccaagcactgagcaatttagattctcatatcaccaaatgggattttgtgggtggaggagarggaaggacccgaagttattttgctgttattctgttacagctctttcttctctgtgttgatgctgccaaaagctatgctggcagcacactggattttcagtgtttatattaactcgtcttaatcaaggaatcctgacttaaccttattctttctcacagacacagttcaatgctgcaatggagcctgtggtgagcactgattcaataggtggtttgcctccttagacgcagaatcacaggactagaaggagtgaaaacaacactttatctctacattggcttcagggaggacagt

SEQ ID NO: 496300 - DNA, 591 bp, Homo sapiens
ttccattagaagattttaggccagacttggtggctcaggcttgtagaataaacacttttggaaaccaaggcagaaggatcacttgagcccagggcttcaagacgagcctgggcaacatggcggaaatcccatctctccaaaagaaaaaaaaattagcagggcatggaggggtgtgtctgtagtcycagctatgctggaacctgggtgacagagggagaccctgtctcaaacaaacaaacaaacaaagataaataaggtagtagattagcaaatagaatgtatatttgcatattttattcagaatggacaaggattttctcagtaagcaaatgttattttactaataagtaaccttcagattgctcagataagtagataatctatagaaaataatttttatacaatcaaaatgtgttcagtattttgtagaatagcaagaattttcactatgaataaaattgacagcgcacagtgaatctcaagaaatatgagttttaacaaggtttaaatgtttaaattttaactgaattatactatggtttctcttcagatcatataaatttttcgccttttaaatttaactgaatttta

SEQ ID NO: 496301 - DNA, 591 bp, Homo sapiens
ttccattagaagattttaggccagacttggtggctcaggcttgtagaataaacacttttggaaaccaaggcagaaggatcacttgagcccagggcttcaagacgagcctgggcaacatggcggaaatcccatctctccaaaagaaaaaaaaattagcagggcatggaggggtgtgtctgtagtcccagctatgctggaacctgggtgacagagggagaccctgtctcaaacaaacaaacaaacaaagataaataaggtagtagattagcaaatagaatgtatatttgcatattttattcagaatggacaaggattttctcagtaagcaaatgttattttactaataagtaaccttcagattgctcagataagtagayaatctatagaaaataatttttatacaatcaaaatgtgttcagtattttgtagaatagcaagaattttcactatgaataaaattgacagcgcacagtgaatctcaagaaatatgagttttaacaaggtttaaatgtttaaattttaactgaattatactatggtttctcttcagatcatataaatttttcgccttttaaatttaactgaatttta

SEQ ID NO: 496302 - DNA, 591 bp, Homo sapiens
cataggctatggtgggtgaaacaggcctccaaacagtgtgctcacatccagcagtggcagtggtgggcagtgcagaccagttcccaggcccatggatgatgcacacagttaatggccgtgggtggggtggatctgctgtcaggttttcctgatggtatatgtgggtaccagggacagacagatgggtgggtcaatcctccagttcctgcacaatcctcatagaggctggtggctctggtgaccaggtgggccagtcctcaggcccctgatagttcccagcttattagctgtggcaggccaggtggattgatccttaagctcctgaacagcatgtttggccacttgtggagtagtattgttgtgtgagccaggcctgtcttcaggccccaggatagtgtccaatttggccagtccccagacaccctggagcatgcaggtttggagcagcctgttgmtagggaggtcaatggtgcaatgttgcagtggctgcaaacaggcagctctcaggcttgtgggagtgtgtactttaactctctttgtcctggcagcagcctccctcatgcactacaccaccctcctgtttcctgggac

SEQ ID NO: 496303 - DNA, 627 bp, Homo sapiens
gagggaccaagggcagaaaaaatatagtttgggaatttgtccctgcccaaatctcatgtataaatggaatccccagtgttgcaggtggggcctggtggraagtgattggatcatgggggaagatttctcatgaatggtttagtaccattctcttggcactgtcctcttcatagtgagtgagttcttgcaggatctgattgtttaaaagtgtgtgccatctcccctctcttcctcttttctcctgctttggtcatgggaagtgcctgctccccgttagcattctgcaacaattggaaacttcctgaggcctccccagaagcagatgccactaggcttcctgtacagcctgcagaactgtgagccaattaaacatcttttctatataaattacccagtctcagatatttcttcatagcaatgtgagaatggcccaatgcaacaaatataagggaaaacataataagtttgcccagtgtcacaacctggataagtgtgtgaggtggctgagtgtcttaaagcctaagcagatcccaatactatcttgcctcccaaatgtggcagtcttgaacaagctcacacaagatttcttctccgttttatagaactgtcttcagggtttctactaca

SEQ ID NO: 496304 - DNA, 627 bp, Homo sapiens
gagggaccaagggcagaaaaaatatagtttgggaatttgtccctgcccaaatctcatgtataaatggaatccccagtgttgcaggtggggcctggtgggaagtgattggatcatgggggaagatttctcatgaatggtttagtaccattctcttggcactgtcctcttcatagtgagtgagttcttgcaggatctgattgtttaaaagtgtgtgccatctcccctytcttcctcttttctcctgctttggtcatgggaagtgcctgctccccgttagcattctgcaacaattggaaacttcctgaggcctccccagaagcagatgccactaggcttcctgtacagcctgcagaactgtgagccaattaaacatcttttctatataaattacccagtctcagatatttcttcatagcaatgtgagaatggcccaatgcaacaaatataagggaaaacataataagtttgcccagtgtcacaacctggataagtgtgtgaggtggctgagtgtcttaaagcctaagcagatcccaatactatcttgcctcccaaatgtggcagtcttgaacaagctcacacaagatttcttctccgttttatagaactgtcttcagggtttctactaca

SEQ ID NO: 496305 - DNA, 627 bp, Homo sapiens
gagggaccaagggcagaaaaaatatagtttgggaatttgtccctgcccaaatctcatgtataaatggaatccccagtgttgcaggtggggcctggtgggaagtgattggatcatgggggaagatttctcatgaatggtttagtaccattctcttggcactgtcctcttcatagtgagtgagttcttgcaggatctgattgtttaaaagtgtgtgccatctcccctctcttcctcttttctcctgctttggtcatgkgaagtgcctgctccccgttagcattctgcaacaattggaaacttcctgaggcctccccagaagcagatgccactaggcttcctgtacagcctgcagaactgtgagccaattaaacatcttttctatataaattacccagtctcagatatttcttcatagcaatgtgagaatggcccaatgcaacaaatataagggaaaacataataagtttgcccagtgtcacaacctggataagtgtgtgaggtggctgagtgtcttaaagcctaagcagatcccaatactatcttgcctcccaaatgtggcagtcttgaacaagctcacacaagatttcttctccgttttatagaactgtcttcagggtttctactaca

SEQ ID NO: 496306 - DNA, 530 bp, Homo sapiens
ttttcaggccctggaatgggaatttaatcttgggaagaaaaaaaaaatatgttatcagaagacattatttcctgaaggcagaattcttgttatatgtcttttatctctatcttttgttctcgttttgattaatcctgatattttgtcttcctacgttttctcagacttatcagctttacatttttctttgttttattttagaactttttttactgtaatatgtcttttctwtacagtgacaatcttaatgttcttccaaggtttgtaatttttaagttctgctttgttataagaataatctcttagtttactctagtaatgccacagtaatcagactggtgaagaaatagaaagagagaaaaccactcttcatgtgttagctgctaaggcaaggagagaggaatgtttttcatgaaaacagaagcatataaaactacaaattagatctatgcatacacatacaaacaaataatttcactcatttcttatgcttttctcatttaatgcagctaaaatgcatgaaatgtccc

SEQ ID NO: 496307 - DNA, 571 bp, Homo sapiens
gactacactgcacgcaggaaggcatgcaatttcaacatgaaaatgcctggcaagggccaaagaagagtcatgaaaatgaagtaaaatattaatgtgaaattacagaaccctagatattaaaaaggaagatctgaaaagttaccagagtggggaaaataggttatctaaagatatggaaggagaaggaggaggagaaggaggataaggaggaagaggaggagggggaggagaaagaggaggagaaatgaaaggaaaagaaataataattattattatgaaatgaaaaatcatgctgacaacagtagaagcaaataaatttggcacaagttgagacattattcttaaatttcacacttgcaagtgatgaaagttgctggaaacaaatcttttaaagatcattttaaaaagcaatatagtaaggrgttgtattatggagatgatgaattttctcttcctgttgaataaaaactgtatttcgtaagttgcagtttaggataaaattacagtgacatcattcaatgcattacaaaaaaatctgtatctgaactattaaaataaaaacacaaatgat

SEQ ID NO: 496308 - DNA, 440 bp, Homo sapiens
gttctttaaaaggacaaattgagcaagctgttgacaacgaccttacgattcagtattgttctgagatkagtttaaagagaaaaagaaaagattcctcaaaccccaaatcatttattagtttaggatacgactgatccagttcccagcccagaaacagaagttcaaattctgacgccctgggacgtctgcatgcaagcagaattcagttccaagaccagtggatccaaggaaggagcgagatggattccatttttactacaaatttcaagggggattacttcaaaaaggaaagaaaaaacatgctgaggcaagaaaactgaaatcaatacacccagggtgacggattcaattgaaataagaagaaagtttattggtgtatcaacaacaaattcccttgctttaagatgatattttgagggaacataaatcttatggactac

SEQ ID NO: 496309 - DNA, 643 bp, Homo sapiens
acctttttaaaaaacattattttgaaacaaatacaccattttgaaataggctaatgtgcacgagctctttcttggccatattattttaaatgtatgactttytcatttcaaaggaaagaagctcttttgcaaatgcccttttctaaaatgtagaagaacaatttccgttgcaaagtaggttgtgcagagcctctgcgatcttacctaaattattaatttggttaatcagtgcattcccttcccagatattctaaagggagactagtcccactccctgtccaagattttacacaatattaattagcaaatttttatttaaaaaatgaaaacagtagtaaacccagtcaatgcccagttgtcttatacaatatatatgatgcaaaaattggtatatttcattatagttttcacaaaggaatttggtctatatttctcctacacatacaatctacattttataaccgaacaaacctcctttccaaacccactacaaataatttcttaagatgtataattaggacacctgtctcaaatcctttgataggtttttagttcatttcttgggagaagtgttctggttgtttcttttttaatcaaagctactttgctaaattgctttccaagcagacctcagaatatttgc

SEQ ID NO: 496310 - DNA, 596 bp, Homo sapiens
atgattttgcaagcctctttgatggccctgggtccatggatggcaggtacctgcaagctctgtagttttcttacctttctaccactgctcactcttctgccattaaaaaawacgagccttatgaaaatacaggagagggaatgcaatcccacactacagccttcagtgtgagaatatcaagagactgttgcattcagaagttcagaatagctctgctctttataaaagaatatgaggagccccctaataaggccaattcattagaacaagtgtttgttactaaaacacaccacgcaggaccacagggatccgagccagacagcacggcaattaaagttgcctcccttccaaacgcaggcggcccaccaactctcacccacgagttctgctttgttttcctattagaaatgtgattgaagaatgcaagttcataatttgttcatgcagcagaagactagtaactctctggttgcaacatccttttatacacttcaaatcagaattaaaaaaaaattcaggttgcttgtgtgtgtcctttctgaaagcgcaggaggagcaaaaccttttgctctgggaatctaccttgctgcctagaa

SEQ ID NO: 496311 - DNA, 310 bp, Homo sapiens
caggggcctcgtggacatttctatgcactctctccttaacttggcatcacctccctccccccaggaacacctgaatcatggagaagccgggccctgggcccagaatctccacaggcatctggtttgcacagaaacttccaatgggtggcactgcctgagatttgggatgggagagaggtggcaaggacatcactctggggtcgggcaggcatgagacctgaggtgcctccccagcccagcccacctctgcagacagaatactacgtgagcatgaygctgcagcagcctccaggattccccgctgcggctg

SEQ ID NO: 496312 - DNA, 632 bp, Homo sapiens
aggaaactcatctaaaaatcggaggacaacctgatgcacccaagtgacaatggacccaggcagctgtgcacaccaggtgggaggcgtttggaacagttagactcatcagtggataggtttttctagcacaaatggaatgtggtgtctcatgtccctagggagacaaagggcaggtttcttatctggtctttccaagctttcaactctctggctcaagtgtcccagaatgaactagaagtctattcctccaccctggtccgtggtcacttccagaactctgaagtggctcaggaggtgactcctgaaaggcagcccttgcttgatctcctggtggagcctgtctgggctgaggcgatgctgggcttgccgtgccgagatctcatgccagaagtcctccctcggagctacctgtctccagcctcattcttyggcatgttgactcctggaattgaggggctatttctaagatgcatgctttttcggcttttctcatgggtgcctcatcagcctgcacaggatcccccatctcacgagagagggaaatttggcattgctgttccctgcctctaaggtcctttatgaggggccgcccaaactcattcccttagttcttactctcccacaggtgttga

SEQ ID NO: 496313 - DNA, 654 bp, Homo sapiens
caattatatttccataaattttaagttagaatattaaattttgcatcatttaatgcctcatatcaaagggyagctgcagctttatacatcaaaatccagattatcaagagagtttatatgctgggaaacacacaaagcaatgatcacaaatggaaattgatagtaatttttttcaaagagaaaataaaagaggaaagaaaaataacaataaaatgagaggaaaatggagacagactaaataaaagactcccttgactacaggtcctcatacgtaagtgaaatgatcctgcacaatggttttctggaagattagcccttctgcactctgggacgggttcctccctatgaggaaaatgcccaagcaagaactctcatatggtttcttgtgcaacgaataggagctttataaaagcagaaaactttgaacaaggacaagtcagtattaggtgagccatacacatgaagtaaaagtgtcagtctgttcccctcactattactttctctctgatacaggttataggttaagaaaatacacaggcattccttccagaggaattgagttgctgcaagtttgtccacttcaagttcatgaaatgttttataacttaatattgttgtcaatacataggggaatttcacttaattggttttaaa

SEQ ID NO: 496314 - DNA, 626 bp, Homo sapiens
cctatgcacattcaattttgagaagcattcctctcaggcagtggttcttgacctcgtctgtgcattacaatcacctggggagcattaaaaaatgctttagtttctggcagcacccaaaccaattaaatccaatctctaggggtgggacccagccatcggagtttattagaactctccaggtgattccaatttgcagaaaatcagtgctttaggacacaggttctcaaaactggctgcccgttagactcacctggagatcttttgcaacttcctaaaaccaagctgcatcccaggccgattamatcaacgtctgggggccagtcagacacaggtatctacactggtgaaatttcccaggtgattgtagaatgcagccagaattgagatccagtgttttgggactccgctcaggaatctttcatttctggagaccccctcacaatatgtcccctactccagcgatgcccagcctccatggtgccctatgcatattgcaccatctctctaattatctagtacgtacctgccctcacccaccccatttggttgggagctcctggaaaatagggactacgttttacgtttctttttcttatgccttgcacaatgcctgatatttacaatac

SEQ ID NO: 496315 - DNA, 620 bp, Homo sapiens
ggaattttcgcttttccattttagagataagccacattttttgctgtgagatcaacacactcctttctaagyttttgtcaaaatcataacttatgaaaagcaactctggggatgttgacaaaactggaaaaacagatgtcttgagccaactgggatcaatatgagccgagcagaagcttgagaaactcaggtgaacaaaaacataaataattggtcttggttgttcattcaccagttatcaatttcactactttgagctgatgattttggcagacttaatgccctgagatttcacaagtaaatgttcatagaaactatttacaataactgtatacctgctcacaacagactacaggatttagagtccctttcttttccctcctctctccctccctctctctacttcctttttaggcataactgttagtacagggctttacttgttaattgttcttttgtgattctgtttgtggcaattaaatgcagtggaggtttggtaattagctgctgtaattagaaacaccttcgggttaggaaggtgtttccttttcatcactttaggagctctagcactcccttcaaaacgcctgcacttggctgtgggggaggggggagtgagc

SEQ ID NO: 496316 - DNA, 484 bp, Homo sapiens
aggctgtgaggggcctgggcccsatcttgaccccagggatccttatgctaggagctggggtagctttggaggctttggctgtcagcagagatgactcctgacctagacccttgaatgagcttgttcccctgtgaaggatggagataagtggagttggagttcctcaggggtgcctaataacctacctaggataactcagagaagagagctatggtggagtgttgaaatactagcccttgtgaactgtacctactggtatgcatgcccttacttatgtagtttcctttcacattgctctaggcttggccaaataacttgctttggtcaattggacattagtaaacatgatacaggctgaagtttgataaactcttgagtttaggccttgccctcttggaattctaaaacgatgcaaagagaaacccaggaaacagcatcaacagccaggcaggtgagcctggtcatactagaccatcccatgcca

SEQ ID NO: 496317 - DNA, 506 bp, Homo sapiens
gaccctacacatctgtaggtgtgaaaccttgtgtgcagaatttccacgcagctctcatcggcctgaccccacccaagatagctgggtagccccttgggtggagacaaaaaccagcccagtgggaaaggctgctggggtgggctggcatgcatctgaggtttcctttaaagctagagagaaaagggctagcttctttttagaagttctcttgagctctagttgctrtgtaaatcagcgtaaaacactctagaatcagaaaggccgtgtgtgttattttctccgagagctttaaatacaggatggtttggccacagacttagtcataaaatgaaggctccacagaggctgacacaggtgaacttgagtgctgatctggggcaggaaatcaagatgctttgttgttagaaacaaatccactaatgttatttccattaactaatcaattacttgattaactcatgtgttcatcatacacttattgagtgcctactaaatgccaagtacca

SEQ ID NO: 496318 - DNA, 573 bp, Homo sapiens
aaaatgcaagaattcccaatattaggtcacaaggacaggttttgcctattttcaatgctaatacataattaaacttccatctatgttttaagattgtttttctcaaccaagtctgatgaattatataatttgtgatgtacctgttgacaaatcatgcttcttttacataattaaagtaaatgaaacagtatgcatcacttattagctgggtgtttaaaaaatcttacagtcaatttttataacatataacatgcaaaaatgacaaaatgtggtgcttttttttaagaaatttctacaggatggggaggggtaagagattgcacactttcggaaggaaacagcaggtgcaaacttttgcaaagcacctctctgcactacacaccctcctcccctctccacctcatgtgaccatggacaaatcagacacattgggaaagacacaccctaatctgtttccatggccctatgagaagcacagatttggaaatacaattcccagcaagcccaggcattttaatgagccatggccaactggagtgacrgaatccttcagccatgtcaaatgccaccaca

SEQ ID NO: 496319 - DNA, 513 bp, Homo sapiens
gcctctgtgatcagactgactagagtggcccaaattccccatctccaagactcagtttcctcatctgtaaatggcaacagtaacatgacccaaccacagagaccctgcagagtccaagcacagaatgtactcaatggcttaggacagcatctgccattttggaagtattctagaagcagcttttaccattattactcttagtataaaatatttacaaattttatttttaattacaatagataatgaagagccataaatacagaaaactatttgtctgtgccatgggctctgtgatcttgcaaagttccaccaagtggtcttcccctacttagttcttcccaggccaggctccaggtccaagctcttcccagagctggttgtcagtttctaattatttttagatcctggctgagtgatttctstcctttttcataagggctggatgacagcttgccactaagaatagcacttcagtttaatcagcaagtcgccaggctttgtgaccatgccggc

SEQ ID NO: 496320 - DNA, 626 bp, Homo sapiens
ctggaggtggcaagctaaatgaagtccaactgccaatcagacttaccttagtgccttggagcaaggtaggtgatgcaccttcaagttttgttgattaaacaagtaaaacgaaaaactattgttaggtttctgtaaagaagaatagtagatgaataaagtaatgcaaatgcccacactataaaaactaggacaggcatataaatgaccaattggcaaattcagacacgaaaacaatagctctggaaattcacccaaacgcactcaaccacaatgatgtaactgcagttagatcagacatgttgctgaaaccaattaggctgatcaactgctgtgagtcacgatcgaatgatagccgttatgtcaatatatgttggcaagaagtagctgtgctagaattctggcatgcgtgatctcgctacgatcatacagtttacgaaaaagtataagtaaaagcattaatacagtactgaaaggtgccctcaacatttatgataaattggcaacagcatgttcttgggaagagcccagaacacgtcaacttartgctgacccaaaggctaactattttttaatttataaagtaataaagcagctaaaaatgcattgatacaattatcacacttagt

SEQ ID NO: 496321 - DNA, 233 bp, Homo sapiens
gcttcccacagcagctccgcggattccttgctaaccccctctgggaacaaagggcttggagaaggtccacagtcctttttggagartgggatcaaagtaagagccacatctgtcacaagaaatgcgggaacagcctcttgccaggagagatggggaaactcttagtccctggctgggtttgatacttaatggctggagtgcttttcatggctgttgggtcagtggctgctgat

SEQ ID NO: 496322 - DNA, 426 bp, Homo sapiens
agccagttaataagaattgagtatcccaaagtcaatgaggaaaaaaaaataacttaaattttaaaatatagtcaatgagaagaggactaaagagaagcmgactagatcattcgcccatggaaagtgaagacttgccaatacaatgtgcctttttagtgttttcctttaattgttacaaatctgtgatttgttatatttgacccagtggaagtcctgcaagtcacactgacctattaatagaaacccagactccaaacaaccaagaaacagagctcaggcctgcttcatttctctacttgcacctcaagagcagcagtgacctttgcctatcatccgacaacaatgtggatggcatcatatttctaccaacatctctgtttggtgtgtgaagttatttccaaaaagcttcattcatttaatcctcca

SEQ ID NO: 496323 - DNA, 426 bp, Homo sapiens
agccagttaataagaattgagtatcccaaagtcaatgaggaaaaaaaaataacttaaattttaaaatatagtcaatgagaagaggactaaagagaagcagactagatcattcgcccatggaaagtgaagacttgccaatacaatgtgcctttttagtgttttccttyaattgttacaaatctgtgatttgttatatttgacccagtggaagtcctgcaagtcacactgacctattaatagaaacccagactccaaacaaccaagaaacagagctcaggcctgcttcatttctctacttgcacctcaagagcagcagtgacctttgcctatcatccgacaacaatgtggatggcatcatatttctaccaacatctctgtttggtgtgtgaagttatttccaaaaagcttcattcatttaatcctcca

SEQ ID NO: 496324 - DNA, 531 bp, Homo sapiens
ggggagcatactatatcagtttccgtctttctctctcttgctctgatttatttttatatcactaactgcactagagtagtggggatacggaactaaaaatgaatgtttatgaaagatgacaaaataattttagataattacatatttatttcaccaataaaacccagaaatatagttggaatattagagaacaaaaaagtgaattcaagaggatactgacccaaggccaaactttaagccatagagactcaattatattctctttggctagagttaatcttatttacccraatagaaattggaaatgcttacttgaaatattcttacttaatctgatagcttttgacttgcctgtggaccacaccaaattggttgggaatgcagaaaagctgtactcagtttgcagctcctgagcattgggaacagacacccagacataagcagaaccccatgtatgaagtagaaatgtgtaaaaagaaaagatttattatcaattttttaatgtctttttgaaaaatgaaatttggcaac

SEQ ID NO: 496325 - DNA, 647 bp, Homo sapiens
gctactatttcttgtcatactgtatttagcttccatgcagcctggaggaactgaattatttcctatccttctcagagggcattactgctatattgagtgcatcagcccatattattactcmcagtagtttaattcttcactggactgcacatttttgatttcccctgtcaaaagtttcccagttctcccagattactaaaaagcatctttttagtaatcattccctaatatatatgtaaactgcatcaaaaccaaattatatttcctttattagttttatagaattctgatccaataacataagctgtatcattttagtagtagtttctggagcaatatctataaattttaattatatgtaaaaattaaaataattatagaacttttcatatatattttagacacaaatctacaacaatgctataactcatttgttcatttttttttctgaacgccttctatgcgttcagacatgagcctgtgtcctgggacatgaaatgaggacaatatggtccctgaattatagatttcttagtctactgaagatttaaatatttgcaaaaaatgtggtaaatgcaataatgatgcaagtgagagaaactctatgtatacaacatactaccatatgtcacctcatcttagtgcct

SEQ ID NO: 496326 - DNA, 647 bp, Homo sapiens
gctactatttcttgtcatactgtatttagcttccatgcagcctggaggaactgaattatttcctatccttctcagagggcattactgctatattgagtgcatcagcccatattattactcacagtagtttaattcttcactggactgcamatttttgatttcccctgtcaaaagtttcccagttctcccagattactaaaaagcatctttttagtaatcattccctaatatatatgtaaactgcatcaaaaccaaattatatttcctttattagttttatagaattctgatccaataacataagctgtatcattttagtagtagtttctggagcaatatctataaattttaattatatgtaaaaattaaaataattatagaacttttcatatatattttagacacaaatctacaacaatgctataactcatttgttcatttttttttctgaacgccttctatgcgttcagacatgagcctgtgtcctgggacatgaaatgaggacaatatggtccctgaattatagatttcttagtctactgaagatttaaatatttgcaaaaaatgtggtaaatgcaataatgatgcaagtgagagaaactctatgtatacaacatactaccatatgtcacctcatcttagtgcct

SEQ ID NO: 496327 - DNA, 446 bp, Homo sapiens
ctgccttattaggtaggccctctgagtgagccaacacataatctgaaaatgcagaaacacagatttctttccttatcatggcataargaaaggtgttttaccataacagctcacagcttggcaaaaaggtgacaggggaatcagatgtccatgtacattccttaatttaacaacctaggtaaggctgtctcaaaaattatcttgcttaactcccctgaaatgcacatactggtcctacacatttctacagcccagcacttcaccagctgaggagagtgatgccaccctggaccttcaagcaaaccccaaagttctgtcaatgtttctcttgggttaggggagggagcagaggttacctcctatgtgtggggtgtgtgggtaggaaatatgaaatgccatcatactctttaggaggctgacaactctacttccacagcactctgcta

SEQ ID NO: 496328 - DNA, 594 bp, Homo sapiens
tgtctagtttcaaactgatgtaattcacatagtagcatctcaatacattttgttttaaatttaatgaagtcatgtgaaaatgttccagtgctgttaagaggctgttatataattttaagtctgagatgttgaaggaaggaagaataagaactggaataacaaaacatgagtataatgtcattaaggttcactataacatggtcagcaggcactgaagagaaacagtaacgataaaaagagcttgtccaataaaactttgtctggttttctcagtgctcacattgtgctctggcatcacacttccacttcatgmtcaggacatgtccttatatccatattgtgcttcccacgttaaaatgtactttatcatatcttattgtgcaaatagagtcaatctcaggacctatgattatctctctagagtacagaaactatttttggactgcctcttttcctaaattttcagctccagccttgtgtttacccatggtgtacttagatggatataataataagcatcactgagtttcagaatctggaacctcctaataccagtgctacctattcctaaaaggggccactgatgatctggaa

SEQ ID NO: 496329 - DNA, 506 bp, Homo sapiens
tgagaaataggaacaatgtgcataaagcacttarttcagtccgtggcacttactcagagctcaccaaaaaggagccattattattatcttgattatcactcttagacactcgagctcacaaggatgcataacctcagaaaatgttggtcccctttgtgagaattcctacaaataatattcttcacccactcacttagaatcagtcagttcacacgatagcactttcatgtaatgtgaattctctacaagagggttgaaccaaggaagtaacaatcgatggcttttagtctcgcaaaaggtactgcacaggtgccttctaaagactcacttttgctctgtatatttaaaaggtaattgatcctctttaatagccctggaggttgatgaccactttctctgtacttctcaattattttcactgcctctaacaatatagcagccccaactctaacgcccgatttgtacctggatctttataatggtttgctttcccgtatggttcacag

SEQ ID NO: 496330 - DNA, 592 bp, Homo sapiens
ttcctaaagtatttcatggctttactctaggatatttattttcaaataaaaataagatatgctcacacatagcacatcctgagtatattccactaaacactagttttaggtgttttgttaagtattactctaagaagaaggctccatgataaaacagatttgttaatcaaaatcaaatcacttacttgatggcaggacttcacagaatttttaatatgctaaaattcattgagaatcttcaagagaattgggatacaagttgcagaatttagcaaacgtatttggtcacagagtctattcacgtgacacagaaaagagaacaatattttaaagcatacttttggaaataccaatctaatataatgctactatggtacagaggccaaaatagaagaccaaagatggatrtgacttgcccaagacagattaggtagaatcagtgctaggtgcctgtgactgaaatccagctttctcatctgagtccagtgtctttccgctcgacttcaatgtctctgttacttttcctgtcacttactacttccctttaaggaaagaaaacacaagaactaattctctgtaaaaggtataaaag

SEQ ID NO: 496331 - DNA, 301 bp, Homo sapiens
atcccaaacagcaaacatactatcccttctctcatatgaaacacacaaaaaatgacagaaatgaacaaaaatggtaattatagaaattaaatacacaactaggaagasaactgaataggagtcatctgctgtgagattttttttttgtttttcattaatacagaaaaaattggaggggtatagaaagaggaggagtggtaactgaaggaaagtgtggaagaaaccacaattacaaagagaaagaagggactatgacttggaaggaaagaatctgtctagaaaaagctctaaatgttttttc

SEQ ID NO: 496332 - DNA, 468 bp, Homo sapiens
attctcccctctcttaccattggatgtttatcacagtactcttcgtattagcaaatgtatgattttttaaaattttctcttgtgatagacacatcataaagatctagcaaacacacacacacacacacacacacacacacacacacactrttggttctgtttctctggggaattctaatactgacatgactactaataaaaatatgtaatttttaaatatcataaataataattattataaatatataactatgaaaggcctaaatactgcaaaggttagttctatgacaatgaatacaaaaggatatgtatctagattggtggtaagaaaaacttcattgagcaaataatacttatgatctgaggataaattaagaggtaactaggtaaaggagggtgaggaaaaaaaatttcagacagagaataatatgtgcaaatactgtgtgatatgaaaaaggtgtcgtgttc

SEQ ID NO: 496333 - DNA, 511 bp, Homo sapiens
cagctaatgtgattatctgggcagttactaatttcagctattaaagtaatactactgtgaatatttttctgcctgtgtttgcttttacatgtatatgcatttctgttaacacattcttttttggtggaatttcttgttttatgctatgactatgttcagcttaatagaaaatgtcaaacatttttygggaggtaattatgctaatttattcactcacaagcagtgtatgaaaatgcctgttgctctatattcctaccaccactggtattgttagtcttcataattattttatttctgtgggggtgtaaacatgttattgtgtttcaatgagccttttcatgattagtaatggtattgtgcaaattttcacatttagtgatcaatcagatatgctttcagtgaaatgttgtacaagtttttcaaatatcttctcccatattaaggttcccttttcttattcttaacaatgttttgatgtagtaaatttgatcaaccattttccttaagcttg

SEQ ID NO: 496334 - DNA, 511 bp, Homo sapiens
cagctaatgtgattatctgggcagttactaatttcagctattaaagtaatactactgtgaatatttttctgcctgtgtttgcttttacatgtatatgcatttctgttaacacattcttttttggtggaatttcttgttttatgctatgactatgttcagcttaatagaaaatgtcaaacatttttcgggaggtaattatgctaatttattcaytcacaagcagtgtatgaaaatgcctgttgctctatattcctaccaccactggtattgttagtcttcataattattttatttctgtgggggtgtaaacatgttattgtgtttcaatgagccttttcatgattagtaatggtattgtgcaaattttcacatttagtgatcaatcagatatgctttcagtgaaatgttgtacaagtttttcaaatatcttctcccatattaaggttcccttttcttattcttaacaatgttttgatgtagtaaatttgatcaaccattttccttaagcttg

SEQ ID NO: 496335 - DNA, 621 bp, Homo sapiens
gccagcttgcccaaggtgaccatatccagattcatctgttcttaaatttatcaaatactttctttctctgtcaccctttttccagtttctcagtctagaaaccataattgtctttggcataccgttcactttaatcctttcacaaagttttagggattttttttccttttacaaagagattcttacatcgctttctgtttctccattactactgcttccattttatttttattccttatctcttctcatctacattgcttatacagtgaacagcttacttatctgattctagtrtatttgtcattccatttaatttattctactcataatattaaaattattatcttaatatacttagttctttatgtctgcctcctgcttgataataacctcctgataacctcctcattaaatccaaacatctttctcttttttgagaaccttcatattgtggcttcacattacttaatatcttttttatggagattaattgtcccgttgtctcctgtgcatgcctttattattattttcaactctctgtgttactcaggtgggatcttttgtctctggcccttattagtttaccatcttcctcttcgggtatataatatctacctgctc

SEQ ID NO: 496336 - DNA, 168 bp, Homo sapiens
ctggtgacatgcatgacagagcctcagtctcatggggctgatcacaaaggctgcgggctccatactggcaattctctcccagagctgaagctgctggttcccctgacgtcagtgtgctgtgtttcagtgctcggtgccctgyggcgtgggacagaggacccgtgatgt

SEQ ID NO: 496337 - DNA, 556 bp, Homo sapiens
ctgccctgcgctcctcatcctcagctccacctcctggtgtgccattttttgccacagctctcatcacagtttaatgcccacctcagatctaattatttgcacaaatcctccctcctactctagcagtggtccttaacatgctggtcagagaactagttgcattagaattaccccaaaagctgcattttaaatagaaattctcaaatactactcccagaaattgtaaatttagtagttctggggtggggcccaataaatctgtattttaaaaatatattcccaagtacaaattgtataatcattgkgaagggtttatcaaaattttaaatgcatgaaccctttgagattcagcaatcccactgctggaacatctaggcttgcaaaactttggcaaggtatatggataaggggctgggcgcggtggctcatgcctgtaatcctagcattttggaaggccgagtcaggcagatcacctgaggtcaaaagttcgtgatcagcctggccaacatggcgaaaccccgtctctactaaaaatacaaaaattagttgggcgtag

SEQ ID NO: 496338 - DNA, 485 bp, Homo sapiens
tttaggaggtgattattgatcctgacatcaatacggcttttagggtcacccagattgctccatcactgacagggggcartcagattattctcactattcctggattttttgtgatttacataaagagactctataggtgatgctacacattttaattttgttacttctaaccaagaataatttaaccaacagtcatacgcaatgttcctcataaaaatgaatagaaagcttatcaaataactgactataataggtttattaattgatatggtttggctgtgtccccacccaaatctcaccttgagttgtaataatccccatgtgtcaagggcaggagcaggtggaggtaactgaatcatgggggaggtgttcccccatgctattctcatgatagtgagtgagttctcatgagattggatggttttataagcatctggcatttcccctgccgaaactcattctctctcctgctgccctgtaaagag

SEQ ID NO: 496339 - DNA, 550 bp, Homo sapiens
ctgagtttgaggataaggagatgggataggggcaggrcaaagggaagtagtcacattccaagaaactaaaattgaaatcataaaccttggatgctggaagataataaacttgagggtaagcccctttcagcttaaaattctatatacagccaaactatgtgattcatgtgggaaaagaaacaaaaattagacatgtaaacatctataaaaattcctgtgtatctttttattagttactggaaaatgtgcttcagtaacgtaagggaataaaccatgaatgagaaagtcatgaccaggatccgtaaaacagggaatccagtccagagaagtggcaaagggaagtcccaggatgacagctatgcatcaggcctggccagcaacccgtccaagattggatcaaaagaatggaaggctctgtggggggagggacagcataaatgcattcttggatgtgtttgtacatttgggactaaactctgatgcatttttgatgaaagaattttcattgtctactcatgagaaaagaaaatcaagtaaaggcaacaaataa

SEQ ID NO: 496340 - DNA, 633 bp, Homo sapiens
ctggttttcacaattgaataaaatttggatttagggcatggaggtgggtgcagaggtacaacagacagaaagagtagcacagaagggagcaagatttaatagcgatgttactgctaagcagggccagtttgagagggactttgagagctggagagagagccaggactccatgctggaaggtttctaaatggaagaagtaataccatggagatgcaaactacctcctttaaatctgtgagaattctagcatgttcactgttccaaaaaataaaaaatgagagaaaaaataacttaaatataagtttataaaacataaacataactttataaaagtacagcatatccaagagttgaaggacactttcaaaaggtgtaacaattggaatgctctataggcattccattcaagggcgttttgtcctagggggtttcctttagttaatttgaggtgagatcgaggtggctgtgacttcattgcccagtttgcttctggttcttgtacgtctctctrgtggtatgagcatctttttgtgcttattgagcttctcagttttaaagatattttacaataaagttacattttacatctatagtcttcgttactatatatgcatgattcttttagacattgat

SEQ ID NO: 496341 - DNA, 633 bp, Homo sapiens
ctggttttcacaattgaataaaatttggatttagggcatggaggtgggtgcagaggtacaacagacagaaagagtagcacagaagggagcaagatttaatagcgatgttactgctaagcagggccagtttgagagggactttgagagctggagagagagccaggactccatgctggaaggtttctaaatggaagaagtaataccatggagatgcaaactacctcctttaaatctgtgagaattctagcatgttcactgttccaaaaaataaaaaatgagagaaaaaataacttaaatataagtttataaaacataaacataactttataaaagtacagcatatccaagagttgaaggacactttcaaaaggtgtaacaattggaatgctctataggcattccattcaagggcgttttgtcctagggggtttcctttagttaatttgaggtgagatcgaggtggctgtgacttcattgcccagtttgcttctggttcttgtacgtctctctggtggtatgagcatctttttgtgcttattgagcttctcagttttaaagatattttacaataaagttacattttacatctatagtcttcgttaytatatatgcatgattcttttagacattgat

SEQ ID NO: 496342 - DNA, 519 bp, Homo sapiens
ctgcatgagtgagcttggaagtggatcatcccctartcaagccttgaaatgactacagccctggacaacacctggattgcaaccttgtgggaggccctgagtcagaggcacacagctaagtcaggccctgactgatgactcatagccattgtgaaatattaatgtttatcattgtaagctattaagctttgggagtaatttgttacacagtgcgatataactaatacagagtaaatcactgttctttttttttttttttttttggaggtactactttttctttggtctctctccatcttgccaacaaagattgacatcccttatataaggaatagtcaacgtctacccctgccaaaaaatatcacccttgatttggagaataaagaataagatggcagggtggatagcagcagagtatagaaacgtatcacagaagaatgttgagacctcttccttttcagggaagacagttccacagtggagtagctctattttcctatctgccttccccatattttc

SEQ ID NO: 496343 - DNA, 587 bp, Homo sapiens
cagtcacctcatctataaaatggaattattatcaattttgatgattttaggaatttaataaaatattaagtttgaaagtttggtcaaaatcaactataacaaacatagatgattaaattttatttttggtgtgaaatttcatttatatgtagaatctgaaaaagtctgactcatagaaacagagtagactggtggtgaccaggggtttggttcatgagtggtggaagtgggagttgttgaccaattactcatcttaaactttcagttataagatgagtaagttctggagattacagttaagtattgtacagttgaaatctgcgaagagggtaggtattaagtagtctctccaacccgcatcaaatggtaactacataaagtgatgtatatgttaattagctttattgcagtaataatttcacaatcatgcatatatatcaaacattatgttgtatgccttaatatttataatttttatttctatattatacctcaataaagctggtaggacaacaaacaaacaaaacraacaaacaaaacaccacaaatactgatccaaaatcaagtgcgtgactgagcactgtccc

SEQ ID NO: 496344 - DNA, 569 bp, Homo sapiens
caaatttctcttaacctgttatacatcttgttggctttgcttgggaagaagcaggggatatcccaacaaaagtctagtattgagcacaggattaactaactttcaacaagacatttcagtagaaggaaattaactttgyttattaagtagatgatgggttttttgtaagcatatttttaaaatttgaagccttatttgtccatgatacttaaagatgaaatgaagaccttagatcatttagggttatttgtttctgtgtttgcaggtttccattggaagaggggagcacttctggcaatacgtaaagctattaaccatcgcatgaaaaagatgattaggttttcagctttcaagtgagaatgctgctactttaatgcccaaatgtatcaacatcggcaaaatcagatttagctgaacaattataatagaatgggctgcgctgccacccatgcttttagatgtccagggtaaaaataatttcccctcaagcctaattttcgaattgtttgttttattttccccataaaatagggaagaactgtgtgactcaatttcaacattcctgtatt

SEQ ID NO: 496345 - DNA, 569 bp, Homo sapiens
caaatttctcttaacctgttatacatcttgttggctttgcttgggaagaagcaggggatatcccaacaaaagtctagtattgagcacaggattaactaactttcaacaagacatttcagtagaaggaaattaactttgcttattaagtagatgatgggttttttgtaagcatatttttaaaatttgaagccttatttgtccatgatacttaaagatgaaatgaagaccttagatcatttagggttatttgtttctgtgtttgcaggtttccattggaagaggggagcacttctggcaatasgtaaagctattaaccatcgcatgaaaaagatgattaggttttcagctttcaagtgagaatgctgctactttaatgcccaaatgtatcaacatcggcaaaatcagatttagctgaacaattataatagaatgggctgcgctgccacccatgcttttagatgtccagggtaaaaataatttcccctcaagcctaattttcgaattgtttgttttattttccccataaaatagggaagaactgtgtgactcaatttcaacattcctgtatt

SEQ ID NO: 496346 - DNA, 569 bp, Homo sapiens
caaatttctcttaacctgttatacatcttgttggctttgcttgggaagaagcaggggatatcccaacaaaagtctagtattgagcacaggattaactaactttcaacaagacatttcagtagaaggaaattaactttgcttattaagtagatgatgggttttttgtaagcatatttttaaaatttgaagccttatttgtccatgatacttaaagatgaaatgaagaccttagatcatttagggttatttgtttctgtgtttgcaggtttccattggaagaggggagcacttctggcaatacstaaagctattaaccatcgcatgaaaaagatgattaggttttcagctttcaagtgagaatgctgctactttaatgcccaaatgtatcaacatcggcaaaatcagatttagctgaacaattataatagaatgggctgcgctgccacccatgcttttagatgtccagggtaaaaataatttcccctcaagcctaattttcgaattgtttgttttattttccccataaaatagggaagaactgtgtgactcaatttcaacattcctgtatt

SEQ ID NO: 496347 - DNA, 666 bp, Homo sapiens
tttgcttattgtgtgatagaaaaagaaaaaagaaaggattaagaacagtctctccctccccccacttggctaccttccttctaattcttccaacattaatacaatgttgctgacgatgttatgttgttactaggttgtgtcaaatcaagagaataattggacattaagattcatctctgaatacattaattagatgatttctttatttctgtcttaagttactaatgatttcctctccataactggggaaactctgtaagaactcattatccttttgggattctatagctactttaagatgatttttggtaacagtagactgtatattaagttcccaaaattaaaatttcaaatagcaagggtactatttagatctaaaatgtgtgcccttcagggagttatttcttttcagatgaaatatgttctatgacaatggtacctatggagagacatgaggaccccatsaatactaatatgttcatcaagatgattgttgataaggcacattttctctaaatgctgagattctgcaaatatctcctctacaagtggaaaacatggccataattctcagctcagagatgatgtgccttactgcactagcaactcattgcgagtaggttatcaatttttctgtgttcctagtgccttgcctagtgcagatta

SEQ ID NO: 496348 - DNA, 573 bp, Homo sapiens
tattttgcgcagtgctaacatgataaactcacatgctttcaaaatcaagtaataagaatagcaggccatgcactctaccaaacacttcatatgtattgggacatttattagggtgttcatatatcgatagattttagaccacagaaattacaaagaaaattttattttttccaagaaacatgatttgtcacatatacaaggatttccaatcctttacaatgcagtagtcagatatgagcattttcatactaactagaaactgaacctttatattcctctgttcttaargttcatctgagacaaggaaataatagcacctaccagttggggttgctgataaaagaacatgagcatctagaacaatgcctgacatacatgaggtgctccgtaagtggttaggatccagccctcaaatggttcccagatgctaatgttatacagagattatattgacactttaagagataataataacttatatttgtagtatatgaattgccttctgcagttgtgctaagtgctttacacagatttttctaacaatccccgcaccaactctatgaagaagatgca

SEQ ID NO: 496349 - DNA, 605 bp, Homo sapiens
tagcctcccgagtagctgggactaaaggccagcacccctaagcccagctttttcttttcgctttctttttttataaaaarttttttaattgtgtaaaatgaactgaattaatgagtcctttagtttacccggaggcagtgagtcttccaaagtcattaatctgcatctgcagaaaacaaaccagcattgattcatatgtaacactgtttcctaacagaatggagagagggggcaggaggtgtggctgtgggggagggagggaacccttgtctgtgtctctctgctgtgtattccagaagcgctgagtcaaaagctgggtttatttaatatctatatagagttccccaatttataacagtgcatgaaaatacctctttccccatgtccaagagtctagtattttaacaagtacactagtacttgacacacctaatttataataattctaccttgtagtatttcctatagtggataatcattgccgttttagtggttattttactgtaggaaaaggtgagtcagttaaaattaaatttagggagtaaggcagatcatgaggttaattaataacttttgtttaaaaagggaaaagttggaggtagatg

SEQ ID NO: 496350 - DNA, 605 bp, Homo sapiens
tagcctcccgagtagctgggactaaaggccagcacccctaagcccagctttttcttttcgctttctttttttataaaaagttttttaattgtgtaaaatgaactgaattaatgagtcctttagtttacccggaggcagtgagtcttccaaagtcattaatctgcatctgcagaaaacaaaccagcattgattcatatgtaacactgtttcctaacagaatggagagagggggcaggaggtgtggctgtgggggagggagggaacccttgtctgtgtctctctgctgtgtattccagaagcgctgagtcaaaagctgggtttatttaatatctatatagagttccccaatttataacagtgcatgaaaatacctctttccccatgtccaagagtctagtattttaacaagtacactagtacttgacacacctaatttataataattctaccttgtagtatytcctatagtggataatcattgccgttttagtggttattttactgtaggaaaaggtgagtcagttaaaattaaatttagggagtaaggcagatcatgaggttaattaataacttttgtttaaaaagggaaaagttggaggtagatg

SEQ ID NO: 496351 - DNA, 361 bp, Homo sapiens
gattttaattgagtctatatttgttcccttgtgcacttgtcctcttcaactgccaggcagtctagctctggcaataggctctggacagtgaggagttttgtagcaggaggatttgggggtaaaagacatttttgtatttcatcaaaagttcatcctcgggacaaactcagtggggatgttcagtttgtaaatttttgctctttgtataagttaacaaatggtgacacataatgttacatgctggtagataacttaaaaattaactgttaaaatataagtatatagcttctccaaattacayataattctaaaaaaaagttaactccctgccactttcagtgtcatattaataaactaacag

SEQ ID NO: 496352 - DNA, 573 bp, Homo sapiens
cctgtgcctcatcctcagcctcatacactggtgagggaagggctgcatgaccttcctcaagaacatctcaaaacctggggtggccccattgttttcttggagagcctgtctccctgtatataaacctgccctactggacaracgtagaaaacgcaattgaacagatacactctgggaggcccgggcccctcctggcccctcccaacgggggcccttttaccctctcccatggcaggaggcagggcaatttgagggatgagcagggaggctcacagcctcccctggctctactccatctgctctgaagctgagcagtggggacagtggtcaaggaggcacctggggcaaattgcagcccccttcccacccaccaggtgcccaaaagagagacaggaataattccagtacctctgccacagggttgctgagaggcatacataagataatactttaaaacttgtaagagcaggctcagcaaacatcctgctacctggggctcacggcatcctgtggaccatcccccaaccgcctgacacactgcttccctagagctgaggttgagtccacactggg

SEQ ID NO: 496353 - DNA, 470 bp, Homo sapiens
tgagggccaggcttctggctgccaccgagcctcctcccagatctcccactggactcccaggcatcaaacgatggcgtgcctgggcgcccaatccaccagccccctgttgcccgaggatcctcccattagccacagccagggttctgggagaatgccaccaccagtgacccatggtgtgcacaacacagttttatgacaagaacttccccagttttgtcaccctcttcagggacagggccgcctggggtttttgtgtgacggaggaacccagcacatttgcctacagtgtcaatgtgactcataaaacatttgttttatgttaaaacaaatgcaggcagaaaaaacaaaatagaaatgctacacaagtttttactacaaaatatattttgagcataactgacaacctagtgctgctcccgccagccccgtgaggtgtcamtctcttctctccttggagacatttcactgga

SEQ ID NO: 496354 - DNA, 611 bp, Homo sapiens
aatggcaattaggctcccctaaaaaaggcaggcaacaagacaaaaagtaaatctaagcaaaatacagtgtctttcttatgcctcaaactaaaatctattaaaataataaagtcacctgaaatctaaatggcaactttcaaaaaatttcaaatagacattcatttgtaatctaacaacctaataatattgtttctcctggtcccattcctcctctaggtcaccctcacatcaaaatctcattcccttctaccttttcatctccagaatcctcctcccctgtccaccttcagttctctcctcttctgagtatcaatcccaccaaacctcttcatacctacacttcaaccctgtaagcctgaaactaacactccacagagccatcattcatgtcctatcttttgccctgttctgaggaaacatgaagacaaaacagaaaacttgtcattttccaaggcattacacctgcaggctatcttcctccacgaagacayagagctagaaaggcctgcaagcaaccaacatgaccagtaggttcgttaggcctaactaatcccaccctgaaactgtgaaattgtgagaacgagccaccgtgtgggacagtgtcctttcac

SEQ ID NO: 496355 - DNA, 506 bp, Homo sapiens
ttctgagactgcttcctcctcttggccctgccctacagatcatgaaggagaagggcaagaggtcatctgagcacatccagcgcatcgaccgggacrtaagcgggacattaaggaagcatatgttcttcagggatcgatacggaaccaagtaagcctatgggagccacagggtcccagcagagatggggtgaatgagagggatgggggcttccccggagcagaagccagggtcacccaggagggatgacacagctgccaagagctctcccggcccagggagcagccggcaccatgaaccgagcacctccctggttccaagccctgggccagactggaacatgtggggccagaacccaggaggatcctgaggagatggaaggcagcaaacaaaatcatgcacaatggtgaagggtgctctccctgacccatggggacccatggtaggacccacgggagggtggcaggatagagggcccatgagccccccccaggcaacagtgacagca

SEQ ID NO: 496356 - DNA, 506 bp, Homo sapiens
ttctgagactgcttcctcctcttggccctgccctacagatcatgaaggagaagggcaagaggtcatctgagcacatccagcgcatcgaccgggacataagcgggacattaaggaagcatatrttcttcagggatcgatacggaaccaagtaagcctatgggagccacagggtcccagcagagatggggtgaatgagagggatgggggcttccccggagcagaagccagggtcacccaggagggatgacacagctgccaagagctctcccggcccagggagcagccggcaccatgaaccgagcacctccctggttccaagccctgggccagactggaacatgtggggccagaacccaggaggatcctgaggagatggaaggcagcaaacaaaatcatgcacaatggtgaagggtgctctccctgacccatggggacccatggtaggacccacgggagggtggcaggatagagggcccatgagccccccccaggcaacagtgacagca

SEQ ID NO: 496357 - DNA, 506 bp, Homo sapiens
ttctgagactgcttcctcctcttggccctgccctacagatcatgaaggagaagggcaagaggtcatctgagcacatccagcgcatcgaccgggacataagcgggacattaaggaagcatatgttcttcagggatcgatacggaaccaagtaagcctaygggagccacagggtcccagcagagatggggtgaatgagagggatgggggcttccccggagcagaagccagggtcacccaggagggatgacacagctgccaagagctctcccggcccagggagcagccggcaccatgaaccgagcacctccctggttccaagccctgggccagactggaacatgtggggccagaacccaggaggatcctgaggagatggaaggcagcaaacaaaatcatgcacaatggtgaagggtgctctccctgacccatggggacccatggtaggacccacgggagggtggcaggatagagggcccatgagccccccccaggcaacagtgacagca

SEQ ID NO: 496358 - DNA, 639 bp, Homo sapiens
tgggtttctgttgcatttctggtaacacacagttgtgaaaagccagtgttggccgttccccaggacagtctggggtagaggaggtcaggatttaactacttgagggtccggggaacagatgtggccacagtccttcctgactcactgttttcccttccacagtccccgtcttctcttcactgatgcacatagatgcctgaccagaggagagatttagttttcgtccaaggattatctgttatgttgcagttctgaaattcccataacgtttaggctagaacacaagtgatttcattatctccaatgtgtatggcttgatagaaatagattccattatgtagcaccttaaatccagataaaacataaggaatttctattccatgtttgtatgatcaatgttaataatctaagaaaatctaaaaagaagctacttcctatattacagtatgaaataaatatgctgaatgatttgttttggggggtggaatggaaaggtataagactgaggagggtgcctgtgggaacagtgataggaatcctttcttaagggttgggttttacatacgtcttttaaaatagatgatatcattartaaattatctgtgggcatcatgaaaaaagtgtataacgtacaacttt

SEQ ID NO: 496359 - DNA, 527 bp, Homo sapiens
ctgctcggtagtctgcttccggaagcacaaaggtgagccccgtccccgccagccctcgtaccactgcgcacggggcagcccccacgtccagcctccgtcttgggggcgtggacccttggcstgcgcttcctttcccgcctcgggtctccgcgggttctgcaggaaccttgcttcctctgacttggtccctggtgtctctgtgtgtcggacagttccctctgttgtccctgcctgtaatcgctctcagggttttggtcagtagcctttcttctaccccgcttctccttctgcgtgttactcttttttgcttagaaatagtttccgattgcttttcccaccgaggtctaccctagcagtttcttcctcagtattctgatgtagcccctcaccatttggctgaaactgcgctaactttaacagtattttcactcgtgtaaataatgtcttgttagaaacaaagaggtaagtccatgtacaatacaaggagacgtccttgatttgttaagagaaaaaaagaaccaagtaag

SEQ ID NO: 496360 - DNA, 401 bp, Homo sapiens
gttggacactgtaaaacatactagtaaggcccaacctggtgttgcttgtctgaaaaataatttaaaagaatctgtttcactttatctgttactcacttaaagggaaaattttcattctgacttcttgtttaagagttcatgyagcaatttggagagtttagggattttctaaattagtatgaaggagttcaagttctccacaattttttccctaattaaataaattgaatttttatccttttgtcaatgcccactatgcagagatctgtaaagtgctgtgctacaaaattaccaccctttatgaatattggcaggtaaagacttactcttccttaggcattataatgtgcctttattgcaggggaaatgtagtatacccacaaaatcattactttgttgtt

SEQ ID NO: 496361 - DNA, 634 bp, Homo sapiens
tgtgttatgttaacctcccttgtgtaactgtattccttggctaagatatctggtaaccattatttacaaataatatactcctttgtacaagactagaatattctccacagggacattttaaatgccgactccagttaaatgtgttaggctttgaattcagtgttggccttataatgaaaattacagactttttttaagaagttatgtttatagattaacaaatctggcaacattttagtctgttactttgtccacatttaattagaaaaagtttgtgtcttttatattctacttatataatcttcagtattttctttggtgctatttttattaaacartaatttttggggcatctaatacgtaccaagcaacatgatgaatcatttttctaaatgtcagtttattatggaagaattataaatttaaaaatgtgagcatacatgaaacatttacctcattggaaagatgtttcttatttaggtagtcttttctcatttttttccattttatacaaagtggtaatactacaaaattatcaatcctttaaagtaacagtttgtgcattttaacttataagataaatgcattttgcacaaaagcacattttatgaatttcagagatagtaagatagat

SEQ ID NO: 496362 - DNA, 634 bp, Homo sapiens
tgtgttatgttaacctcccttgtgtaactgtattccttggctaagatatctggtaaccattatttacaaataatatactcctttgtacaagactagaatattctccacagggacattttaaatgccgactccagttaaatgtgttaggctttgaattcagtgttggccttataatgaaaattacagactttttttaagaagttatgtttatagattaacaaatctggcaacattttagtctgttactttgtccacatttaattagaaaaagtttgtgtcttttatattctacttatataatcttcagtattttctttggtgctatttttattaaacaataatttttkgggcatctaatacgtaccaagcaacatgatgaatcatttttctaaatgtcagtttattatggaagaattataaatttaaaaatgtgagcatacatgaaacatttacctcattggaaagatgtttcttatttaggtagtcttttctcatttttttccattttatacaaagtggtaatactacaaaattatcaatcctttaaagtaacagtttgtgcattttaacttataagataaatgcattttgcacaaaagcacattttatgaatttcagagatagtaagatagat

SEQ ID NO: 496363 - DNA, 178 bp, Homo sapiens
gttcccttttcctgccttgaataagaatttaaatgcctagagctgcaactaccttgcaaccacaaggcaacaygcatgaggacaaaagttaacacaataaggacagatggaggaaccacatcgttgagatgccgaactatcccagcaatacctccagaattcttgtgagaaaaattag

SEQ ID NO: 496364 - DNA, 557 bp, Homo sapiens
actattttacccaatacagagcttccttcaatggaatagagattagtttgttaatagctgtgaatttaggtaattgtaggaataaagaaagcaatgaaagttmttttgcatatatctacacatatacataatttacataatctaagtgtgtgtatgtatgtgtatatgctactatacatatgttttcctcttaagtgaactgctaatttactatggtatattgaagatataaacattattttgctatcttcttaaaccctttgagacaactaaaaatactttaaaatagatctgcaaggatgaagagaactggaggaaacaaacaaaatattggaatcttgtaagaatatagataggtgggaactgtcttagtggcactaagcaagctgaatcccaactttgtggttggtaaagctgcaaaccttatttatacacagtttcctcagataaattagcaataccaagtaccgcaggaaatgaaaatgacagtgattactaaaatatggaggcctgttgaaaattatgtgcaaagtcaataaattgccagatcccctccc

SEQ ID NO: 496365 - DNA, 623 bp, Homo sapiens
gaaaaaggcaaattaaaaatggtagaaaaactttgctacatttttacttaccttagcactccccctttcccagctcagcagtggtgctgaagacataagcccatgatttcagaaattctggctcttagaatagctgaaaattattaccagttattgtaagagccagaatttctaaaaaattctatcctctaataaagttttcaataactgagaattattttcaggattttaaaagcagattttagcaagcagaaaacataattagaaaatttgaaggtaagtcaattgtaattatccacgttgttgagtaaaaatttaaaaaaattgacaaaaatgaacaagccttatgagatctgtggaatgccatcaaaatacgctatctgcataacagtagtcccagaagaggagagagaaaaaaagaaggaaaatatttgaaaaataayaagcaaaatctccccaaatttgataaaatacattaatttacacatccaatgaacgttctgaaggacacaaaaacatctgcactgagcccaattataaagaaactttttacaaagcaagaatcctgaaaacagagagaaacaacttgccctatttaaaaaaaaaaacttcaatacaaataa

SEQ ID NO: 496366 - DNA, 651 bp, Homo sapiens
ctcctcacatccttgtttccacatcaccctataaattctttaacattgtgttgtaagtaatagctatttgtctttccagatagaatatgaacttcagaggtcagacatctacgttatttatagttaacccctatttaatagcacagtgctagacatgtacgttccaaataaaaaaacccgtgttccaatagtgagtggttatttagtgtgtcaatagcctactaaaatggcaagatgataataagaaacttaatgtgttccaatgatatttaaaatttctgcagacaaaaatgagatagacaggatatctaaaagtgagttagttagaatgtgtctcatatatatgaaaaatgctgtcttcctcattatcctcttaaaaaactcgtraaatattgtaaaattaaataggtacaccctttaaatgtttccaagttaattctttcactagggaatgttgcctaagaatactaacaaacattgtccagtcatttaaaaaattatttattttatttccatttcagttaataactggaaaagtggcctattagcaacaagcatacctctttatactgtaccttatctgattgcactttgcagatactgcattttttataaatggaaggttcgtggtagcccggtgttaagcaagtc

SEQ ID NO: 496367 - DNA, 623 bp, Homo sapiens
ctagtttgattttttttttgtcaagtgcatgtcattgatatcttgtttatggtctttataatttggggcaatactgagaatatctcaacccaatcacaagttctctctagattttcttactgaaaattacataaacacagcaaatacaatatgaatatacaataagaagcaactacaattttagcattggaatgaataacttcacatcaaaatattaaactgaaggagaagttggttgactgttgactgacactctataacttttccagattgtgttatatatatatatattcattaggctactaataaatctaatgacatttcttaccaacataagaaaattactttcatttctccatgaatcattgaaacatactacttgcccaaccttatttagtaacttaaccattccaactctgcactactgcaacaacactatttgctgttttgcagtcttatcatgcactcttttgaatctataactttgtctatgctatgtcctctakacagaatgtgcttttacactttgctatggagataaactcctttttttttttttttttttttttaccatctcatctttctctataaattcttcagttcccaccttctcacagctcacc

SEQ ID NO: 496368 - DNA, 479 bp, Homo sapiens
gcaaacacctgggctggcactggaagtggacaagtgggaagtacaccaggaagccactgagcaggaagaggaagatgtttaggaactctgtctggggatggttgatgacgggcgccagcaccagtagagataagccaggagtgtgatggcgggaatgaaggtgggaacctgcagtgggcacggtggggatttggcccctgagacccagatgatgaagggggaacaggaggtagtgtgtggtccacaggctctgtccctcctgcctgccttcctgttgtttacacctgcaggcagctcctctcttccactccctgccattaaacttcgcctggaccaggrgagccacctgctgggctactggaggctctccagggagcagagccttgggagccagcattctgctctctgtgctgtgtgaacccaagtgtgtgcacggattctctctgcatctgttttccctccgagtcctcaagaggaga

SEQ ID NO: 496369 - DNA, 552 bp, Homo sapiens
gctaacgtatgtgaacaaaactccaagaacaatttagtattaaagtgtccarctctctggggatacagattgattcatgaaggagctaactcaggtctgctggcctgcaagctgtctcagaaaggttttgaggggacgctgaagccagatgcttcttcccctgctggcaggtaagcgccaggtggccccgacctttgttcactgtggtatcccaagcagtttgaatagtacctggcatgagatgggcactcgataaatatatgtggaatggaaatactttagttgctgtagttttgtttctttctttttttttcaaagcagattcaaaatggtgtgcattattaacttgtcctcaaacattaaagcaaactccagtgggaaggacttacacagactcaggaaaccccacagacagggctggcatcataggcatgagctcaggagggccccacacttagtgtaactcaatgctgttgccatcctgaaatgcttaataattcttgaacaaggagcaccgcgttttcattttgtacggggtcggcacgttatgca

SEQ ID NO: 496370 - DNA, 614 bp, Homo sapiens
tttttgattatggattgtaaagtagtggttcaaaacttaacattctttgggtttaggatttcagccttacaagatgaaaagagttgtggaaatgaatggtgatgatggttgcacatcattaatgtattaaaacacttgtaagtatacactgaattgtattcttaaaaacgattaagatggtaaagtttatgctacatgtattataccacagtaaaaaaataattggaaagaaacagctcacattcccttaaatgaacagtcttttctactgaattatacaaattgaggaagtatagattaaaatatatcacctcaaaggttttccaaactagactccctctcagatgctccactgctaaaacaaactaacagcaactttttcagttcacaggaaaaagaaaaaaaggtctaacggaaaaaacttcctcaaagttaarattttaaacaccaaacaaacattagtagaaaaacttagaaacagctatggtgcagctttaaaggtcaagatttttatatgttcctggatgtgtttttatattccatatatataattcagccatatttcctactgataaaaaccgtaagatgacctaggacctgaacaagttttacaa

SEQ ID NO: 496371 - DNA, 557 bp, Homo sapiens
ttgaatctcctctgacaatatggacattgaatataatctataacagataaaaacggaaacagattaatagcatrgtacttgaaacggacattaaaaaatcttaagtttctatgcagtcattcaaaaaatataagtaataacatctgataagcaaaaattcccatatccttataactacccagttttacttgtctaaacttagtaaagagttaaaaaaaaaaaaagtctgctggtacatgacttccaattttcttctagctttgaatcaaatgtgtgaaggaaaaaaaacaaaagataaatccttagtacaaaagagtaagcagaggaaaaacgttatttcttttttgcctttatgttttcatttataatggatacatactttatatagcagactagttaggaagtaataatacatgacgttaaaatacattttaaaatacaggctcatctattaaaattttttatttcatcaaatggaaaactgtcaagaaatagtttacttatctttaaagtgctattttctcttaaaagtcccaacagatggaagaagtgattaa

SEQ ID NO: 496372 - DNA, 650 bp, Homo sapiens
tgttttattacatcataccttgattctttccactttgcattrtattgctttcaaccaccattcccttaagcagatccacatctattctgcacatcccaaaaagctgagcaagctgcatatagcttcttgtttcaaagctccagtctcttaaatcccacacgaagttcaagtccccttttagagaaagccattggttctcattcatatcatttgcagagcacaactaaatgagattctgagtctcggtgagaactcagtttatcacctccactatgtaggacatttcttccttccatgaccagaagaggaataacctaccacaatttagcatataaaaataattcatacatttggtaatcataagaaaatgataattttcatcaaaaacataagaaaatatttcccttaaaactgttctagagggaggaagcatattctgagttggctcttgctagttttatttgaagtaaaaataaaattttctaagtgttcagggggaaaatagtgatagtttctcatggcctggaataatcagaaagcatataggtaggctgtcacgggtgaagatttattgaaggaaaaatgtcctagacaagaaacatcaagaaaagaaagaggggctttaaaaaagtgaggaacttaaagcaaac

SEQ ID NO: 496373 - DNA, 626 bp, Homo sapiens
ttgtatttttagtagagactgggtttcgccatgttggcccgggtagtttcgaactcctgacttcaagtgatccacccacctcagcctcccaaagtgctgggattacaggtacgagccactgtgtccagccagttcattccttcttattgctgaacgtattctattgtwtggatgtaccaaacgtgtaactctcaccactcactgccttacacataatacatcatctagatgaagtgggtgaggaagaaaaaggaaccatgtagcttcacatcagtccttgcagcaggtcacttctacacagtcttccttttcctttgacctttgctgatcatctactacactgaatcatctgaaactgccagtgtttagcaattttttacctacaaaaacagcaaactgtcaccagcacactactctaaaagagaaagaaaatgacgaaagaagaaaccttgaaataatcagagaggaagcaagaacacagtaggccaaaatataggtaaatacaataggatttcttactgctattaagttttctaaattatctttcgtagttgagcaaaaattgtaaaaatgtctgattgggttctaaagacatttagagaatacattcaagataattatataaa

SEQ ID NO: 496374 - DNA, 486 bp, Homo sapiens
agcttgctaaatataactagtattatttacttgttactatactattaaaagtcatatcttcaacactcctcaaatagtagaaatacaaaggaagctcactttaaattgcatttttctgcttcagggatcagctctgattagttgtgttttatgcaattctttccatctctaattctgtttccatgtttctttcatctagtagaaaattaaatgtgatgctttgctaggttcccaaggattactaacttacactacattcaaatatgttagtctcatacctgctgccctaaaaaatacagcaaaggtacattcatagcctaggtaaaacgagcaccaaaattaagtcatagcagcaaacatagaagctaaaaattgttctatgagacrtcagataagaaattaaatgaattccatcattttaagaaattagaaagcatgtctttaaagaattctttgatgtgagatgtttaatttgtatgcaaaagt

SEQ ID NO: 496375 - DNA, 549 bp, Homo sapiens
cactcacactcaagttctcaatcaactgtcattcatggttctctttcactccctatagtctaataaagcatttggccctgctgtttcttttgaaatatttcttgcatctgccactgcctctccatctttcctctctctaaacaatccaggccctcataccaagaaggatactactaagctactcagagtttttagcactaccactaaatggaactgaaaatgcaattcttatgaattcatctggcaataatcattacttttgtggcgactgtgagaaaaacccgacttagtgatgtaactagcttgcctaacataaaggttgtactcatgcaatcagagctaacagacmggaaaaccaaggcatagccatattgagctactggtctccaaagtttcaggccagggtcctgcacattttatggtgaacatttcattgaaaataattcattaaaagagcttaattgaaacatccaacagtactgccacctgtacactttggaaccttccttacatttttaactattgcaacgtattctggacacatcttta

SEQ ID NO: 496376 - DNA, 445 bp, Homo sapiens
aaggaaacaatatagcaagtttacattagtaaggttcctcttcgcagcctatctttatcaaacatcatatttaagggaaaatcaaatttatcatctaaaccatgcccccattctggtaagctgaaacaagtataaagattgagcacttatacaccaggcaatcatctaggcattcacaatacagaatgaacctgaaaataagatcgctctctcttctttaaacttacattttagtggaggtcattagacaagtaagttaatcaacaagatgaaggaaaactttacttgatgaatgggttaaaaaggggaggggcagggggagacayagaagaaaatccaaaaataaggcagagaggatggagggggtataataaatgatcacatccttatactcagaatgctccttaactcctgtgttccagttgacaataattctctaaattct

SEQ ID NO: 496377 - DNA, 578 bp, Homo sapiens
tgaaaccagttctgcagaaacctgggggtagaatattccaaacagagtaaaatagaagaacaaagactcagaggcaggctcaatcttggcaataggctcaacaatcagaccaaaaaaaaagcagaataatgaggggatagagtgataggagatgaaatgggagaggggttcrgattacatgaattttataggacttggtgatttagattttattctagtatgttgagaatccacagatcattttaagcaaaaaaaaatggcatgatctcatttatattttaatagtcagttgggcttctctgtataatatggatttttatggggcaagaaggaagggagttgttacaggtacttgagaggaaaggtgatgtttgcttgactaggtcagtagcaatagagttgggaaaatgcaagcagatcagactcactttttgatctttagttcacttaaagtgttgacacattggagcataaaagataaatattttacttttcatccctaaaaggcagaaaaatataggggcaaaaaatggaatgttggaagtttaggaaatgtggtttttgacttgaccttaaac

SEQ ID NO: 496378 - DNA, 446 bp, Homo sapiens
gtgtctgattatctgtccacttatggatgtattaaagtaacctgctagtgtccctagcttactgcaaagagcaaatgtaattcctctctagagaatgttaacatttccagggcctcaaattactttcagttttcatatataatgcctagtactyaatttaaaaatacatgtaaataaatacatgatgagatatgatgaagaaattattgaaaaaaatgaggatgatgtggtttggcactgtgtccctgcccaaatctcatctctaattgtaatctccacgtgttgaaggagggacttggtgggaggtaattggatcatgggggtggtttcctccatgctattcccatgatagtgagggagatgtcatgagatctgatggttttaaaagtggcagttttgtccagtgcaatggttcacacctgtaatcccagcacttagggaggctg

SEQ ID NO: 496379 - DNA, 446 bp, Homo sapiens
gtgtctgattatctgtccacttatggatgtattaaagtaacctgctagtgtccctagcttactgcaaagagcaaatgtaattcctctctagagaatgttaacatttccagggcctcaaattactttcagttttcatatataatgcctagtacttaatttaaaaatacatgtaaataaatacatgaygagatatgatgaagaaattattgaaaaaaatgaggatgatgtggtttggcactgtgtccctgcccaaatctcatctctaattgtaatctccacgtgttgaaggagggacttggtgggaggtaattggatcatgggggtggtttcctccatgctattcccatgatagtgagggagatgtcatgagatctgatggttttaaaagtggcagttttgtccagtgcaatggttcacacctgtaatcccagcacttagggaggctg

SEQ ID NO: 496380 - DNA, 446 bp, Homo sapiens
gtgtctgattatctgtccacttatggatgtattaaagtaacctgctagtgtccctagcttactgcaaagagcaaatgtaattcctctctagagaatgttaacatttccagggcctcaaattactttcagttttcatatataatgcctagtacttaatttaaaaatacatgtaaataaatacatgatgagatatgatgaagaaattattgaaaaaaatgaggatgatgtggtttggcactgtgtccctgcccaaatctcatctctaattgtaatctccacrtgttgaaggagggacttggtgggaggtaattggatcatgggggtggtttcctccatgctattcccatgatagtgagggagatgtcatgagatctgatggttttaaaagtggcagttttgtccagtgcaatggttcacacctgtaatcccagcacttagggaggctg

SEQ ID NO: 496381 - DNA, 446 bp, Homo sapiens
gtgtctgattatctgtccacttatggatgtattaaagtaacctgctagtgtccctagcttactgcaaagagcaaatgtaattcctctctagagaatgttaacatttccagggcctcaaattactttcagttttcatatataatgcctagtacttaatttaaaaatacatgtaaataaatacatgatgagatatgatgaagaaattattgaaaaaaatgaggatgatgtggtttggcactgtgtccctgcccaaatctcatctctaattgtaatctccacgtgttgaaggagggacttggtgggaggtaattggatcatgggggtggtttcctccatgctattcccrtgatagtgagggagatgtcatgagatctgatggttttaaaagtggcagttttgtccagtgcaatggttcacacctgtaatcccagcacttagggaggctg

SEQ ID NO: 496382 - DNA, 445 bp, Homo sapiens
tacctagggccccacctcataccaaagacacttaaaaagtagaagggcatttccgttatcaccaaatgaaatgacccacccctttcctagaaccaatctttattccaaaaacatcacgataaaacaatgcacaaaataaaatgattgattcagggtgacaaaactgaacaatgcttcattctcaaactttaaaactgagatgcctccatcagttattatgcrcaaaacagcccacacattatgaccaatgaggattgcaccgcagttttcgattcaagatttacatcagttcaacagcatatccctcaaagtctggttaaatgtgagatttatcaatgtaataatagaagcagaaataaattacagtgtagaggccaaaacgaagagataaggcttccaaacagattagaaaagggggcaagtcaatggagtcctgagataaggg

SEQ ID NO: 496383 - DNA, 541 bp, Homo sapiens
aaacatatgattgagttggacacaaatcaaatatttaaaacaatgaaatgtgtcataaaataatataggaataggaaatattttgtatctgaaaaccctgaagtctgacatttttgaaaaaccagcatgtaatggttagttttatgggtcaacttgactgagtaatggggtacccacacatttacatataaacattatatttggatgtgtctttcaggatgttaataagtagactgagtaaagcagattgtcctcttctccaatgtgggtaggcatcatccagtccttcagtgcctgagtagaacaaaacggccaaggaagggaagattccctttttctctctgactgctaaactggtacattggtcttcccttgaccccagactgggacttacaccattgctgctactgtctctcaggccttagaacttgggctggaactacaccaccacttccctctaccccatggctttcctgggttgccagctcttaggtggmagatcatgggacttctctgcctccataatcaaataagccaattc

SEQ ID NO: 496384 - DNA, 570 bp, Homo sapiens
gaatatttgaaaagcataataactttcttgtcttcttatgcagagtgtactgaacatactttatttcttccctaatgactctgagtcatcattattgaattacagaatgctgcatgtagaaaagaatgaagggcaatgttctcccagactattgagacatccagagagacttaatgcatacattcccccctgtattaggcaactctacactgtagctctttttaatcttgccattcttttacctcatactttattattatctataactccctacttggctgggagctgtctgcttctagtagtctctactatttctactgtcttatcttctataaacataatatacagtaaagcatgttagaaataactagataattatacttctcaaataaaattttaagtttaccatctaaatgcctttgsgctgctctgctactgagtaggatgtgtgaatattatgtcaaatagttccccactccgcatatcctgccttctccttggaaatcatcagtgagacgtgatgcacacagcttggaacactgaggaagggagtacagaatttgacttatg

SEQ ID NO: 496385 - DNA, 540 bp, Homo sapiens
tgtcttcttatgcagagtgtactgaacatactttatttcttccctaatgactctgagtcatcattattgaattacagaatgctgcatgtagaaaagaatgaagggcaatgttctcccagactattgagacatccagagagacttaatgcatacattcccccctgtattaggcaactctacactgtagctctttttaatcttgccattcttttacctcatactttattattatctataactccctacttggctgggagctgtctgcttctagtagtctctactatttctactgtcttatcttctataaacataatatacagtaaagcatgttagaaataactagataattatacttctcaaataaaattttaagtttaccatctaaatgcctttgcsctgctctgctactgagtaggatgtgtgaatattatgtcaaatagttccccactccgcatatcctgccttctccttggaaatcatcagtgagacgtgatgcacacagcttggaacactgaggaagggagtacagaatttgactta

SEQ ID NO: 496386 - DNA, 505 bp, Homo sapiens
gctttcagacatgtagctaaaacccatggagtgttgaaactctttattatttccccatttcatggagtatctagtgttataggcagagagagcagttaatgccagccctaaggtaagagcaggccttgtaagcttgaagaacagaaaggatttcagtataaacagaggggtttgagtgaggataagaacagaaatagatgaggcaactttttttcatactgttctctcctctggttccatttaattggcccgaggataaacatctgagccagaaacagagttttgttctaggatttttcaaacaagaccttgtgagacttatattctccaatgatgatgctgtaagacagaagatacaggagtttcaggcaactatgtctgtctaatgggaaccatattgaggaacatgaagaagctgcacgtcacatatcataggyaatcttattaacccaaagaaatcggtattttctagaaaagtttcaatcctcagttgaattccctaaag

SEQ ID NO: 496387 - DNA, 612 bp, Homo sapiens
aagtttaacattagatcttttaagtagttaataattttgaaagcacaaaatttccatcagatgacatggaaagcacagaagtagggtatcaagaggcaaatattgaagtctgctgaatttgactgaagatagaagaatagagacagttctagatcagtgctttccaacagaattttttggggtaatgaaaatgtcccacatctgtattgtccaatagaagaaccatttgccacatatagctattaaacactttaaagtatggctaatgttaacragaaaattaattttaaattttatttactgtgaaccaatttaactttaaatagccacatgtgataagtggctcccccactgggcagtgcaagtatggagtatagcatacacagaagaggtacagatggagaactggtattgggagatgctcagcagccatgtgacagctaagaccactgggtatctcaagttaatattgcagaataaatgtttaacctgggaatgggaagatgtcaaaaacaagtttcccttactttacaattgtatctggactttctcatcttcggaggtggtcttagtgtggggtaatagactggaagagttaccaaggttgttatt

SEQ ID NO: 496388 - DNA, 612 bp, Homo sapiens
aagtttaacattagatcttttaagtagttaataattttgaaagcacaaaatttccatcagatgacatggaaagcacagaagtagggtatcaagaggcaaatattgaagtctgctgaatttgactgaagatagaagaatagagacagttctagatcagtgctttccaacagaattttttggggtaatgaaaatgtcccacatctgtattgtccaatagaagaaccatttgccacatatagctattaaacactttaaagtatggctaatgttaacgagaaaattarttttaaattttatttactgtgaaccaatttaactttaaatagccacatgtgataagtggctcccccactgggcagtgcaagtatggagtatagcatacacagaagaggtacagatggagaactggtattgggagatgctcagcagccatgtgacagctaagaccactgggtatctcaagttaatattgcagaataaatgtttaacctgggaatgggaagatgtcaaaaacaagtttcccttactttacaattgtatctggactttctcatcttcggaggtggtcttagtgtggggtaatagactggaagagttaccaaggttgttatt

SEQ ID NO: 496389 - DNA, 665 bp, Homo sapiens
gaaataaaatttgaaagcataaatacagatcaataaacttttcccaatctgtttaacagaaagaaaacagattttttaaaaagtttctcagtgaaatgcaggacaataataaaagggttaatatttscatcaacagagatgtagagggagagaatggaaagcgggactaatcaagtgtttgaaggaataaaggtcaaaaactttcctaatttggtgaaagtcataatcatacagacttaagaagcagaataaagcccatttaggagaaatttaaagaaatatgtgccaacatacgtcataattagtcttctgaaactaaaaaagaaaagaaaagaaaaaaaagtcttgaaagcagacagagggaaagaacatattacttacaggggacactgatttgaatgacagtagacattaatgcctaacatattttaggtactgaaagaaaagaactgtcaactccaaagtctgtatcctctcagataaatgaaaactaagggaattagatgctagcaaatctacctttaaagaatgtctaaaaaaattaagcagaaaggaagcggtaaaagaagctttgaaattcagaaagatcattgatgggtatactttgggttaagtataatggattatcctttccacgagtttttaaaatcttatttgatggttga

SEQ ID NO: 496390 - DNA, 466 bp, Homo sapiens
atcccaccagctctgagctttctgctctttgtcctccgtgactcagttccaatccttgcccattctctctgggtgttccaaagtcacccttgcgggtgccttcagagataccaagtgggagaattggaccagaactgtgctaaggaagcgctggggacccgcctgcgagccgccatctggaaaaggtggtcggtgtgggctttggggtaatggccagatctgagaggaggccaggaggggactgaggagcacagctctgatattttacagtgacccccatcaggatgtggagtccatttccccactcccgaaatctgggccrgcttcatgcctcgctttcattgacagaatgtggtccttgtagcttctacattcaccctctaagatcagggccccaacaccatggtggcccaccatgctaccaaggaggagaaaccacgtggagaaagagatcctgcacccagct

SEQ ID NO: 496391 - DNA, 664 bp, Homo sapiens
taaaagcaaagcaataggtgttttggatcctcacagccctccttgtgagaattaaatgcattaacactaatgaaggcatgttgtgcatggctgtgtgtggggtcatgctctgtggactatggatggacatcagagctgtgcatgggcacacagggtgcttttgagagacagcagcatcgccctgcctgccccagcttcagagagctccacagtttcatagaaatgtcctccccgtcccacctacagctctctgtgggctgtgacgtccttgtgtgatcctgcaatcaaacaaggacacygagggaactctgcaaacatctcatcagaagagagaggtgaggacagaacatgtgacctggggatgccgggcctggcaatgttcccatccctgacccggcgagtccctctcctgttcccaggggcccagcctgaccagggaaatgacactgagtgaaattgatgttggcacctttgcctctgatcacgccaggatgctgaggagctggggagcccagtgagatccaagcagcactgcacggagactcagggggcctgggtctgaattttaattctgatgtgaactcatgccatgtcccccaaggagtcatttccactcagggccaccatgtcccccctgtaagacagggcttggcctggatgccag

SEQ ID NO: 496392 - DNA, 664 bp, Homo sapiens
taaaagcaaagcaataggtgttttggatcctcacagccctccttgtgagaattaaatgcattaacactaatgaaggcatgttgtgcatggctgtgtgtggggtcatgctctgtggactatggatggacatcagagctgtgcatgggcacacagggtgcttttgagagacagcagcatcgccctgcctgccccagcttcagagagctccacagtttcatagaaatgtcctccccgtcccacctacagctctctgtgggctgtgacgtccttgtgtgatcctgcaatcaaacaaggacaccgagggaactctgcaaacatctcatcagaagagagaggtgaggacagaacatgtgacctggggatgccgggcctggcaatgttcccatccctgacccggcgagtccctctcctgttcccaggggcccagcctgaccagggaaatracactgagtgaaattgatgttggcacctttgcctctgatcacgccaggatgctgaggagctggggagcccagtgagatccaagcagcactgcacggagactcagggggcctgggtctgaattttaattctgatgtgaactcatgccatgtcccccaaggagtcatttccactcagggccaccatgtcccccctgtaagacagggcttggcctggatgccag

SEQ ID NO: 496393 - DNA, 495 bp, Homo sapiens
gatggtacatgtatgcaggtgtttacagtactaacgattttactaagatttgaaaaaaatcaaaattaaaagagagaagaaagaagcacctgctatgagccagggacacaggtggcttccatctaaccaccactcttttcccttcttatgttaacaactttcacccttcttccctaccaygtggctgtagtgtgagggctgccaatcctgatgtctcaagccctggagtaggcacatgatgcaggcctggccaatcagggtgctccatgctgttgcccaccacgactggtcagggatggtctgagctgggccaatcagaatccttccctgggactttctaagtgaaacttccagaaaagttctttctactcagaaatcaggcagctatagcttgtgagccctgaacttctcagtgtcactcatgactcatgaagtatgaacccagaggtgggcacagctgagcgacttggaggaaagagggcctggcaatatcaa

SEQ ID NO: 496394 - DNA, 642 bp, Homo sapiens
ctgggccgcctgtttcgccctcatcccagaatctggctctggggctgtgacatcgcaggctggagtatgaatgctgcrtgacctttgcttgtggagtcaaaaccagttccctgagagaggccaccaacctccttgaatgtcccccgtccctctcaccacccctggtgctacaggttggggtatgaagggtgagacagctttgggaagtcttatgctaataatagaaagatccagagctctggaacctgccagatcttggcttatgtctatgtggcagagtccagttacagaacctttctgagcgttggttttctcctattaaaatggggaaaatgatagtggtttccttgagatgaactcaggcctcttaactaagatgatgaatgtaaagtgcttcatggatagaaagttccatggttagtatggaataaaggcagcagcaagactagaagtttggagagaagtgaggtttggtgagagcagcccaccctgagcccctgctccctctgaccccgggtccatcctgctcaggtgtgtggtccaccaggggtaaggagcacaggtttccacccctggcacccattaagaggccgtggtaatcagtccaggacacggtggtggggccaagactaggagatggtg

SEQ ID NO: 496395 - DNA, 642 bp, Homo sapiens
ctgggccgcctgtttcgccctcatcccagaatctggctctggggctgtgacatcgcaggctggagtatgaatgctgcgtgacctttgcttgtggagtcaaaaccagttccctgagagaggccaccaacctccttgaatgtcccccgtccctctcaccacccctggtgctacaggttggggtatgaagggtgagacagctttgggaagtcttatgctaataatagaaagatccagagctctggaacctgccagatcttggyttatgtctatgtggcagagtccagttacagaacctttctgagcgttggttttctcctattaaaatggggaaaatgatagtggtttccttgagatgaactcaggcctcttaactaagatgatgaatgtaaagtgcttcatggatagaaagttccatggttagtatggaataaaggcagcagcaagactagaagtttggagagaagtgaggtttggtgagagcagcccaccctgagcccctgctccctctgaccccgggtccatcctgctcaggtgtgtggtccaccaggggtaaggagcacaggtttccacccctggcacccattaagaggccgtggtaatcagtccaggacacggtggtggggccaagactaggagatggtg

SEQ ID NO: 496396 - DNA, 509 bp, Homo sapiens
cagacaacccccgccctccaatctaacacaggtcttcttggttccacctccaaaacagctccacartccccattcttctcaccacccccatcgtcagcaccagaatcctagcgaaaaagccacctcctctcccctcagcatcatttttcttctggacagggaacagtttccacataggatggaaaagaaaacgaagtccaccaaaggaggtatttctccctgggagatcgtctctgccctggagtcttacagcagcagcctccaaactagactctcagccggcacacctacctccttccatccacgctcctctgcactgccaggaggggtgcagaaaactgccaggctggcaatgtcacttcagggccttcttatcggcattaggatagagccctggagcctggatgtggctcactaatgaggccagtgcaggccctgtgcattcttctcctgttccctcttcctttcctcttcttgccattaggactccaaccataggagtccccctc

SEQ ID NO: 496397 - DNA, 509 bp, Homo sapiens
cagacaacccccgccctccaatctaacacaggtcttcttggttccacctccaaaacagctccacaatccccattcttctcaccacccccatcgtcagcaccagaatcctagcgaaaaagccacctcctctcccctcagcatcatttttcttctggacagggaacagtttccacataggatggaaaagaaaacgaagtccaccaaaggaggtatttctccctgggagatcgtctctgccctggagtcttacagcagcagcctccaaactagactctcagccggcacacctacctccttccatccacgctcctctgcactgccaggaggggtgcagaaaactgccaggctggcaatgtcacttcagggccttcttatcggcattaggatagagccctggagcctggatgtggctcactaatgaggccagtgcaggccctgtgcattcttcycctgttccctcttcctttcctcttcttgccattaggactccaaccataggagtccccctc

SEQ ID NO: 496398 - DNA, 594 bp, Homo sapiens
tttgtgtttcaaaaaagggccttgcacctgcttccaatgcctcctctgtggtccacctcacacctgggaaggggcatcttcagaatggccactctgagcctctccagctacaaccctcttctcaccagacttcccagggcctccatgacttttattttgtttttgtttttgttttgagttggagtctcactctgtcatccaggctggagttcagtggtgcaatcttggctcactgcaacctccgcttccaggttcaagtgattctcctgcttcagcctcccaagtagctgggattacaggcatgtgccaccacacccagctaattttttgtatttttagtagagatagggtttcaccatgttggccaggctggtctccaactcctgacctcaagtgatctgcccacctcagcctcccaaagtgctgggtttacaggtgtgagccaccgcgcccagtatgacttttattttccatcctccaactcgctcaaccctggagtgataacagcctgagggtctccrtgatcttccgggggtgctgggaggtgcctcatggtgaatgctgaaactccaaggggaaggggagaatgaggaa

SEQ ID NO: 496399 - DNA, 597 bp, Homo sapiens
acctagggtgaatgtctagtgccagcgggtggggtggggtagactctaccaatcacatcgttttccttgctctcagcaggacgagtagatgaaaagtacctacacagagctccagggttcttccgtgtgccaggcatgcccttgtgcctgaaataacggcatgtcttggggatggaggtccgaaagcgtggattctcgccccaaccgaggcactgactagcttgggactttgagcacctccctttcccctctctggacctcagttttcccatctgtaaaatgagatccatttcagttctgatgttaacaaggttaaagtgaccttcagggtcatgacccatggggcccagcctggaaagaactgtcccccaaagaagcccagagccccccaaagatgcagagcctaagccggggggggggggsgttccccagagcctccaaaatgatccatcctgctgtgccattgtgtaaatgtctttcttctgtgggctcccaggacaggtctgagaggttagaaggcaaatcgtttgaggaacataagaggagcaaactggggctcagaggggttgcagaataacccacagttccagttccaca

SEQ ID NO: 496400 - DNA, 554 bp, Homo sapiens
atgcaccacgatggagattagaaggcgccgataggtacaggcacctcagccactcyagggctagactggcagtgtccaggagaagctggtgggtgggccaggcgcaggcatcaggcagtggattgacaggagtgaaggcctgggggaaagggtgtgtggtttgtgaggaaaccacaagttgttaagcccttccatggagtcagtatttccagaatttccaccatgtctctggttcagtgacaaaaagagctatgtgttccccattgaggagtattttatcctgtatgcaatggagtgccattgaaggaatttgaacaggaagcacatggttagaaatacctttaattaagtagattgggctaatgactggcggctgggaggcgataagggcctggcagatggaatctagatcagagatggggcaggggtggcttgccagtttaaggaatacttagcaggtgaacccagcaggactaatttgttagttcagaaaatatttattgaatgccaacggtggaccagacgccgtgttatgcaccagagctggaacaggc

SEQ ID NO: 496401 - DNA, 667 bp, Homo sapiens
ctgtgaaccacggtacccaggatgggctgtccccactggaagctggaagaggtggggaacgattctgctcagagcctccgagggagcagggccctgctgaggtcatatgtcccatcctcagcatggcaatagagtctatttcggtggttctaagccactcagcatgtgactttgttactgcaaatcccaggagtgaattccatccctgactttattctccaataacactggaactttacacacacacacagtccccaatatactaaacatatttctttgtgtctaacgtcaatgcttcttgctgtcgcaatgagactactttagcttcagcagggtctctcatcaccsctgtgattctcctaacagaatatgggactaggtatgatatttgctattaaacccataacataatatatatataatatacccattttataactgaggataatgtttatttatttattgctcccacttaagcaaaacacttcgtgcgtgaccctggtgctatgtcacttgctttcaccaaaaggtccttgggcctcttcccatttgataaatgaggaaactgaggctagctaggaggggtaactgggaggacaaccatcaattggtaggagagtctcacatttgggcacccatgccagtgacctgtcttctgcctctcccc

SEQ ID NO: 496402 - DNA, 667 bp, Homo sapiens
ctgtgaaccacggtacccaggatgggctgtccccactggaagctggaagaggtggggaacgattctgctcagagcctccgagggagcagggccctgctgaggtcatatgtcccatcctcagcatggcaatagagtctatttcggtggttctaagccactcagcatgtgactttgttactgcaaatcccaggagtgaattccatccctgactttattctccaataacactggaactttacacacacacacagtccccaatatactaaacatatttctttgtgtctaacgtcaatgcttcttgctgtcgcaatgagactactttagcttcagcagggtctctcatcaccgctgtgattctcctaacagaatatgggactaggtatgatatttgctattaaacccataacataatatatatataatatacccattttataactgaggataakgtttatttatttattgctcccacttaagcaaaacacttcgtgcgtgaccctggtgctatgtcacttgctttcaccaaaaggtccttgggcctcttcccatttgataaatgaggaaactgaggctagctaggaggggtaactgggaggacaaccatcaattggtaggagagtctcacatttgggcacccatgccagtgacctgtcttctgcctctcccc

SEQ ID NO: 496403 - DNA, 573 bp, Homo sapiens
ataatgtttatttatttattgctcccacttaagcaaaacacttcgtgcgtgaccctggtgctatgtcacttgctttcaccaaaaggtccttgggcctcttcccatttgataaatgaggaaactgaggctagctaggaggggtaactgggaggacaaccatcaattggtaggagagtctcacatttgggcacccatgccagtgacctgtcttctgcctctcccctcgtgggctgtggttaatctacccctaagtcaggccctacccggaaggcaggtgagcacttgacaggagataagtgggtggtccagagtcttccctggggcaggagctggggctaagcctgcagaacctctgccctagccagagatagaggtgctgagttgtggctacaccgtacaccccagcctcccctacagcactttcctggcaaatgtggtctcggccatcaagctgccaatggtaagctgctaggscccctgagagtaggtgtctgccagtgtctgcccagcccctaacatggggcacccctcccgctactcctggccaaagtggtatgagcaccctcagagcag

SEQ ID NO: 496404 - DNA, 631 bp, Homo sapiens
tcagactgatactttaagcaggtagatccctaaacaaaccagatttccagtctacctgagcagcataataaggaagtcccctctgctttaatccttacaagaaaagtaacctagtgttaactaattagccttttctctatcttacaaaaaccactattctaccatttgccccgtgggagcyctcattccgttttgcagagtggaggctgcccagattcatgaatcacaaataaaagccaattcgatctttaaccaaatttgttaaaattctgtcttttggctgggtgtggtggctcacgcctgtgagtgaatcccagcactttgggaggctgaggtgggtggatcacctgaggtcaggagtttgagaccaccctggccaacatggtgaaaccttgtctctaatacaaatacaaaaattagccaggtgtggtggcgggcatctgtaatcccagatactcaggaggctgaggcaggagaatcgcttgaaactgggaggcggaggttgcgattagctgagattgcgccactgcactccagcctgggcgacagagtgagactccatctcaaaaataaaataaaaaaaaaataaaattctgacttgacagatgtcttcactcacctgagcaagtgg

SEQ ID NO: 496405 - DNA, 633 bp, Homo sapiens
tcagactgatactttaagcaggtagatccctaaacaaaccagatttccagtctacctgagcagcataataaggaagtcccctctgctttaatccttacaagaaaagtaacctagtgttaactaattagccttttctctatcttacaaaaaccactattctaccatttgccccgtgggagccctcattccgttttgcagagtggaggctgcccagattcatgaatcacaaataaaagccaattcgatctttaaccaaatttgttaaaattctgtcttttggctgggtgtggtggctcacgcctgtgagtgaatcccagcactttgggaggctgaggtgggtggatcacctgaggtcaggagtttgagaccaccctggccaacatggtgaaaccttgtctctaatacaaatacaaaaattagccaggtgtggtggcgggcayctgtaatcccagatactcaggaggctgaggcaggagaatcgcttgaaactgggaggcggaggttgcgattagctgagattgcgccactgcactccagcctgggcgacagagtgagactccatctcaaaaataaaataaaaaaaaaataaaattctgacttgacagatgtcttcactcacctgagcaagtggca

SEQ ID NO: 496406 - DNA, 633 bp, Homo sapiens
tcagactgatactttaagcaggtagatccctaaacaaaccagatttccagtctacctgagcagcataataaggaagtcccctctgctttaatccttacaagaaaagtaacctagtgttaactaattagccttttctctatcttacaaaaaccactattctaccatttgccccgtgggagccctcattccgttttgcagagtggaggctgcccagattcatgaatcacaaataaaagccaattcgatctttaaccaaatttgttaaaattctgtcttttggctgggtgtggtggctcacgcctgtgagtgaatcccagcactttgggaggctgaggtgggtggatcacctgaggtcaggagtttgagaccaccctggccaacatggtgaaaccttgtctctaatacaaatacaaaaattagccaggtgtggtggcgggcatctgtaatcccagatactcaggaggctgaggcaggagaatcgcttgaaactgggaggcggaggttgcgattagctgagattgcgccactgcactccagcctgggcgacagagtgagactccatctcaaaaataaaataaaawaaaaataaaattctgacttgacagatgtcttcactcacctgagcaagtggca

SEQ ID NO: 496407 - DNA, 627 bp, Homo sapiens
acactggctgaaaagacacagtcatggaatgtttgctacaggcaccctccttgaatgggtaccattgcgacaaagaagcccagcataggaggccacatagaagaagagagagagaatcaggaggaatgaaaagaaaggaggcaggaggatgctgtgtcttgcacagggccatgtyttgtttgactaaaaaaatatgcctatccccaattccagaaatattctcttgttgctttttaattctcagtaaatgctttgtaaaaatcttactgaaatcccctgccttgagtcctctttctcctccccttcctcatgttcactcatgctcacctgtcaacgctcagctttcctgacactttcctcttccagccccacactttcagcctggggacttctacctttatttgtactcaagcacacacacctacacatagccccattttaacgcatgccacaacttgtctttcctaactgaagtcagaccctctagcttatttatctctgcatcctcattgcaggctttgataaaagaaaagagatgcacaaaggcagggaccaatccttgagtgactccagtgtctgcagactctatgaaaaaatgatgcagccaggttacccacgtgcaatgga

SEQ ID NO: 496408 - DNA, 570 bp, Homo sapiens
taactctaggtatacaatgcaacctccttactctaactctaggtgtacaacaaaacttcccaactctaactgcaggcgcacaacacaacccccaactctaggttactatgcaacctcccaattctaactctaggtgtacaatgcaactcccaactctaggtatacaacacagcctctcaactctaactctaggtggacagtgcagcctcccaactctaactctagatgtacagcacagcctaacaactttaattctaggtgtacaatgcaacagacagaggctatggatatcctgccctacatcckctgcccagtgctgtcttctcttcttgatggctaacagcacccttcctcacacttcagcatctctgcagtgtctgcctatcggcttttcccagggcgggtgcttgttcaatccaccttcagagcaccctaagggggctctaacactcccaaggacactcccatccaatgaggattgaggagtggaaattaggaactaaatgcctcagctcctggaggatggatgcattgcatactcctcggagggtcctcaggagagaacaggca

SEQ ID NO: 496409 - DNA, 246 bp, Homo sapiens
ttctcttcttgatggctaacagcacccttcctcacacttcagcatctctgcagtgtctgcctatcggcttttcccagggcgggtgcttgttcaatccaccttcagagcaccctaagggggctctaacactcccaaggacactcccatccaatgaggattgaggagtggaaattaggaactaaawgcctcagctcctggaggatggatgcattgcatactcctcggagggtcctcaggagagaacag

SEQ ID NO: 496410 - DNA, 576 bp, Homo sapiens
tctgcagaaacaaactatctcaaaacttggtggcttacaacagtaacagtgtattttctttcatgattctgtaggctgaacaggtaatccttgttttctgattagaattgactagagcacaaagatgactagaagttggtgctacaggccattgtctggcagctcagttgtgactgctgtccagtcgtcttgatcctcttccatgtggcctctccacgtggctgcttgggcttcctcacagcatggcagcgggcttccaaaatgttgtgttccaagcaggtgaaaccagaagcttcaaatctagccttattagagctacacagtttcgcttctaatacatttctgtttgttccaaacaagtcagaaggccaacccagcttcaaaaaatgcaaaagtgtctctagctcttgatgaggacatggccaggtcacaaagcagcacagcatgtagaatggaacatactgctgtagtcatctctgaaaatgcaatcttagatgctgtgttgaatgttatttcatctagtcytctcacaatcttaaagattaagcagtagaaaggggctctgacacttcccag

SEQ ID NO: 496411 - DNA, 570 bp, Homo sapiens
gtgatgcttttttgttttccctaatcgagcagatgccttggtgctgtaaggatactgctctaaggacagagagcccatctgtaggggacacagcagtgtggatcccaggccaggaatagaggatcttgaaaaatgaagagagcctttctcaaactggaagacttgtatctttattcctgtggcagaaaccagtctctggctttcagatgaaaacagctaaggatctggcgcccaacggcacctattttgaatgagcttatatcatttatggaagctcacaaatcctgaactaacactgggttacttgaaaactaagccacatcatatcggcatgtacagttgagattattcaagaatactaatgtttacctagatattaaccattacattattaatatcattttttattattttgcctttctrcgtacatggcctttgtccttgctagcccgcatttgcctaggggaaaaagtcagaacttttcccagacagaatgcaaggaggaggaagttgatataaagcttttgacaggcagaaacaggaaaggcattaggacaaaggccctgaaag

SEQ ID NO: 496412 - DNA, 591 bp, Homo sapiens
cattcttaagcagaaaatttatttgtccacactcccctgaggaaagaatgctaaagccaatttcattcaaacactaagcattggctcaagaccaaataagaagcattgcagccctggatgatgtagccacagtaagttggaagcaattgatttcaacaaagaaaacgattttgctactggccaaggatggggaatctttctgacctgcacattgtctccacaaataasgtgcctctagttaagcctccctaatcaatggccaaggatgcaattacagttgcagagaagtggaactcaaatggagtgggaataaagaaaggaagattaataaataataggaaagggggagtagagaagcaggagaaaggagatgggagaagccggcaaagatgaaacacagctctgctgagaagcatatatccaagaacaatcaacactataaatttcatggatgctgcatcagttacctattgctgtgaaacgacaactcccagatttagggacttaaaataacacatattcataatctcaccatttctgtggggcaggagtcagagtgcaccttagctcagggtctctcacaaggctgca

SEQ ID NO: 496413 - DNA, 610 bp, Homo sapiens
gccacctcccgtagacttcgcatttcttccgcactctcctctcacgacgggtcttctttgttgtacttaatttcctacgcaataagatttcagcatcaccatcagtcccccaaagactaattcccacagagccgaagttcccaccaarggccgagggttaaggttactaaaatcagcgtttctgaatcctgtctcaagttgtctcaactgggcttccgtagaacggtttcttcgtaagagggccttcagcgacagccgagctcggaaaagaacgggaataagttgtctcttacatttcctcaaatactgtgaatggtctgaggcgcaggtcaggtgtatttaaaaacctttaaacagtattcccccgccccaaaaactggccttgaaggaacaagtgaaactcatcctgcttttcatgtttgctgggtttgcccgttacaccccttcgcccgcacctatctagacaggcagctctcggccaccctccgggtcctgattttgaaaagaggagtggaccaatcagatgtggagcgctgtttggcgtcgcattttgagcctgggctgaaactgcgggtgtgacccccccgtggtggctccgggtgtctgcagt

SEQ ID NO: 496414 - DNA, 610 bp, Homo sapiens
gccacctcccgtagacttcgcatttcttccgcactctcctctcacgacgggtcttctttgttgtacttaatttcctacgcaataagatttcagcatcaccatcagtcccccaaagactaattcccacagagccgaagttcccaccaaaggccgagggttaaggttactaaaatcagcgtttctgaatcctgtctcaagttgtctcaactgggcttccgtagaacggtttcttcgtaagagggccttcagcgacagccgagctcggaaaagaacgggaataagttgtctcttacatttcctcaaatactgtgaatggtctgaggcgcaggtcaggtgtatttaaaaacctttaaacagtattcccccgccccaaaaactggccttgaaggaacaagtgaaactcatcctgcttttcrtgtttgctgggtttgcccgttacaccccttcgcccgcacctatctagacaggcagctctcggccaccctccgggtcctgattttgaaaagaggagtggaccaatcagatgtggagcgctgtttggcgtcgcattttgagcctgggctgaaactgcgggtgtgacccccccgtggtggctccgggtgtctgcagt

SEQ ID NO: 496415 - DNA, 610 bp, Homo sapiens
gccacctcccgtagacttcgcatttcttccgcactctcctctcacgacgggtcttctttgttgtacttaatttcctacgcaataagatttcagcatcaccatcagtcccccaaagactaattcccacagagccgaagttcccaccaaaggccgagggttaaggttactaaaatcagcgtttctgaatcctgtctcaagttgtctcaactgggcttccgtagaacggtttcttcgtaagagggccttcagcgacagccgagctcggaaaagaacgggaataagttgtctcttacatttcctcaaatactgtgaatggtctgaggcgcaggtcaggtgtatttaaaaacctttaaacagtattcccccgccccaaaaactggccttgaaggaacaagtgaaactcatcctgcttttcatgtttgctgggtttgcccgttacaccccttcgcccgcacctatctagacaggcagctctcggccaccctccgggtcctgattttgaaaasaggagtggaccaatcagatgtggagcgctgtttggcgtcgcattttgagcctgggctgaaactgcgggtgtgacccccccgtggtggctccgggtgtctgcagt

SEQ ID NO: 496416 - DNA, 320 bp, Homo sapiens
acaagaagtagattagttgttgccaggggttggagaagaatgggtactgggtttcactgggtgagaaaactgttctgaaattagatagtggcgatggttgaacagttttcaatatactgacacctactgaactgtacacattaaaatggtgaattttatggtatgtgaattatatctcaataaacaagagmaagtgagaaagcaaaagaaaatttgaaagaagagtcaagagacacaaactcccacacccatcctgtaggggtttcaggaacagaaaaaggatgaaatagagaggaagaaatctaagaagtaatatgaaa

SEQ ID NO: 496417 - DNA, 242 bp, Homo sapiens
tgctcaatcttttagataaaaatctactcgacacatctctgagaaccaagttgggtaccatcagtaatcacacaggtcacaattcatttattttaggccccccaaaaaaggaaaaaattagacttagtggcattttactagtagctcagagatccaacagtttgcaggaaatagagatgkaattgtaagcaagggaaatacagtgaaattatattaatctccacccagacactataaggaca

SEQ ID NO: 496418 - DNA, 636 bp, Homo sapiens
ttccatggtcttctggcattcagtttgaccaagacatctgctgccatctgattttttttttcattttagatatattgtaacttctgcttgcgtgyatttaaaatttttctttattctttatatgttaaaaaaaaaacccatatcaggccgggcatggtggcataatcccaccacgcctgtaatcccaatagtttgggaggctgaggcaggtggacagcttgagcccaggagttcaagaccagcatgggcaacataatgaaacctcatctctacaaaaagtttaaaacttagccacgtgtggtgctgacacgtgccttgtagtcccagctacttgagaggttgaagtgggaggatcacctgagcccaggaggttgaagctgcaatgagctgtgatcctgccactgcactccagcctggatgacagagtgatactctgtctcaaaagaaaaaatacccatatcagaatacttgtatatttagagattttttccataattgctgaaagcttccaatctaaagacagtcctctgtctggttcagggaaattttcctttaatttttttttttttagttgcctaccctctgttctgctttccttttcagagttagtgctatgcataattgtttccctccagt

SEQ ID NO: 496419 - DNA, 541 bp, Homo sapiens
tatattttttctactatcttatttttaaaacaactttctaaaacaataattatgaatcattattgatggatgcccagtatagaaagatgtaatatgtataacaatacaacaaaggagaaaagattaaatggaggtaagtaagagcaaagctagtacttactatggaaattagattggccttaatctgatccagatagtcataagctatgacattaattgtaactctcagggtaaccactatgaaaataactcaaaaatacatagttaaagaaatgacaagagaagtaaattgctaccgtagaaaaatttatttaacatataacagacagcaacagaggaaggyggggaaatatgtagaaaatatgtagaaatatgtagaaaacaaatagaaacatcatggaaataaatgttacattaccagcagttatattacaggtacatttattaaacattcctaaaatggcagagaatagataaagaattaaaaagaaaacatgatccaactatatgccatctgcaagagacacacattagaatcaaa

SEQ ID NO: 496420 - DNA, 538 bp, Homo sapiens
ccaatggaaaagggctacctggggccaggcatgttcaacatggaggttccatcttcccttttctttgttaccatgtacagtaaagaaacaggcaacacggcactgataggtagagaacccatctacgtaataaaagattagggtggtggtggccagcctctcatgccctatgcaaatgccacacctagtcctaaccagcttttcatgccttatgcaaatggcacacctgttctgaccaatctttcatgccctatgtgaatcasacactgcctcctcaagctcatttgtaaaacctcctgaatttcaccatagaagcagaaaacccagttgggacccctccctctgcagcagagagagcttttctctttctttcacctattaaacttccactctgaacctcagtgtttgtgtgtccgcatcctagttttccgtggccatgagacaacaagtcttgggtatttaccctagacaatgatgctgcttcgattccagtctccccagggttgccagagtgatcttgtgaacattcagtcccttg

SEQ ID NO: 496421 - DNA, 444 bp, Homo sapiens
cagaataggagctgcagtagtgataaggagttgtcaatgtgtagaatattttttaggaaaacattgtaatgatattcacaaaatctcaccggaaggttttctctttatttatggcttgattctgtgtcaagtcaacttccaggtaccaacatagtcaagaggacagtgaaatctgctgagactggaaaggcaattggctgtctccagagctccatgtgattactagaatggccatgtcattgagggggaaggaraaatgtgctgctccttggagttccataacagagccaagctgaggcctctgctagttacttgtcatgtgatcctggagaaactccttacatttttttatgtctcagttccttgatctgtgcaataaccgtatgtcccatatatccaaaattaaaaaataataaaaatgcctatcagagcttcttatatcat

SEQ ID NO: 496422 - DNA, 611 bp, Homo sapiens
acccaggctggagtgcaatggtgtgatcttggctcgctgcaacctccgcctcctgagttcaagcaattctcctgactcagcctcccgagtagctgggactacaggcaagtgccatcacgcccggctaatttttgtattttttagtagagacagggtttcaccgtgttggccaggctggtcttgaactcctgacctcaggtgatccaccygcctcagcctcccaaagtgctgggattacaggcgtgagctaccgtgcctggccaagaaacatttttactgtaacagtagtctgtgaacacttaggattttcaccaagatatatgcattgttaatgctttttccttctaattaaaaaagaaaatggataacagatgaggaaaatttgatgtgatggtttttaggaaatgcacaaatgactcatgcactcacttgatttgacaagggtactggtttctatataaagaaacaacttaggcccaaaatagaagttgtgcacagcagattgtaactgatagaggaactgcacattccaagcatcagtagtgtgaaggctggtatgctgggacatctctgctgagaatgttgtgtgaagtccataattaattattatt

SEQ ID NO: 496423 - DNA, 550 bp, Homo sapiens
ttggcttaatataaagacatgcctctcacatagacaggcttctgcccaccccgactaacttaacacaaaccctgaaaccaagtgtgctatctaagcaaatgtgctcaggacaaaaagcagattcatgcactgagattttgcttatccctccatgctttggaaaaagattgtcattgaaggaaatggaaagagctaacataagtgtaattcttataagacatttgtccaagaaataaaggaacaagatgggtaaaaaggatgtgacatagttttgggaaactggycatttttaagattagagagatttaaacttactcttttttgtctttcaatgtctgagtttggttttttttttctggttggtcaagtggtgtggtttggtttttattaaagtggcaggctgcaaagacatgtttttgtagtcattctaacatatctcagcaaaaaatcaaattagggattcacattttaatgctataaactgcttgcaattaagaatctttatttctaaaatttatttcctaataatgataaagatggaaaacatgga

SEQ ID NO: 496424 - DNA, 658 bp, Homo sapiens
ttaattgtaaatgctatttttttgctgataaaacgttatattaacaaaacttattcttatttttgacctatgtactcttttaatataagatgaagaaagtattattcatttaaattgattttgttcctgtcgttatgtaaaatcagattatcacctagtaagaagataatagaagaaccatgttgaatagagttgtagttaattctcgattacccatgtcagattaatctattttgtagactgttaatggttattaatttattttcatctccctcttgttttttctactactattctgagttttctaacatattaagcaaaataaattgtaaggaaaacaaaataatttacawtgtatacataatatgttgtaaaatcaggttcctatttggtggaaaattcttccattttggtgaggttttttctatctctattatatccaaagaaatagtctatcacctctcccttggtttaaattctttctaactttcaacacaatttgatcctcagatatgttcgggtatcacaaatctacaggaaaaattaaggagaatcaaatacaggcaaatttatgaagacatcagaataactttccacacaaattttagatgcaatcttattgtctgatgtaaatattgtgaataaattttataattta

SEQ ID NO: 496425 - DNA, 658 bp, Homo sapiens
ttaattgtaaatgctatttttttgctgataaaacgttatattaacaaaacttattcttatttttgacctatgtactcttttaatataagatgaagaaagtattattcatttaaattgattttgttcctgtcgttatgtaaaatcagattatcacctagtaagaagataatagaagaaccatgttgaatagagttgtagttaattctcgattacccatgtcagattaatctattttgtagactgttaatggttattaatttattttcatctccctcttgttttttctactactattctgagttttctaacatattaagcaaaataaattgtaaggaaaacaaaataatttacaatgtatacataatatgttgtaaaatcaggttcctatttggtggaaaattcttccattttggtgaggttttttctatctctattatatccaaagaaatagtctatcacctctcccttggtttaaattctttctaactttcaacacaatttgatcctcagatatgttcgggtatcacaaatctacaggaaaaattaaggagaatcaaatrcaggcaaatttatgaagacatcagaataactttccacacaaattttagatgcaatcttattgtctgatgtaaatattgtgaataaattttataattta

SEQ ID NO: 496426 - DNA, 448 bp, Homo sapiens
ctgcagcctcacagagagctaacacccatgctggcacctggaggtgtctaccctgtggcaggagccagcatgtctgactgtggagtggcctgatccaacactcactcacacaccctttgtcactccacacctgacttcagtttcccttcgaggtgtgggatccgggccagtagcatgagctcagtgcaacctgccaggccgagtgggcagaatgagcccagcaggcccaaggaaaactcaggcaaaggcatcactagccacaagtttccagccagaaaagcaacaccctaaaaatctcrtaaaaatactgccagatggagcagatcctagtattttctgcctgttattgtttccccacttccctgtttttggtctttatatctgaaattacttatgtctattaagatttttagtgtacatttctcattactgttgtgaaatctccatg

SEQ ID NO: 496427 - DNA, 482 bp, Homo sapiens
ctcctctgctacaaatatttttttttgacaagagagactctgaacatgttggccatgatttcaaggtttcactatacttcaatttcagctgattttatcttccattattccttcactttactctattttttgatcacagtaccttatctgctgttttcttagcaaaatttcctactccatgatttttcaaataaaatatttccatctagaatgcacatcctctcccaattgccacttatctgaatttccagtttccttcaactcrgcttaatggctcttctccatgccttagctggaaataatgtctcaatgttctgaattccacattctccatcacatagctggcacttgtaattccttatattggtattacatgtattgtctccacattatattataaatttacagaaattgtcacagatccttagagtttttggagtagaaagagtgaaagatacgttgactatacccaggattaaata

SEQ ID NO: 496428 - DNA, 579 bp, Homo sapiens
ctaggcccatcaggatgctatttaaatacagagacaagtaaaacttgaaagactatgatgtctgagccaaattataaaggagtcccaacagactggagctggggcatactaataaggtgaggaaacaaagtattaaagttaaattcagtgtgtgtgtgtgtgtgtgcatctgtgtgtgttatgtgtgtgtgtgtgcrtgcctgtgcatgtaggtttgattttgctacatctcagtgaaaagtgggtatttgagcagaataatttgatttataataatgtacccttgatctctgtgttcatgtggactacctaatgaactcagcaatttcctcttcctctctctataaaggtaatttctagtatgatgaagtaattaatgtagataagggttttgagaactagaaataatcatgttttctgcaaggaattcatcccaaggctaaacaagttcaaataatgactctagtcattcatgatattcatatacaattccagatttttaattgagtatgatgaacaggaagatgctgttattctccagccttcaaactacctgtcctaagcatactttgtaaccaa

SEQ ID NO: 496429 - DNA, 472 bp, Homo sapiens
gagctatgttagtggcagtgggagagatttttttaaattgaatatgattaacaggagtctatagaacttgagcctattgactaggctccttctctactcttcattgcttttttttttttttttcaggtcagggccaatttggcatttattcccttcttagttacttcatctgcacaaacacccatcttatgactttaaaaaatatcccgtctatgggttcttcctattaatgatgggaatgaagtcagtacaaaaactagtaccaactatagttttgcagaatattttacatattacaagatggcacatacattaaggggtaggtcaggcagaaataactaatctcaatttatagakgagtagatttaagtgttaatgaggtttatataactttcatcttagtgatttatctaaagaggcaaattacctttaattcttattttgtttcatagtttgaaggcaactaaaaagc

SEQ ID NO: 496430 - DNA, 547 bp, Homo sapiens
gtcatttatttgtacatccatatttccatcagaaactactaaataagccaacaaggatataattaccaatgtcatacagcattctaatccttataatcctattttgaatttgcacaattttgtaggaacggcttatcaactcatacattgaaaaaattctccttttatggagggtattcacaataaaatatactttctctttttcttttgagacagagtcttgttctgttgctcaggctggagtgcagtgacacagtcacaactcacttytgcctcaacctcacaagtagctgggacttcaggcaggtgccatcatgccttactaatttaaaaaaaaaaaaaaaactgtagagatgtggtcctactatattgcccaggctggcctcaaactcctgggctcaagcaatcccccagcgttggcctcccaaaatgcagagatcacaggcctgagccaccacatctggcctatctttcttaaatataaacatggttgcctgaataaatatagtctgctattaatttcaggtgtgttctatttgtttagcct

SEQ ID NO: 496431 - DNA, 562 bp, Homo sapiens
gagcattttctttatcttcaagtagagaaggcagaaaagagtgaataatgaamatatgatgtaaaaaatccagtaatctcactaggttttgtgatagaagcctccttttcctgtatcttccctgacctctatggaacacaatgaaacctgattgaatcagaatcactgggaggaagaggaaaggcagggagggcgtgttgtgcaaaaattgtgcttctttgaaggaaaaggggaaagtgggctagaaactggaaaagggttacaatgttaattacatttcctgattgtactccatcaaattgcttcttcctccctcccatttgccatctagagtcagtagactgcatgtgctgtctggctgggggaaattaccagatatgtaaggaaaaagagcaatttacagaccttagggatacatttgattctgaaattttagtgtgctatagaattacagcaaacataatcccatatcacacaagactagagagctctatagagaaataaggtccaataaaactaatagataagtatcctctaactgtagctctccaaaccttgcatg

SEQ ID NO: 496432 - DNA, 562 bp, Homo sapiens
gagcattttctttatcttcaagtagagaaggcagaaaagagtgaataatgaaaatatgatgtaaaaaatccagtaatctcactaggttttgtgatagaagcctccttttcctgtatcttccctgacctctatggaacacaatgaaacctgattgaatcagaatcactgggaggaagaggaaaggcagggagggcgtgttgtgcaaaaattgtgsttctttgaaggaaaaggggaaagtgggctagaaactggaaaagggttacaatgttaattacatttcctgattgtactccatcaaattgcttcttcctccctcccatttgccatctagagtcagtagactgcatgtgctgtctggctgggggaaattaccagatatgtaaggaaaaagagcaatttacagaccttagggatacatttgattctgaaattttagtgtgctatagaattacagcaaacataatcccatatcacacaagactagagagctctatagagaaataaggtccaataaaactaatagataagtatcctctaactgtagctctccaaaccttgcatg

SEQ ID NO: 496433 - DNA, 496 bp, Homo sapiens
cagtgtggtcagaataaaagctagcagaagaatgtgaaagactagactggtttagtcttctggcctacatctttccccsatgctggatgcttcctgcccttgaacttcagactccaagttcttcaggtttcagactcggactggcttccttgctcctcagcttgcagacggtctattgtgggacctcacctttgtgatcatgtgagtcaatactccttaataaactcccctttatatatacatctatcctgttacttctgtccccatagagaaccctgactaatataccctcactctccattaaactcattccactaaagagctctgttcaatcctccaaaatgaaattgcaatgaatcccctagctttttcagtcactatcagataataaataacagaattcctgtccaatggctcattactccaagctcaattcacctgctccagactgcttcaggctcagaagtctgaaatagggagagctgtgaaggggatc

SEQ ID NO: 496434 - DNA, 496 bp, Homo sapiens
cagtgtggtcagaataaaagctagcagaagaatgtgaaagactagactggtttagtcttctggcctacatctttccccgatgctggatgcttcctgcccttgaacttcagactccaagttcttcaggtttcagactcggactggcttccttgctcctcagcttgcagacggtctattgtgggacctcayctttgtgatcatgtgagtcaatactccttaataaactcccctttatatatacatctatcctgttacttctgtccccatagagaaccctgactaatataccctcactctccattaaactcattccactaaagagctctgttcaatcctccaaaatgaaattgcaatgaatcccctagctttttcagtcactatcagataataaataacagaattcctgtccaatggctcattactccaagctcaattcacctgctccagactgcttcaggctcagaagtctgaaatagggagagctgtgaaggggatc

SEQ ID NO: 496435 - DNA, 496 bp, Homo sapiens
cagtgtggtcagaataaaagctagcagaagaatgtgaaagactagactggtttagtcttctggcctacatctttccccgatgctggatgcttcctgcccttgaacttcagactccaagttcttcaggtttcagactcggactggcttccttgctcctcagcttgcagacggtctattgtgggacctcacctttgtgatcatgtgagtcaatactccttaataaactcccctttatatatacatctatcctgttacttctgtccccatagagaaccctgactaatataccctcactctccattaaactcattccactaaagagctctgttcaatcctccaaaatgaaattgcaatgaatcccctagctttttcagtcactatyagataataaataacagaattcctgtccaatggctcattactccaagctcaattcacctgctccagactgcttcaggctcagaagtctgaaatagggagagctgtgaaggggatc

SEQ ID NO: 496436 - DNA, 149 bp, Homo sapiens
tctaacttcctaggtgttaggagcacctatctcatttaccaaatcattcaccaatgaatcaaaaaagcaacccaaaaccaaaagaaaatgccaagtattgggttcaagytctagattcaactactttaccatctgcatgactttaagca

SEQ ID NO: 496437 - DNA, 599 bp, Homo sapiens
tctgtagcccaggctggagtgcagtggcatgatcttggctcactacaacctccacctcctgggtcccggttcaagcaattctcctacctcagcctcccaggtagctgggattacaggcacacaccaccatgcccagctaatttttgtattttcagtagagatggcgtttcaccatgttggccaggctggtcttgaactcctgatctcatgatccatccgcctyggcctcccaaagtgctgggattacaggcgtgagccaccgtgcctggccttaaacaaccgaatcttgcatgaactcatagagtgagaactcactgaaggacagcaccaagccactcatgagggatcggcccccgtgagccaaacacctcccactaggcccacctccaacattggaggcccacatttcaacttgagatttggaggggacaaaacatccaaaccatatccccccccaaacttttagtggcccctttttaagaatcctgttggagacattgatgatgacaggcaaagtgtttccctccccttccacccccataaattaaactctgccttgggtccattagatgtccctgcagttgcagaaaactgtacag

SEQ ID NO: 496438 - DNA, 599 bp, Homo sapiens
tctgtagcccaggctggagtgcagtggcatgatcttggctcactacaacctccacctcctgggtcccggttcaagcaattctcctacctcagcctcccaggtagctgggattacaggcacacaccaccatgcccagctaatttttgtattttcagtagagatggcgtttcaccatgttggccaggctggtcttgaactcctgatctcatgatccatccgccttggcctcccaaagtgctgggattacaggcgtgagccaccgtgcctggccttaaacaaccgaatcttgcatgaactcatagagtgagaactcactgaaggacagcaccaagccactcatgagggatckgcccccgtgagccaaacacctcccactaggcccacctccaacattggaggcccacatttcaacttgagatttggaggggacaaaacatccaaaccatatccccccccaaacttttagtggcccctttttaagaatcctgttggagacattgatgatgacaggcaaagtgtttccctccccttccacccccataaattaaactctgccttgggtccattagatgtccctgcagttgcagaaaactgtacag

SEQ ID NO: 496439 - DNA, 572 bp, Homo sapiens
tagctttggctgaagagttcaggtgagcctacataaaagattaaacttcagtaaatacagaagtgttgaggtttttttggagcctctttgccttgtaattttttttttttttttaagaaagagctggtcttttggtcactgggtctttttttatatctgcagggaagtcatagtaacaggctccgtgtctgattgggttccatggcaacaaagggttgtgactttattaaaggagagttgagcatgccaagaaagataaaaatcagagtatggaaaatgtccgaccagatgaatgtgttttttggatcacatgtgccctggactagaaaggtttcctgagtcgacatcagtctccattacagatttgaatcgcactgggttatcattaaggtcatagggatcagtgcttattttwaaaaagaaatccatctacttctttgcttttacccattcattcttccttttttaatgtctcggtatatttacaaaaatcaaaacagtgatggtaagtacctaacaagagaggattctggcttttcaagggagaaaagaaatataacatattctttgtg

SEQ ID NO: 496440 - DNA, 551 bp, Homo sapiens
gctgcttttggtggctagtaatagaatrttgagccaaaactggctaaaacaatagaggtttatttttctcaataataagcattccaaggccgggtgcgctggctcacgcctgtaatcccagcactttcggaggctgaggctggtgaatcatctgaggtcaggagttcaagaccgggctggccaacatgttgaaacaccgtctctaccaaaaaaaaaaaaaaaaaaaaaaattagccaggcatgggggctcatgcctataattccagatacttgggaggttgaggcacaaaaattgctagaacccgggaggcagaggttgcaatgtgttgagatcgtgccactgtgctccaacctgggggacagaatgagactctgtctcaaaaaaaaaaaaaaaaaaaaaaaaaaaaaaaagcattccagaggtgggtgattaaaccagttttgcccaagatgctaaaacacagaagataacatttcaaaaacaagtcactataggtagaatttccaaagcgcaggtttgagggcctctccctgtgttcctgaactcctca

SEQ ID NO: 496441 - DNA, 551 bp, Homo sapiens
gctgcttttggtggctagtaatagaatgttgagccaaaactggctaaaacaatagaggtttatttttctcaataataagcattccaaggccgggtgcrctggctcacgcctgtaatcccagcactttcggaggctgaggctggtgaatcatctgaggtcaggagttcaagaccgggctggccaacatgttgaaacaccgtctctaccaaaaaaaaaaaaaaaaaaaaaaattagccaggcatgggggctcatgcctataattccagatacttgggaggttgaggcacaaaaattgctagaacccgggaggcagaggttgcaatgtgttgagatcgtgccactgtgctccaacctgggggacagaatgagactctgtctcaaaaaaaaaaaaaaaaaaaaaaaaaaaaaaaagcattccagaggtgggtgattaaaccagttttgcccaagatgctaaaacacagaagataacatttcaaaaacaagtcactataggtagaatttccaaagcgcaggtttgagggcctctccctgtgttcctgaactcctca

SEQ ID NO: 496442 - DNA, 551 bp, Homo sapiens
gctgcttttggtggctagtaatagaatgttgagccaaaactggctaaaacaatagaggtttatttttctcaataataagcattccaaggccgggtgcgstggctcacgcctgtaatcccagcactttcggaggctgaggctggtgaatcatctgaggtcaggagttcaagaccgggctggccaacatgttgaaacaccgtctctaccaaaaaaaaaaaaaaaaaaaaaaattagccaggcatgggggctcatgcctataattccagatacttgggaggttgaggcacaaaaattgctagaacccgggaggcagaggttgcaatgtgttgagatcgtgccactgtgctccaacctgggggacagaatgagactctgtctcaaaaaaaaaaaaaaaaaaaaaaaaaaaaaaaagcattccagaggtgggtgattaaaccagttttgcccaagatgctaaaacacagaagataacatttcaaaaacaagtcactataggtagaatttccaaagcgcaggtttgagggcctctccctgtgttcctgaactcctca

SEQ ID NO: 496443 - DNA, 551 bp, Homo sapiens
gctgcttttggtggctagtaatagaatgttgagccaaaactggctaaaacaatagaggtttatttttctcaataataagcattccaaggccgggtgcgctggctcacgcctgtaatcccagcactttcggaggctgaggctggtgaatcatcygaggtcaggagttcaagaccgggctggccaacatgttgaaacaccgtctctaccaaaaaaaaaaaaaaaaaaaaaaattagccaggcatgggggctcatgcctataattccagatacttgggaggttgaggcacaaaaattgctagaacccgggaggcagaggttgcaatgtgttgagatcgtgccactgtgctccaacctgggggacagaatgagactctgtctcaaaaaaaaaaaaaaaaaaaaaaaaaaaaaaaagcattccagaggtgggtgattaaaccagttttgcccaagatgctaaaacacagaagataacatttcaaaaacaagtcactataggtagaatttccaaagcgcaggtttgagggcctctccctgtgttcctgaactcctca

SEQ ID NO: 496444 - DNA, 655 bp, Homo sapiens
ttttaagctacttggaagtcaggatatcttttcattttagtattccccattcccagtcatcagtccctgcccacaaggaatttggagtttagaagaggaaggaccattggtgaacaatttaaatatcagtaacmccaaacaaaattcaaaacacctgttctggctctgtagggtgtacagtgggagactgggctgaaatatttaaagtgcagctgttccagagaggacctggagcccagtgtgaccagtccagggggagggaaggatttccctcatagggttcaaaggggacggtagagcaggctgaagaaaactttggagcccctaaaatcagaggtacatttgggaaaacctcaagtcatcagttttggggagtgtcctcaggaacaggaagacatgatggaaaagaaggcagagaccatgcagaatcttcgttcaagggtaagaagttcagccttattctgtgggaactgggcagctgctggaaattcttgaacagggaaatgatagcatgggaatggaagtttaaggagaaggtatatctgacatcagggtgaagcagcgattgaagatgggcaaaacacactggcttcttagaaggccactgtaaagacagaatagcctaattatccttcagaaggagactaagtaaata

SEQ ID NO: 496445 - DNA, 450 bp, Homo sapiens
caccagggacttgaggtcacccatcttcaggtaggtctcagcagcatagccagggctgtccagcttcttgaggtaggtagcgcacagcagcaggggctcgcgctcagccttgtccagtttgcgggcgatgtcgatcaacctggagagggaaggggcaggtaggagggtgggctctgggtcttgtcaacggcaagccgtatgtccattcattctgtggtccccagtgttgatactatgccatggcccatgggagttgctcagtgggtagttattaaatgcatgaatacacactccagaaacatcaccaggatctgggagaggtggcctttacaggatcctgtcasccaccttgtgtgtctttctcggaagtcactgagctatccagcagggtatagaaacaattatctcctaatcccctaccaggtacccagatgacgccatgagctttcc

SEQ ID NO: 496446 - DNA, 544 bp, Homo sapiens
agaaacaattatctcctaatcccctaccaggtacccagatgacgccatgagctttcccatgcgtgaaatcagaatcttcaccaccctaagaggtgggcatgattatttccatctctcagatgagaagaataaagtctgtggggaaggtgaagcacccagcccaagactgggcccagcactctttccaccacgggtgcaggaattctcacggaaaagtggatgccaaggcataagaatacctcaatgactgccctctaaaggaagaggtgagtgtggggcctgctctgagctctggacaaaggcctgcaggaagtcttycctgtcctcctggccaacgtgctgaccaaagagggaggagctgcagggacccactggctcaccactgcttccccatggtgagcagccctcccatcactcatggggacatgaggcctggatagaatgcgcttgttctctctggtcaggctggaatttggagtcaaactaactctcccaggagaaagggttctacccaggctagtcttggtgagaaaggaaggagaag

SEQ ID NO: 496447 - DNA, 764 bp, Homo sapiens
aatgacaaaagggctccttattttcatcagcatctacattttagcaaatcatcttattgtctgcaacttaatttccgtatgcaaaagtgcacctgtttctaatttgaaaggaacattacatttgtgtgctcttaacatttaatcaaaatggcaatatagaaaggggtgggggagcagggggtttttttgtttatttattttgatttaatggggatccatcttgacaagagaaaatacstgggtccaaagaagatggcaggagtttaaaaaaaggctcctgtttggtagcccagtcaaggctcctgtccaggctctggagccgccctcttccatccaccttccccagccccacagagcagcgccagcccaatggagactcttccctttggaacagctccttaagcagggggtttccgtttgagattccagactgccaaggtctgttccctcaggcatcactggtgtccagtccaacagcttgagggcatggaaggaacagcacacagaagctaaggagaactcacatgtattggggacgtttttggcaccagccacgttccatgctgtctcaggcctctcagcagccctgtgaaggaagagttatgatttccagtggggctgggaagggggttgccagggcccaggggctgcctccagccctgggaggggcggcccatgatgtgtccagccccaaggccctgccccttttacccccagtccacctgccagaggtggcaatgcagcacttcatgaaaagcccaaga

SEQ ID NO: 496448 - DNA, 764 bp, Homo sapiens
aatgacaaaagggctccttattttcatcagcatctacattttagcaaatcatcttattgtctgcaacttaatttccgtatgcaaaagtgcacctgtttctaatttgaaaggaacattacatttgtgtgctcttaacatttaatcaaaatggcaatatagaaaggggtgggggagcagggggtttttttgtttatttattttgatttaatggggatccatcttgacaagagaaaatacctgggtccaaagaagatggcaggagtttaaaaaaaggctcctgtttggtagcccagtcaaggctcctgtccaggctctggagccgccctcttccatccaccttccccagccccacagagcagcsccagcccaatggagactcttccctttggaacagctccttaagcagggggtttccgtttgagattccagactgccaaggtctgttccctcaggcatcactggtgtccagtccaacagcttgagggcatggaaggaacagcacacagaagctaaggagaactcacatgtattggggacgtttttggcaccagccacgttccatgctgtctcaggcctctcagcagccctgtgaaggaagagttatgatttccagtggggctgggaagggggttgccagggcccaggggctgcctccagccctgggaggggcggcccatgatgtgtccagccccaaggccctgccccttttacccccagtccacctgccagaggtggcaatgcagcacttcatgaaaagcccaaga

SEQ ID NO: 496449 - DNA, 764 bp, Homo sapiens
aatgacaaaagggctccttattttcatcagcatctacattttagcaaatcatcttattgtctgcaacttaatttccgtatgcaaaagtgcacctgtttctaatttgaaaggaacattacatttgtgtgctcttaacatttaatcaaaatggcaatatagaaaggggtgggggagcagggggtttttttgtttatttattttgatttaatggggatccatcttgacaagagaaaatacctgggtccaaagaagatggcaggagtttaaaaaaaggctcctgtttggtagcccagtcaaggctcctgtccaggctctggagccgccctcttccatccaccttccccagccccacagagcagcgccagcccaatggagactcttccctttggaacagctccttaagcagggggtttccgtttgagattccagactgccaaggtctgttccctcaggcatcactggtgtccagtccaacagcttgagggcatggaaggaacagcacacagaagctaaggagaactcacatgtatkggggacgtttttggcaccagccacgttccatgctgtctcaggcctctcagcagccctgtgaaggaagagttatgatttccagtggggctgggaagggggttgccagggcccaggggctgcctccagccctgggaggggcggcccatgatgtgtccagccccaaggccctgccccttttacccccagtccacctgccagaggtggcaatgcagcacttcatgaaaagcccaaga

SEQ ID NO: 496450 - DNA, 764 bp, Homo sapiens
aatgacaaaagggctccttattttcatcagcatctacattttagcaaatcatcttattgtctgcaacttaatttccgtatgcaaaagtgcacctgtttctaatttgaaaggaacattacatttgtgtgctcttaacatttaatcaaaatggcaatatagaaaggggtgggggagcagggggtttttttgtttatttattttgatttaatggggatccatcttgacaagagaaaatacctgggtccaaagaagatggcaggagtttaaaaaaaggctcctgtttggtagcccagtcaaggctcctgtccaggctctggagccgccctcttccatccaccttccccagccccacagagcagcgccagcccaatggagactcttccctttggaacagctccttaagcagggggtttccgtttgagattccagactgccaaggtctgttccctcaggcatcactggtgtccagtccaacagcttgagggcatggaaggaacagcacacagaagctaaggagaactcacatgtattggggacgtttttggcaccagccacgttccatgctgtctcaggcctctcagcagccctgtgaaggaagagttatgatttccagtggggctgggaagggggttgccagggcccaggggctgcctccagccctgggaggggcggcccatgatgtgtccagccccaaggccctgcccctttyacccccagtccacctgccagaggtggcaatgcagcacttcatgaaaagcccaaga

SEQ ID NO: 496451 - DNA, 703 bp, Homo sapiens
tgggcagctagttggagggactggggcaggagcattttatgcagggctaggcattccgattttcaaccaaaaaacacctcagggtttatctggacatgagggtgcaccgaggcaaaccaggcccagttcactccctcgaggacctcccggtctgatggggaagcctggcccatggcttgttgctgtttgctaatgtgatgtgtgcttcagtggcggtaatccagagctggaggagcccagaggagtcctctaacccactctgggaggtcagggaaagcttcctagaagaggtgaccctgaaggatgggtgtgcctcagccgggggaagtgttctatttgccaagacacctagggagatagggagggggtccaggtgccgagaagtaaaagggcagagttaactgggaagtcagaggtgtccaaaccaaggtgcattttgagccttgaaggatgagtgagagcagcctgcatgaccgggaggagagaggcagcccaggcagaggaaacggcatgggctaaggcccagaggccagcgcrccagcagcttgtctcggaagctgcatcttccttctgggaaggagggaagtgctggggcagtgctaggggagcagtgggagggcctccaaggcggtcttcagttaggtcaacttttatcttgaacggggagccatggacggtttcaagcagggaggtgaggggtgtg

SEQ ID NO: 496452 - DNA, 614 bp, Homo sapiens
gcgccagcagcttgtctcggaagctgcatcttccttctgggaaggagggaagtgctggggcagtgctaggggagcagtgggagggcctccaaggcggtcttcagttaggtcaacttttatcttgaacrgggagccatggacggtttcaagcagggaggtgaggggtgtgagatacagcgaggagaatgcatgcggtggggaagaggcagtggggaggaggctggggctggggagttggagaggagaggccagaatatggagagaaaagcctatggggaggcctcgagtgggtgtggtgaggaggaaagggcccagaatgcccccagttcttgcttggatgttgggtaggtatgggcagtgggggcgtggggcattcctggaagagagaggaggggcagatttggggggctgagctctgttctggacatcctggtatacagcaggcatggaatagctgccgaatgaggggctgggatgagagggaacagacctgagggaggactcctgggggtggctctctgggacagacatggtctgggggaagcagaggaggggttggagctgctcgtgaagtcaggccaagcgaagacccttgggaagccctgtagcactgc

SEQ ID NO: 496453 - DNA, 438 bp, Homo sapiens
gcaggactgaaccaggcaggctggggtgcagtgagtcctcctgcctcttctctgaaatgcccctgtgtcaccctctccttctgtttcctctgcagagccctcaggactgcccccggaccctgctctcacccctggcacccgtgcctacgggtggctcccagaacatcctggtgcctctggccaacactgcctttttccaggtaagtagaagccaggccagcgccgggtggggccaggaggaggccggggagcacgcaggccactaactgcccccatgtcctggtgtgacccctgctctgggcccactgcagtgctttcgcacctgtgtgggctttgcttttctttctctgagtttccacsttctgcatgaggaagccccactctgactgcacggggctgcaagaagaggaagtggtgagggccaggccaagggggaca

SEQ ID NO: 496454 - DNA, 465 bp, Homo sapiens
aggcttgggtcaccacaagaaggctgagttctgcattttgctgatggagatgcagcttcctaagggaatggcaggcagtggagctgaagtgggctcgccagactcagatgggtggagggtgtgggaaaggccccagtgtcattctggggcctcattcctcarggtgaactatggggatcaacagacccagctcccaaagccagtgtgaggagcaatcccttgccatgaacttcctttcagggaaccacaccaagtcccctcccgcacccttgtcatgtcaacacacatgctgattccgtcaacctggccccccttgctactgcccaacccagcctcagacacctgggccccatgcctgcctgtactcctcctcattccccactgagccccacggccctctcctgcccccaaaacacccctgttcacatccctccattctcctggccctggcatctgcccacccca

SEQ ID NO: 496455 - DNA, 465 bp, Homo sapiens
aggcttgggtcaccacaagaaggctgagttctgcattttgctgatggagatgcagcttcctaagggaatggcaggcagtggagctgaagtgggctcgccagactcagatgggtggagggtgtgggaaaggccccagtgtcattctggggcctcattcctcagggtgaactatggggatcaacagacccagctcccaaagccagtgtgaggagcaatcccttgccatgaacttcctttcagggaaccacaccaagtcccctcccgcacccttgtcatgtcaacacacatgctgattccgtcaacctggccccccttgctactgcccaacccagcctcagacacctgggccccatgccygcctgtactcctcctcattccccactgagccccacggccctctcctgcccccaaaacacccctgttcacatccctccattctcctggccctggcatctgcccacccca

SEQ ID NO: 496456 - DNA, 550 bp, Homo sapiens
tgtctctttgctcctggtttgctttcgtataggtcaagaatggtgctgcttccccgaccaaaaagaaggtggtggccaaggccaaggcccctaaagctgggcaggggccaaacaccaaggctgctgcycctgctaagggcagtgggtccaaggtggtacctgcacatttgtccaggaagacagaggcccccaagggccctagaaaggctgggctgcccatcaaggcctcatcatccaaagtgtccagccagagggctgaagcttagggccagaggcaggggcggagagagaccgagcctctgccctagtttttattcttcaactaaccactgctctatttatttcattgtaagctatttatcaataaagacttttgtttctttttcctcacaattggtgtgggtagaggctgaggttcaaggatttggccattcggtccttcatgaacatccgctgagcacctgctgtttacctggccaatgctggggctcagataggaggtcctgcctcagggatacagactgtgtgctatatggggctgcagcacaga

SEQ ID NO: 496457 - DNA, 684 bp, Homo sapiens
gccctgagcaatgaccctctggagctggggctggagccttgtacccactgcacagaggggagactgaggccggactcaccttggtggagagcaggcgggtcaggtagatttccgggagcaccttcttgcgatggctctgccggtgagacttcttgggctccgccagctcgtccgtaggcagcacctgggaggccgggcagtggtcagtgtccgcaccaggccccatcctcggccgcctgtgggaggtctggctctgccatgcttcttagcacacaagggctgtggttccctcctgattctgggccccatccctactcccccaccccccagcctttygcagggctgggagcacttttcccaagaggcccagggccacagaaagccaaggccacacccactgaggggctggatcccccggggccgaggttgggcactcaccaaatggaaatacttctctgtgtccaagtctttcactgtgagaggaaaaacacaataaataaacatgggagaggagaggagagaaacagaaatgaagacagaaagatggagtgagaaacagaaacaagacagaaagatggggagagaaacagaagcagagacagaaagatggagagagaaacagaaacggagacagagatccaaagagacagtcagagagaatgagacagagatgcagagacgcat

SEQ ID NO: 496458 - DNA, 659 bp, Homo sapiens
ggcaaagcctcgaggtttccccagtggcatccacagtggagaagccacagcactgctgtctggaaacacggtcaagaggggtactgtctcctgtcggtgccaccactggagggtcagcccgcccctcccgagccacactagtggggcacgatggcaaagacaggagatgcagygtggaggggcagcggggcagggctcactttgccacctgtttgctgtgtgacctcgggtgggcctctaggcctctctgagccttaagtgtctgtgctcaggaggagaggggaaggaatgatcacgcaggccctcgagacccttgggtgggtgattaaaggaggtgatctccctgataatcatcatctgggtggagggagccctcctgaggggttcagaggataggctggagaagcccacatgggagctgaggctctagggcaggaagtcagcagacttcacacttcatgatgacacacacatgccccatcctcacagcggcccacggaggcagatcatgctcctctttccagatacggaaactgaggaccaagaagcagtggcgccgccgtggtcatgcagatggttagggtcaggcctctcagccccaagcaaggggcgcagggatgcagcggctgagagcagggcctggacgcctggaggctgtg

SEQ ID NO: 496459 - DNA, 446 bp, Homo sapiens
cccgtacatggcaagtgcttggcacagtgtctggcacgggctagccctgtgtgagcacccccgyaaaacagccacggcgcatggtcctcacagggctgtgaccttggaaccaggctgcctgcccctaacgctgcttttgagatcaagaaccctgcccagtgccggcttttgtgggactaatcttccactaagcctgggaggatgtcagggaaagtgcctggcgggggtgccaggggtgggggtgcggctgggtctccacaggaggcaactgtgggctccaggaccaaggccttgctctggctatcggttgtgggccactggctggaactatttcctctctccatgttttcctcatttatatatctgaccctgagcactggtccctctggccctgccacttgtaaatcccttttatgggtctggggtttgggggacagattatgggg

SEQ ID NO: 496460 - DNA, 542 bp, Homo sapiens
tccagaccagctggacaccatctggaagggctgaagccagccagccaggccgccctgagggccaacacacagactgggcatgatctgcccacccaccccaaacaggcatggcctggaaggacaagccccaggcttaggtcacaagcctggctggattaaggacctactgtgtgacactacagctactgggggcaccttacagccctgggggtgcacgcacgcacacacacacacacacacacacacactcttgctgcgtacccattttacagatgagaaagctgaggctcctgactcctaagtctcacagctcttacctcactrtgggaggcaccatcccctctgaacctcggactccacatctgtaaaataagacagcaatagcacccaccacctagggcttatggaaggactgagctcataggagccttcagtgctaagcactgtaggtgctcaataaatgttcccaattagctatgcagaccacggagcagaggctcgggagctcccgaggacagggacaagccactccaccgcttcct

SEQ ID NO: 496461 - DNA, 570 bp, Homo sapiens
cagccattgtttagttagctggacgcagcccctagacacccagctcccccttcatgaagctgtttctcattccggcccggcctggccccatttccagctcccctccccctgggtcccagaggagcacagtgtgggatgggcagccagcggctcttccctggcccagggaaaaggcttccctccccccagcaggaggggcagagcacgaagccagtctttccaagccctggaacagtttccctcccagcttcctcccctgaagggactccaggccaggagccgagaaatagttgcctctccagggaacactggcagttccctcctggggctggggggacttggaggttcgatctcacaccctcctccccrgcccctggtctcctcggggtccagcccatatgcctggccgcaggctgtgctctgcagcaggactctaccgctggtcccagagtcatcgcacgaccgctgtggacacagccaagaagacagggctgcttggagccttgcgcaaacatctccgggctggattccatgagctggggacacagaggtgacaacggggccctctct

SEQ ID NO: 496462 - DNA, 671 bp, Homo sapiens
tcctgccaagtgtctctgcttgcacccttcgtcactgggagatcactcccagcccccagcccaaacccaaatgtaaagcccatcttggaagctctctctccctccgcccccacctggcatctcagcccctaaattggtgcaaaaaaatgtcttcttgacgacgtgcacccacccactgcatgccagtttaaaactgcctgatggttttttttccacctttactataaaaagacaccttgaaaatgctgcactgacattggcctgtcggtattccttttgttttaaaaatacaaatattatggtcattcataggttggggagaaagacttggggaaggaaggtagactcagtctgccccaccttgttgggtgatgctgtgcctcagtttcccccatcagtggcactcaacaacttcccaactggcttgcactccaaacaggttgtgatttgaggaaagggatccaagctacatgcaatggaggctaatttcttcactcagtttctctcaaaatatcttaactgccccaaatacgttgaaaacaatcagggacaaatttggggacttctgagggctgcggggaccgaggttctctgcctctsgcctcacacttcagcagcttctccctttgggttctcgggaagaaggtggagggcagagggcaagtcctgtc

SEQ ID NO: 496463 - DNA, 617 bp, Homo sapiens
gatctcaaaaaggaaggagagagaggaagaataggaagagaaagaggaagaattctggatggataatttaatattttcaaacaagggaaaatatgaatgaattctggcctccccttataaaaattatttcttaattaaagaaataaaaaagtgaagttctyttttgataacttgatgtgtactttcccagtctttgggcccaacccacctcaataagagtaaaaatacaaatttccttataaacagaagacagggtctaatatctaaatccagcagtggatttaataggtgaatgatcctgcaatttagtaagttcaagaagataatgttacaaatcaaatattccaaaactgaaatcactatttgtgaagataccaagtagattttgcctagcatagaaataattcagtcagtcaatcagtccatcagtcgttgactcagtagatatttattatctatcatatcttgggtactcttttaggcactaggtaggcagcaatgagtgaaacaaagtccctgctctcagcttacaatcaactggggaggagattgctcattgacacataaacaagtaaacatatgtatcagatggtgataagcacaaggaacaaagaaca

SEQ ID NO: 496464 - DNA, 584 bp, Homo sapiens
gtacagtcagagctggctgtaaaacttggcttcagcatcgagttcaactatgggaaattagtaaccttgtctgtaaaatgaactcaagagaacaacctcataacattgtcgtaatcacatctggaaaagtacctggcacatagtaggccctcacatcttattagctttcttgcccataaacccctgcagtataatatgacatttcttctcatttctgtattgaataggctctcttgaaaagcaccagtgatatatcttctaagcaccaaatccagttccaccttttctcagctatcagccaccttgacacatgtacagcatgttctggttgtcatagaagagattatccctattgctyttaattaaggtccccaaactagaaaatgtcccctaattcactgatgtagaaggcttttggaaagttcagctcagcagttctcaaccagaatgtgcattcaaaccacacaagggcatcattactgcatattcccaggtccccggcagctctgagcccttgacctagaatggggtgcaagctgtgcttagaaaactggagcacatgtgagtcctatgattcagttctg

SEQ ID NO: 496465 - DNA, 516 bp, Homo sapiens
ttgaacaggatgtgcgttgggggtgggatatctgttcccaaagccttagccccaccctgacttgagggaaaatttccagatgggattggtctctgctaagcctctgagcccctctagttggggccagaggtcatcttggcatcctcccgcccacccagatgaatggaaagttctctctccaggacatggttatcctcattccccactcctgtgcctcacgattcttactcttwtgacagacttcctaaaattccagcctaaatcctctccattacagtttctacaaattctgactcctaactacaaagggaagagaacagagtgaagccttcccgaggtttggggtctgtataagggtataggaagtggggagtggggtgcagatcagccctcttgccccaggtggtttataggatgaaggtttctctgtttaaaacagtaccctggtggcaaggagtaaaggggaatattacacccttccttcctcttccagccttagtgaggttttctgggcag

SEQ ID NO: 496466 - DNA, 643 bp, Homo sapiens
ggctggattaccaagggggaggaggaagagggcagaacagttggcaagtgttaggcctcagggcagaggactctggttgaggggattccaggcaaaagtcctccacggtctgctcagatgcttgttagttataaagcttcataggccatccctctgctgaagagggaaatggctctcagggaagtggcgtgtgtgttcacgcacgtgtgtgtgtgtgtgttggcagagaggtgggatcaagtgacaggtcattgtaggtcatttctgtggagcagatggggtgggatcatattaaaaaggcagtgctgattaacccacactccatgaagcccrgctaatgttggctctgaccttcaccactaccaccacagccactgccactcctgcctctcgctcttctacttcattctcatgcctcatttgcatccctgttggtaccctagccctcatcccacatccactcaccatgtgttctgtgcccctcctgtgttctaggcactgccatgggcactggggatacactgggggacaaagcatgggttccccgtggagctccagtggcttctctatgccagagccactcctaagactagggtccctgaactgacaatgtactcccaaacccaagtgcacagagccagaa

SEQ ID NO: 496467 - DNA, 643 bp, Homo sapiens
ggctggattaccaagggggaggaggaagagggcagaacagttggcaagtgttaggcctcagggcagaggactctggttgaggggattccaggcaaaagtcctccacggtctgctcagatgcttgttagttataaagcttcataggccatccctctgctgaagagggaaatggctctcagggaagtggcgtgtgtgttcacgcacgtgtgtgtgtgtgtgttggcagagaggtgggatcaagtgacaggtcattgtaggtcatttctgtggagcagatggggtgggatcatattaaaaaggcagtgctgattaacccacactccatgaagcccggctaatgttggctctgaccttcaccactaccaccacagccactgccactcctgcctctcgctcttctacttcattctcatgcctcatttgcatccctgttggtaccctagccctcatcccacatccactcaccatgtgttctgtgcccctcctgtgttctaggcactgccatgggcactggggatacactgggggacaaagcatgggttccccgtggagctccagtggcttctctatgccagagccactcctaagactagggtccctgaactgacaatgyactcccaaacccaagtgcacagagccagaa

SEQ ID NO: 496468 - DNA, 548 bp, Homo sapiens
ggaagagctcctctccagagcttcactgcatcayagacttgtgcaggggccagccagagtgtttctcaaaatcttttaagtctctgaattataaacagagctaaatgggaccttggagatcatcttgtccagccccctcctagagaaggagactgaagctcagagtggttaagtgacttgcccaaggtcaacaggatgctgtgttattattattatgattatttttgcatcaggacttgtgggatctgtagtaactattctcttggccaattataatcacatcactggcatttgtttacgagaaatagccccgctaggcccagtcagcaataagtctttggagctgtctcagcctgccagttgctttatataaaccatcccttttatgggagttgaagcactgtatgaaaagggtttttgtctcatgttgaccttgtttagtcacattaacgcacacatcagttccaggccccattccattctctgaacatcttctgacacactgacagtgctgagcagagcaaggttgggttcgctcctctggcaga

SEQ ID NO: 496469 - DNA, 644 bp, Homo sapiens
ttctatccagaaatgtaaggataatttaacaggtgaacatcagttagtgtagttcatcacactacattaatcaaagaaaaggataaaaatcacaataatcttgataaatgaagaaaaagcattaaattcaacttgtaactcaatagtaataaaaatgctttaagaactaggaatagaaaacttccttgatatgaaaggaacaccattgttaatactgacatgtaagagctttcccttggaaatcaagaaaggatgtttgctattactatttctattcagcatgatattggagctcaggctaatgcaacaaagggmaaaaaaaagaaatgtggcataaagatttgaataaaatcatctctatctgcagctgacatgattataagtaagtatagaaaactaaaactttagaattgtacaaacttttaaaaagtaaatttagcaaggttgcaggatataagatgaatataaattgcttttctataaataatatataaatatgaaatgaaatgaaaaataattttataataggttttaaaaacttgatacataggaatgaatccagtgaaaaacgtgcaagacctctacacagagaattacaaaacaattaaaacaattaccctataaaacaatgacaattagaaatt

SEQ ID NO: 496470 - DNA, 475 bp, Homo sapiens
gatgactctcacctgtaatcccagtactttgggaagctcargcaggaggattgcttgaggccaagagttggagaacagcctgggcaacataatgagatcctgtctctacacaatatagaaaagaagtgagccacgcatggtggtgtgtgcctgtagtcccagctactcaggaggctaaggtgggactacaggatcacttgagcccaggaggttgaggttgcagtgagctgtgattgtaccactgcactccagcctggacaacagagcaagatcctgtctcaaacaaacaaacaaaccctcaaagacatataatttcatggatcaattgtgtctgtcaaagtcaaaaacggaagttaagtaaaagaaaaaaactacagacatttaacaaataatgaactgtgttttccttgccctgggtgaagtgctgatgagctggcagtgagcagacaggccaggtggggtgttctgcccgggt

SEQ ID NO: 496471 - DNA, 558 bp, Homo sapiens
tgctctgattagccaacacttggctacttgtcacaagaatatattcatttgggccaggtgcagtggctcatgcctgtaatcccagtgcttttggaggccgaggtggtggatcacctgaggtcaggagttcgagaccagcctggccaacatggtgaaaccttgtctctactaaaaatacaaatattagctgggcatagtgatgcgtgcctgtaatctcagctayccaggaggctgaggaaggagaatcacttgaatccaggaggcagaggttgcagtgagccaaaatcttaccactgcactccatcctgggtgacagagtgagactccttctcaaaaaaaaaaaaaaaaaaaagaatatactcccaagttaggttgcagttcactctacagagagagctttaggtcaaatttaatttaattaaacaattctccccttttggtcagcctcaaaattttgagattgaccaaaaccttgggcatcaacattacttctgtcaccatcataatggacttgtctgctctcagtatggaattcacaatggacaatgtcaacgtagt

SEQ ID NO: 496472 - DNA, 543 bp, Homo sapiens
caaccgatgtgtcatcaatgactcattttacctggtgaaaacatgctttggcataaagtattatagccttgcattattgagtcatatcagagtttataagagtgggagatacatgagattctattattaggggcataggccctctattactattttacaagagatctatctatgtctttccagtaggagtggatctgattgccatcaatcaataatacctkagaccaagggactccaatcaattcagcatgctttgcctaatgatatttgtttgtaatactgttgcgggacaatcaaagactggagagaccaaaaaaggttcaggagagtttattaaattaaggtgatcaccggttcagccagacatacatccagaaagtctgagccccgaacaaaggcttttcctacttttaaacatattaaggtgggaactacatgaggcaggaagccagtttcagaagtgagaaacaaagcagttaaataacatttcttacatcttgagaaagacatgtcttgcaacctaaccttatcggtccggtgacc

SEQ ID NO: 496473 - DNA, 543 bp, Homo sapiens
caaccgatgtgtcatcaatgactcattttacctggtgaaaacatgctttggcataaagtattatagccttgcattattgagtcatatcagagtttataagagtgggagatacatgagattctattattaggggcataggccctctattactattttacaagagatctatctatgtctttccagtaggagtggatctgattgccatcaatcaataatacctgwgaccaagggactccaatcaattcagcatgctttgcctaatgatatttgtttgtaatactgttgcgggacaatcaaagactggagagaccaaaaaaggttcaggagagtttattaaattaaggtgatcaccggttcagccagacatacatccagaaagtctgagccccgaacaaaggcttttcctacttttaaacatattaaggtgggaactacatgaggcaggaagccagtttcagaagtgagaaacaaagcagttaaataacatttcttacatcttgagaaagacatgtcttgcaacctaaccttatcggtccggtgacc

SEQ ID NO: 496474 - DNA, 543 bp, Homo sapiens
caaccgatgtgtcatcaatgactcattttacctggtgaaaacatgctttggcataaagtattatagccttgcattattgagtcatatcagagtttataagagtgggagatacatgagattctattattaggggcataggccctctattactattttacaagagatctatctatgtctttccagtaggagtggatctgattgccatcaatcaataatacctgagaccaagggactccaatcaattcagcatgctttgcctaatgatatttgtttgtaayactgttgcgggacaatcaaagactggagagaccaaaaaaggttcaggagagtttattaaattaaggtgatcaccggttcagccagacatacatccagaaagtctgagccccgaacaaaggcttttcctacttttaaacatattaaggtgggaactacatgaggcaggaagccagtttcagaagtgagaaacaaagcagttaaataacatttcttacatcttgagaaagacatgtcttgcaacctaaccttatcggtccggtgacc

SEQ ID NO: 496475 - DNA, 554 bp, Homo sapiens
cctgggtgtggtgtgtcagtgactcaggcctggcagccctgcagcagccccctgctggagacacaaggtcagagccacaggagcctgaggaaattgagaagaagcacctttgggtcacctgtggccccagtgcctacccctccagaggtggggcctgccatgcaccagggggctgccctcactgggcactgcctggccatctccactaagaagatgaggccctggcctgcagaggaaataatgagttgctcagagatgggtttgggactcccyggggaggtgccagacaccacattcccgcctctgcctagagcctcattaccacccgctcttcgggggctcagtgggcggacaggctgacctccatccttagcctcagccagtggggctgggcagagtgggtggggatgggccatgtgacctccgactcaggcatccagctcagtggggagcctgggtccagcggaagacttggggagctggactccaggttccctctcgctgtctcaggaaggggaggtatatggcaggagactggaaccggttccctgagt

SEQ ID NO: 496476 - DNA, 589 bp, Homo sapiens
cagctctgagacccacagccctgtggcttgagacccacggacccctccacctcccttctgggatgacaggagtgtcagaccccagtccataggttggacccaaagggccttgggccraaggacacagagtagaacctcaccctctgactcctgacccagggtctctgtcaaggcctgctccttcccttagagcagaggtccccaacccctgggccacagactggtactggtcctgtcaggaacctgttaggaaccaggctgcacagcaggaagtgagcagaggctgagctagcattaccgcctcctgtcagatctgcagcagcattggattctcataggagggagaaccctattgtgaactgcgcatgcgagggatctaggttgtgcgctccttatcaaaatctaatgataaatgtgatgcacttgaatcatcccaaaaccaatccttccccaatcctgatccatggaaaatttgtcttgcacaaaaccagtccctggtgccaaaaaggttggggaccgctgccttaaagcagtgaaaaagaaagcaaatagcctggcgtgaatgccaaaatgaccgctcaacaaggac

SEQ ID NO: 496477 - DNA, 589 bp, Homo sapiens
cagctctgagacccacagccctgtggcttgagacccacggacccctccacctcccttctgggatgacaggagtgtcagaccccagtccataggttggacccaaagggccttgggccgaaggacacagagtagaacctcaccctctgactcctgacccagggtctctgtcaaggcctgctccttcccttagagcagaggtccccaacccctgggccacagactggtactggtcctgtcaggaacctgttaggaaccaggctgcacagcaggaagtgagcagaggctgagctagcattaccgcctcctgtcagatctgcagcagcattggattctcataggagggagaaccctattgtgaactgcgcatgcgagggatctaggttgtgcgctccttatcaaaatctaatgataaatgtgatgcacttgaatcatcccaaaaccaatccttccccaatcctgatccatggaaaatttgtcttgcacaaaaccagtccctggtgccaaaaaggttggggaccgctgccttaaagcagtgaaaaagaaagcaaatagcctggygtgaatgccaaaatgaccgctcaacaaggac

SEQ ID NO: 496478 - DNA, 513 bp, Homo sapiens
caggcagttacaagcagacacacacacagacaggtggacctaaggctaatcctccctccaagaccttacacagcaggacgccagtatccttgcccatgggatatgtggggcacacagattatcccaaagtcctagggacccaggaaatgatctcttcactcagaacccttcaggtgaccactggggaaacctggcttcagttgggctctgaaatatcccacaggctgttctaacttctccatacattgcatttcagcagatagttttgtgatgagagtaactgttaagcaaatcaccctttcccaacagaaccatattcaaatgagaggaagaattcctgatggggtggggcacaaagtatcaaatcaatcacagccctgaacaacagccccaacctcmataaccattaccattgctcgaaatcactgaccattcagcaccccgcaaaggagacaggggcacctggaccatggaccccacaggggctgaaatttagctcaaaccacctctgcc

SEQ ID NO: 496479 - DNA, 419 bp, Homo sapiens
ttttgcatttactgtacacttttgatgtggccaattcagttgcaaactaacatgaattgttaaaactataattctcatttccatcagcgtattcctttgggaaagaacataacctgtccatgaaaggatactctctctatatataaactactgaatcttggatttctattaactatgtggcttttagacataggtaaatgtagtgaaagaaaataatgtgagcttccatctaataagaccagactctgtctttgaaaataattattggaaggagggtggggaaggaacctgtgcccattcacatgagctctacttgctgtatatttaaagcaagtcagatatcgagaaggaatccttcagaataccgcgaacatatggaaactagctrcttatacatattgtctaactcttttaaaagt

SEQ ID NO: 496480 - DNA, 585 bp, Homo sapiens
gtgccaggggaggtttccaaggaccctgcttttcttttctcacacttgatggcaatctcatgttaggtcccctccaatcctagactggaagctccttgaaggaactgacctttatcttgaggttgtttttcaagtattgagagctgtgcctgacacagaatcatggacactcgatagatgtttgttggataaatgaatatattaagaatacactgagaagtcaccagatttggtatgatatgagaaacagtgtgaagtcaattgtctcccccacaaaaaaattactgatgcctgaaaatctaccatttacaatttatttcatacatgatttattgccttattcatgtaagacaattaatatgtaaatattcttgtgagagttaacacaatgagtcaccaactgaccctgaagtagtttttgggttcccgctgtcaacagaaagaatgggagagcayacgttgcaagaaataggtggtaagagaaaggccaggtagcaaaagggtgaggctggcatggacaggaacagtagagaaggattaaagcaactttgtcagcttcctaattttccctggcatgagtactta

SEQ ID NO: 496481 - DNA, 441 bp, Homo sapiens
ccataatggaaacgttactcgtttaggtaggcacacatgaaatattaatttcctggattgtctgcatttgcatagtaatattaagttcatcttcttggcatgttatggtctcaattagcaattctattgtcatacctgagatttggggaaggaaggaaaagagtaggctgtagacaatttccctctggaaacagcaacactaatggagcttatcactcccatcattaatttaatcaaaaaccttaaggcagagggctaaagcaatctgttaagaaaacattttctaaaatgagaatgcttcccatttcaattagggtcttgctctttttttctctttgagacatgtttttttctctctatgctctcttccccacctcccatacccgccrctgattagatttgcaaccgggggctgtattttttttccaaagaatgttttct

SEQ ID NO: 496482 - DNA, 643 bp, Homo sapiens
tgtgaataatagaagcagaagagaatatatattgttaaaaatgataagtgtgcctgtagtctcagctacttgggggctggggtgagaggactgcttgagcccaggagttggaggccagcctgggcaacatagcacgaccccatctctaaaaaacaggcaggcttgatgggtcacacatgtaatcccagcactttgggaggccaaggagggaagatcacttgagaccaggaacttaagaccagcctgggcaacatagtgataccctgtctctacaaaaaaaaaaaaaaaaaaattagctgggcatggttgcacatgcctgtagtcccagctacacagggggctaatgtgagaggatcacttgagcccaggaattcaaggctacagtgatctatgatcacaccactgcactccagcctgggcaacagaccaaaccctgtttcaaaacaaacaaacaaataaacaaacaatcaaaaaacagtagggtccttcaagactttgaaagtcttgaagtcttcaaagataattcaatctctttctctctacccctgcgctactactgttaagagagttaaaactcaaaaagttgacatggttcacagcrtcacatgtctagtagactatacaagcaattcaccaaactggg

SEQ ID NO: 496483 - DNA, 654 bp, Homo sapiens
catccatcaactcacacagttaccctttttattcctgtggcaagaacacctaaagtgtattcttttagcaaaaatcccaaatacaatacaatacaccataatcagcatgttgttcattagatctctagacttcattccacatatctatccctttgtatcctttgacctacatctccctacttcctacccctttcacccctggtaatcactgtttttaactctatctctgtgtattctactttcttttagatttcacatataaatgagatcatggggtatctgcccttctgtgcctggcttatttcactyaccataacgtcctctaggttcaactgcattagtatctttgaaaagatgaggcaatcccccctataatccccattttacagatgaagaccctgaggctcagagaggtgaagttactctcagggtcattccgtaagtggcacagccaggatttgaacctgggtccatttaattctagaagtcatggtcttaacgtgaggggattctacttagggccagttgtcactcacacccagaggtaaacgtagtaagatggctcatggggctagatcagaagccattggatatggtaggactccccagtgagatcttgttatggggacagaattcaacccataacaagagggg

SEQ ID NO: 496484 - DNA, 591 bp, Homo sapiens
tccacctgaagtaacttaccctgtagttactgcaaataaactttatcaataaatgtcaaacttgttaaaaaggcaaatgtccagaacctccctgagtggttctggtttagtaagcatcccagtcaggtctcagcggcagagaacagaaattgcttgctacgtgaatccaaaaggcatttgattcaaagtgatggagacgggaaacaaacatctagagaaacagtcattcatagtgaagttctgctataattgctcccttgataataaatggatgcaattttgttttttgttttgttttgttttgttttttttgagagggagtttcactgtggttgcccaggctggagtgcaatggtgcgatctcagctcaccacaactccacctcccaggttcaagcaattctcctgccccagcctcccgagtagctgggattacaggcatgcgccactatgcctggctaatttttttgtatttttagtaaagacggggtttctccatgttggtcgggctggtctcaaacgcctgacctcaggtgtagcagtcggagatgcactcamttctagccttggtgcccagacctgtgaactctgg

SEQ ID NO: 496485 - DNA, 581 bp, Homo sapiens
ctgcttgtctgagggctctctctcactggcaggctggcagggctagggagttaagttatcccatcagagcagcccacaatccatgactgatgggagcaaatcaataaataccccatcctcccactgggaggtcccccggggggattgtgcctcagtcgcccacagtgacaacctgcttagtaatgctcacattactggtttccttatcttccctgtctctgcttctgagatcacctccaaaataagttactttccctcaaatccttgtttcaggttcttctgggagaaaccarcttaggatgtctgacaaagaaaaacaaagcaagggcattctgtacaaagacaacagcttttataaaaggcccagacttgtttagcaaataataagagattaattgtgaactaattgtgagtggcaggaaatgataggagatgaagctggagaaatttggactggctcatttgcctcttgaatgggtttttctaggaagagtcatggcggatttccagtcatggttctcgctatgtgaataggaatatatatatatatatgtatgtatgtatacatcatgggtttttat

SEQ ID NO: 496486 - DNA, 581 bp, Homo sapiens
ctgcttgtctgagggctctctctcactggcaggctggcagggctagggagttaagttatcccatcagagcagcccacaatccatgactgatgggagcaaatcaataaataccccatcctcccactgggaggtcccccggggggattgtgcctcagtcgcccacagtgacaacctgcttagtaatgctcacattactggtttccttatcttccctgtctctgcttctgagatcacctccaaaataagttactttccctcaaatccttgtttcaggttcttctgggagaaaccaacttaggatgtctgacaaagaaaaacaaagcaagggcattctgtacaaagacaacagcttttataaaaggcccagacttgtttagcaaataataagagattaattgtgaactaattgtgagtggcaggaaatgataggagatgaagctggagaaatttggactggctcatttgcctcttgaatgggtttttctaggaagagtcatggcggatttccagtcwtggttctcgctatgtgaataggaatatatatatatatatgtatgtatgtatacatcatgggtttttat

SEQ ID NO: 496487 - DNA, 581 bp, Homo sapiens
ctgcttgtctgagggctctctctcactggcaggctggcagggctagggagttaagttatcccatcagagcagcccacaatccatgactgatgggagcaaatcaataaataccccatcctcccactgggaggtcccccggggggattgtgcctcagtcgcccacagtgacaacctgcttagtaatgctcacattactggtttccttatcttccctgtctctgcttctgagatcacctccaaaataagttactttccctcaaatccttgtttcaggttcttctgggagaaaccaacttaggatgtctgacaaagaaaaacaaagcaagggcattctgtacaaagacaacagcttttataaaaggcccagacttgtttagcaaataataagagattaattgtgaactaattgtgagtggcaggaaatgataggagatgaagctggagaaatttggactggctcatttgcctcttgaatgggtttttctaggaagagtcatggcggatttccagtcatggttctygctatgtgaataggaatatatatatatatatgtatgtatgtatacatcatgggtttttat

SEQ ID NO: 496488 - DNA, 560 bp, Homo sapiens
gtggccagggctacaaggtcacaccacatagaaagggcaatttatattaagggaacagccttcagccacttttttttttttttttttagagcggagcagtgtaaccatcagacaccaggaggcttcctggccttctcagtacatcacgcaatggcagctttttgaagatcagtaacatgaagtctgtcctaaagaacattgaaggtatccctcctggaaaacaatgctattttcttatggtccacaaggaaaagaaagaaggaatgtaagtattccagttacaactcactaggatccatccatgtgtaaatacatcccacaaggtggattaaaagtatataaatttgtgttaaaaagaargtaaaatggttattatataagatgctgatattaggggaaaattagtgaaggatacgtaggaactctctgtactctctctgcaacttttctgtaagtctaaaattattccaaaattagaagtttctatttttaaaaattgatggtcaaaaagaaaagaagaaggtaaaattcttattgtatttgtcaagagattcactgac

SEQ ID NO: 496489 - DNA, 627 bp, Homo sapiens
atgcctgctatggtccaggaaatgctgggttgcccagtttcaaaggccttagttcaatttttctgaactcagttttctgctctggtaggaggatggatgggttttcaaataatgtgttacttgcctttttatttacatgactgtgatcctggagtatgaaaaacctcttcttatgttccaaatattttaagaacgttttaatgtaaaaaaaaaaatctgaaaaaggtggtaaaatccctrctttagatttatgtttactaatttttttcttgttctcttgatattgaagtgccctgaagaccacaagctaccttggagctgctcgcctgtgttctgggaagacagagttaagttatgaatctatgcagcaaggcagcacccaataacctacagaaaggttataataggacatctttttaaaagttgaccaacaagcctgtttgcctctcaattaacgttcttaaggttataaaactggaattctgttttagaaggagtggatcattgttcataataagacaaaaactaggccctcaggagaaaattgatggaaaccacaaacccttccctttggcaatcaaattttgttagattatcagcaatgcattatgaaatctgcacttgtac

SEQ ID NO: 496490 - DNA, 627 bp, Homo sapiens
atgcctgctatggtccaggaaatgctgggttgcccagtttcaaaggccttagttcaatttttctgaactcagttttctgctctggtaggaggatggatgggttttcaaataatgtgttacttgcctttttatttacatgactgtgatcctggagtatgaaaaacctcttcttatgttccaaatattttaagaacgttttaatgtaaaaaaaaaaatctgaaaaaggtggtaaaatccctactttagatttatgtttactaatttttttcttgttctcttgatattgaagtgccctgaagaccacaagctaccttggagctgctcgcctgtgttctgggaagacagagttaagttatgaatctatgcagcaaggcagcacccaataacctacagaaaggttataataggacatctttttaaaagttgaccaacaakcctgtttgcctctcaattaacgttcttaaggttataaaactggaattctgttttagaaggagtggatcattgttcataataagacaaaaactaggccctcaggagaaaattgatggaaaccacaaacccttccctttggcaatcaaattttgttagattatcagcaatgcattatgaaatctgcacttgtac

SEQ ID NO: 496491 - DNA, 521 bp, Homo sapiens
ttatgtaattactatacaagttactgctgtagcaagacagctcctgggatcattgccatcaaaatacaaaaaaaaaaaaaattaaaaataggaaatatttggaagacagaagaaaatactgtcatgctttaaaaatacatattttaaaatacaaatttttaamttcatgtgaattcaaaagatataatttattcaagttaaaaatgaagtggatatgtatagaatagtgatatatgagttttgtaacacttttaaaataattaatgttataaatcagaatttcccagataatggtcaaaagaataccacttcttcaggttgctaaaggtattaaatagtcatatggtttggctttgtatccccacccaaatctcatgttgaattgtaatcccctgtgtgaaaggtggggcctggtgggaagtgattggatcatggggttggtttctaatggtttagcaccattcccgtagtactgtctcctgatagagttctcacaagatctggttgtttttaagtgtgtg

SEQ ID NO: 496492 - DNA, 602 bp, Homo sapiens
gccgattcgagacatttgggcgagcgggtcaggaggggttagtttaaaggtggaagctgaagtcttgggagtaagtaggatcacatcgtagagtgcatgtagagagttctttcttgggaactctggggaaccccagcttttaaggaccttgaaggaaattcagagggatgactagatgggggaaggagaatcaggggagagaattttaggaagttctagagagttctaagaagtgattggagagtcaaagtccacatgyaagttgagacctggaagtaggcatctgtagggtacagcaactaaggggtcatcagagaatgcaatgaaaacgccttcagtggagtgtgtctgtgcaagggaaagggagaagaggatggcggaagactggccattgtgtgtctgaaattaatgggacatggaggcttaaagaatggagttcatgctgcaagctgaccttgaaggaagagaaaaccagatatatggagatacaggggccaaggacgctttcgatttttagttttaatatgtgtccttttagggtgggaggaagagaagtaaagatatttaagtgctgagggggaggaggcagttgacaaggcaag

SEQ ID NO: 496493 - DNA, 568 bp, Homo sapiens
tgctcaattttgtatggtccagatgtatatttagcttggcttctagacatgactactaaagtatagagttgtttcctaagacagtggacataactcaccttttaaaatttctatttaaagaaaatattcactacatttaaacacactccttgatcagttggctattaatcaagattaattattgctatgccttaaaaactgtgggaaagaattaygggaaaagtgactatagagagctaggctgaaaagagtgattccaattgggtcttgattggttctatgaaatcatgaagaatccatctgaatctcagtttctcagaatacatgtggtccatcatgtatggaacactggggagtgaagtcaaggagctaaagaggagaaaggagtcctgagcagagagaaggcctggagttggtgcacggggcaaagtggtctgtaagtcagagaggagcagtcaaagcggaagatgcaagcaagggagctgcgcctcttcagcctttcaaagactcttggcacgcccacatgaagagccagcagactcaatgtacccatagctatgctggtttt

SEQ ID NO: 496494 - DNA, 568 bp, Homo sapiens
tgctcaattttgtatggtccagatgtatatttagcttggcttctagacatgactactaaagtatagagttgtttcctaagacagtggacataactcaccttttaaaatttctatttaaagaaaatattcactacatttaaacacactccttgatcagttggctattaatcaagattaattattgctatgccttaaaaactgtgggaaagaattatgggaaaagtgactatagagagctaggctgaaaagagtgattccaattgggtcttgattggttctatgaaatcatgaagaatccatctgaatctcagtttctcagaatacatgtggtccatcatgtatggaacactggggagtgaagycaaggagctaaagaggagaaaggagtcctgagcagagagaaggcctggagttggtgcacggggcaaagtggtctgtaagtcagagaggagcagtcaaagcggaagatgcaagcaagggagctgcgcctcttcagcctttcaaagactcttggcacgcccacatgaagagccagcagactcaatgtacccatagctatgctggtttt

SEQ ID NO: 496495 - DNA, 531 bp, Homo sapiens
gcaatactaggtcagaagtcctttgttaacatcatgctctgtacacatttcaagamaattacctgttgagtccacgtgctttgttcccacacatgcctatttccactgtcctagacaggtaggaacccagtctcttttatctttgtggccaccaggctgtatgcagtgcctggaacagaccaagtgctaagtaaatctgaatggacaagagtagaaatatcaacaatttggtagaataacactgccattcaaaaggaaaaattttgatatccaaagtgattgtcttacatgagagaggtgtatccttacaaagaatatcaaaaatctctggaagtacagctatacaaagtcatttttatgtaacttggccttagttgagtctttcagcgatttgatattgatggcctgatagtgtggctgtgaaggatccttactcaaaaaaaatgcctcacattagtatagcactttagagagaggaattgaggttagaaatatgcaattatagcatttgcctaaccacaagcacatgca

SEQ ID NO: 496496 - DNA, 274 bp, Homo sapiens
cacccacacactctctctcacacacacacacacacacacacaggccaggggaaaacagaactacastgctcccgtttggcattctttgagatggcagtgacaatgcccactacaagcaggaagtgaagatgaccaaaggcacccatcagtctgcctttgcccaaagctggccgggctccaacagccctgctcgcacccccaactgtagagtgacccaaatggatgcccgtctggacactgcctgaagtcagggtttgcttgtcttgttaaagct

SEQ ID NO: 496497 - DNA, 604 bp, Homo sapiens
ctgtcaggattggcaaattgtaactgctcttaagygaaggcatttgttttagaaaagatgagatgcaattttcagaattggaggtttatggatacctcctggggtaatggactcttttatacctgaagtttatcttcctgaaagacaaataaaaggtttgggttttgctgttagtgtaagagcagaatgtgtcttctgatcaacaaagagggtattttacattccctggaagcacccactgaaaatccttgctaagaatattcattggcttattctcctggagacggagacagattgggcaagtcatctacagggttatttgtcttcacactgtctaccactgacagatcatttctaccagaatgtgttccatgtaagtgttttggatgcaattcaagttacctctggtaatggtgccattgatcatgctgtggatgtggtaaagatatctgcctgaggatgaacagttttattgtatattgtgacaattgatttttcttttgctgaagacacaggctggagatattttagagcactgtattaatgaccaagcagcttttaacagatgaataatggtgaaagagtatgaatggataatcttcta

SEQ ID NO: 496498 - DNA, 589 bp, Homo sapiens
tatctgtagcacatttagatttcaggtatataaacttgtttaggagtttgattttccttaactatcctaggagaatcgaaggactcctcccctattttgttgtctgcttcagcttgatggaacagtaatgcaaattttccagcctactttattcctcagtttagggaatgaattaaagttatccttagaagagaaaataatgtaaataagaatgaaatatatgtatgtgcttacctatggtgtacaatacaggagcttaggggaaagaactgagaaagtgtgagttagtgatctttacacctgcatttcacaagtgactgagaatgaagcagataaaagccatatattattataaaaaggaaattatttatgtgaagtagacatcaacattagagattgtctgtaattaaatagaatttaaacagggtttcagtggaaattggtcctaatatcttatgatccattcatgcgtgactctkccctgtgaaaatgtgcagggggaacattcctgggtgatggaatcagaactgaaaaagatatgcaggtacacggtgaggacggttgacaacacagcatttttaatctgcat

SEQ ID NO: 496499 - DNA, 601 bp, Homo sapiens
tgtgtgcaccatcatttctttacactctagccaaccgctgtgcaatggtctgaatgtttgtgccccccagatttcatatgttgaaatgttaaccccctaggtgatggtatcaggaggtggkgacttgggcaggtgattagttcatgagggtggagcactcatggtgggattagtgccattatgaaagaggcccaagagagctcctgctctccctccattacaaggtggacatagggagaaggggccatccatgaaccaggaagcaggccctcaccaggcactgaatctgcaggcctcttgatattggacttccagccaccaaaactgtaaaaaataaatgtctgttgtctacatttcatccagttcatgtattttgttatagcagcccgaacagaccaagacaaattgttactctcaaatttcttttttctcttcaaattactgggtaagaatttgctttcgtttgtattgttttgcagttccctgaaaactactaaggttgaacattttttcttcatatcattcttgtcatcagtacttctggttctgttccttctcatttctcagatttttttattaattatttaaagaattatttatt

SEQ ID NO: 496500 - DNA, 613 bp, Homo sapiens
tgtctgtcttatattgaaggttagtgctggattagaaggtcatctgatgagaggatgctttctaggtgtgattatgcaacacagaatggggtggggagagtagacacatttgtttgaaagtggggtttttttggcagactcacagttcattaaattcacatttcttctaggacagacagattggtggcagttgagcaaggctaaatctagaggaatatgttagaaaaataaatgcctggaaagaaaagtggaggttccagaaaacaggatgagttttttgggtggtacaaaaaagaaagtgcctttaattataaaaacatagctgggccgccctgaaaygaatcagaggaaaaagggaacaacagagacatgttgtagtactccagaaaaagtgacggtagaagaaaacatttttgctgacattaaagtttctcagttattcacgacctgaagagacaaggggctggggaagaacaggctctgggaaatagtgtgtggcaaaatgttggctctgaccaggccttgagagacacagattctcaaactccaacagcagttttggtcagcaatctgctagggtgaagcaaaacaaatgtttcaggcaaaacaaagt

SEQ ID NO: 496501 - DNA, 613 bp, Homo sapiens
tgtctgtcttatattgaaggttagtgctggattagaaggtcatctgatgagaggatgctttctaggtgtgattatgcaacacagaatggggtggggagagtagacacatttgtttgaaagtggggtttttttggcagactcacagttcattaaattcacatttcttctaggacagacagattggtggcagttgagcaaggctaaatctagaggaatatgttagaaaaataaatgcctggaaagaaaagtggaggttccagaaaacaggatgagttttttgggtggtacaaaaaagaaagtgcctttaattataaaaacatagctgggccgccctgaaacgaatcagaggaaaaagkgaacaacagagacatgttgtagtactccagaaaaagtgacggtagaagaaaacatttttgctgacattaaagtttctcagttattcacgacctgaagagacaaggggctggggaagaacaggctctgggaaatagtgtgtggcaaaatgttggctctgaccaggccttgagagacacagattctcaaactccaacagcagttttggtcagcaatctgctagggtgaagcaaaacaaatgtttcaggcaaaacaaagt

SEQ ID NO: 496502 - DNA, 625 bp, Homo sapiens
caaattttcaattctcatttatagaagaggaaaggctcatatcacttacttttgtgggttactgtgaggataaaatggaaagatgtccatatagtgttgcgtagagtagagactcccaaactcactgtataaaactcatagagaactatttacaagtgaggttatccttttcctgagtttgaatatctactatatgacaggctacatctttagggaccatacctagaatattttgttgttcaataaatggatatacagtaaacacacattgcaggaaaatgagccagtgtgggcacaaaactctgggaatcyagtctagtccagtgggagtggggtttggggctctaacagtactggttcaaccagtaaccaacttattggttcactcttgaaaagagcaaaataaaaatcccatggaactataccatcatttttgtgataggtaggtaggctaaccttaccaagttcattgctacttttgatctgctaaaacatgtgaatttggttcactagagaaataatacttcctctgataccaccatggggctttgctttctccctttaatggcatttgaacaaggcccttctggtcctacaataaatattatacaggaatacttttata

SEQ ID NO: 496503 - DNA, 642 bp, Homo sapiens
acaactgcaatattccaatggctgaccactgtaaagatctatttttaactcatgcaacatcctcagcatcaacaggcctgatcaggtgactcttctggggtctcttctcaaaagacaagtcagagatctagaatatttccagcatatttccaccttgtggatctgccatcccctggggatttagaattcttcatttccagttttgcaggtgggtgtkttagggacagccacagtttgtaggggcaagttctgaaagtatatcagattacctctgcatctacctcctgggctagaatttatctcagtcacccccacttaactgcaaagggagctgataaatatggtcaagctacaggtttaggaagaaaaggaaactaggttcactagttaccagtttactgcctctcactgccaccttgatacttcagtgcctgctctgcaacattgcactagactctaaacatttcttctgcacagtgagctcgatgggaagttttgtcaataggagttgctggaagaacaccgcagtcgaaagggggcttctcttcctggtctggtgtgatgagttttgttttctcttgctcctgctgtatagtcttgtggtgcttgtgcgtggtgacatccagcagtgaagtgtcccag

SEQ ID NO: 496504 - DNA, 642 bp, Homo sapiens
acaactgcaatattccaatggctgaccactgtaaagatctatttttaactcatgcaacatcctcagcatcaacaggcctgatcaggtgactcttctggggtctcttctcaaaagacaagtcagagatctagaatatttccagcatatttccaccttgtggatctgccatcccctggggatttagaattcttcatttccagttttgcaggtgggtgtgttagggacagccacagtttgtaggggcaagttctgaaagtatatcagattacctctgcatctacctcctgggctagaayttatctcagtcacccccacttaactgcaaagggagctgataaatatggtcaagctacaggtttaggaagaaaaggaaactaggttcactagttaccagtttactgcctctcactgccaccttgatacttcagtgcctgctctgcaacattgcactagactctaaacatttcttctgcacagtgagctcgatgggaagttttgtcaataggagttgctggaagaacaccgcagtcgaaagggggcttctcttcctggtctggtgtgatgagttttgttttctcttgctcctgctgtatagtcttgtggtgcttgtgcgtggtgacatccagcagtgaagtgtcccag

SEQ ID NO: 496505 - DNA, 590 bp, Homo sapiens
attctggcaattagtaggttcccctacaaacgcttatggaacaaatggcgacaacgaaaaggtcacatttactcattttccttccccttccctccccaccttagtgccactccccagaggcttctgtgctttttcttctgtcagttacgccacagtcctggcttatgggttctggtaataccgtctctgctctgtgcccctgcagtcctaggggcgctcataacttctaggtgtggctaaaagtctgggttgcttaacttcctcttttggcttttcagttcttccatgactgtgtaaccagttctctgcattaaatgcccactgtttgaaatacctagagtggttttctgcttgtttaatatgaccatggcaaaatttaaagccatgtgtggttmccttgtttccctgttgatttggggacaaaagccttattagcctcaattcaagacacaagaagaagaatctgtctctagtgtgtctagttttcatgtctggtttttcaaaatttcttaactgatgtgctagagttctttatatattgatatcctgatactaattttttatctattgtatatgtagtaagcattttt

SEQ ID NO: 496506 - DNA, 374 bp, Homo sapiens
caccatagaactagctttatgtttaactctaaaggacaaagagcatttggatgaaactgcaygccaatatctatataactaggcccccttggttaatagcaacattcaattaaaaaaacaccaaagcctcaatatattaagatgtaatttttatcttttaaataaagatctgagtgattaagtgcaggataaggacgagaatttaaaaaggaagacaaaagaaaaataaaacatccattgtcctctagttcattgtctgctgtccagtccccaaaatgaagcactttgactacaagttttattagaagccaagagccattagataatttgcagagtcatttccagggagtctccagttctgtgatacctcataa

SEQ ID NO: 496507 - DNA, 625 bp, Homo sapiens
aactttcaaattcagtcaaaaggaaaaaacatgtgtttgtctttttgtgctttaaaatttgtcaacaaataccaaactgagcacttctgaaacatgaattgtaggcccattcctgactcagtttaccactgacacaatgatcattargcataccgcagtagagtgtggcagatgcattttgataagttattttgttaattagctcaaccacttaccaatctctcagacataaacactacttagaaattaattgctcttaatttgttagtatgaaaacttgcctaagattctcagggacctcagacaaaaattaataaacataactttttaaaaaaacaaagcaccaaattttttcatacgtatgatgtgactatcttcttgaaataactcaaaagttctccagcaacttagcttgtaactcatttcaaataagattgcatgaaagaagaaatgaagagtttaatatgccccatcacccctgaggcaattagtttggagaagtgacacaagtcatttaaagaaagtttctggagtacattgccaggctcctgatccttagcctaacacttctgccgacataaattctttggtctccatttgccaaatggatatgccacacatttag

SEQ ID NO: 496508 - DNA, 581 bp, Homo sapiens
ggcagaatattatgaactggccgagccattcattttcttgaatatgttattcagtattttatgctaaaccagcaatacaccatccattttagtacaatgatccttatgttcaataaaattgaagtgtcgcatcataaatcattatagtcatttattttacattagacacattagccactatattccataatctattacaataaggtggatttaaatgtaccccaaggaactgcaataataactcgagaaccaaatatagcaatttatggataaaatatgcttaacctaaaactgcactagctatcgtgatggctgtgaactctgaatggaatttagtgctgatggtgactgaactcagctatacataaagagggaggaaagagaaaaagaaatggcagaccttcctctaattttstgttcgttaatttaaaaagtgtactagattattacactatcagtgagacggacaaattttgctggaggaactcatgctcagttgaaactttttctaagtaacacatattcaaaatctctagttaactattcaataggatgcctgttgtttccaacaacagcagtgt

SEQ ID NO: 496509 - DNA, 581 bp, Homo sapiens
ggcagaatattatgaactggccgagccattcattttcttgaatatgttattcagtattttatgctaaaccagcaatacaccatccattttagtacaatgatccttatgttcaataaaattgaagtgtcgcatcataaatcattatagtcatttattttacattagacacattagccactatattccataatctattacaataaggtggatttaaatgtaccccaaggaactgcaataataactcgagaaccaaatatagcaatttatggataaaatatgcttaacctaaaactgcactagctatcgtgatggctgtgaactctgaatggaatttagtgctgatggtgactgaactcagctatacataaagagggaggaaagagaaaaagaaatggcagaccttcctctaattttctgttcrttaatttaaaaagtgtactagattattacactatcagtgagacggacaaattttgctggaggaactcatgctcagttgaaactttttctaagtaacacatattcaaaatctctagttaactattcaataggatgcctgttgtttccaacaacagcagtgt

SEQ ID NO: 496510 - DNA, 459 bp, Homo sapiens
gattcccactaagccctccaaagccctgcagagccaggctgacctacaaaaaaaatagttgttattataaactaatgagatttgggggttgtttcacagcattattacagcaaatacacatgagatgtgtcttaggtcccctttccagggagccaggctccagaaatttgtactagttttcccatctttttactcagcagtcccgagtaggaraggccttcctgatcaccctgtataaattggcagcttcataaaggtaacacctgatctgagtcttcaggctgaatcgggataagcatgtgaggtgcttgtgaagggactggaagggcaccaccctgtatggtagcctatggccattagttgcgtgtggctgctgagcacttgaacggtcccatccaaattgagaggtgttgttagtataaatacacactggattttgaacacttagtatgaaaaaca

SEQ ID NO: 496511 - DNA, 459 bp, Homo sapiens
gattcccactaagccctccaaagccctgcagagccaggctgacctacaaaaaaaatagttgttattataaactaatgagatttgggggttgtttcacagcattattacagcaaatacacatgagatgtgtcttaggtcccctttccagggagccaggctccagaaatttgtactagttttcccatctttttactcagcagtcccgagtaggagaggccttcctgatcaccctgtataaattggcagcttcataaaggtaacacctgatctgagtcttcaggctgaatcgggataagcatgtgaggtgcttgtgaagggactggaagggcaccaccctgtatggtagcctatggccattagtygcgtgtggctgctgagcacttgaacggtcccatccaaattgagaggtgttgttagtataaatacacactggattttgaacacttagtatgaaaaaca

SEQ ID NO: 496512 - DNA, 551 bp, Homo sapiens
cattgatctggtccagtgaacacagtttgagaaatgaaatggttaaaaatgagactgcatagacaggcagaggtttagtcatagagagcttcccatagtagggagtctggtctttggcctttagtctattaaaaaaggaagccccagagggcctttaatccagagagtaacagtgtcaggtttatgttttgaaaacatcattgcatgttagaggatataggatgggtttggagagggcagaatgagagaaagaagtccatgtaagaggttgagatgggagatggtggagattgaattagtgagagtcagaagagaaaggaagcaccgaattttgggaatagtgccccataagacaagcaggcattagtgatggctgggatgtaaggcatgaaggtaaagaaagaatccagaatgacctctgcatttctagagtaggtgaccagggagatgaaggtgccctygagtgagatacagaatggaggaacaagaattcatttaggcgaaagataactttcctttgggatgatctgggatgaccagatggacacatg

SEQ ID NO: 496513 - DNA, 610 bp, Homo sapiens
ttaaatcagtaaaccaagagtagaatacagtattattattatgtatgtaattgtctgattcacttcagaaataagttgtgtatcatgcttttttctttcctttctttttgtacaagtttttgtttttcttaaattttccataggcttttattttttcttatgttgtatccttagtctcttcactyaaacagttgatcaggtatgttactgctctttctttattcaggagacctctacccagaactatgagttctccttctgcagtctgggatgctttctctctacaccttcggcacaacgctcttcctggagcttcctttccctgccttcttaaagacactgaatccactgactcctaaatctcataacactgcatctgagtaatgattcaattgggtataaagttataggttgagaatatttttctctttgtcctttgaagaaattattccactgtcttctagtacgcagtattactgctcccatttttattcttctttaggaaatgtcctcccgcccacagccttctctacctctaaggttaaaagattcccctgtccttagatgtcctgaaattttagagttatgcatgtaggtatatttattaatt

SEQ ID NO: 496514 - DNA, 600 bp, Homo sapiens
aacatttaattttaaattgtacggctatgtttatcatcttgctatctgtttaccatttttatttcactttttacttttctgtactttctattttgatatggttattgcctactagactatcttgttaaatggctattgaagccttgtattcattattaaaattgttttattctatattttaacttgtgtattcttaaaagctttttgttatattttatgcatatgagtgcctagtttttggttgcaaatgrcttctctcactcgttgactcatctctttgctctcttgtatgtcttctcaaaaatagctcctattttcatgaagctgaatttatctatttgatttgtagttagtatttcgagtatatgcatgtcttgtttttgaaatatttgcatatgtaagaatcattatatgtcatgttatattttatatttaaggagcaaaacatttattgtgctattgtaggtatttattttttaaggtaaagtagcacataagagacatcatctcaaaaattagtcttaattgacaattaattggctatgtttgcattgggggaacccgctcccatatttcaacataggttctttttattttccc

SEQ ID NO: 496515 - DNA, 628 bp, Homo sapiens
tgtttatcatcttgctatctgtttaccatttttatttcactttttacttttctgtactttctattttgatatggttattgcctactagactatcttgttaaatggctattgaagccttgtattcattattaaaattgttttattctatattttaacttgtgtattcttaaaagctttttgttatattttatgcatatgagtgcctagtttttggttgcaaatgacttctctcactcgttgactcatctctttgctctcttgtatgtcttctcaaaaatagctcctattttcatgaagctgaatttatctatttkatttgtagttagtatttcgagtatatgcatgtcttgtttttgaaatatttgcatatgtaagaatcattatatgtcatgttatattttatatttaaggagcaaaacatttattgtgctattgtaggtatttattttttaaggtaaagtagcacataagagacatcatctcaaaaattagtcttaattgacaattaattggctatgtttgcattgggggaacccgctcccatatttcaacataggttctttttattttccctaagtgtcggctggtctgagaaataaagagaaacagtacaaagagaggaatttta

SEQ ID NO: 496516 - DNA, 628 bp, Homo sapiens
tgtttatcatcttgctatctgtttaccatttttatttcactttttacttttctgtactttctattttgatatggttattgcctactagactatcttgttaaatggctattgaagccttgtattcattattaaaattgttttattctatattttaacttgtgtattcttaaaagctttttgttatattttatgcatatgagtgcctagtttttggttgcaaatgacttctctcactcgttgactcatctctttgctctcttgtatgtcttctcaaaaatagctcctattttcatgaagctgaatttatctatttgatttgtagttagtatttcgagtatatgcatgtcttgtttttgaaatatttgcatatgtaagaatcattatatgtcatgttatattttatatttaaggagcaaaacatttattgtgctattgtaggtatttattttttaaggtaaagtagcacataagagacatcatctcaaaaattagtctyaattgacaattaattggctatgtttgcattgggggaacccgctcccatatttcaacataggttctttttattttccctaagtgtcggctggtctgagaaataaagagaaacagtacaaagagaggaatttta

SEQ ID NO: 496517 - DNA, 628 bp, Homo sapiens
tgtttatcatcttgctatctgtttaccatttttatttcactttttacttttctgtactttctattttgatatggttattgcctactagactatcttgttaaatggctattgaagccttgtattcattattaaaattgttttattctatattttaacttgtgtattcttaaaagctttttgttatattttatgcatatgagtgcctagtttttggttgcaaatgacttctctcactcgttgactcatctctttgctctcttgtatgtcttctcaaaaatagctcctattttcatgaagctgaatttatctatttgatttgtagttagtatttcgagtatatgcatgtcttgtttttgaaatatttgcatatgtaagaatcattatatgtcatgttatattttatatttaaggagcaaaacatttattgtgctattgtaggtatttattttttaaggtaaagtagcacataagagacatcatctcaaaaattagtcttaattgacaattaattggctatgtttgcattgggggaacccgctcccatatttcaacataggttctttttattttccctaagtgtcggctggtctgagarataaagagaaacagtacaaagagaggaatttta

SEQ ID NO: 496518 - DNA, 667 bp, Homo sapiens
taaaactgtctaaatatttctttcagtaaatactctgtatatttttgagacaatcaaggcattaaatgtagcaaaatgttttagactaaaacaaatatttttatttgaacaacttgactactccctgtagaaatggctttagagttgttatataaacattacacttaaatgcaggtaaaacttgaaccaaaatgttaaccacaattaaaaataccaaataaataccaactggcctagaaaacgccactgatcttaaattttggacaattacaggcatgcaattatgttaagatacacatgtatatggtcagttaaattgcaaccatgcaaattattgagaaatgccaagtcttcaacaaacatgtcaaaaaaaccttatatctgataagaaaaacaatgtaagtgagataaacagtgtactttagcccatacctcacatcataaaatacatagttcacactttattgaacacttacccatgatgcacttacaaaaaaagggaaagaaaagataaataagacttcataaaaattaaaactgacttagaagtcaccattgagcacataaaattgaaagctatagattgagagaaaatattttaatatatttctacataaacatrtgtgtgtgggaaaatatgtgtaatgtatttgtacaaataaatagt

SEQ ID NO: 496519 - DNA, 660 bp, Homo sapiens
aaatcaaattttgttttaatcaggatgctgaaaacttatttaccagtctagggaagataccttagtacagtctatttatcttgcaccagggagtgaatttctgttatagtcatcttcatatgactatcaactgaatatactgactaaatacctttaacttgaaagtactttttataggtaagacatgcacatagttgattttatttattgttcaaggagagaactattaaataaatcatcctatgtatgaagcatgtcttagtctgtcagtttgacagtataataaaacaactcaatcagtaataataattataattcatctgaaatactaaagcagcttttatatttcttagaatcaaatgtttaaatgtattcaatttaatttacaaagaatgtcatttaaaatatggtctactaggtttatattattaacattttatatgtaacatataatactcttgaaaaaattagtggtaataaatttacatagatggataaatagrtagacaggcatagacactaagttaaacagtaatatacatgggaatgtatactgacacatctagatttgtgagtctttgaacctcaaaaatccataatgtaatttgtatagagaaaatggagtctgcaaagaagagattagtaaacaggcacctggag

SEQ ID NO: 496520 - DNA, 640 bp, Homo sapiens
tgatcttgggagtatgtattgtacttttcacttcataaagctgaaatgagaggtgttaagagcttttacttctgctgagtgtcattgtttctctatcatcccctttcatgttcccattatcaaaattttctcagatgtgtagatgcccactacagtgaaatgcgctgccaaagagctttcaggaattttacagaagctttcttttttggatcacatctcaagttcaaytcagtcatctgattcagtgaaatctgtagactctgaagaaaagaaagaaaaaaaaaagaaactcagaagtcctattgtaaattttgcatgaactcacgtgctgaacttttcatattaattgcagttatattggtaggtgctgaaagttctgtattctcaaatccttgtgagttaacatcatagaatcttctgttattctcatatgacagtcccaagtggaatattctaggtaagcaggaaacttcctgtacatgttgattcagtcctgacatagaatcacaagattcttatatttagaaacttcccccaactccccaccccagtgtctcatcttcatctatatccagctggcagaaacagaaaggacacaccaacaaacctgtttcataatttcctttacaaacaagtaacg

SEQ ID NO: 496521 - DNA, 640 bp, Homo sapiens
tgatcttgggagtatgtattgtacttttcacttcataaagctgaaatgagaggtgttaagagcttttacttctgctgagtgtcattgtttctctatcatcccctttcatgttcccattatcaaaattttctcagatgtgtagatgcccactacagtgaaatgcgctgccaaagagctttcaggaattttacagaagctttcttttttggatcacatctcaagttcaattcagtcatctgattcagtgaaatctgtagactctgaagaaaagaaagaaaaaaaaaagaaactcagaagtcctattgtaaattttgcatgaactcacgtgctgaacttttcatattaattgcagttatattggtaggtgctgaaagttctgtattctcaaatccttgtgagttarcatcatagaatcttctgttattctcatatgacagtcccaagtggaatattctaggtaagcaggaaacttcctgtacatgttgattcagtcctgacatagaatcacaagattcttatatttagaaacttcccccaactccccaccccagtgtctcatcttcatctatatccagctggcagaaacagaaaggacacaccaacaaacctgtttcataatttcctttacaaacaagtaacg

SEQ ID NO: 496522 - DNA, 580 bp, Homo sapiens
tgggtgctaagcccctcactgcccagggctggcggcgacgaccagccgctccgggtgcagaggctgccgagcccacgcccacccggaactcgtgctgactcgcsaactcgcgaacacggtgcacagccctggttcccgctggcgcctctccctccacacctccccgcaagcagagggagccagctctggcctcagccaacccagagaggggctcctacagtgcagcggtgggcttaagggctcctcaagcgagaccagagtggacaccgaggccaaggaggcaccgagagcgagcgagggctgctagcacgttgtcacctctcaataggatgaaaaaaaagcgtttgctatacatttgtgtagcaaaatgtaaaatactgaatattaatcttcacataggacgagtgtgatatttgtaggtatatcacaaaactttatgatcactataaagcgatttcattagccaggcatggtggccagtgcctgtagtcccacctactcaggaggctgtggccaaaggatctcttgagcacatgaatttgatgttacagtaagtagtgattgcaccactccacattag

SEQ ID NO: 496523 - DNA, 600 bp, Homo sapiens
ttaatggattaatactgtgtgatcttttgagcattatttttttatatctttctgtagggcctacacctaggattagcttttgaaggttgttttacaaaagaagtaaagtgatttaaactgacacatttatttatttctctcttaattatatcctcctctggtatagaaatactgacacattttatttctctcttaattatttcctcctctggtatagaaaagcagaaaaaaaagatgacttttttttttttttagttagacattaattcaaatcttgacttggctgttttcttgcctatgtaactttgagtaaattaccataaactctgtacctcaatttcctgtctgtaaaatggggatgttgccatgttgtaaayttttgcagagctttactgagataatacatgtaaaaagcccagctcagtgcctagagctaataaagacttgctctgtttccccttgccacccaaggtgtatatttgaccttggctttgccgaattaaggacataggcttaggccatgagacaaagtaaagcttactcacttacctcttagcactacctcagtggttcctgtgggccacatcttcataataccat

SEQ ID NO: 496524 - DNA, 626 bp, Homo sapiens
tcccaacactttgggtggctgaggtgggaggatggcttgagcccaggagtttgcgaccagcctaggcaacatggtgaaaccacatctctacaaaaggaaaaaagtacaaaaaattagctgggtgtggtggtgcatgcctgtggtcccagctactcgggaggctgaggcaggagaatcgcttgaacccaggaggcggaggttgcagtgagctgagatcatgccactgtactccagcctgggccacagagtgagcctccatctcaaaaagaaaaaaggccgaaggggagagcatctaatgtcagctaacacttagggacacccactctggcccaggcttttctgggggctgcttgaccaccctaacttcccgtgaggtgtgcgtgaacatcattccatttccagatgtggaaaaccgaggcccacagcagcaaagccacagccccaaggtcgcacggtgtgttcgaaggtcagccacacgggggcaaggaattttgtttctggctaattcactgctgggtccttggggtyctagaatcaggcctggcacatagcaggtgctcaggaaacactgaatgaatgaatgaatgaatgaatgaatgaatgaatagcagagctgggattcagac

SEQ ID NO: 496525 - DNA, 684 bp, Homo sapiens
tgagcacagtttgggattgaacttcctggcttctgcaatgggttggattgagtgggaatgtaggatgggttctagacaacatggtgaaaccctgtctctactcaaaatacaacaattagctgctaatgaaataccctccagaaccctgttttcttctgccacagaaatcaacaagttccaggcagtgactgctccatcagccagggtcctggagggaagtgataatcttcaagtccctggcccaaaaggtcacaattgcatatacaatgtgagtgagaaataaactttggatgttcttagcctctgaggcataggggctgtttgattactgcagcaaaaccaagcctatcctaacagatacaacaggaatggaggcttttgataccacagaaaaaggtggcagacagtggcatagatcctaggcaaaaaggaagactccagaccctaactggtaacatttatcaagtccttgctgtggtccaggygctctgcacagcgcttcttttgagagtttacatgcttacattgaatttgcacactcatgctatggggtaagagctgatttttttttgagacggaatcttactctgttgcccaggctggagtgcagtggcgcgatctcagctcactacaacctctgcctcctgggttaaagcgattttcctgcctcagcctcccgagcag

SEQ ID NO: 496526 - DNA, 568 bp, Homo sapiens
tacccagcagactgcatagcttttttttttgagacagaatcttgctctgtcacccaggctggagtgcagtggcacaatatcggctcactgcaacmtctgcctcccgagttcaagtgattcttctgcctcaccctcccgagtagctgggattacaggcgcgcaccaccacgcccggctaatttttgtatttttagtagagacgaggtttcgccatgttggccaggctggtcttgagctcctgacctcaggtgatctgcccacctcggcctcccaaagtgctgggattgcaggggtgagccactaataactatttataatgttaatgctcagggctcatcttccccatgccatgagagcccaggagggtaggggccaggtctgttttgctcacagctaagtctgcaacccccggtccagggcccaccagcgggaaggaatcctgcagtgtttccatccatcctggagcctcagtttccacatctgcctaatggggtcatgtgccacttgtccttggggtcactgagtgtcttcagtcatccgccaagtctgcagaagcacctagccagct

SEQ ID NO: 496527 - DNA, 641 bp, Homo sapiens
cctacttaatatctgtggtcataaatttagagtgagaccgttttgattcagcacatagggtgcagaaaaagagaataattgaattcaaagagaattgagtattttccagataaatgtgatagactgagagaaagagaaaggtaaatmagtagaaggtatgtttaagcaaatgaagtgagtgacacagatgggtcagataactgtttagaaggtagagtaagcagtatattagaataagcaagaggaaaatataagaagtagtgatcagattatggttttacacttatttccattttctgcttcagagagtttccaaatcatctttttatccccttcatagaggaagtagataaatctttacttaaaagtacttaatccaatttttaagactaaatgtacaatatttaagtcaaaaagttggtgtaatcaagaacttgaaaacaaatgacatattcactgaagaaaggttgaggagaagaaagagatggggtgtcaaaaacagagagaaaaagaagaaataatgataatacaaagctgaatttggtgaataataaaatagaaattaataaaccaaattcaattgagaatattataaaaaccaatgattaataagggatcaaattgattaattataatgaaat

SEQ ID NO: 496528 - DNA, 641 bp, Homo sapiens
cctacttaatatctgtggtcataaatttagagtgagaccgttttgattcagcacatagggtgcagaaaaagagaataattgaattcaaagagaattgagtattttccagataaatgtgatagactgagagaaagagaaaggtaaatcagtagaaggtatgtttaagcaaatgaagtgagtgacacagatgggtcagataactgtttagaaggtagagtaagcagtatattagaataagcaagaggaaaatataagaagtagtgatcagattatggttttacacttatttccattttctgcttcagagagtttccaaatcatctttttatccccttcatagaggaagtagataaatctttacttaaaagtacttaatccaatttttaagactaaatgtacaatatttaagtcaaaaagttggtgtaatcaagaacttgaaaamaaatgacatattcactgaagaaaggttgaggagaagaaagagatggggtgtcaaaaacagagagaaaaagaagaaataatgataatacaaagctgaatttggtgaataataaaatagaaattaataaaccaaattcaattgagaatattataaaaaccaatgattaataagggatcaaattgattaattataatgaaat

SEQ ID NO: 496529 - DNA, 518 bp, Homo sapiens
ctgtgtttcttgtgatatatatgtgaaaatactaacctcttaaaaaaacaccattaaggccctccattactctggtaaattcataacaaacatgagattcttagttactattaagcgttgccattactctgttattttcaatataagctaaattactattttctagagggaacaccaaaaaatgtcaatttttaaaattcattcattcaactcagttgagtaggaaataataaaatattgctgccagaatgtcttttagatttacatttatatcarctttttctctgttaaaacaaagagtgtgccaagctacaattccataaatgtcaagtggaaacatgctctcacagtttaactgtgtgaacagtcctgcattttctatgggaatacagaggatctgtcattatacaatcttatttcattactaattagtctgtgatatatgagaattacaaaatctgcaatgaatataatcccatgtatccaatataattttgcttcttacattgaaatttttc

SEQ ID NO: 496530 - DNA, 622 bp, Homo sapiens
ggaagtagatcactattgccatctcctggcaagcaaaccacatgaccacagtttaaatctttttggagagccacatattgtgagaaagcaagattaccccataaataggcaataaagtataggatatttattgtaagaccatcattggatttttattctttatttctataagacctttacaaaaacccattagagttgataaatagtaacgtttgttttatgagctctttatattgaacaggaattctgcttgatatgactctttaaatgcatatgatggatctacctgcgattgaaacaaatattagaaatgcttcaaaaagaaaacttagaaagtgtttgcaatgcattggtagaaagcagccagcattgtccctaccactgcatacagcccagaaagtgacaggtagctttctaccacataataaagctgawgggatggctaacagcttgaacagcattaattcatctttctgctgtgggggctttcaccagagattaatcatacactccctccaacttgccttctcatcttgctgtgtttctgtttaatttctctttcttactatgttctcctttgcaatctattgctgctgttgcattgaacccccttccctctcct

SEQ ID NO: 496531 - DNA, 581 bp, Homo sapiens
tttggtgatcttttgaaaagttggcaaacaacaggcacatgtatccctgttaaccaagttacatttgccaatatagcaagataagaaaaaagaggagaaaagagcaataattaactattgtagctagaaactactctactaaaggataaaatgaaaaagcttctccatcatcctaaatttactgttgtataaagatgactaccatttaaccatacaaccccaacttttatttttcctcagatattttaatactcactagattcattgaggtagggtggtagaacaataatcagaaagaaaatgtctgaaaaaatcatctggggtgtccatataattgaaattaagatttattcctttggtgtcmgaaaacctagaatcgatgtctagttatatatttatttatgcattttttaaaatcactgattatctctttgtttagtttgagttttttttagcgctttttaaaatcagatatatgatttcgcaaatattttctcccactctgtgggttgcctttgctcactgttgatagtgtcctttgatacacaaaagtttttttttattttgatgaagtgcaacat

SEQ ID NO: 496532 - DNA, 504 bp, Homo sapiens
tgtcaagactagtttatggtgatggtgtaggttttcaactcttactgtgtctttatgttttaattggaatttgggaaagacatggagtggaggctgctagatatatataccatttaagactagaagccacatccacgcacttgtcagagcctgagccacctactccgtttccactttcttgctttattactatctgatcggtactttcctcaatcccctgaaggcaccgggaacgtccactttatgaaagccagtgggaagtttgaatcatcatcttactctgttgtctcctctcagcgtaagacatggcccagcgccagctcctcttgctggaatgctggtgctgagcactcgctcagtccctcataacacattacttcataaaattcccacagcaagcctaggaggtgtcatcattgttctcattttacacacggggaaacygaggctcagggagtaagatcacttgcttgtggaccaatagtgggctaaccactggaaaag

SEQ ID NO: 496533 - DNA, 597 bp, Homo sapiens
cagctgatagaatgtgactccccaggggtcctggctaatggccttagaagggcttctgcaggggaacccgggaagctgccagtggtcctctgtgcacactccagcggggctgagtcctcctccatctgcactgcaaagccctttccttgggtctttgagtccccatgcatttttggattgtataaaaccagataacacatttttttaaagacagctatagaaaagcttcccacatcgaagacacaggatccatcagaacattgactgattgattgattgattgattcattcattcattcattcattccagcacccacaaggctccaaactgttcctggctgggacagaaaagaggagcaaacctggcccctgtcctggaggagcmagggaaaggagatggaagtataaatagccagttacccgaaagtgggatgggctattatactggagtgtatgatacagtaagtccttacttaacatcatcaatttgttcttggaaactgacattaagcaaaacaatatataacaaaaccaatattttcttcatggacattgaatgaaacaaaatgctgttatttgaggacctgctgtatgttg

SEQ ID NO: 496534 - DNA, 592 bp, Homo sapiens
ggaaggactgtctggagagaggggcgactgcamaggcaggtggctgggagagaagtctggtgagatcagtagggaccagctcagcagatcctctggccacatgaagaatgttgtgttcattctaaaaagcaatggaaggaaatgaatgggggtcagggtggggtagggagtgtgacaaaatcagcctgagattgaaagagccattctggctgctctgtggagttcagatgagagggggatgagaactttgaggctgctgcagtggtccaggccagagctgatggtagtttggacttggctaggggctaatggacacagagaggggaaaaatgcaaaagatgcttagatggtaaaatctaaaagacttaatatcaacactgcatgaccctaccaccctcttgaagaacgggccaagtgaggcagtggttaccaaacccagtcacataacaaaacaacctgggggtatttttttttaaatatagattcctgagctgtattccctagagtttgatctggttaacctgaatggagtctgaccgtgaaatctacatttaaacacattcctaggagattctggtgccctgtgtctgca

SEQ ID NO: 496535 - DNA, 654 bp, Homo sapiens
tatacaattgtataattttatgcttcccctgggagagtgggtggagccctggctcccagcccatgatggaagggtcttggcagtatttgtaaagcagtctgtgggggtgtaactcagggcggatctgaaaagctggtctttggaaagggaaygaaactgacagtaaacccatgtaagtctgaataatgcttccaaatttctccctggaaccctgatttccaaattttccattctgttttataacccaggtccaaaccacagcagtcccattaatggattccagtgcaaaacaactgctggtgtattcctactacacgcaggtctctgttgtttgccctcatgtgctattttatctaatagctgagaatgacagtaccaatggagcactgagttaaggagtcagactgttcgaaggcttcattcttcgttataattggtgagattttccatgggactaagagaaaattgattaactctctgagcctctattttcctcctctgtagaatgggggaggcagttcctgttcccattttaccacagccggcgtgctgtgaggggatgttggtacatttccaataaggggacaatgagtgtgaagagaaaggaaggccccaggtggtccgtaaactcttccaccagtcccacactataaa

SEQ ID NO: 496536 - DNA, 651 bp, Homo sapiens
accttttccatgcctgtctcttctggcagattaagtggttatttccactaactttcttgtggaaaaacacacaagacagatatattctccttcagtttttactaagaaagttttgtggttatcattttgacaataaacttcagctagcatagtccctactattcatgttaataatatcttgacttgaaccatcatattttccccacatcattcacaatgcatttcaatgctgtaacccactgcaccatccccagcccttttatcttcacaacgttctctaataaggtaaacaggatcatacatcatcaaacatatgtcacagacagaaaagctgacacacagacaagttaaataatttaagtcaaaccaaaaaaaaatcataactgggattagagcttgagattccctattttcttacagtgaactgtcttgagctgtcacttaatgcattgaaaacataataagcacaggccataggcattttcagaacatgaaacttgactgaaacaaaaactgactgtttgattgctttggtgttttaaatgtatccccwaatctcctttgctattgatagtcatttggtgccagtgacagggaagagcagaggggcttaggaggtttttgtagatctcagtatcactgtgtcttata

SEQ ID NO: 496537 - DNA, 563 bp, Homo sapiens
gtgttagaataaagaaaagtactactttcgaatatgggaaatcataatttgtatggtgatagcaccatatagtgcaaatgaagaacaggatcaaaaaatgctacaaggctaataaatatttaacaatttatttgttgccttatgtttgttgtttcatgtctttgaggtttagccattctataaatgaactttatttatgggacaaataatttattctgggtaaaaggagaaaaacatgcatatttaacagttaccaaccataggtatcgaaagtcttaaatttcaaattttctagttatcccagggataccaccagagtttcagaaataaaatcccactctcaatgtaaacataacagttgtatctaatgaaaaaaacttccatctttaagattaatatgaaaataaacttcgacagtaagtaattcaatatgtggcaaaggtttcagaattttttataaagagctgttataatyagtaaaaaaagataaacacagcaagaacaaatgagcacaagttaggaataagcaatttactcaagaagaaattccaaggccaataaac

SEQ ID NO: 496538 - DNA, 379 bp, Homo sapiens
cttccttctctccagtggaccataatttaggagaacgtagccctgggcttgatgctgccattatttacctctcaatgtctctaagcctaagtcatggaaccttctaggcctcagttcctcatttgtaaaattcaggaaaaaaaaatagactagatgatatctgatgttctttccatctctaatgatcagtactcatgatcttttttggtgaagtctgttttggcaaaaaattacttcttgattttctatgcccttcagaggactgaaacaaaacactaaaattaaaaatttattcttcagaattcacagaacacamtaagtgcaaaagcagtaagtgtgtaacatttctacttctgaaatgattaaagcttactgcact

SEQ ID NO: 496539 - DNA, 607 bp, Homo sapiens
actggtaaactggctcaaccagttgtgcgatcccacccaggaacataagatagcaaggaaacctaactttgacccccactatgattccatctccaacctgacctgaatcagcactacccacttcccaagccctacctgccaaattatctttaaaaattccaattccttgagtaataataaaactctggtctcccacacagccagctctgcaggaattactctttctccactgcaattcccctgtcttgataaatcggctctgtctaggcagcaggcaaggtgaatcaggtgagctgcgttatttgtcaccataccacagatgaaggcacaacagttgtcctcattggctcttctgaaatgctcatggaaaaaagatttgtggcacagcaaactttggctgtttctgagatctggcaaaatctcccttgccatttagaccactggaaacctgcgagtggagattggtatctgkgatataccttttatatatacctcatacgctcctgcctgaggcaatctcctttctaaatttctgtatccttggctggttaaacgggtaacttatttgaatcttgctgggtaggagatagttctcttctcacagaac

SEQ ID NO: 496540 - DNA, 638 bp, Homo sapiens
aggctgggaattgggagactacatcatagcattactgagcaaagaagsaggcggctgcttggccacaggacacagacagcccaggacccaaacttgaggccagcaaggggtcaggattaagctgttgcagttcagtatgggctggaacaggaagtgagagaggaaggggagaagtaggaagccctaaattgggccttgcaagacagagaagacctatagagatgggcattccaggcaggtggaattgcagatgcaagagggagctctggcgaggctccaggattcaggagagctgggcagatgggtccctatctcatgagcttcctacagtgatagctttggccctactgcctttccttcccctggcctctactcccgaggtggaatgggaacaccttgtccccacatggtgcttctggagttgaactacaacaaaagaaataaagtattctgtgagttccagggtgtattcatttgctagagtggccataggaaagtaccacatactgagtaggttaagcagaaatgtatttcctcacagttctggaggctagaggtctgagataaggtattagtagagttggtttcttctgaggcctctctctttggcttgttaatggccatcttatccctgggcc

SEQ ID NO: 496541 - DNA, 590 bp, Homo sapiens
taatagggtaattacacagtccatggtatctcccctagatacttaataatcacaaagggaaaaacagtagctttatatggagaaacttagtagacctcatcttactcacgtgatgaagtttaatgtcaccagcaatgagagaaatctagatcatgtgccttctggtatgatgctctgaggacacagtacccaaaacgcattaccttaatctaatcaygaagaaacattagataatcccaaattgaaggacatcctataaaagaactggtctatcatctccaaaaagtcagtcttatgaaacacaaagaaatactattctagattaaagtataaagaaacatagacataacctctttagcatactaaagaagtgtaacacatgatatgggatgttctttttgttctgaggaagcggtccccaaactttttgggaccagggaccgctttcatggaagacgatttttccgtggatgaggggcaggggatggtttcaggatgaagctgttccacctcagatcatctctcataaggagcacacaacctagatccctcacctgtgcagttcacagcaggatttgcactcctatgag

SEQ ID NO: 496542 - DNA, 634 bp, Homo sapiens
gctgctacggggaacgggtgttcacagcctggagggtgcagaggagagctataatcatcaaaagagggaagaagcagagtgtggagatgagaaaatccacaaggaaagccaagtgccacccacaacaaccacatccaacctccgcatgtggttcttgtctggtctgcacgggccagcatgacagtgtgcccatcaaccacatggcagaagcactcggcgggtagaggacctggctgcgttcttcctcaagccccttcctgtagtgagccctgatcccacgctatcacactgtcgcatgtctaaggctctgtgctcttactgggtaaggacaatttcgccccatctcttcctaactccatatccagcacagggcctggcttatcacagaggctcacagaggtctggatgaatggacggctgcctacagccccattcctcacagacatggggtgacgaggaagaagaggctcaagtgaccaggcctccaaggccaggctctcccttttctcattttccctagaaccccagatccccagyttctaccagcagggccagagggagcttttctggcagccgtgaaggcagcgtctctgaaatggccagcccccggggcttgggcctagtgtgctggagt

SEQ ID NO: 496543 - DNA, 441 bp, Homo sapiens
agcgggaacatgtggcctcagggggccgcacgcggatccctgaaatcccctgcattacaggtacagcccgggatacaaggagagggaccaggttgggggcagcagggctcctctcccggccccagcacattctcaaacagaactctgaggagtccaagaaatctaaattcaaacttagcattccaagtcatcatgaaggtcagagtggagatttgcttattgaatagttagtttgtacgattactcataaactttcagacatggccctctgtgtgtcccccagtcctgccctgtgaatgttcatgtgtgcctgggcaaggagrcatgtgtgctcctctgagttcaggcagcacctagagaagcgcagccccttccgaacccccacaaatgtcctaagaaaagcacctgtgacattgaggggccaggagagctgtcacgtga

SEQ ID NO: 496544 - DNA, 441 bp, Homo sapiens
agcgggaacatgtggcctcagggggccgcacgcggatccctgaaatcccctgcattacaggtacagcccgggatacaaggagagggaccaggttgggggcagcagggctcctctcccggccccagcacattctcaaacagaactctgaggagtccaagaaatctaaattcaaacttagcattccaagtcatcatgaaggtcagagtggagatttgcttattgaatagttagtttgtacgattactcataaactttcagacatggccctctgtgtgtcccccagtcctgccctgtgaatgttcatgtgtgcctgggcaaggaggcatgtgtgctcctctgagttcaggcagcacctagagaagygcagccccttccgaacccccacaaatgtcctaagaaaagcacctgtgacattgaggggccaggagagctgtcacgtga

SEQ ID NO: 496545 - DNA, 477 bp, Homo sapiens
tcttagatgaggatattgatgtccagagaagacagggagcaggctgaggtcacccagcaaggtattagagaagacaagatgggaacctgggtcacckgcctgggcctcatattttcaaagtgctatttttttttttcccgtgttttcactttgatcttacttttaatgatagggacgtatcactgtgtcttctcaaaatggtgggtgtgaatggaatttttcaaagttgaatcaatttgagatatttctgaagtttgtttaggaaacaagtatgtgactaccttcctaagagctgactggttttttgaggcctggattgtgtgtgtatgtgcttatgtgtgtgttataaaatggaatcaactataccaggttaaacaaatggacaagtcatggaaaagacacagctctgtttggacattaataagggcgggtgtggaagctggaaagctgagatgccggaaggctcagtgcttagta

SEQ ID NO: 496546 - DNA, 558 bp, Homo sapiens
gtcttagtaaagaaagacccccaaaagtccatgattttataggtcgaatgaggtgaaaagtggtatcatgataaataaatttgtttaaatatcataaaaagttggtctaaagaaaaacattgggtaaataattatgtgagtatgatgtggttatgaccaaattgtaaagatgatcagtttcttaagtctgggggacaggcactgagcagaggccgtggtggggaacaggagcctgtcttcatggctcttactggccactgggcaagactcagatagcaccaaccaaccagtcacagttgtgatgtaggatgtgactgtgaatgacatccctgctgccygcttcagagaaagggctgccacttgccagagaaggaatggtgataatgagggacagccagtccctaagtggagatccctgaaagtggtgaatatcttagaccagagaagcccagagcagtttttttaccaccttgtatggctggttttccagtggctttactggtgccccctcggaggacaggggctgtaggaagtttgttattacttccttattagtga

SEQ ID NO: 496547 - DNA, 624 bp, Homo sapiens
  misc_feature (1)...(624): n = A,T,C or G
tctcactttgtgtgaagtgccaaggttagagcagagaaccgacagaagtggttcctgacctcatggagctgacagtccagcagaggagagacaggtttgacaaacaatgattcagctccactttcgatgagttctctgagagagtggtggagggtgaagggagtgtgttatagtaagacaacaccgaaagaggggaagggaggagggatcagagggggcgtcttggaggaagtgacacttgacggattacgatttggtgtcccctgtgcctccaccttcagggagcaatgccctggttctggtgacatgggcactcagggtccccatggcagttccttctcattgagtgtcacctccgtcatttggcttcaagaactggaatatgcaaatggcagtcagttatgtgtgatcaaatgacactggctacatgctcaagaaygaatttagcatctaccaccagcgttcccacagtactcccaaataacttctgtatcctccccacctccagacacacatgtatacacacacacaacctcacacacattttcaaaccagcctgtcagtctacctcactctcctctttagattcagctttcactgggctaggtccntggcccatgaagc

SEQ ID NO: 496548 - DNA, 624 bp, Homo sapiens
  misc_feature (1)...(624): n = A,T,C or G
tctcactttgtgtgaagtgccaaggttagagcagagaaccgacagaagtggttcctgacctcatggagctgacagtccagcagaggagagacaggtttgacaaacaatgattcagctccactttcgatgagttctctgagagagtggtggagggtgaagggagtgtgttatagtaagacaacaccgaaagaggggaagggaggagggatcagagggggcgtcttggaggaagtgacacttgacggattacgatttggtgtcccctgtgcctccaccttcagggagcaatgccctggttctggtgacatgggcactcagggtccccatggcagttccttctcattgagtgtcacctccgtcatttggcttcaagaactggaatatgcaaatggcagtcagttatgtgtgatcaaatgacactggctacatgctcaagaacgaatttagcatctaccaccagcgttcccacagtactcccaaataacttctgtatcctccccacctccagacacacatgtatacacacacacaacctcacacacattytcaaaccagcctgtcagtctacctcactctcctctttagattcagctttcactgggctaggtccntggcccatgaagc

SEQ ID NO: 496549 - DNA, 632 bp, Homo sapiens
ctggtccctccattcggggtccctgacttcccacaacagcctggcatgtctttaaatcattcaagtggagatatcaagtagacatctgggtatatgagacaagmgctcagaagagtagtccagggtaaagttacacatttgggagcaggactggttacataatttgtgggacccagtgcaaaatgaagataaatagcctcatgttaaaaaattattaataacttccagacgtcaagaggataacatcaaaccaagcacagagacctacaggtaactgcacaggtcacttgcccatgaagcctatatgcgatatttaatttggaaattgatcagattatttatggagagagagttatcaggagaaggaatggggaccccaaataggaccttgaaacctgtgtatatgctggtagtcacaatgagacaatactgtacgatcccacttatgtgagatacctagaatagtcaaatgcatagagaaggaaagcaaaatggcagttgccaagagctggagggaggtgggaatggggagttcatgcttaatgggtacagagtttcactgtgggaagaaaaagttctggagatggatggtggtgatggttgcacaacaatatgaatgtatttagtgccac

SEQ ID NO: 496550 - DNA, 338 bp, Homo sapiens
ttagttttcccagcaaccaattaggtcactccattattcttgctttttcacagctgaaaagacacaggctcagagaactccaaggccacacagctggtgaaaattctaatttaaagccatgtaggctccatttctccatctatgtgtgtgtgtgkgggggggggcggggtgtgacacggggacttaattccttctcttttaatgagaaaatgccacgtggcggaggtggggagggtgggaggagtcccggcgatttccgtgtctaggactgaagcctccctacttttggagctgcctggctttgtttggaaaagtcaccaggagggcctttctgagaa

SEQ ID NO: 496551 - DNA, 711 bp, Homo sapiens
tttgtatttttagtagagacagggtgtctccatgttggccaggctgrtctcgaattcctgacctcaggtgatccgcctgcttcggcctcccaaagtgctgggattacaggcgtgagccaccgcgcctggctgcaaagtttaacttttatatttacacaaacggtttgtggaatataaggtgccctgacttagcaattgagaaaactggataagccctataaagtttaaagagaacagagttaataagttttgattgaaattgtttctaaaccaatgatatatttctctttattattaaacaatatagaatgcaagtttatgccattcttggtggcccatgattatagattatgaacatactaattggaccgtaatgcaataatatttacatgagttgagttgcctggtggtgagaccacttgtgtgcagatgaatctctttgagtctcattttgttcactgtgccaacctcttatgaacgttctaaagacttgccaagtattaagcactcaaaagttgctgctgttgtttatgataacaattacttgggggagaaagaaattcactggtggggaccttaaagaatatttcaaacatgtaacatttggtatggaaaatcttttaaactgaatttgttttagggcacattgaatactttactttccttttcctcagcatcaacaacagcaacttgtgattggcggtgaccgga

SEQ ID NO: 496552 - DNA, 603 bp, Homo sapiens
ctatgagcaattggatcttttttttatttttattttttgtattatactttaagttctagggtacatatgcacaacgtgcaggtttgttacataggtatacatgtgacttgttggtgtgctgcacccattaactcrtcatttacattaggtatatctcctaatgctatccctcccccctccccccactccaccacaggccccggtgtgtgatgttccccatcctgtgtccaagtgttctcattgttcaattcctgcctatgagtgagaacatgcggtgtttggttttctgtccatgcaatagttgagaaattgggtcttaatgctgctagggagaaaaatctaggtgaagaacacacagtcagaatgatcccacccagggtgagggatctagggtatgtatacaccaacagccattagtgattggtagaggggtgctgtaggggaaaacaggaaggtgttaataacctggcaatttggccaggcacggagcctcacgcctgtaatcccagcactttgggaggccaaggagggcagatcacaaagtcaagagaccatcctagccaacatggtgaaaccccgtctctactaaaaatacaaaaatca

SEQ ID NO: 496553 - DNA, 495 bp, Homo sapiens
gttggtgtgctgcacccattaactcgtcatttacattaggtatatctcctaatgctatccctcccccctccccccactccaccacaggccccggtgtgtgatgttccccatcctgtgtccaagtgttctcattgttcaattcctgcctatgagkgagaacatgcggtgtttggttttctgtccatgcaatagttgagaaattgggtcttaatgctgctagggagaaaaatctaggtgaagaacacacagtcagaatgatcccacccagggtgagggatctagggtatgtatacaccaacagccattagtgattggtagaggggtgctgtaggggaaaacaggaaggtgttaataacctggcaatttggccaggcacggagcctcacgcctgtaatcccagcactttgggaggccaaggagggcagatcacaaagtcaagagaccatcctagccaacatggtgaaaccccgtctctactaaaaatacaaaaatcag

SEQ ID NO: 496554 - DNA, 626 bp, Homo sapiens
actcataaggaaatgaagacccaaagaaccagtttgagtcaaacatttatatacagaatgggacaaagactagtaaattctgaatatatgataaggcaaaagagcttgagctagaatagttaattgggtagagaagtgaccaagaagataagggttagtgtaagaaagtttgtgttgcatagatgtccttcagcctcaaattttccatccttgattattagaatgctatttaatagggaggacatctttcacaagagagtttcatctcctgcttttaagaaacaaaaaagaggtcagaatggtcttcttgcacctgctgtttttcaagtgcctttaattcaaaatagtcgatgtgccaaaattgtatatttttaactccttcatcatttatcgctcacttacattgygcagaacagcaatttcaatcaaaactattttcaccattgaatcagtagtaagagaagcccctaccttcctgtagcttccattttaatgtgctttgatagatgaacgtggttaatttcaattacagtctgctaatctttcaacttctttacttaggatactgcagtatgtccaccatagaaaagacccagataaagatgatttagatttgccagatgttc

SEQ ID NO: 496555 - DNA, 626 bp, Homo sapiens
actcataaggaaatgaagacccaaagaaccagtttgagtcaaacatttatatacagaatgggacaaagactagtaaattctgaatatatgataaggcaaaagagcttgagctagaatagttaattgggtagagaagtgaccaagaagataagggttagtgtaagaaagtttgtgttgcatagatgtccttcagcctcaaattttccatccttgattattagaatgctatttaatagggaggacatctttcacaagagagtttcatctcctgcttttaagaaacaaaaaagaggtcagaatggtcttcttgcacctgctgtttttcaagtgcctttaattcaaaatagtcgatgtgccaaaattgtatatttttaactccttcatcatttatcgctcacttacattgtrcagaacagcaatttcaatcaaaactattttcaccattgaatcagtagtaagagaagcccctaccttcctgtagcttccattttaatgtgctttgatagatgaacgtggttaatttcaattacagtctgctaatctttcaacttctttacttaggatactgcagtatgtccaccatagaaaagacccagataaagatgatttagatttgccagatgttc

SEQ ID NO: 496556 - DNA, 548 bp, Homo sapiens
agggaatgaaggagagctttttgcccttcaaagtaaacctatggcccaggcgtggtggctcacccctgtgaaaagaaagaggaaagaagaaaagaaacctatgaagacttcaggaaagattactttggatgtacttcagtttctactctgatacttagagctgtgattgaatttggtacttcagtactttccatttcaattcttttttcttttttctttctttyttttttttttttgagatggagtctcgctctgtcgccaggctggagtgcagtggcacaatctcggctcactgcagcctccacctcccgagttctagcgattcttctgcctcagcctctggagtagctgggactacaggtgcccgccaccacacccagctaatttttgtatttttagtagagacgggatttcaccgtgttggccaagatggtctccatgtgttgacctcgttattcgcccgcctcagcctcccgaagtgctgggattacaggtgtgagccaccacgcccgacctctcaattcttttttcaaaccgttaaactattg

SEQ ID NO: 496557 - DNA, 501 bp, Homo sapiens
ggagctctgctgtccatcacaggcctgagtttcctcagagattctatactgcaacatgttacctctgctcagaagactgctaaggacacatgacacctacttgctcttgtaggcagatcattttcttctttttttcttgaaatatctttaaaaaaaaaaaaaamctccctgaaaggcacattttattgctatcatttctgccttattttcatatactttgcttacttatattgcttttaactgtttttcttttttcatgtttacccccttttgattttcaaacatttatttttaccatcctttttattgtctcttagtcttaggttgagataaaatttattactacttatttactaacacttattttttatacatgtcttcttctgatttcttttggcttagctatttactgttttgcacttgcttttgcctttctctcttatttgatagctgtcaattcctacttctttgtgactttgaattcttcatacttcactttcc

SEQ ID NO: 496558 - DNA, 617 bp, Homo sapiens
tgtcttagtatgcagagtcctcttagctttgattcttactcctcttcattatttggcaatgaggagttttagccttctaaatggctgcagaagaggaaggtatcaacsagcagacgtgaaactgggggtagttctgcaggttacaaaagtacccaaggcccggtgcagtggctcatgcctgtaatcccagcactttaggagactgaggggggcggatcccttgagcacaggagtttgagaccatcccgggcaatgtggcaaaaccctacctctacaaaaaatacaaaaattatctgtgcatagtggcacctgcctgtagtcccagctacttgggaggctgaggtgggaaggtgggaggatcacttgagcctgataggtggaggttgcagtgagccaagatggtgccactcaactcaagcctgggtgacagagtgagaacctgtctccaaaataaataaataaataaataaataaaggtactcaaaagggtagacattatcaccaggacttataatcagtggttcagccaccaaggtgctaaagggatctgcagattgcatagctggaaattttctcctgtcttcttctgctagtcaagttgtttttcttcagaattc

SEQ ID NO: 496559 - DNA, 611 bp, Homo sapiens
gggctttttctccaagctctcacaagaggggatgacctcccctactgtgatggggggctctgtgacaatctgatacccttctccatttttctttcactttgtacccagaaggacctgggggaaaggctgaaatggctttcattctcctgcctaaaacccctcacacatgccatgttttcaaaaggacctcatgcagcttcccaggaatggcccttggccactggaccctgcctgcctgtccccctgcatcacccgcttcttctgtccttgtggcccagacagaaggagtggcttgaatgtccctgagttaagtatggacttttctctctgaatatttgctcctgcctctccttctgccagggaagtcctttccagccctgtcaacctgaacaatggatctcttgatccttcaagaacrcagcttatctgctctgggaaactgttcatttattttattcattctatcaaccaatcattgtttatttgttgaaaccttatcatctctcagacactgtgataagtcctggaaattaaatagtgagcaaaaccagacacagttcctttcctcatggagcttaaaatccacaaggaaagatagatgctaaccaaaa

SEQ ID NO: 496560 - DNA, 636 bp, Homo sapiens
agcatttgaaaatcttttagcgataattgcaatggcaaaaataaaagaaatcacttaaaagtccatttgtaggggacagattaaatgagtcctgttacaaatgtgcaataaaatgctatatgccactccacattaataatacagatctatgtataatgtcattgaataacctccaagatatagtgataatataaaaaaaatgttcagaacaatgtggagagtgcagtactagcatttttttttctaaaatacaaaatgcaatcctggcatttttgtaaaaaatcatgtaccatatatgtatcctttatatatataattttaaaaaataaaaacactggtcaaaattttaaaataagatgctrccttttcctcattaataatatgcatacagtaagaacagagagacttcactgtcctcaggggactgctctagtctcttagctaccaagtatctcgaagttacaaatgcattttaaaacccttatacagaagtagtttagtaacttgtataagcagttgagagtactttttatgagaatttatttatttatggtaaggacttcccttcttgagacctgctttttcttttctagtagccagggtttttgtgaacaagggcgtattagtctgttttca

SEQ ID NO: 496561 - DNA, 550 bp, Homo sapiens
aacagttgacttctaatccaaaaggacagagttcaggaggtagyagcatattcaaagtgtaagaagtcaaccaaaaagtttatattcagaaaatcaatttttcaaaaaggaaagagaaaataaaacattctcagataaacaaaaacttagtgatttcatttctgtcatatctgtactacagaaaataccaaagaaagaaaccttaggctgaaatgaaaagacaatagataaaaacattacttcacaggaagaaataaaagggactattattaaagattactacataggtgctatgaattacatgtttgtgtacactctgctccaaatttctatgttgaaaccatactcccatagaaggttatttggaggtgggccctttgggaggtaataaaattatgagggtggggccctcaggatggtattagtacctgtgatcattaattttggctgtcaccttgactggattgaagtatacacagatagctggtaaaatattaattattcttaatgcttcaataggcattgagcctgtctctcctctgctgaaaag

SEQ ID NO: 496562 - DNA, 550 bp, Homo sapiens
aacagttgacttctaatccaaaaggacagagttcaggaggtagcagcatattcaaagtgtaagaagtcaaccaaaaagtttatattcagaaaatcaatttttcaaaaaggaaagagaaaataaaacattctcagataaacaaaaacttagtgatttcatttctgkcatatctgtactacagaaaataccaaagaaagaaaccttaggctgaaatgaaaagacaatagataaaaacattacttcacaggaagaaataaaagggactattattaaagattactacataggtgctatgaattacatgtttgtgtacactctgctccaaatttctatgttgaaaccatactcccatagaaggttatttggaggtgggccctttgggaggtaataaaattatgagggtggggccctcaggatggtattagtacctgtgatcattaattttggctgtcaccttgactggattgaagtatacacagatagctggtaaaatattaattattcttaatgcttcaataggcattgagcctgtctctcctctgctgaaaag

SEQ ID NO: 496563 - DNA, 487 bp, Homo sapiens
tctgcccaggaataatttccttttccagagcctcccaaagcactaacaactcagatgtctcctaccttccctcttaggaaggcattaaaggggaagagaggatggctttggcccscaataaactgggttcaaatcccagctctaccacataaatataaaagttatctgatgttcagcatggtatctctctgaccctcagtctcttcatctgtaagtcagagatagtaatacagtaccacgctttacctggcctatgggaagcactgaaagcactgggtttgtttgtatcattatattctgtcttcctcttcctgtcttatccttatccttcttcaccccatgctctccacttctcctatttccatttcattgccagtaccaaggaacacaagggaatggtgccaagtccagtaggaagtaggactcgggtaccaggctggtatagctcctggatattgtgtatttgttggggggcaggggtgaggga

SEQ ID NO: 496564 - DNA, 494 bp, Homo sapiens
gaatagtatttcatgaagctgataaaaaggattaagaatattctgcattgtccaatacattagcactagccacctgtgattactaaagtagccacttcaaatgtggctaacagtctgaatggagatatgctcttagtataaaatacacactagattttaaagacttagtgtcagaaaaaggartataaagtgtttccttaataatgcttttatgttgattgattatatgttgaaaagctaatattttgggtatgttgggttaactaaaatataccattgaggttgatttttttgatgtgactattagaacatttaaaattacatgtgtctcttctatttgtggctcatttcagttatgtttctcttggacagccctgctccaggcaaatgaaacagtatgaaaagggacaggggcaggaaaagcatgagcaagtggaggtaactgggtgactccattggaacatgaaggcttcaaatgtgcgggctggggaagg

SEQ ID NO: 496565 - DNA, 471 bp, Homo sapiens
tgagttaggtgaccaaccttcctagttggtttcccaggaagtgaaatattcaatgctaaaaccaagaagtcctggttaaacaggctgagtttatagggtgatcatgtgtgagcatgtaccaagggaccctaagttagcatggaggctcagggaggacgtgacagcacagggagagakctacaccctataactgctgttttccctttttttttttttttttttgccttccacctcatgaccactgtgttccacgtctttccttgtccttctttttccaactatcttcattctttttgtagatccactcaccttctctctcagcaagtcaaactctttcctctttaaagacagaagacttcctttgcacgtggatatttttttgtgctattatacttaaattttgaagagttttgtttcatttttgaggattatacttttctttttgtataaagtaatataacacatgggaaa

SEQ ID NO: 496566 - DNA, 471 bp, Homo sapiens
tgagttaggtgaccaaccttcctagttggtttcccaggaagtgaaatattcaatgctaaaaccaagaagtcctggttaaacaggctgagtttatagggtgatcatgtgtgagcatgtaccaagggaccctaagttagcatggaggctcagggaggacgtgacagcacagggagagagctacaccctataactgctgttttccctttttttttttttttttttgccttccacctcatgaccactgtgttccacgtctttccttgtccttctttttccaactatcttcattctttttgtagatccactcaccttctctctcagcaagtcaaactctttcctctttaaaracagaagacttcctttgcacgtggatatttttttgtgctattatacttaaattttgaagagttttgtttcatttttgaggattatacttttctttttgtataaagtaatataacacatgggaaa

SEQ ID NO: 496567 - DNA, 512 bp, Homo sapiens
cttttcagtttcctctcccctccacctgtgttctcaacatgttctcatccagtaaaacctatctttagcctcatttcttctgtgaagccttccttggtaccttcttcctgccttctgtccaaagagtacagatgcttgcttctcctctgggcttctaaggtgactttcacttgtgtctgttacaacaatgctgttaaacatgcctttcagcgggagggtgaggattgtctcactgtatccccagcgccaaggacagtgaccagcagattgcaggggctcaggggctgtttgatgagtgaatatatgagccccagtgcgttttcctattcctgaagggattccccgtttggggtatcacctgcaataggcacagaaasaagatccattgatttggatccttgccctcaagagatttagagttgaaaaatgaagatggaaaagttaacagataaattaacataagggttgatagttactttgataataatagtgatgatcacttcatttatgga

SEQ ID NO: 496568 - DNA, 547 bp, Homo sapiens
atgcttgagtgtgatcataaaagactactttccaggatgtcggggctggggagctggaggggctgctccaggaggtgggggacctggagctggtacttacagacttgggtgcttatgagtgtgggttatggaccagatgccagggttcaaatcctagctcagatacttattgatggtataaccctgggccaattactcgactcctctgtgcctcagtttcctcatctgtaaaatggggagtgggctgttacccacctcatacagtggttgtgaggattaacatatgtcaaggactttaggacagggccaacggacgtggcgagcaccctgtgagtcgctgactgttacccctactatttagtacaaattaaaagcaacagacttcacccagaaagctgagaagcccggggcagctcatggcagcttttaaagcagaaagggrgactcactggggtctgtagagatgaaaaaaaaaaggggcctcccagttcagagactggtggggaggttgggggtaccctgcagcagcacccattcccgtcccaca

SEQ ID NO: 496569 - DNA, 498 bp, Homo sapiens
tatagtgtttttggattttgatataatacactattgattagataacataccaacatgtaacttgatcctaaaaacatttgctgttggccaggcacagtgactcatgcctgtaatctcagcactttgggaggtgggaggatcacttgagccttggggttcaagaccagacagggcaatatagtgagatcctgtccctatataaaaagaataaaaatgaataaaaacaaaacagacaaaaatatttgccgctgtgacacagcctatggctgagctccactgtttgtcataaaaccccaacattgtaaaagagtgactaccagaaggaaagccattcggagcagagcagktgttcttgtgacacacaggaggccatggccaggagcatggagagtcgcagccatcactacgtcctggagcctgtgtttgcatctgctcttttgaagagaaactgctccaagaagcccctgcggtctcggcacagtccccgtattgattgtg

SEQ ID NO: 496570 - DNA, 592 bp, Homo sapiens
agggtgtagatggggctggctgctcaggtctgcccttttgtaggctgtgccaagaggaaaacctgacaagcaagtcctaggctctgtggcagacacagagttttcttgtttctgctggcatgaggaggagttttcacatctcttccatttcacttcccgcactttctttttgaatgttggaatcccacttgctcaaggatttatggcctaagaatccaggttacttgaccttgatgactgtatggtttcagggtaaatcacttcacctctctggtctcagtttcttcatctgtaaaagagagaggttggatgcctggtctctagttggttacatagtgagttgtgaaattgcgaacagctcactaagatacctaacctcttgctggtgtatctggtggcaatttgacgagttacaggactggggctgttgaccttgcccatgttttctacttcaattatacttttgtttcatcctcaaaaacttgatcagggtcccactaattttcrtgaatgttttaagagtttgtccatacttactacctctagaagtttcttgcagtgccaatgtgacagaggccaaatgtgttcaatg

SEQ ID NO: 496571 - DNA, 432 bp, Homo sapiens
gccaagcagttctccacttatcaactcggtgtcctatagttcaagtcaattctgacactaatgggttactgcagaccccgctgggtaagggcttagtcccataggaccgcctcccacttcagatgccagtcacaaggcccaggttgtgaccggtgcttctgactagaagttggagttcccacagttcccctcctcaggtttggtaatttgctaggatggctcacagaactcagggaaacactttacttacatttgctggtttataataaacggtgttatgaggatacaggtgaatatctagataaagagggccacacccccctccagtgttcagcaacctggaagctcagcagatctcatggttcaaagttwttatgcagcttaatctccagccccatcacccagaggtcagtgagtggtgctgaaaggccc

SEQ ID NO: 496572 - DNA, 518 bp, Homo sapiens
tgggaccacatcagtgcctcctgtctcccctgccccaggccgcttccctccctcctcctattaacatcatgctccccaataatccccacagccccgcctcagcctctgcttctggggaacctgacctaaggcaacaacaacatttccctggggctgaggaggcaggcatgcttttaaagaggcttttccatcacctttgagcatcacctgcccacgagatcaaccccacacatttgagtttggcacacgacacattgcatggcctggcacrgcctttctttcctgccttcatctttcacctctctataccctgttctttgaccttagcctggggttctccacagaaaccacactgttggactcttttatgccttggtgcatcctagatgtcacattacagtagtttggagagacttttcttaggtgtaagtgagataaaggggttgctggaggtgctggctacaggacagtgacagagaaagcagtggggtaggcttgccacatggaagagagcaggt

SEQ ID NO: 496573 - DNA, 374 bp, Homo sapiens
attttgagaatacagaataagtgcaaaggccctggggtggtcggggagggtggtctgtgcaagagcatgacgaagtccatcgtggctgaggagtggtcagaagaacctgaccatgtgtgcctgttggttatttaaggattttggttttaaccaaagtgagctgggtggctgctggagggtgtgaaggaagagactcctaatctgagatggatctctgggatgaatggttgttggtgtttgagaagctattgcagtaatcgagtcaagaaatggtgctggcgtggccccgggtggcagtggtgggtgaaagcactgagagtgtgttctgyaaggagacttgccaagattgacccacagaccacatgtgggatatt

SEQ ID NO: 496574 - DNA, 219 bp, Homo sapiens
agcaagcagctcagctccaagttagtgagggccgtgcatgagsggaagtcttctccagcgcaagtaaagcccttttcttgactacatttcctcaccacagattttaatctatacctaaaatgcctcttatctgtacctaaaacaaatgcactgtgttcttggcaaaaaaaaaatgggtatattttgatatcccttttctcttggaaaatattttcttaa

SEQ ID NO: 496575 - DNA, 518 bp, Homo sapiens
cacagccagggaaaaaaaatcaaagactggctttaatatacattaaatacatatattcgttatagagttattccatatttaatagttattccawtaactattagccttatagttcaaatatttcttataccagataattcttaaaaacacttcatatcctaacatcagaaagaattttataattggatctgggaccatttgacaatgtacttgcatgaaaaaaaatccaaacctaaattatgcaggtttaatacgcagcttacgtcacatgaaactgccctctataaagcaagcattctgtacatataattaattttaacttgatgaaaagagcatctcacggaagaaaacatgtaatgttgagtagaaccactagagaacgaggagatatttcttctcatttatctgtgatgtttcatttcatttgaatgaaatcagttaagtatataattagggcccataactcagttcagttttattttacagtaacatttaaaccctagaaaaaaacaacatct

SEQ ID NO: 496576 - DNA, 518 bp, Homo sapiens
cacagccagggaaaaaaaatcaaagactggctttaatatacattaaatacatatattcgttatagagttattccatatttaatagttattccaataactattagccttatagttmaaatatttcttataccagataattcttaaaaacacttcatatcctaacatcagaaagaattttataattggatctgggaccatttgacaatgtacttgcatgaaaaaaaatccaaacctaaattatgcaggtttaatacgcagcttacgtcacatgaaactgccctctataaagcaagcattctgtacatataattaattttaacttgatgaaaagagcatctcacggaagaaaacatgtaatgttgagtagaaccactagagaacgaggagatatttcttctcatttatctgtgatgtttcatttcatttgaatgaaatcagttaagtatataattagggcccataactcagttcagttttattttacagtaacatttaaaccctagaaaaaaacaacatct

SEQ ID NO: 496577 - DNA, 654 bp, Homo sapiens
ttttacataaagagagcagaaggtaatacacatctcatgttttctcagcatccaggcacacccaaggcatcatcttcccattagagccctaatgaggggatggccaatcccaggttccatgcagacctcctagcctgttcctcgaactggctttgacctaccagccagttagcttcatccatcaagacgggtatggatatttccactgcatgtttcaatcataggtattgagaagacatgcaggaaatgggaaaagagctgccttacactttgtgaggtttaccttgtgttccatgaaaggtgaacttacagacggaggtatgaccttgggtggcaccaagacaggtagatctctgcactcttactcccagacccaaggcttatataccatagggaaaagcatatgtgcttcagcaagacaattaaaggcaatcctctagcacaggcaggaatggtatatgtgtcatagcctgtaatttgtgcaataacatcaaggccgctttggtctaagggcaggatccatggkgagttaaacattcttacataagagaagtaaataaagtagaattcttggaggtattcccaggactggggttaatcagaagtcaacatggtggattgaagtctgagatgtcactgtcaactccacaccta

SEQ ID NO: 496578 - DNA, 563 bp, Homo sapiens
ttcctatctgtgcacttcctgtaagcctacacttcttgtgaatttatacttctatgagcccatagatcctatgtgtatacttcctgtgagcccacatttcctctgatggtatacttcctgtgagcacacacttcttatctatgcacttcctgtaagcccayacttcctgtgagctcacacttcctatgaggccacacttcctatctgtgcacttcctttgagcatacacttcctatctatgcacttcctaagagagcatgcttcccgtgagcccacatttcctatctgtgtacttcctgtgagcatacacttcctacctgtgcacttcctgtgagcatacacttcctatctgtaaacttcctgtgagcatacactttctgtgcacttcctctaaacacatacttcctctctgtgcaattcctgtgagcccacacttactatgatatacacttcctgtgagtatacacttcccatgagccccccttcctctgtgcaattcctgtgagcacacagttcctctctgtgcacttcctgtagcaccactttctctctgtgcacttatt

SEQ ID NO: 496579 - DNA, 514 bp, Homo sapiens
accgctctatgtctgatgtattttattttatttttatttttatttttgagacaggatcttgctctgttggccaggctggagtgcagtggtatgatcagggctcactgccgccttgaccctgctgggatcaagggatcctccacctcagcctcccaagtagrgggatactaaaggcatgtgccaccatacccagctaactttctgatttttggtagagacgagatctccctatgttgcccaggctgggctggaactcctgggctgaagaaatcctcctgccttggccttccaaagtgctgggattacaggtgtgagacactgcgactggccatctgatttttttaatctgcaatatagacatattaccaactaatagtgctgtcgggaagatcagtgtgaataacctgtagagaaggaccctgtatttgtagcgctttgtgctacaaattctttatgccacatgggctttttaggcagtgccgtgcctgatggctccctgacatctttgtgcaca

SEQ ID NO: 496580 - DNA, 514 bp, Homo sapiens
accgctctatgtctgatgtattttattttatttttatttttatttttgagacaggatcttgctctgttggccaggctggagtgcagtggtatgatcagggctcactgccgccttgaccctgctgggatcaagggatcctccacctcagcctcccaagtagagggrtactaaaggcatgtgccaccatacccagctaactttctgatttttggtagagacgagatctccctatgttgcccaggctgggctggaactcctgggctgaagaaatcctcctgccttggccttccaaagtgctgggattacaggtgtgagacactgcgactggccatctgatttttttaatctgcaatatagacatattaccaactaatagtgctgtcgggaagatcagtgtgaataacctgtagagaaggaccctgtatttgtagcgctttgtgctacaaattctttatgccacatgggctttttaggcagtgccgtgcctgatggctccctgacatctttgtgcaca

SEQ ID NO: 496581 - DNA, 626 bp, Homo sapiens
caggaggatcacttgatctcagtagttgaggctgaggcaggagaatggcgggaacccgggaggcagaggttgcagtgagccaagatygcaccaatgcactccagcctgggcaacagagcaagactccatctcaaaaaaaaaaaaaaaaaaagagagagagagatttgaagggctactatgtggaagatggaatttaactttacttgtgattccaaaggtaagaataaacatggacacattgaagcctgtgagagactgaatttggctaagtgtaaggaagaatgtacaaaggtgaggaagttgaccaggggacagtgatctccctttccccaaggctttcaacaggagctgagtggccatgcttgggtgctggtgcagagaagttctgtgaatcaggaaaggacttcaaaagttgcttccaaatcaaatatcctatcctggattgtccaacctttcccccctgccctcttctgaagaacccagggacgcacatcccaatgcctacaggacaggggcgtaatgtgcaaataggggctggcttggtgaaaaaaatgcatgttccttctaggggagggtctactgctcagttcccactgatttatttatttacttattttttcaagaca

SEQ ID NO: 496582 - DNA, 626 bp, Homo sapiens
caggaggatcacttgatctcagtagttgaggctgaggcaggagaatggcgggaacccgggaggcagaggttgcagtgagccaagattgcaccaatgcactccagcctgggcaacagagcaagactccatctcaaaaaaaaaaaaaaaaaaagagagagagagatttgaagggctactatgtggaagatggaatttaactttacttgtgattccaaaggtaagaataaacatggacacattgaagcctgtgagagactgaatttggctaagtgtaaggaagaatgtacaaaggtgaggaagttgaccaggggacagtgatctccctttccccaaggctttcaacaggagctgagtggccatgcttgggtgctggtgcagagaagttctgtgaatcaggaaaggacttcaaaagttgcttccaaatcaaatatcctatcctggattgtccaacctttcccccctgccctcttctgaagaacccrgggacgcacatcccaatgcctacaggacaggggcgtaatgtgcaaataggggctggcttggtgaaaaaaatgcatgttccttctaggggagggtctactgctcagttcccactgatttatttatttacttattttttcaagaca

SEQ ID NO: 496583 - DNA, 478 bp, Homo sapiens
acatgttgtaagagtccgtatatgaaatgtctagaaaggcaagtctatcaagacaaaaaatatatttctgcttgcctggagttgagggtgagaatgaggagtgattgcaaactggcatgaattattttggggggtaatggaaatattctaaaataatggaygcacaaatctatgaatatattaaaagctattgagttgtacatattaagtgtgtgaattgtatgatatgtgaattatacctcaataaatctcttaaaataaatatatgctaattacaacaaatgaaaccctgttgttgtatgaagaaaaagttatcagtcttcccacctccttcccatattcaacacccctcaaccaataagcagcattaccataatcagtttgaggtgaacctttccatccttttctttatgcttgtataaccacacatatgcacctatgtttgtgttccagtaacactaactagcattgagtgaat

SEQ ID NO: 496584 - DNA, 410 bp, Homo sapiens
ccgcgaggagagacttccacagwggcagcgtttccacagcccaaagccacgtttctagggtgatgcagccccagtaagttcctggcggggaagctcacggctgtcaaaagaactcttcgctccagccggcgcacgaaggggaggagggcaggaggctgccgcccgcacaggtcatctgatcacgtcgcccgccctagtctgcttttgtgaatctccactttgttcaacccccacccgccgtctctccctccctgcgccttccctctaaccttaaagacccagctacctctacgcaaatggtagctacctctgcgcaggtggaagttgagttcggttcacgcgggaccctcttccctgtggcaagctgctgaaggagacctgctgttactgctttagctgctgttctgctt

SEQ ID NO: 496585 - DNA, 410 bp, Homo sapiens
ccgcgaggagagacttccacagargcagcgtttccacagcccaaagccacgtttctagggtgatgcagccccagtaagttcctggcggggaagctcacggctgtcaaaagaactcttcgctccagccggcgcacgaaggggaggagggcaggaggctgccgcccgcacaggtcatctgatcacgtcgcccgccctagtctgcttttgtgaatctccactttgttcaacccccacccgccgtctctccctccctgcgccttccctctaaccttaaagacccagctacctctacgcaaatggtagctacctctgcgcaggtggaagttgagttcggttcacgcgggaccctcttccctgtggcaagctgctgaaggagacctgctgttactgctttagctgctgttctgctt

SEQ ID NO: 496586 - DNA, 480 bp, Homo sapiens
atgaagtagacaggagcagccatggaagaaactcaggtttcagtgaagcactatgaggaggtcctcccagggaggctgtggaatcaaaatgttaaaaggggtagaaaaaaagcgagctacaagatgaagattttgcctaccacgttttgagaaaatttaaaaagataagcgatacagtgaatgagrcaggactttcggctaaaatcggagtaaaatttgtagattccagtaaaccaaatccctagagaagagtcccagccaagacaatgttagaaacttggttgcaaattgtacaagtttgaactgagaaggccaagtttgtgggttaatggaaaagagaaaaataggcatcccaagaaggatacattgttttcccattaaagaagcaaggaaatacactttgaaaagtaagtatgggaaagaatgaggttagggctacacagagatgccatggcacactggttatctcccttgggttca

SEQ ID NO: 496587 - DNA, 480 bp, Homo sapiens
atgaagtagacaggagcagccatggaagaaactcaggtttcagtgaagcactatgaggaggtcctcccagggaggctgtggaatcaaaatgttaaaaggggtagaaaaaaagcgagctacaagatgaagattttgcctaccacgttttgagaaaatttaaaaagataagcgatacagtgaatgaggcaggactttcggctaaaatcggagtaaaatttgtagattccagtaaaccaaatccctagagaagagtcccagccaagacaatgttagaaacttggttgcaaattrtacaagtttgaactgagaaggccaagtttgtgggttaatggaaaagagaaaaataggcatcccaagaaggatacattgttttcccattaaagaagcaaggaaatacactttgaaaagtaagtatgggaaagaatgaggttagggctacacagagatgccatggcacactggttatctcccttgggttca

SEQ ID NO: 496588 - DNA, 567 bp, Homo sapiens
acatgggcacacacaggcatgcacacacacacgggcgcayacacaggcatgcacatgcacacacatgcaaacgcacacatgggcatacacacatgagcgcacatatatacaggcacacacaggcacacaaaagcatacacatactcaggcacacatgggcacacatacacgggcatagacgggcacgcatacacaggcacacatacaggcacacacatgggtacacacaagcacatacacgggcacacacatacatgggtacatacaagtacatacacacacgggcacacacacgggcatacatacaggcacacacatgagggcatgcacacagatacacgggcatgtgcacatgggcacacatacacacaggcatacacacttgggcacacactctggcacaggcacacagcacacacattcctgctctgcagcctcagaccccgcctgtgcttgggaagacctccctgcctcctgctcacttttagggctccctttggtttttactacaagcaatggagtttcttcctgtgcctttgtggccctgaggggaaccactgtctccct

SEQ ID NO: 496589 - DNA, 552 bp, Homo sapiens
tttttttttttttttttttgaagacagagtcttgctctgtcccccaggctggagcaaccatcacagctcaccgcagcctcagcctcctgggctcaggcgatcctcccgcctcagcctcccgagtacctgggaccgcagacgcgctccaccatgcctgttctttgttgttgttgttgagacagggtctcattatgttgtccaggctggacatgaactcctgggctcaagcatcctcctgccttggcttcctgttgtgattataggtgtgaaatactacacccagcctgatttttggttttagagacaggatcttgctgagctgcccaggtgggaaggcaatggctgttcgcaggctcactcacggtgcactaccgccgtgagctcctggactcaagtgatcctcctgctgcagcctcccaagcagctgggaccacaggtgtgagccatgtttccagtttatcacaggtaatttcagatgtgagtgacgttctgtgcccagtaatggggctkttggggtttataccactgcactcccccagctgtggtgtacaa

SEQ ID NO: 496590 - DNA, 330 bp, Homo sapiens
ctggggcatgggcaagtcaccctgcccctccaggcctcagcttycccatctgtacatctgagcccagttgaggatagcccacctcgtggggatgtggtggggattaaatgcactaatccacacctgtttcatgttaagtgttcaatcaaccccagctaagccctttacagacatcctcccattctgtgcttacagaaatgctaagaactggctgggcacggtggctcatgcctgtaatcccaacactttgtgaggctaaggtggacagatcacttgagtttggagtttgagaccagcctggccaacatggtgaaaccccgtctctgctaa

SEQ ID NO: 496591 - DNA, 587 bp, Homo sapiens
ctcctccctcactccttgcaaaatacatctccaagccttagttctgggtctagtccctggctgggcctcaggacaccgccataatgaaaccatggccttgccctcaaggagaaccagactggctggggaagatgacactaagagtaattataatgcaaagtcataaaactgcaggtgtcacgggggagtcagggtctgcttgctcctgagctgtgtcttccaggccaaaggaaggagctgggggaagggaccccaggtagagaggacagcatgggcaaayagcgccagtattgcttgtgaggcaggaaggcgcaggcaggagctggtggcaggagccagacctgactcctgtgtaggttataggtgaccctctaggttctaacaaatcatggccctatgaccactcacagtgagaaagggccacacaactctggcacaccacagcctgacaaaaacttttccacacctaccctggctgtactgtgggatcttggaaatccctcttggagagctggaggccaaattttgagatgacctgcttgctggggcccagagctaccttcccaggagcatggttggtggctagc

SEQ ID NO: 496592 - DNA, 300 bp, Homo sapiens
ctgttcatttgtatttgacattgataaggctttgagatcctgtagtaatacttattaaattttttataatataggaattctgtacaggttataacatgactgaattgtttggtttattcatttaggatgaggtgatgactgagcccccctttccattgtaatattctgtgagtgaytttaggcagtggggaggacattatcctttctgagggtcagtgataggcctgtcagtgtgcctgggactctcacttaggtaaccccatgtcgattcccagagtagtcttaatgttatcattatta

SEQ ID NO: 496593 - DNA, 603 bp, Homo sapiens
gtgtgtcttgatgcttcaggtgcacatgggaagatgtcactggggctttagggatgtggttgtagggccctagtggaggatgtagtmtagagggggctgtgatttcaaaatggcactatgctgtggctgcttgtgcctccagtgggtatgtaggacccggcagtaatgccttctctgcaataatgccattgtgtgggctcctgagatctccctctaatagtctcagggtccacaagggcataggggctttcccatggataggattgtgggagtctgcagtgggaacgtatatcacttggggatctctcatttacctttttttcacaatgaggagtgcctcctggcactgagccaaacctggctggctgccttgttttcctctccttttatgcctcagagctttcttgtcacttgctgtgctgaatttcagtgttctttcttagaagctctgtttgatgtgtggttatctacttagtgttttggtccttctttgtgaaggaagtgagccttagtcgcctttggtcagccatcttgaagcccaccatcatctctctgttctgttttcgttttattcgagtaaagcattcttccatccagtgctca

SEQ ID NO: 496594 - DNA, 603 bp, Homo sapiens
gtgtgtcttgatgcttcaggtgcacatgggaagatgtcactggggctttagggatgtggttgtagggccctagtggaggatgtagtatagagggggctgtgatttcaaaatggcactatgctgtggctgcttgtgcctccagtgggtatgtaggacccggcagtaatgccttctctgcaataatgccattgtgtgggctcctgagatctccctctaatagtctcagggtccacaagggcmtaggggctttcccatggataggattgtgggagtctgcagtgggaacgtatatcacttggggatctctcatttacctttttttcacaatgaggagtgcctcctggcactgagccaaacctggctggctgccttgttttcctctccttttatgcctcagagctttcttgtcacttgctgtgctgaatttcagtgttctttcttagaagctctgtttgatgtgtggttatctacttagtgttttggtccttctttgtgaaggaagtgagccttagtcgcctttggtcagccatcttgaagcccaccatcatctctctgttctgttttcgttttattcgagtaaagcattcttccatccagtgctca

SEQ ID NO: 496595 - DNA, 603 bp, Homo sapiens
gtgtgtcttgatgcttcaggtgcacatgggaagatgtcactggggctttagggatgtggttgtagggccctagtggaggatgtagtatagagggggctgtgatttcaaaatggcactatgctgtggctgcttgtgcctccagtgggtatgtaggacccggcagtaatgccttctctgcaataatgccattgtgtgggctcctgagatctccctctaatagtctcagggtccacaagggcataggggctttcccatggmtaggattgtgggagtctgcagtgggaacgtatatcacttggggatctctcatttacctttttttcacaatgaggagtgcctcctggcactgagccaaacctggctggctgccttgttttcctctccttttatgcctcagagctttcttgtcacttgctgtgctgaatttcagtgttctttcttagaagctctgtttgatgtgtggttatctacttagtgttttggtccttctttgtgaaggaagtgagccttagtcgcctttggtcagccatcttgaagcccaccatcatctctctgttctgttttcgttttattcgagtaaagcattcttccatccagtgctca

SEQ ID NO: 496596 - DNA, 603 bp, Homo sapiens
gtgtgtcttgatgcttcaggtgcacatgggaagatgtcactggggctttagggatgtggttgtagggccctagtggaggatgtagtatagagggggctgtgatttcaaaatggcactatgctgtggctgcttgtgcctccagtgggtatgtaggacccggcagtaatgccttctctgcaataatgccattgtgtgggctcctgagatctccctctaatagtctcagggtccacaagggcataggggctttcccatggataggattgtgggagtctgcagtgggaacgtmtatcacttggggatctctcatttacctttttttcacaatgaggagtgcctcctggcactgagccaaacctggctggctgccttgttttcctctccttttatgcctcagagctttcttgtcacttgctgtgctgaatttcagtgttctttcttagaagctctgtttgatgtgtggttatctacttagtgttttggtccttctttgtgaaggaagtgagccttagtcgcctttggtcagccatcttgaagcccaccatcatctctctgttctgttttcgttttattcgagtaaagcattcttccatccagtgctca

SEQ ID NO: 496597 - DNA, 632 bp, Homo sapiens
cctgaattcagagttcagaagcagacttttccttcttaaagcttcagcatcttccttataatgccagaaccccgctcctgccccccatgtcctccctctccctcccgacaagggcactggtgctatttggagagctggaaggtagtgtaatatctaactttttagccacagtttcaaatcagagctgcagacatgtgccattattctctcacaaactcattctccgagctttcgtagctcattaaaggagstaatggaaccaattttgcagctatggatgagttggcctcctgccagatgagacctcgcttcattaagttccaaccacatcctgtcctctgtctcaccctgtccatttacctctcctcctcagaggctcggttccaaggagggcggctcacatgataccactgaccccaaacgtccaggccccaggtaggtgctgagggaatgatggagtcaggtgggattagcgctccctacaggacaacagtctgtccctggtgctgggccagtactgtgcagaggccacctcacacagtggtcaccataacccaacaaggatcagcagcgcccttctacctgtggggaaatgtccttctgggaggttaagtgacttgcccaaagtcaca

SEQ ID NO: 496598 - DNA, 632 bp, Homo sapiens
cctgaattcagagttcagaagcagacttttccttcttaaagcttcagcatcttccttataatgccagaaccccgctcctgccccccatgtcctccctctccctcccgacaagggcactggtgctatttggagagctggaaggtagtgtaatatctaactttttagccacagtttcaaatcagagctgcagacatgtgccattattctctcacaaactcattctccgagctttcgtagctcattaaaggaggtaatggaaccaattttgcagctatggatgagttggcctcctgccagatgagacctcgcttcattaagttccraccacatcctgtcctctgtctcaccctgtccatttacctctcctcctcagaggctcggttccaaggagggcggctcacatgataccactgaccccaaacgtccaggccccaggtaggtgctgagggaatgatggagtcaggtgggattagcgctccctacaggacaacagtctgtccctggtgctgggccagtactgtgcagaggccacctcacacagtggtcaccataacccaacaaggatcagcagcgcccttctacctgtggggaaatgtccttctgggaggttaagtgacttgcccaaagtcaca

SEQ ID NO: 496599 - DNA, 626 bp, Homo sapiens
ctgaggtaattggctgtacagcccccagcctctgccccccagggccctcctgaggtgtctggaaggacctttgggatctttggcctcataaccagaaatcagaagcttcaaattctagaggccccttttcttccaaagactacctctcacacatacagcagtcctgcaggaaaatggtcaggaaaggcyaattttacagctcacaaagtgggaaaggcagggaagcctacctcagcttcatggaaagccctgaactgggctgacctccacctgccccagctatgcctaaagggggagggtgagacagcttagagtagccatgccccgtggcaggcaggcctggctaagtggcccccttcccaggggctggggtcttccccaaacactctacctctcagagcagaggatgtcaccttattgctccctcttgtactaggtctgcggccctcttctggggcatgtggctggggaaatggtgggatcagatatcccctactgagcccagggagcagattgttggtgcctgaagcgctcacagagatccctgtggtacagatgaggaaactgaggcttagcaggacaggagcagggctggggcacgagccaggtctcttctctggctcaca

SEQ ID NO: 496600 - DNA, 626 bp, Homo sapiens
ctgaggtaattggctgtacagcccccagcctctgccccccagggccctcctgaggtgtctggaaggacctttgggatctttggcctcataaccagaaatcagaagcttcaaattctagaggccccttttcttccaaagactacctctcacacatacagcagtcctgcaggaaaatggtcaggaaaggctaattttacagctcacaaagtgggaaaggcagggaagcctacctcagcttcatggaaagccctgaactgggctgacctccacctgccccagctatgcctaaagggggagggtgagacagcttagagtagccatgccccgtggcaggcaggcctggctaagtggcccccttcccaggggctggggtcttccccaaacactctacctctcagagcagaggatgtcaccttattgctccctcttgtactaggtctgcggccctcttctggggcatgtggctggggaaatggtgggatcagatatcccctactgagcccagggagcagattgttggtgcctgaagcgctcacagagatccctgtgstacagatgaggaaactgaggcttagcaggacaggagcagggctggggcacgagccaggtctcttctctggctcaca

SEQ ID NO: 496601 - DNA, 630 bp, Homo sapiens
ttttgtatttttaatagcgatggggtttcaccatgttggccaggatggtctcgatctcttgacctcatgatccgccccccgccttggacttccaaagtgctgggattacaggcgtgagccaccgcacctgaccagttaaatttcattggtatgttttatatttatgcctaagctcaagaaataattaaagctgtatgggaacagttgtaaaagcaaaaatgaatctcagctttctctaggttagttaatacaagtaaaatattattatataaatttgttacaggaaggactgaacatttcacaaggggtatcaatgcccttgytctcttttaaaaattgtatttataatagacacataataattgtatatatttttagggaaccatgtgatgttttaatgcatgtatatatagtataattatcaaatgagggtaaataccataccagtcactttaaacatttatgatttctttgtggtgaccacattcaaaattctctcttctagctatcttgaaatatacaatacattattatttactgtagtcaacccacagtggtaatagaacatcaaaacttactgtttttgtataattgtaagattgtactcattgaccaaggtctcccagagca

SEQ ID NO: 496602 - DNA, 542 bp, Homo sapiens
ctgttttggcgtctgtttgctgcggtaggaacatggcggatcggctcacgcagcttcaggacgctgtgaattcggtgaggaatttcattcgattagcctctgtctttctctttcttgaggtaaagcaagggaggaaaggggcccaagaggcaaaacttgraagtggggagcggactgagagacagggcttcggcataaagcgctctctcgggaggcgccaccgcgaactcggaggtttgaggccggctgccgggcggtgcttgaaggtgcgggagggagcagactctttcgcttgaggagaccgggaagatcgttcttgtccgggtgaggccgccaggacttgtgggctgcgcggtcctgtcgtgttccctgaggacagttttattttcttgtcagtggtgcttacgggttctctttcttttgggggttgggaggagaagcaggagctcttttctttcctcatcaattttaatccaccaagggagatctcatgctctggatgactgggtttttgtaatgaaatgtcagccgagagtattcct

SEQ ID NO: 496603 - DNA, 664 bp, Homo sapiens
cctctctcagaacggcatcttcggatagattttgggtagttgtccttttgggtattagccagtatcagacaatattggttcctttaatggcccttttactcctcatattttcaagcatccttatctaaacctcctgaatcttacaagacaaatcttgtggtggttttctctagagagccagaagttatattaatttccagcttgtttacttcttaaggctctctggaaatgtctgatcatatattggacattttctaaattggcgatttaaataacaggagaaagtcttctgaaattgcctgatgtgttttatgaaatattttatactgttgagttatttaaattttctctttgctacttgttgctttttttttttttttgtattggaggggataatcattaattggactagttggtacagatctgtagtccagggcagtggtatataacaaagtcctgaattctgkggcaaattgctgttttaataaagttgatgaaagtctttgtttataacccttcacttggatctacaccaaattttaatttaacttctgtaaacgtggcttctggcctggtaatttagtgtgattttattttttgaggaaaccctgaagaaaggatgacttatattgaacgttaggtaaaacttagtagaaagataaaa

SEQ ID NO: 496604 - DNA, 574 bp, Homo sapiens
ggtacccatagccagtctcttccagactcatagcatcagtggataccatgtggctgagaaaagaactgtttgagtgccattaagaattctgcatcagacttagatacaagccttaccaacaattacagaaacattaaacactatgacacattacctttttagctatttttaatagtcttctattttcactcttgataagcttataaaatcatgattgaatcagctttaaagcatcataccatcattttttaactgagtgaaattattaaggcatgtaatacattaatgaacataatataaggaaacatatgtaaaattctgttatgacataatttatgtctccattttgttgtattggccagtacttttacaaatcaaaacatctctcaagccaaaggagaagacagtaagaacagacataagggacattttagtttrggctagtgtcctgcctcttagaggtggcattgtgtaaatctgagctttgagcaagaaagttttggaaattgtgttgcttttaagaaatagagttagtgtggctggataagaaagtcacatttatgcaaatgtttct

SEQ ID NO: 496605 - DNA, 618 bp, Homo sapiens
ctttcactccagagagaccagggcatccatttccatgctctgcctggtcccttttgcctatgtgcttagtgtggagtggctaagatctgttagttcatgccaagggctggattagaggtagaggactccacggagtcactgaacccagtctgcccaccctgcagaggagtatattgaggccctgaaagttacgtggcctcgggcaagtcactgttaagacttgttttcccttcccagaggctttctctctttggtcttgagcacttgttttgtgcaaggctgaacaggcattcacccctccttcacagagggggttgctgacgcccagggaagctgagcgattcccccagctcacgcagtgagtggatggcctggttggatctcagtccaggctcctggctcctctcaggagcttctcaaagcatttctgccagaaagcagaccctgttccctgtgatcctgtccttctgctggggtgcatgaagcccccagggccccgcagtgcacataccttcacccagcgcctggcctccgatgagcaaggacacgatgtcctgggggrtgcaatctcctggcccacatcccttgaccagataaacactcccctacagacactcc

SEQ ID NO: 496606 - DNA, 613 bp, Homo sapiens
gcatctgcattcaagcccccaggggatgggctggaggggtgcaggggagggctgtgccatgccccagtctcgacccctgtccacctcctggtccctcctggagctgrggggccagggttctgctggagagagaagctgagaggcccctcctggggtggagatggctcccggaagcgggactgtgagtataaggaaagaaggcagcaaacacggctgtggtgaggctcaccctccactcaactcagcactggaacaaaagagaaaacaaccctttttactgagcacctactatgtgccaggcactgatctagggctttgtactgattagcatagttaatccttccaacaaggcatggaggcaggaagagatgaactgagtgatctgagctcacacaataactggagggatacgggtttgacctgaagcagttgtctgtaacttcagacagcttacaaagcaactgggggacacagcttttcagtagagaacagaagatggcaagagggaataccaccgggggagatgggagcacagatgacaagtactataggagtttgagaaggggaggggtccccaaggtctgaggaaatccgcacgggcttcctggagcag

SEQ ID NO: 496607 - DNA, 549 bp, Homo sapiens
tccatccatccactctcccacccaccgctgcacttgctctcccttctcccgggaatgctctccccacgggtcctggcctctgccgctcacaggcagggcccctgcagccccagcctcgtgggacatcttcggggaagaccccctgaggccccatccaggatgtcagccccagtacctgcaccccacctgaaggagtgacgtgaggccacttcctggaggctggcactgcctgctctcctcgagtccctcctcagccctcacctgcatccaccagggaggccagagcctcctccatccatgccccacagcccagacctcaggatgctctttggagcaagtgtgttcagaagaagagtgttctggggtctcttgaaggaaccagaaagaaagctcttgtcctcctaataatgacaacccgctttaatgcatttgttcgttcattgggggacttactgagcactgtgttcacaggactgggatggaacagggcacaaagcccccgcccctccggtgccagcrtacagacatcttacccagaagtcgaggctt

SEQ ID NO: 496608 - DNA, 282 bp, Homo sapiens
tactgtctgtgtctgtgaggaggatccaagygcgcgaggatgttgtgatttgctttgctttgggaatcccaggtgtcagcagtcatcactggcccacagtgtgcgttcaagaagtcttacctgacccaggtgtggtgactcacacctgtaaacccagaatgttgggaagccgaggtgggaagattgctcgaggacaagaatttgagatcagcctgggcaacatagcaagactcgtttctaaaaaatttttttaatagttgggcatcgtgaatatgcacctgt

SEQ ID NO: 496609 - DNA, 611 bp, Homo sapiens
gctgggcatggtggtgcacgcctgtaatcccagctactcgggaggctgaggcaacagaatcgcttgaacctgggaggtggaggttgcagtgaaccragattgcgccattgcactccagcctgggggacaagagcgagacttcatttaaaaaaaaaaaaaaaaaaaaaacagactgccaacaagtccttttttttttttctccttttaagcctaaagataaatgcttatgatcttagaaggaaagaaataaaacacggtaatgggaaaatcagttcagaggtaggaaggaagctgggtttgcaaaaacaaaacggaagtatcagtgaagcatggcctagaagtccaagagcaggggtagagttttaaagggactgctatttagatcacagctatccctcagagcgcccccatgccaggaaactacgcaactgctcctgcatttggtaactcacttaatcttggtaattaccctatggggtaggtgctactgtcatcccctaatcccactcacctgttttctctttttcaaggtggaataattagtatccacacaaagggaggctgggaaggttgacacggggagggggcggcttctggcggaccaattccta

SEQ ID NO: 496610 - DNA, 611 bp, Homo sapiens
gctgggcatggtggtgcacgcctgtaatcccagctactcgggaggctgaggcaacagaatcgcttgaacctgggaggtggaggttgcagtgaaccaagattgcgccattgcactccagcctgggggacaagagcgagacttcatttaaaaaaaaaaaaaaaaaaaaaacagactgccaacaagtccttttttttttttctccttttaagcctaaagataaatgcttatgatcttagaaggaaagaaataaaacacggtaatgggaaaatcagttcagaggtaggaaggaagctgggtttgcaaaaacaaaayggaagtatcagtgaagcatggcctagaagtccaagagcaggggtagagttttaaagggactgctatttagatcacagctatccctcagagcgcccccatgccaggaaactacgcaactgctcctgcatttggtaactcacttaatcttggtaattaccctatggggtaggtgctactgtcatcccctaatcccactcacctgttttctctttttcaaggtggaataattagtatccacacaaagggaggctgggaaggttgacacggggagggggcggcttctggcggaccaattccta

SEQ ID NO: 496611 - DNA, 599 bp, Homo sapiens
ctgcagagctgcatcactcatggtcatgccccttcctggttggcccatacccaataatgggtggtggcaggggtgtaaagacctagctacctcacaccaattcagaacaacaaaaggccattctagctccagagctcttcatggtgtcaggtgaggcagttgtcaggtttgcatcagagcttcacttcaccctaggtccactcctgcttccttctcttccttttcacaggtgatgatccaaaggcccacataaatatttagtacactaaactccatctcagaatcagcttccgggggaatccagcatgcagcatgatccttgaactcatggaacaatttgtatgatgagccaggtggacagatgaattcaayactgtgtgagaagtgctaggatagacacataaagaaaatgctataggaagggaggagaagtacaccaattcaatcaatgaggctcaagttcttcctggagtggataatcttgagataatttttgaaggtttttaagcctataaagaaggaagaacagcccaggctcagtggctcacgcctgggatttggctcagtggtgccaaatcccagcactttggcagtccaag

SEQ ID NO: 496612 - DNA, 641 bp, Homo sapiens
ctggttgtcaaaacagcctttccatatattcagaggtatcaagtatttttatcagtttatccatcatcaagaaatttctcccagagcattcttatgtgctgcagttttagcccattgcttgatatagttgctgctggtgcagtctctatcctatgctagttcctctgtttcctatatcctatgtaatcctttggcttgtgtattctcttggtttattccattttctagtagctttctgaaaggcaagtgttctgtggtattatatttatataagtgtctttattttaccccaactattagtttagctggctttcaaattataaaggtgaaattgttcttaagagctttgaaggaattcatagcatctgttgtaaaattagaagcccttcttacttccatcactcttcagatcacttttgtctcctctgtggaagattatacgatctcattttgaaacttatcaaatgtttctctttgttgtatctagagttctgaaatgtcacagccatgttacttattaygagtctatagtctttcattttgccatgcattttatgggtcctttcagtctgacaatttgtgtccatcaactctgggaaaattcctcatgttttttctttaattttcttgcctttgttttt

SEQ ID NO: 496613 - DNA, 648 bp, Homo sapiens
aaaaggcagattaataggagaaagggcatatgattttatttgatcttggtgttacgtgacatgggagccttcagaataaagacctaaagatataggagaaaactgcccattggtatgcttaggttcagcaaagtctggacagccatatactgagtggggaaacccagcaaggcctgcctgtctgtatagattcttcttggcctctctgtgcagcattctttccttccgggtatggaacagcaccctttctggaatggggatcctatgacctacaatcaaacagaataggtcagatatgtctttatrgttagtttttacacagaaagatgagggcagggaacattagagtaatatatttaggttctgtggctggctttggggaaagggagttctggtttctgtggactaccttggggacaagggatggtagtttcagtggctagcctcaggagaatgagaggccagagacaggaagttaggagatggtcagagagagctgctttggaggactttattttggagtatcatttccttagccctagcagtatcatacttacatttaagtaaactcaagtctgtaaacgtggcaaaggaaaaatttatttgaatagtggacagtattctattcattattcttctcaaatgaac

SEQ ID NO: 496614 - DNA, 648 bp, Homo sapiens
aaaaggcagattaataggagaaagggcatatgattttatttgatcttggtgttacgtgacatgggagccttcagaataaagacctaaagatataggagaaaactgcccattggtatgcttaggttcagcaaagtctggacagccatatactgagtggggaaacccagcaaggcctgcctgtctgtatagattcttcttggcctctctgtgcagcattctttccttccgggtatggaacagcaccctttctggaatggggatcctatgacctacaatcaaacagaataggtcagatatgtctttatagttagtttttacacagaaagatgagggcagggaacattagagtaatatatttaggttctgtggctggctttggggaaagggagttctggtttctgtggactaccttggggacragggatggtagtttcagtggctagcctcaggagaatgagaggccagagacaggaagttaggagatggtcagagagagctgctttggaggactttattttggagtatcatttccttagccctagcagtatcatacttacatttaagtaaactcaagtctgtaaacgtggcaaaggaaaaatttatttgaatagtggacagtattctattcattattcttctcaaatgaac

SEQ ID NO: 496615 - DNA, 577 bp, Homo sapiens
ggttttgctgaaaataatggatttccatcataaaattagaattaaccccaaatatttaagaaaggatttataaatttacattagtaaagcctttatagtgaaacagtgccggttccttttcattggtttcatacaatcaatataaagcatcacagtctccatatggtttgtaaagatattttgaaggaatatcatctttgtatgttttttaaaaaccaagaatctaaaattcttcgtatttattatgttggtacttaattctgttgggtgggttctttttgtttgttttttgttttgagacggagtctcgctctgtctcccagacgagtgcagtggcgcgatctcggctcactgcaacctctgtctcctgggttcaagcagttctcctgcctcaccctcccgagtagctgaaactacaggcatgtgccaccacgcctggctaatttttttgtgttttcagtagggacggggtttcaccawgttggtcaggcttgtatcgagctcttgacctcaagtgatcctcccacctcggcctcccaaagtgctgggattataggcgtgacgaccgcgcccggcc

SEQ ID NO: 496616 - DNA, 577 bp, Homo sapiens
ggttttgctgaaaataatggatttccatcataaaattagaattaaccccaaatatttaagaaaggatttataaatttacattagtaaagcctttatagtgaaacagtgccggttccttttcattggtttcatacaatcaatataaagcatcacagtctccatatggtttgtaaagatattttgaaggaatatcatctttgtatgttttttaaaaaccaagaatctaaaattcttcgtatttattatgttggtacttaattctgttgggtgggttctttttgtttgttttttgttttgagacggagtctcgctctgtctcccagacgagtgcagtggcgcgatctcggctcactgcaacctctgtctcctgggttcaagcagttctcctgcctcaccctcccgagtagctgaaactacaggcatgtgccaccacgcctggctaatttttttgtgttttcagtagggacggggtttcaccaagttggtcaggcttgtatcgakctcttgacctcaagtgatcctcccacctcggcctcccaaagtgctgggattataggcgtgacgaccgcgcccggcc

SEQ ID NO: 496617 - DNA, 477 bp, Homo sapiens
gcccaatagaagccagccacagagccatggggtaggcagtctgggctgcctgctctggacacctgaacttcagttggttcacaygcaaaataacagtgcatctaattttcctcagaggcagagctgttcagtaattaaccaactcctcattattttattattttattttcaatctttattgagtgattctaatgaattaaaagactttccaatcgttttgaaatgacagaaaataatatgcttctcgggtgtctctatttaaaaggaagcaaacactaaccctagaattttatctgaaaggaagttcatctcttttttgccttctttttcttcctcataactcagtttatggatggttcaaaaaaatgcatggtatcatcttatgaaaaaatggagagtagtgtatgaactatattgtaaataattttaaaattaatcaatattttctctttctgtagtattgtaacgagccatgct

SEQ ID NO: 496618 - DNA, 599 bp, Homo sapiens
tgcagtggtatccatgttgtaatgttgttttcaaaaatcattttgcaactttaaagcaatgttgcattagctgttattctcattatattcatgtawcatgctccttttcatgattttttttccttaggataattctctgaaatagaattgctggacctaaggggatgaatattataaggtctttgattttattggtcaatttctcttgagaaaagtctttactaatttactggcaatgtgtgagagttcctgtttctccataacctcatcagatgaagatgtttaattatcatgaaattatgttcactgctggatatctgtttaaaatgctcagaatggtttatttatttcacagaacttgaaaatatttattttaaaaagtgatactgtgatttttcagctacaaaaagttgttattggtgttttcttttattactgtcaagaagataaatggtagagtatacataaaatatatgaaatttggcaagttaaagttattgtttgaacactttgtattgaagaaattctgcacttgaagttcttgagtgttctttgttgcccattattgtttgagatacagaacgtctttaccactaatg

SEQ ID NO: 496619 - DNA, 564 bp, Homo sapiens
acttcgataaatggagagttgtattcgtttatgaattagaaaagcaaataatttttggttgccaagaatcctctaataatcatgtagattcaatgaactcctattaaatattacaacaggcttctgtgcagcatttgattaaatttacatagaaaagcagaaggaattagaatagtcaaaacaattttgagaaagaataaagctggaggatgtggaggaaaagttaaatattaaatttgaacccaactgaacgtggacacaaacagtagtcaccaaatccaggaataggtagtgtgagccccttgaggcattcatccaacactgtttaggagaaatctctatttcaatctattcgtatacgttaattattgaaaaacaacagacaattgcaaaaacaagttgacctttttgtgttccttgagcccagtcgcgaagggccctcgtgactgggcctcatgccaaacaactcgttacaaaaagagctagggtccttacaaaaagaggtagggtcccagaccrcgctgaagcttcgtgagacctctctttctctgtgcacggatgggc

SEQ ID NO: 496620 - DNA, 573 bp, Homo sapiens
ccattgtccatctcccttctctagcacagcacagatagagagaaatagcgtcacagaaagtctgaatttgctttatcatgcccaacaccaaaatggcacattgtattggccgaaatcactaatgctcttccccaaaattatcttcaatcacataatttaataagaaatctcacttaagtcmctacccaagcctccctctaattatacaaggcatcccacctctgcctttatcctttccccttcttcagcacttctccctcctctgcctgtgttcctcacacttccccaagctcttctcccacaaaaacagagaaaaataataatattaagagtgcaccttttctggagataaagaagtcagtccaggactaactcacatagtaactgaagaaatattcttgaatgtgtggtaataatttttacaacctcatcatttctaccttctttatatgacttctgtttcttttttcttaagaatctctctaagaattctcttctaagaagccctaaggaaaacaaccctgtcactcaaaccatcccaaatctaataatgcatcttgcccccttcaattt

SEQ ID NO: 496621 - DNA, 420 bp, Homo sapiens
tttctgtatctcacttctgttttctgtttgtcacttccttttttctatccataaatgttatctggtcacatggcagccttggaattgctctgaacctattctggttctggaagctgcctgattgatgaatcagtctttgctcaaattctgttaaatttaatgtttctagagtttttcttttaacaaagtaaaaaacattttccatttctgtcttgcaccacataagagtccaaggagggctagcctgggagatgaatttaaataacatgaacatattaaaattaccctttctaaggggcaacttaaaacctaagaatgaattcctctctcktgagggttcttagtgcttatgcttgtcagcttcactttcctcaatgttaatccaccattttctacataagggggacatgccatcccaaa

SEQ ID NO: 496622 - DNA, 618 bp, Homo sapiens
aattttgggagggacaagattcagcccataacagaaatcatggttataacttttatttttcaataacagtactttgaaaaatgacattgtgtctgtttcttccattttaaaaggaatacaacatgtttaagaccacagaacatctgcataggtaagtataaatcttgttggcattttaattttctcactggaaaccttgttttcatgtgcaagtgctgaaggttctggaatattttttcattattgctctcgttatgaaagcagctgttcaatgaacacagcatattttgttacctcatcaagaagcagaggaagattatgttgtgatcaagttttgtatagctatagtcaaagcttttctgattgtttgagcctggtggttgatttaataggtatactccagggcagttactcatccctgatatatgtccaacccaaaactccaagttatttatgtaaacgatgcttyatatgccttccatgcagataaatcccagttgacagaactgtttaagagatgaatgtgctcccaactgggattacggtcacagtatttatctatatcaactttcatgttacttcactggcaaattgggagctttggaggataagaggata

SEQ ID NO: 496623 - DNA, 638 bp, Homo sapiens
aatacaacaatgctcgtttacttagcaccttaattcccgcacttgcttatagacagaaaatgcctccttcctttcttttgaaagytgtggctcaagatggcaggacaccccacagagtcccagtttagatcttgaaacaggtagagtaagaatggttttggttaggtaggtttaacctaccaactggaggtttatttgaattacatctaaatattatttataggagcaagtctgccagttattaataatttatgaaagttgcttattaccagctataatgtaggttttattgaccgatagatttaactatgggaagaagtagcagaaagagaaaaggaagtgaaaaggtgatatgggagtgtggcttattttgaaagaattctagttttggccagggtgtataatgtaagctagaaaataataatactgagcaccagggatgagtgaagaattcatttatgtctttggcttagtccagcgctatttgacttaagacagtgtgtatggtgtcctggaaaggtttataatttataaagctttgaattctcagggataagccatgaattacagggtgatttcaaaagctttacattctaagataagccactattatgctttttcctcattaaagacaggag

SEQ ID NO: 496624 - DNA, 673 bp, Homo sapiens
ttatgctctgactcttttggaaactttaccttaacttgtggtgctcctgtttggctggaaaaagccatatggccaatgaaaatgtgcagaagttgcctgaaaccaatccacagagagctggtaaactataactttaggctgtgatgaccacatgctgcctttcatcagccaagaaaacaaaaatagccaagctttttrtaatgctttctaaaaaaattgtaaatccatgattgtatcttctatcagaaagtcttagtggtaatacaggtatcctaggtatgggcctcattgatcctctaaaaaaaatgtaccactagggaattctacttcaccaacattttcttgacaatagttgaatcaatcatgtaaatcagtcttaggatttagctgattctgcagcatggtggttttctttgaaaagaagaaatgtcttgatcctgaagacattcaccgtcatctaaatgtcttccccttgattcagtttcttacattatagactactttagtgaagatatccttttcttgcaacagttattcacttaaaaagacttcaaaatattatccagtcactgaagcttctttgaagaaaaatatgactgctcgtgtaaacaattaatggttgttaagcatggcagtgtatattatgacaaacaacacatgctacattatgcca

SEQ ID NO: 496625 - DNA, 663 bp, Homo sapiens
ttaccatcctacagctcacctgttggtaaatgttgatcttatagttcttatttatataaacctcaaagcctggaggaactcataccccactcagacatcatcacaagagaattctgaagtggaaattaacagctaaatggacctgtataggactaaaaatatatatctatgtattttattaaaatacatatgttattaaaatatatattattaaaatatatttttaattaaaatatatttattaaaatatatatattatatatatatattattagttctagattccagtattctttttttggtctaaatttgtaagactcagcaaagacattcatccaggacatctatagcttgctgtgagcctttgctgtcttcagtaaccagcatkcgaatttcatagagatgccaatggagagaaagatacaaggcttccttccctttaagaggcatataatcaaactagtccaagaaagctagtttgacaaaagtcaagggaaggaggggaatagggaaatatatgttaaactacatggctagttaaacattagtcctgcaggccgagtatttgctgggaaaagggggaccctcatcagttacttcaggagctagatttttccatggccccaaatatccttagtgtgttgtatgtccttccaaggattg

SEQ ID NO: 496626 - DNA, 523 bp, Homo sapiens
aatgacattgatacacacatggcttttttcccatgcctatatatatctctaggatgcaaaaataatcacatttaagccaaaatagtattaaaaaytcatacatgttttgtataattccttaattgctgaacttgtcactcaataaactacatgacctcaagcaaattactgacctctttcatgtgttaatttgtttgcaaagagctccaccaaagtgttgtgagaaataagactttatgtaaaatgtagtgtactttattacagaaatcactgtgtaggacatatcttttttttaactttttttaaaaaaattttactttaagttctgggatacatggacttatcttttaaggattccatttcaaggaccttttcactggtaacaagtcaggatctggtaagaagttcagatctatcactgttaccactcctctctctgccacctctatttgccaggcctttaattcttcacatgtctagtgttggctctgaattgtaggtgatttattattggagaagtctg

SEQ ID NO: 496627 - DNA, 506 bp, Homo sapiens
agcacagggaaaccaggatggaataagagtgaatttgctatatggagagaatgtcagatttttggtttgaatggggagaaaaagaaaaagaataacttcaaaggtactctgcctttgagcagggtaatcagcacatttcaccycattttaactgaatatagccttgcaagtccactgattctctcctattttattgagaaaaatcacaagagcttcccaaatttttcttttctttgtcagcattttatagacgattggggacaagttctttgggcacagacaggcctgaattaaattcaagacttctctgtcatttaccaggtgcttgatctttccaaggaagtttcctaattgtaaaaaggtaaaaatcatgctgatgttatcaatatgttctgaaattttatttacataatgtatcgaaagcccctagtcctttcttaagcttaacataaaactactggttcttgatctgtgtttaataacatgggtcaaatcaagtgtttaat

SEQ ID NO: 496628 - DNA, 491 bp, Homo sapiens
atcagcaattataacaaaaccaacaacaataagaatcataatagctactgcttattgagaacaaggcactcagctaacagagtcattgcttgcacataaaccacaactgtactgttatacatttgacctccttcatcatcttttccaggttgaatttagacctgtggacctgaaataacgaattcatttttttttttttagcctggtagagttgcctctcggctgatagttcaattctggcagcatcctccattttaatctttgtagcagtggtttatttaataatttggattttttcatacttttgtacttattttataatatgcatggaawggaaaaaatgaaagtataagagtactgattttaataatgagtaatgtggtctcatgcatttaattcaatttagaaaaagttggaaagcatcagggtgccaaaaattgggacaatttatccttaattggacattcattgatcttaagccagtcgactgt

SEQ ID NO: 496629 - DNA, 607 bp, Homo sapiens
gcttagagtgaaattttagtattaaatgcatgttagaaaagacaaaagactaaattggtgatttgaaattccgtttcaagaaaataaaaaagatacagcaaatcaagcccaaagaaagtagacaaagagtaataataataataaataaaataagaaataacaataataattcctctatcctagaaawgtattttaaaaggctgtatgtaaaatggttggcacagtgccagaagcatagttaggctgcaatacacattagttagttatttttattaccagcacagcaacaagaaaaatggaaagatccatctcatttctcttcaggggcaacatgtgcttttgacagtgtctgttttcgttgtgatatcctcttcctagtggaaaatcagctcacagagcttctggtggaaattttaagtgagcatgggaaggaacaagtggaactaacatttattgcctccttctatgtgccagacactctgctaggcacactgctcatgttcttttattccacccttacaagaacctagagaggtagagattcatcagcacatttcactttggccactgaggcttctagaggtgaagcatctaacccatcattcag

SEQ ID NO: 496630 - DNA, 582 bp, Homo sapiens
attgtagaattttcagcaaataaaaaattgtttttttaaaccactaattctgggagtcgtttggtacacaacagcatgtaactatccccaaactaaatagttacaaagccttgaagcctctggcagatggttctctgatttcctgaaatatataaccacaagctataatgcgctagcatcagtaaaaataagaaagtttgcccccccaccacacacacaaaaggaaagctagtacttatgcttgttaaagctttaagaaaagagttctgatatttttttaaatttaggttttaaattaaatccataaccgtaggggcaacattttccaggggagattttgctcatactgcagaaataaaatatgctatgctaaaaagggaackggcagcagtaattctgaaatatttttaaaataaagtaaaaagtcaaagaagcagaatggtcatcctgtctatcaatattgtattaatttgaaaaaatataagcaaggcaacagattgattattatagattactataagcatgatgtcaaatctaactattgtctttgaaatcagtgtgtcactgtagcggtaacaaacg

SEQ ID NO: 496631 - DNA, 557 bp, Homo sapiens
ttcaatgagtgaggttcatctattagttcatgagagaactgattgttaaacagagtctggtgtcttcttcctctccctctttccttctctctctccaagtgatagctgctctccttccccttctgccatgattggaagcttcctgaggttktcaccagaatcagaggccagaaccatgcttctacagtctgcagaactgagaacccgaaaaacctcttttcctcataaattacccagcctcatgtgtttcctttatagcaatataaatggactaaggcagatatcaaatattgttagtgaaagctatgtaactgaataatatgacaccctataaccccatcgttttccacttcattttagacatgagtgctgctcagttattccttcacttgctacttgccagctagcattcaattctctaatataattccaaacatttattgctttcctctattgccccaacccacctgattttcctgttctcagcagaagaccttgcttatcatgtcatagagatgaaggtgtcacttgtgaacatcctcaacaaattcacccat

SEQ ID NO: 496632 - DNA, 557 bp, Homo sapiens
ttcaatgagtgaggttcatctattagttcatgagagaactgattgttaaacagagtctggtgtcttcttcctctccctctttccttctctctctccaagtgatagctgctctccttccccttctgccatgattggaagcttcctgaggttttcaccagaatcagaggccagaaccatgcttctacagtctgcagaactgagaacccgaaaaacctcttttcctcataaattacccagcctcatgtgtttcctttatagcaatataaatggactaaggcagrtatcaaatattgttagtgaaagctatgtaactgaataatatgacaccctataaccccatcgttttccacttcattttagacatgagtgctgctcagttattccttcacttgctacttgccagctagcattcaattctctaatataattccaaacatttattgctttcctctattgccccaacccacctgattttcctgttctcagcagaagaccttgcttatcatgtcatagagatgaaggtgtcacttgtgaacatcctcaacaaattcacccat

SEQ ID NO: 496633 - DNA, 634 bp, Homo sapiens
cacatgaatatttcttataatgcttctcagcgcaggacaagaacattagctggagcacagcctgctaaaagcaattttatgaaggatgccaaacagtgtgccttgcatgccccagatctctggtgatctggacatcttgatacaagagtaaaatttataacacctacaagaggggagaactacacattcttcagtctgtgytcattcattcctgccacaaatttaattgagcagttattatgtgatggtcactaggcagatcgcagtaaattatattctattgcagggatgaataaagcaaatgagtaagtgctatatgatgaatgctgtgaaaaaatctaaaccaggaggtggtgttgctattctggaatgagtctttataaaagcacttttacatatgataatacttgagtagggacatgaatgaaatgaggaaggaaggtatagggatatttgggataaaagtgagcatagaaaacagcacaaaaccctaaataatggtctactgaaataatagcaggaagaccagtaggctaacctctttataaatcttacgtctcaaaactgggttttgatgagaatttcacagaagagagttccaaggatgtagtctctggtgagaacatgtactgga

SEQ ID NO: 496634 - DNA, 634 bp, Homo sapiens
cacatgaatatttcttataatgcttctcagcgcaggacaagaacattagctggagcacagcctgctaaaagcaattttatgaaggatgccaaacagtgtgccttgcatgccccagatctctggtgatctggacatcttgatacaagagtaaaatttataacacctacaagaggggagaactacacattcttcagtctgtgctcattcattcctgccacaaatttaattgagcagttattatgtgatggtcactaggcagatcgcagtaaattatattctattgcagggatgaataaagcaaatgagtaagtgctatatgatgaatgctgtgaaaaaatctaaaccaggaggtggtgttgctattctggaatgagtctttataaaagcacttttacatatgataatacttgagtagggacatgaatgaaatgaggaaggaaggtatagggatatttgggataaaagtgagcatagaaaacagcacaaaaccctaaataatggtctactgaaataatagcaggaagaccagtaggctaacctctttataaatcttacktctcaaaactgggttttgatgagaatttcacagaagagagttccaaggatgtagtctctggtgagaacatgtactgga

SEQ ID NO: 496635 - DNA, 580 bp, Homo sapiens
gagaggagaggcaacactaaacaaccagcctgggcccaggcatgtgatgggaaaaggggtcaaaaacagacacctcctatgggctttctgagcactgttcrgttcaatttgctgacatcttctagctggcttttctctatttgcttaatatgctgaggtatttagcttaaaagcactaaatgccccatcatgatgagccgttttctctttccccatttactgttattaaggacattttccagcattttcactctctttctgccccaaactaagattgttttctttcgctcctctctcgtgactactcacaggcattcaccaccacacaccgccggcttgattttactcatctttaattcagggatgagtaaagctctccaaatttaggatctgtgctacctttataaagcacacactcctgactgctttcggcacaagtgtggaagctgaattcttgcattccaactagtaaacatgtattgtgcatctactgtgtacccaccagtgttcgtggggcttctagaaatccacaggtgaacaagatatgcttttccccttgtactgtttaggagccagcaga

SEQ ID NO: 496636 - DNA, 580 bp, Homo sapiens
gagaggagaggcaacactaaacaaccagcctgggcccaggcatgtgatgggaaaaggggtcaaaaacagacacctcctatgggctttctgagcactgttcggttcaatttgctgacatcttctagctggcttttctctatttgcttaatatgctgaggtatttagcttaaaagcactaaatgccccatcatgatgagccgttttctctttccccatttactgttattaaggacattttccagcattttcactctctttctgccccaaactaagattgttttctttcgctcctctctcgtgactactcacaggcattcaccaccacacaccgccggcttgattttactcatctttaattcagggatgagtaaagctctccaaatttaggatctgtgctacctttrtaaagcacacactcctgactgctttcggcacaagtgtggaagctgaattcttgcattccaactagtaaacatgtattgtgcatctactgtgtacccaccagtgttcgtggggcttctagaaatccacaggtgaacaagatatgcttttccccttgtactgtttaggagccagcaga

SEQ ID NO: 496637 - DNA, 624 bp, Homo sapiens
gcgtgcatatgtctaggaagatcccatttccctaaaatcttatctatatacacgtgcaccatatgtgattctgtgagcaggggaacacttgagaggatgcaccttcaaggggtcacagtgattgcttcccggatggaaggttcttagcagaggtaacaaagggtcactttcactttgtttaaaatacattacaatgagaatgtgttacttttataattagaacaacaacaggaacaaaaaaagacaatggaggcatggtgggagacgccagggtgagtgcaaagactgaccaggaaagtcaccggggccacaggaagggggcagcttatcccagaaggccactgagcagaggcaggctgccccgatcacggcttgcctacctctccctsgcagggccttcccacaggagggacatccttccctgcccactgttgggcttggccgtatcatgggccacagaacatgagcagatgaggtctgccaagtctgaacagaagtttgaagagccatggcctgggtcagccagatctgtgtctcttctccctttgtatgtctctgacaggtgttaccctttcagtctgggttcccgaacgaaggagacccgtggaacagggcccaagccag

SEQ ID NO: 496638 - DNA, 581 bp, Homo sapiens
gctatcaaggactgcctgagactgggtaatttataaaggaaagaggtttaattgactcacagttctgcacagctgcagaggcctcaggaaacttacaatcatggtggagggagaagcaaacacatccttcttcacatgagggcgggaaggagaagtgcaaagtgaagcggggaagccccttataaaaccatcagctctcatgagaagtcactatcacgagaacagcatgagagtaaccacccccataatttaattacctcccacccggtccctccccacatgtcatatgtggggattatgagcagtacaattcaagatgaggtttgggaggggatagagccaagccatatcaatgttggagagggacagaagaaatgacattggagctgaacactggaggaggtatagygtttcagtgccagtcaagggggagatgtggtgagcagatatttcagggagagagaatgggacaagcaaagaggagggaggtaggaaacttctggctttggggaacagtcagtgattcggtgtagaggaggagggcagggagtgggagatgcgcctgttaccagagggagggg

SEQ ID NO: 496639 - DNA, 606 bp, Homo sapiens
gaaagagccatgaaagttggcatatatgtaggaaaatcggtgtgtccttaaaacagattaatggatctaatattgtggctgaaaagacatgaaaggggctgggcgcggtggctcatgcctgtaatcccagcactttgggaggccaaggcaggcagatcacctgaggtcaggagttcgagaccagcccggccaacatggtgaaaccctgtctatactaaaaatacaaagttagctgcctgtaatcccagctacttgggaggctgaggcaggagaatcacttgaacccaggaggyggaggttgcagtgggccaagaacacgccactgtactccagcctgggcaaaaagagcaaaactccatctcaaaaataaataaataaataaataaaaagatatgaaaggtctttagttacctttcacaggaatccggtctagggaatgcagctttgctatgtagtggtgttctttgtgtgtaggaggaaggctcagagagagctggcgaggatcaaaaatgacatggacatatggataaaaacatttatcctgggaaaagtatgctaagctagggagagtagagccctatggccaaacaaagcttttcctaaccc

SEQ ID NO: 496640 - DNA, 650 bp, Homo sapiens
ttacaaaaccggacgggagttggtatgagaccatttgtagtttttttaaaatcctacttagtatgaccatttataatattcataagttttgctacaggaacgttgagtttgatgtgccacaaagcccatcaagggttttatatgatatggtagaagcatcatactgccttcctccaatttgaacagttctgaattccaagacacacctggccacaatggcctcccacacaggactgtgtacttatcctacagtttactatagtcaagaacaagcgaaagactaagagtcaagaggtcagacagttgagaagggcaggactttgaggtttaaggcagaaaaacattaagagttgagaattcagattgtaagatttgacaccaacaagcagaatatacctaagggagactgatgctagggcgaagacattggccttctgcctcattaaacattcttccttggktaaaagtaatgtcgggatgtagacctctacagtcagaaatggtggctaagtgaagaagtcagagagctgctatattgggcaaatcagtagtcatattttaagagagctgccttccttcttcccttgggaatagagatggcctggaagatcccctggaggatacggggctggtccagcagcagttggacc

SEQ ID NO: 496641 - DNA, 650 bp, Homo sapiens
ttacaaaaccggacgggagttggtatgagaccatttgtagtttttttaaaatcctacttagtatgaccatttataatattcataagttttgctacaggaacgttgagtttgatgtgccacaaagcccatcaagggttttatatgatatggtagaagcatcatactgccttcctccaatttgaacagttctgaattccaagacacacctggccacaatggcctcccacacaggactgtgtacttatcctacagtttactatagtcaagaacaagcgaaagactaagagtcaagaggtcagacagttgagaagggcaggactttgaggtttaaggcagaaaaacattaagagttgagaattcagattgtaagatttgacaccaacaagcagaatatacctaagggagactgatgctagggcgaagacattggccttctgcctcattaaacattcttccttggtwaaaagtaatgtcgggatgtagacctctacagtcagaaatggtggctaagtgaagaagtcagagagctgctatattgggcaaatcagtagtcatattttaagagagctgccttccttcttcccttgggaatagagatggcctggaagatcccctggaggatacggggctggtccagcagcagttggacc

SEQ ID NO: 496642 - DNA, 627 bp, Homo sapiens
ctaaaaggaagaagccacaagaatagatccctaatgatggcacttcagaggagatttaacatgcacatctaggcggttggaaggaaggagacttcccccaggtcctcagaccacacctggcttcagcaaccctgcttgcctctgagcgcctgggtctatgcaggtgtgagcatggagtagccacagggggctaattgctaatagccccttgccgttggggaaacacgaacccatttaggggaggatgtgaccaggtggagggaggtggcggcagcggccaccagtgcctcaagtctcacgccagtttgggattaccaagaactctcactaagaatggctcacaaatttacctcccctttctccaccctgtcctccaaacagccagacgaggcagaggggagccaagcaggtcrtcagagggggacattcactcactctttaggccacacaaactggttccacttacatcattctattcaatcctgtccctctgacgctgagacagtgactttccagggaccaagccgaaagccttgcctcagtcctcagtgtcttcagccccaagcgcttgctatggcaaagaaccgtttctccttaagccacaccccacccccctcggcctgccct

SEQ ID NO: 496643 - DNA, 627 bp, Homo sapiens
ctaaaaggaagaagccacaagaatagatccctaatgatggcacttcagaggagatttaacatgcacatctaggcggttggaaggaaggagacttcccccaggtcctcagaccacacctggcttcagcaaccctgcttgcctctgagcgcctgggtctatgcaggtgtgagcatggagtagccacagggggctaattgctaatagccccttgccgttggggaaacacgaacccatttaggggaggatgtgaccaggtggagggaggtggcggcagcggccaccagtgcctcaagtctcacgccagtttgggattaccaagaactctcactaagaatggctcacaaatttacctcccctttctccaccctgtcctccaaacagccagacgaggcagaggggagccaagcaggtcatcagagggggacattcactcactctttaggccacacaaactggttccacttacatcattctattcaatcctgtccctctgacgctgagacagtgactttccagggaccaagccgaaagccttgcctcagtcctcagtgtcttcagccccaagcgcttgctatggcaaagaaccgtttctcctyaagccacaccccacccccctcggcctgccct

SEQ ID NO: 496644 - DNA, 504 bp, Homo sapiens
ctgctttcctcacctgcccctgccctaccttacacccccagcttgacttctttccagtccacgtgtgtatataatgatatctatatttttgcccaggtctgggtattgctcctgcccagaccctgacatccctttccactgtgtgtgtgaccatgctgggggagggggactctgcttggaattaaaaggttgcattgggtccctacatctgtcttttccttatgagccaccagacctgggtgaacgagacaagccatatcaggcagagggaagccctgggagcaagggtkccaatgcaggggccgcctagggctggagggctggagacacagccccgcagtactctttcccccaagcctgggccacagaagcaggggctgtctagacaggggcctgtctgcctctccttcagggactctgtgatgggggcaggaacccttgtgtttggggccagagggaactcacacctcagggaggaggctggtagagaactggctgggagga

SEQ ID NO: 496645 - DNA, 504 bp, Homo sapiens
ctgctttcctcacctgcccctgccctaccttacacccccagcttgacttctttccagtccacgtgtgtatataatgatatctatatttttgcccaggtctgggtattgctcctgcccagaccctgacatccctttccactgtgtgtgtgaccatgctgggggagggggactctgcttggaattaaaaggttgcattgggtccctacatctgtcttttccttatgagccaccagacctgggtgaacgagacaagccatatcaggcagagggaagccctgggagcaagggttccaatgcaggggccgcctagggctggagggctggagacacagccccgcagtactctttcccccaagcctgggccacagaagcaggggctgtctagacaggggcctgtctgcctctccttcagggactctgtgatgggggcaggaacccttgtgtttggggccagagggaactcacacctcagggaggagsctggtagagaactggctgggagga

SEQ ID NO: 496646 - DNA, 366 bp, Homo sapiens
ctgggaaggggaggctgcagtgagctgtgatagagctactgcatttaggctgggcaacagagtgagactataagaaagaaagatgagagagggatagaggagaaagaataagagacaagagagaagaaagtggagagagagaggaaggaaagagggaaggaagggaggaaggcagggaaagaaagaaaaaggacaaaggaagtaggaaaaaattaaaagaaagatgagagcgggagagaggagaaaaggggaggagagaggaaggaaggaaggaaggaagaaaagagtgcccttggagccccaggagtactgagcaaggctcgcgtrcttctctgtgcctcctgtgggaaggctgaggactttgtg

SEQ ID NO: 496647 - DNA, 535 bp, Homo sapiens
tatgatgcatagtatttgaaataatcataggaaacctacaaaatataaaactgaggtttaggcaatgtatgtaacttgtttaggtacactaaaatagctcattatggagatagaactagaatccaaaattttggtttctaaaactgtttgctaaatcactttgctacaaaaaccaatgaatatgcatgtcagcgttgctgacccattttgtaaattcagaatttacagtcaggaacaatgtactgtgtttttcttgactttttaccaaatttccaatasattgaactaaaactgctagtacaagtttccagtaaggaatagatgcaaaccaaaactcaaatatctttgtgttttggtgattgatatggttaggctttgtgtccctatccagatctcatcttgaattataattctcataatctccatgtctcaagggagagaccaagtggagggaattgaatcatgttttcccccatgctgttcatgtgatagtgaatgagttttcatgagatctgatgattttataagcatctgg

SEQ ID NO: 496648 - DNA, 619 bp, Homo sapiens
tttggtgtgattaacagtgggggtagggctcacactcaaaacaacatactgctttgccatttctcctatgaattcttgaagcaatgaaagtcagaaaaacattgtcaggatagggtcataataaaaggccctattgaatgctgttctcctgagcctataaattcagtgaagtttattgttctgatcttgagtccacagattatgctgtttgctttaaggcactaaagaagcagtcagtttgagcagcagtaaaatttctgcagaataaacaaactcataaactggcattctacaacttccttccactgcactatttcgccatggttgtttcacttcaggatcacagtggtaaaatgatgcaaagtacagactgacttctaggatttaaaaagacaagattagcatttcgacaatacctaacaaatatctcctaacttaaaaattttcaaaatatttcaatgatgtatcactctctatgrtaataagcacaatggtccagtggtatttttagtgacttgggcagctttgtagtctgtgagcaagtgcatttcaggcgattactgcaacaggactgtgctgttcttggctactgttgtgattaattgacattacccaggaa

SEQ ID NO: 496649 - DNA, 590 bp, Homo sapiens
tgacggagtcagcaatattgggaacaagagcttgccaaagagagtttaaatttctctacttatatgagacagttttcattgtcttatccacattcatttcttaatattatccccaactttagcctaatctctgacaggattatcaaataaatttaatgaagtacatagtggcaagctgaggggaagagagggataaagaatacatgtccaaggacaatgaactgccctcagagtgacaccaaaagtcaactcagaaagcctacatagaggaggttcacattttgaaaaactcacttcactgacttgataattttgctatgatttatctctgaatttcctatgtttctctgacacattgacatgacctaaatttactctctctctctctctctctctatatatatatatgtatataygtatatcaagaatgatcatttctccctatttatacaatcaaaaaaaaagctaagaaaatttcagagatcacaaagcatattggcagagtgtctgggatgccagtggcctgggactctaagaacaaaatcaccccatccttactatactgtgatgcaaacagaatgccaaataaa

SEQ ID NO: 496650 - DNA, 596 bp, Homo sapiens
agatctttataagagatttccaccttgaaaaattccccatagtaggtgtgacccaagaacagcgtgggaagcagtgtgacagacgctgggctgtgaagtctctatccttgttaccatggcatctgcagaaatgttgtactatatacaatagcctcctgagaggttcaggggaaataagaaaaatgtggttatgttctggttttggtttgcatcatccccagatgcagaaaaatgtgggtagatgaacaattcaggcagaaccaaaaatcaactagaggaaacaacaacaacaacaatgaactcacaatgatgagtatgccaaaggaacacaagaaccaattgaaaatgtttccagtgcccaaagttagagtaatctgagtaaatacataattaaagcaatattgaattataaatcaaagtataaaataaataatagtgagttcatactgatstaaataacgattaaataaatgagtggagaagagacaaatgtctcatacagaagaattttaaaaatttatatagatatttcaccctcaaggaagtggagcatattccttactacttaagtatgagggacacacatgtccttccaa

SEQ ID NO: 496651 - DNA, 644 bp, Homo sapiens
tttgggaaagctttgtttcactacattaggcatcaatcatgagaatctataagaaaatattagtgaaaggatttactatttatgatattttgttgccatctcctatcccaaatcaattaatctgtattgaaaaactccaaattagcataacataatatcagtctataaatgtactttataagaaatcacttataatctctagagctaatgttaaaattcaaagatttagtactccattagagaattattgttgtggcagacactaaaataatctttcataattaaaatgaatattgaaaagtatataaatttcaaaggcatttactgatgttatattgtgatacaataagaagcacctatctggtcttccttcccagttcctgacacagggctcctaaatctcttgtaatttcctgggtgataggaatctcttttgttctaatgacttgactcttggtgggctcctgcatagcttcaggataggtgccagtggccagaaagaccaagytataattagaagcttggaactttcatccaacaccctcatcctctggggaggggagaggaacagcagattgagttaataatcaatcatgcctatttgatgaggcctccataaaaatccctagaagatggagttcaga

SEQ ID NO: 496652 - DNA, 621 bp, Homo sapiens
gtggaaactagttcaagtttctgttgtgaaatctgtaaatctgtaagttatctgtacctgtaattctttgtcttatcatggaagaggggtctccctagtttaagccatttcctcttcctgtgcttaagatccagttgtgcatttctagtgcgtgcttagtgctytgacagtgtgcttacacagtgaatgggcaagtttggtttctggctaaatagtgagtcagcatcaacctacagtttccgtctgcccatagccttcatagatgtccaacttagtgatgcgtttccagtcctcaatcaccccagggctgatgggtcctcctgcagccacacactgcttcagactcttgaatctgtagctggagaggcatcaaaagttgttcttagcctcagggaatatttctaccaataacagatctgttagaaagaatcttggaaaaatgatgcagatattccaatacaggaaatgctcattaagtggtggttgatgttcttaatactactctattagataatctattcagacaccccagttagatcaatctccatgaagactctcatttactcttctggacaagcggcattaatgttaaaagcaaatcaaccagtgctaactgatggc

SEQ ID NO: 496653 - DNA, 621 bp, Homo sapiens
gtggaaactagttcaagtttctgttgtgaaatctgtaaatctgtaagttatctgtacctgtaattctttgtcttatcatggaagaggggtctccctagtttaagccatttcctcttcctgtgcttaagatccagttgtgcatttctagtgcgtgcttagtgctctgacagtgtgcttacacagtgaatgggcaagtttggtttctggctaaatagtgagtcagcatcaacctacagtttccgtctgcccatagccttcatagatgtccaacttagtgatgcgtttccagtcctcaatcaccccagggctgatgggtcctcctgcagccacacactgcttcagactcttgaatctgtagctggagaggcatcaaaagttgttcttagcctcagggaatatttctaccaataacagrtctgttagaaagaatcttggaaaaatgatgcagatattccaatacaggaaatgctcattaagtggtggttgatgttcttaatactactctattagataatctattcagacaccccagttagatcaatctccatgaagactctcatttactcttctggacaagcggcattaatgttaaaagcaaatcaaccagtgctaactgatggc

SEQ ID NO: 496654 - DNA, 621 bp, Homo sapiens
gtggaaactagttcaagtttctgttgtgaaatctgtaaatctgtaagttatctgtacctgtaattctttgtcttatcatggaagaggggtctccctagtttaagccatttcctcttcctgtgcttaagatccagttgtgcatttctagtgcgtgcttagtgctctgacagtgtgcttacacagtgaatgggcaagtttggtttctggctaaatagtgagtcagcatcaacctacagtttccgtctgcccatagccttcatagatgtccaacttagtgatgcgtttccagtcctcaatcaccccagggctgatgggtcctcctgcagccacacactgcttcagactcttgaatctgtagctggagaggcatcaaaagttgttcttagcctcagggaatatttctaccaataacagatctgttagaaagaatcttggaaaaatgatgcagwtattccaatacaggaaatgctcattaagtggtggttgatgttcttaatactactctattagataatctattcagacaccccagttagatcaatctccatgaagactctcatttactcttctggacaagcggcattaatgttaaaagcaaatcaaccagtgctaactgatggc

SEQ ID NO: 496655 - DNA, 642 bp, Homo sapiens
tattcctgtcattattagtagtgggatcaatttcactattattgtctatacagttctgtgcctaaaacctacaaaacaagaaaatgttaactctagaaagtgctagtgatttgtaatttttatatcattaattataaccctgcttaatcgcacaaggctttttatatggcgggtgctcaataaacacttgctgaatcaatgaatgtgtgctccggagccacactgtttagattctcttctcctttaccacttattagctgtgtgatctgggaaagttaatccacctctttatgtctctgtttccttctctataaaatatacataataagaatcactagcttattaggttgttgcaaggaattaataatttggcacatagtaggggcttgttaaatattagctgtgatgatctccttccaagtcttcattttcagagccacacacaaggctacagtgccagcttgtgaccctagagtgtaagtgcatatgatcgccaactatgttctctttccaccccaggtccaacactgggtagttaaggactggaggtttctcctacatctgccttcttagtggccacctamagacttttgtattttcctcctcacatccccgcagatggggtccaggttgcctgacaca

SEQ ID NO: 496656 - DNA, 580 bp, Homo sapiens
cattcagttaaagttaaacagggtgtgatgatgaagccatttttcctctatacccaaagagacagcaaaaatatataaccaagacaaacaaattcagaatattgtttcaggcatttgaaactcttctaattttaataggccaaaaccaaaagcctagaaagagtaaatcaagaggcatgcattytaaatgtacagacaaattaaataattatccaagttgttttgtcctgcgcactgaagtggaagtttcaagattactggccccagccaaggagtagtgttgaattttttaaaattaaaaaaaaaaaaaaaaaaggctggtcagccaaaggctttctctgctatactgagacctacagatttccattagcaatatagctttttaatctgttgagccactcagcatcccttactgagggcctcccccctcagtacaaaagaagagtaaagaacagagtacctttaagattagcacactaatttctgttgaggaaggtctaatgaattagtcattgtgccttcaatatggttgtctgtgatccctgcaaccaccctaatctgtaacgagcaaagatcctgg

SEQ ID NO: 496657 - DNA, 673 bp, Homo sapiens
acagtttaaaattaaattacacttgctttacttaaaaaatatattcctaaaagtcaaacaagaattgcatttttctccgtggaattttggcaaaacagtataaaataaatcattgttcaaaaataatgaaatctcctaaaactagaatgatgtaataaattattttagtcttactattatttctactaagttgtttagaataattaggtgggcagcggtgcctcacgcctataatcccagcactttgggaggctgaggcgggtgaattgcttgaggccaggagttcgagaccagcctgggcaacatggtgaaaccgtctctactaaaaaaatatatatatatacaaaaattagccgggtgtggtggtgagtgcctgtaatcccagcttctcgggtggctgaggcacgaaaactrcttgaacccaggaggtggaggttgcggtgagctgaggctatactccagcctggatgacagagcaaaactctgtcttacatttttaaaaagaatgattagtattactggggcatagtcatttagcaaatgcataaaataagtgtgctacaacatgggaagaaaaatgataccagtgtgcaaaggcaaaacaaaataatacagaaaaaaaatttgaatttatgatttactctaaaggtaatatatttgactcagtttcagc

SEQ ID NO: 496658 - DNA, 591 bp, Homo sapiens
atacatccatcaattctatctttggcatggtgtattctgacagtggtggatagaatgtaaccacttgctttattaattatgagatgattgaaagaggaactactaaccaagaaattggtaaaggcctagcacaaatattttccccctaattttacaggggcgggaaagacctgaagaacttcaaaaccaagtgggaaataagaatgggtaacttgtgtatttttttttcctggctttttttttttccttcttccgaagtcaacaaaggcctcagggtgtccagattgctactgattcattcttaccaagttccttctggtaatagttttcaaaagaggatctcagtggaggtgcacagtggcgctcctagctttctttttacggaaaggaggaaaggtgcttggcaccagtcggggaagctcacgccaagtgaccgagaccagaactcgctcycgaccggagccccccaagtctggtgacttggaggaaggaggatcccgaatcccagccagaactgagaaagccctcaaaggtgcggaaaggggacttttccctcaggaaagccggcaacagcagaggccctagcccacg

SEQ ID NO: 496659 - DNA, 591 bp, Homo sapiens
tgtgacaacaggtgcaccttaccatgcccagatgattttttgtattctttgtagaaatagggtcttgctatgttgcccaggctgttctcctggcctcaagcgattcttctgcctgggcctcccaaagtgctgggattacaggcgtgagctgctgctcccagcccacttcctctctatcaggaacggtgtccatcaactctccatgcaagcatgtttgcaattccaaccagacctcctggtaaacatgctgacattctcaggaaggtcatggataacctgtatcatttactggcagaaagaaaatacagtctccttctcaataattttttttttagcagaatataccgagccactgcaaactgattatcatacactaaccctggagctacgggtttcggggacacgctggctggagaacgggaggtagtcatttaagctgcaagattaacatagcctaacacagggacatttcacactgaaatggctcactttgtgtaagtaaggtttcagcatatggtgctaaagaaaacagacaaaaatctcattggttactttaaaaacyaaaatgttcctaataaaggaagaaataaa

SEQ ID NO: 496660 - DNA, 561 bp, Homo sapiens
ccattctatgcaataacatggtctttggctaagtcagagttatttgggcagtagattccaaagccaatttgcaaacttttcttcagtattaacaaatggtcataaaatgtcaggtgsatcagattcacttataggcaggaaaaactattattagcagtacacttcaacggacatattgaagtctcttgatctccatatgctaaagaaacacatttgaatattgataactgaggtgtgttttttttgcctccaagtgcaatctctaggggcaatgctgaccgacttagcccatgcatagatatgcatatggtatcacagagagtgtgtggaatttgtccaacatggaggtattgggcttgcagagcatacaacactctgtgctgtttgtgacagcatcaaacacgggcccgagtcctctgccacaaatccatttgatcagatctctgcttcacacatcttagtgaatgacagcttttttaaaccagtttggtttgaagaaaacctcaaaccagggccatcatttggactgtctttggggctttcagcattctttttatctat

SEQ ID NO: 496661 - DNA, 561 bp, Homo sapiens
ccattctatgcaataacatggtctttggctaagtcagagttatttgggcagtagattccaaagccaatttgcaaacttttcttcagtattaacaaatggtcataaaatgtcaggtgcatcasattcacttataggcaggaaaaactattattagcagtacacttcaacggacatattgaagtctcttgatctccatatgctaaagaaacacatttgaatattgataactgaggtgtgttttttttgcctccaagtgcaatctctaggggcaatgctgaccgacttagcccatgcatagatatgcatatggtatcacagagagtgtgtggaatttgtccaacatggaggtattgggcttgcagagcatacaacactctgtgctgtttgtgacagcatcaaacacgggcccgagtcctctgccacaaatccatttgatcagatctctgcttcacacatcttagtgaatgacagcttttttaaaccagtttggtttgaagaaaacctcaaaccagggccatcatttggactgtctttggggctttcagcattctttttatctat

SEQ ID NO: 496662 - DNA, 561 bp, Homo sapiens
ccattctatgcaataacatggtctttggctaagtcagagttatttgggcagtagattccaaagccaatttgcaaacttttcttcagtattaacaaatggtcataaaatgtcaggtgcatcagattcacttataggcaggaaaaactattattagcagtacacttcaacggacatattgaagtctcttgatctccatatgctaaagaaacacatttgaatattgataactgaggtgtgttttttttgcctccaagtgcaatctctagggkcaatgctgaccgacttagcccatgcatagatatgcatatggtatcacagagagtgtgtggaatttgtccaacatggaggtattgggcttgcagagcatacaacactctgtgctgtttgtgacagcatcaaacacgggcccgagtcctctgccacaaatccatttgatcagatctctgcttcacacatcttagtgaatgacagcttttttaaaccagtttggtttgaagaaaacctcaaaccagggccatcatttggactgtctttggggctttcagcattctttttatctat

SEQ ID NO: 496663 - DNA, 455 bp, Homo sapiens
gattagatacaatctgcttttcaatcatcaaaattaaaatacaaggaaattctgcgtgtaaatgtcaaccctcaataacctataaataatctcactaattcctcttactttctgctacaatcatgmacttatttatttattatttgttgagatggagtttcactctcgtcacccaggctggagtgcaatggcatgagttcggcttactgcaacctctgccttccaggttccagcaattctcctgcctcagcctcccaagtagctgggattataggtgtgcaccaccatgtccggctcattttgtatttttaatagagatagggtttcatcatgttggtcaggctgttctcaaattcctgacttcaagtgatccacccaccttggcctcccaaagtgctgggattacaggtgtgagccactgcacctggctgaactctcttatttttttagttgtt

SEQ ID NO: 496664 - DNA, 455 bp, Homo sapiens
gattagatacaatctgcttttcaatcatcaaaattaaaatacaaggaaattctgcgtgtaaatgtcaaccctcaataacctataaataatctcactaattcctcttactttctgctacaatcatgaacttatttatttattatttgttgagatggagtttcactctcgtcacccaggctggagtgcaatggcatgagttcggcttactgcaacctctgccttccaggttccagcaattctcctgcctcagcctcccaagtagctgggattataggtgtgcaccaccakgtccggctcattttgtatttttaatagagatagggtttcatcatgttggtcaggctgttctcaaattcctgacttcaagtgatccacccaccttggcctcccaaagtgctgggattacaggtgtgagccactgcacctggctgaactctcttatttttttagttgtt

SEQ ID NO: 496665 - DNA, 550 bp, Homo sapiens
acaaattcctgcctccttgaagaaatgctgaattaaattgttgagataaatcctttatgttcttgtaaatttttttctattattaaggttattttcttaattttatatwtatttttgtatttttacattttattttgggcgttggatgatgggaaatagactgaaggataacaaacaatagctacactatctttttaaacatctatttttaatgttttgctctctatttcattaaaaattattgaatattaggcttaattttacagacttctctgcaagtttaaaaataaaatgaacctcagtacatgcatctatgtaatttatttggaagaagatatttctgaacattaatggaaatatgttcattttggttgtttaaaccatacaaagattatgaataaaataaagagtagattatagaataatagaactctacagacctcctatgaacttcaaaagaaaattaaaataaaaaaatgagtctggaataggagtaatggagatcagaggcagagagattgttatagaatgaatttgagatgaatcatgt

SEQ ID NO: 496666 - DNA, 604 bp, Homo sapiens
agtgctgatcctcaagggtgctagcaaattcttcatagtagtctaaagtctagtagtatggaaggatatgatagacacaaagayatatttcatgctgttcttttaaataaaataccatttgatctcggagcagaaatataagttttcttaagttttcatatttcccaattaacagggttacaaggggaagtagaagaaatattaaacaaaattttccaaagtggcattaattattaaagtaaatgacacaaatgactacataaataagtaaaatacataggaatatctcatccttcttccatttccaattctaccataaggattaaagtccaggcctgcattgccaagttacaaatatcacataaaattaaccacagtattattaaatttataacaatatgtatcagtagttttataacatatacatgtataggggatataatttattatacatcatgttatataatgcattattactgtgtgagccactaggcttagcatccaagaccacttgatatattgtatgtgctcaattctctatttgttaattataaagaattcaaatatcaactctttgatgtataagtgtaattaaacacacata

SEQ ID NO: 496667 - DNA, 604 bp, Homo sapiens
agtgctgatcctcaagggtgctagcaaattcttcatagtagtctaaagtctagtagtatggaaggatatgatagacacaaagacatatttcatgctgttcttttaaataaaataccatttgatctcggagcagaaatataagttttcttaagtttycatatttcccaattaacagggttacaaggggaagtagaagaaatattaaacaaaattttccaaagtggcattaattattaaagtaaatgacacaaatgactacataaataagtaaaatacataggaatatctcatccttcttccatttccaattctaccataaggattaaagtccaggcctgcattgccaagttacaaatatcacataaaattaaccacagtattattaaatttataacaatatgtatcagtagttttataacatatacatgtataggggatataatttattatacatcatgttatataatgcattattactgtgtgagccactaggcttagcatccaagaccacttgatatattgtatgtgctcaattctctatttgttaattataaagaattcaaatatcaactctttgatgtataagtgtaattaaacacacata

SEQ ID NO: 496668 - DNA, 616 bp, Homo sapiens
ttatcccccagtaactcaaactcaggagaaactggagggaaataacatttgcaaagtattttgtgattttaagagtttccacagacattatctcattggatccttacaacagcctctgaggtagggactattatccccattttacagaggaagaaactgaggctcaatgaagtaaagtgatttgttcaaggcagcatagctaggcagtggcagagcagagatctaaaaccaggcctgcccaatcccaaagcccttggttctgggggcagcggggatggccagttttcmtggaacctgttttctgtccccctgccactcccgcccctggcagggctcctggtgcagcagatcatcttcttcctgggaaccacggccctggccttcctggtgctcatgcctgtgctccatggcaggaacctcctgctcttccgttccctggagtcctcatggtgagtgaaacaagacatggagggctcagggactccttagaggtccgctaacagcgaccacctccccaccccactggcaggcccttctggctgactttggccctggcttgtgatcctgcagaacatggcagcccattgggtcttcctggagactcatgatggacacc

SEQ ID NO: 496669 - DNA, 616 bp, Homo sapiens
ttatcccccagtaactcaaactcaggagaaactggagggaaataacatttgcaaagtattttgtgattttaagagtttccacagacattatctcattggatccttacaacagcctctgaggtagggactattatccccattttacagaggaagaaactgaggctcaatgaagtaaagtgatttgttcaaggcagcatagctaggcagtggcagagcagagatctaaaaccaggcctgcccaatcccaaagcccttggttctgggggcagcggggatggccagttttcctggaacctgttttctgtccccctgccactcccgcccctggcagggctcctggtgcagcagatcatcttcttcctgggaaccacggccctggccttcctggtgctcatgcctgtgctccatggcaggaacctcctgctcttccgttccctggagtcctcrtggtgagtgaaacaagacatggagggctcagggactccttagaggtccgctaacagcgaccacctccccaccccactggcaggcccttctggctgactttggccctggcttgtgatcctgcagaacatggcagcccattgggtcttcctggagactcatgatggacacc

SEQ ID NO: 496670 - DNA, 615 bp, Homo sapiens
tttctcaaaaactctgacacattttgaatcattgatgtgaactgtgagactaaagacataagccaaaacctcagagaagtaagtgaaaattctcttcaacaaaccatgctgggaaaattggttatctacatataaacaaattagccttaaccctgaacacatgcgattgcgggacttttccttagttcagctacagacggggtcctggtcacagggtcatgaaaatgtaggcttgcagaccatttgaagggtgaggaatgcagggttttattgggagaaaaggaagaaaggagaaacgaccctctgcaagccagagtctctgctagtgcacttcctgcctcgcagtctgagtcgtaagttccacacaggaagagaaaaggcaggctcctcccactgcaaagagtgcaaacttgctgaggcttcaccccwgtgtgcaggctggtggagttttccctggatcctcccccacctggtagtgtcattcccgcctctaaagaagtctaaccaagtgtcattagaataaggatgaagacaagcctgatatgtatttatatttatctttatttatttattttttttgagacggggttttgctctgtcacccgggctggagtg

SEQ ID NO: 496671 - DNA, 405 bp, Homo sapiens
tatactctgctgtggtaataaagaacccgaagctgcaggacttctttctcatctagttcccaggtccaccgtgggtgtgtggaggaccytgggctgttatgggcacctaagtacccaagctggcccctccatccaggccattgccagtcactgcagcagaggagaggagctaaagaaccgtgtgttagtttttgtacgtttcttctagaaatgacacacacaacttttgttcatatttcattgactaagacaagacacttgaccacaactaacatcgaaagtgtggaatgcattagcctcccttgtgcccagaaaaaaagagggactggatgttggtgaacagtgtgactgctgcttttcttgtgtacacatctctctatccccttagaccatgagcaccccagg

SEQ ID NO: 496672 - DNA, 574 bp, Homo sapiens
ataaggattctcaagttatccatattgtaaacaaataaaccctcaccttcctggtatcctcttatctcctaccttctgtgcacttttatctcttcactgccaagctcttttgagaagggtggtctatactcactatctccattttgtcaatatccagcaatcccacaacccagtggttcccaagcttgtctgcaaatcaaaactatctgagtatctttaaaacttccaaaaccctggtgatgtggtttggctctgtgtctccacccaaatctcatgtcaaattgtacartaattcccagtgttgggggagggacctggtgggaggtgattggatcatgagggcgatttcccccttagtgttcttgtgatatttctagtgaattttcacaagatctagttgtttaaaacagtgtagcacttcccacttctctctctcctaccaccatgtgaagacgtacttgcttccccttcgcccttctgccatgattgtaagtttcctgaggccatcccagccatgacttctatacagcctgcagaactgtgagtcaattaagcctcttttctttataaattt

SEQ ID NO: 496673 - DNA, 600 bp, Homo sapiens
tggggagaaagtagcacctggctggcttcttgaggaagcgttgccagcaaggagctctcacatcttagcagcgaccaaggtagtaggccatgaactgtaatagaggcagagggtttgttaagattttagaagcwgacagtcctggtttgaagtcctgactcgactatgttccgaatgtgtgatcttggacaaatggcttaacctctgagccttagtttcctcatctgtaaaataagtcttaaaaaaaatctctccaaccctccaagagctggtgtgaagattagatggggtcatggatgtcagcatgatatgtaaactctgaagtgccctgtgcttatggaggtggccactaatggcatagtatggcagaatctctgaattagagagtgacgggaactgcctggggctccgagtcaggtcttgaacttaccatcaagctggagaaaacttccttcttcaatttaggggttgaactgataggcctggcagtggtcccacctttgagcggctgtcctggaaacaaatacatgcgaggatgtcggctcttcttccattctgcaagtcagtgtcaggtcagtgttgggaagtggtgacctgcag

SEQ ID NO: 496674 - DNA, 600 bp, Homo sapiens
tggggagaaagtagcacctggctggcttcttgaggaagcgttgccagcaaggagctctcacatcttagcagcgaccaaggtagtaggccatgaactgtaatagaggcagagggtttgttaagattttagaagcagacagtcctggtttgaagtcctgactcgactatgttccgaatgtgtgatcttggacaaatggcttaacctctgagccttagtttcctcatctgtaaaataagtcttaaaaaaaatctctccaaccctccaagagctggtgtgaagattagatggggtcatggatgtcagcatgatatgtaaactctgaagtgccctgtgcttatggaggtggccactaatggcatagtatggcagaatctctgaattagagagtgacgggaactgcctggggctccgagtcaggtcttgaacttaccatcaagctggagaaaacttccttcttcaatttaggggttgamctgataggcctggcagtggtcccacctttgagcggctgtcctggaaacaaatacatgcgaggatgtcggctcttcttccattctgcaagtcagtgtcaggtcagtgttgggaagtggtgacctgcag

SEQ ID NO: 496675 - DNA, 557 bp, Homo sapiens
ggagagagtggagaagtggcagtagctccatcaaggaggtcttgcaattctagctaaggagctggacttcgagcagcaggtggcacggccaggggagcagggagcggaactgagggcatggtgggagtyagctatgaagcagtgagctctgctgcatccatggccttggtgggccatcttggaagggaccagcaggacagtggctgctccagacccatcccacccaaaaatgtcccctagagcaggagagagacctgtgggagaagcaagccgatataaatcagagctaacctgtgctgatccccggctccctaaatcaagaatctgacaggttttctgggcgagaatcaatcttactgtccccacagtaaataccataatcctttttccagtgtggtttagagaatgtaactgccatgctcatgatttattcgaaaaatattctgccaggttatgtgaacgaatgggggagtccacgtgcttttaaacaggagttcagggagctctcaatgggactggcacctccctcttggggcagctccagcaggctgccagct

SEQ ID NO: 496676 - DNA, 653 bp, Homo sapiens
ctgtaatcccaacgctttgggaggccgaggcggtcggatcacctgaggtcaggagttcaagaccagcctgaccaacatgcagaaaccccatctctactaaaactacaaaatttgtcgggcatggtggtgctactcaaaaaattagccaggttccccagctactctggaggctgaggcaggagaattgcttgaacctgggaggcggaggttgcagtgagccaagatcacaccattgcactccagcctgggcaacacaagcgaaactctgtctcaaaaaatgtttaaaaagataatttaaaacatttcccacagccctcacctccaatccccaaccccaacatttctgcaagcaggagtcattcaagtttgccacatcccagaatgtcagccccctcctttcagatcagggttacatcagaatctgagccctggaaatgtggagccacaaggaayctcagacactgcatagtcctatcttcccacggtaagatggaaacaccaggctcagaggcaggcaaggacaatgcagtttgaccccaggcatgctgacagtgcccaattcctacacaactgggggtccctgcagcccccaacagatcaccccttggtccctcttccctcagccccagcctggattacccctgctccaagca

SEQ ID NO: 496677 - DNA, 569 bp, Homo sapiens
ggtggtaagaactgaggtagggtctgagtcaatgaggaaatcatggctcttcctcctcagagcagtcttgtgcccygcctgggctgcagcagcaggtgacaagtgacaacagccactctatcagcagtggctgccagcagaggggaccaagtccaggtggggaacctccccctactaccaaccgctgattgctcagccatagcagtggatcctctccttttcctgtggggtgggccaggagaggctgggacctgttgggagggttggggagagcattcacaaggactgaattgttgatcctggactgagttgtgaaatcaatgaatggaaaggaagaaagtccagtatagaattaactgggtgtcggggaggtgggacagggagggaagaagccgggcaagagtcagatcccaagtgaactcccggcttcttgggctgatcctgtgaggatctctggcgcatacattacgcacagtttgcccttgctccacagttgggcattcttattcctgcaccagggattggctatgggctgccctgacaagtgccagaaatttttgggcactgtc

SEQ ID NO: 496678 - DNA, 569 bp, Homo sapiens
ggtggtaagaactgaggtagggtctgagtcaatgaggaaatcatggctcttcctcctcagagcagtcttgtgccccgcctgggctgcagcagcaggtgacaagtgacaacagccactctatcagcagtggctgccagcagaggggaccaagtccaggtggggaacctccccctactaccaaccgctgattgctcagccatagcagtggatcctctccttttcctgtggggtgggccaggagaggctgggacctgttgggagggttggggagagcattcacraggactgaattgttgatcctggactgagttgtgaaatcaatgaatggaaaggaagaaagtccagtatagaattaactgggtgtcggggaggtgggacagggagggaagaagccgggcaagagtcagatcccaagtgaactcccggcttcttgggctgatcctgtgaggatctctggcgcatacattacgcacagtttgcccttgctccacagttgggcattcttattcctgcaccagggattggctatgggctgccctgacaagtgccagaaatttttgggcactgtc

SEQ ID NO: 496679 - DNA, 569 bp, Homo sapiens
ggtggtaagaactgaggtagggtctgagtcaatgaggaaatcatggctcttcctcctcagagcagtcttgtgccccgcctgggctgcagcagcaggtgacaagtgacaacagccactctatcagcagtggctgccagcagaggggaccaagtccaggtggggaacctccccctactaccaaccgctgattgctcagccatagcagtggatcctctccttttcctgtggggtgggccaggagaggctgggacctgttgggagggttggggagagcattcacaaggactgaattgttgatcctggactgagttgtgaaatcaatgaatggaaaggaagaaagtccagtatagaattaactgggtgtcggggaggtgggacagggagggaagaagccgggcaagagtcagatcccaagtgaactcccggcttcttgggctgatcctgtgaggatctctggcgcatamattacgcacagtttgcccttgctccacagttgggcattcttattcctgcaccagggattggctatgggctgccctgacaagtgccagaaatttttgggcactgtc

SEQ ID NO: 496680 - DNA, 569 bp, Homo sapiens
ggtggtaagaactgaggtagggtctgagtcaatgaggaaatcatggctcttcctcctcagagcagtcttgtgccccgcctgggctgcagcagcaggtgacaagtgacaacagccactctatcagcagtggctgccagcagaggggaccaagtccaggtggggaacctccccctactaccaaccgctgattgctcagccatagcagtggatcctctccttttcctgtggggtgggccaggagaggctgggacctgttgggagggttggggagagcattcacaaggactgaattgttgatcctggactgagttgtgaaatcaatgaatggaaaggaagaaagtccagtatagaattaactgggtgtcggggaggtgggacagggagggaagaagccgggcaagagtcagatcccaagtgaactcccggcttcttgggctgatcctgtgaggatctctggcgcatacattaygcacagtttgcccttgctccacagttgggcattcttattcctgcaccagggattggctatgggctgccctgacaagtgccagaaatttttgggcactgtc

SEQ ID NO: 496681 - DNA, 597 bp, Homo sapiens
tgttatcctcgagaaggagataatattcatgagtgactgtcccatattgcaaacacatgatcagatcttcttgttgtttgctagatatrgaaaagcaaaagtcaacaattgtccctcttaacttcacagggaaaaaacaggcaactagttttattaggagaactaggaatacattttggcaactctgtagattaattaatggaaaactttatttttaggattagccaatgttgaagagtcagaagattttctttctattgattcattgccttcaagttcattcactcaacctgtgccaaaagaaacaataccatccatggaagactctgatgtgtccttaacatcttcaccatatctgacctcttctataccttttggcttggactccttgacctccaaagtcaaagaccaattaaaagtgagccctttcctgccagatgcatccatggaaaaagagttaatatttgacggtggtttaggttcagggtctgggcaaaaggtagatctgattacttggccatggagtgagacttcatcagagaagagcgctgaaccactgtccaagccgtggcttgaagatgatgattcacttttgcc

SEQ ID NO: 496682 - DNA, 684 bp, Homo sapiens
tcctctcccagtgcagtcgcagacagcattaacttgcccagcaacaaaatgggacgatgcacactgagtactgccaaccatggaagctcaccccagcctccgtgyccagagtctttattgaggctctaatgtatacaagataactgctcacataaccagtaacacatgaccaaaagcccccaccttaatcacactgttagactatccagtgtggaccaaggcccccaggtaaacaaagacatttttagcagcaggacatttcagggactcagagaattcctcccaggaatcagtgcaaagaccagatctctctttaggttagttttattacattattattatcattattattactattgagactgaatcttgctccgtcacgcaggctgaagtggcagtgacagctcataactcgctgtaacctcaaactcctgaactcaagcaatcctcagccttagcctccagaaagtcaaattctttgctacatagtggagaagggagatccaacttaatgaagctagtggtaatgactggcaaaaagtaaaacaacttcatgtttgtgcttcgtccactgaccacaacacatagtctttacccttcttccttgtaactaacttccctcccttgagcctcggtcggcactggcctgagtgcctgtgcattagtatagcctgtgcattggta

SEQ ID NO: 496683 - DNA, 604 bp, Homo sapiens
gtctaaaactacttccagagatgtgttaaagctactcatatattcttgcaaattccaaatgtaccttaaaaaaaattcatgtgagatagcttaagcccttcaagccatgcttaagaaattgagttttatcagacagagcgcataacctggcacacattaggaaagcagctgaatcctcaatgaaaaagaaatcctcaagcagtratataccatttcagtatatctgtaaacaaaatgccttttcacttcataaaaattaaaagtaaaacaatacataaaatcttttaaaaagtcaagtcactaacaggcaacataaaatgtgaaagtaaacaacttgacttttcaaataaagaagaaagaccatcccttccaggataaatattccctaaaaaatggcatggcaatgaagctttcctatacattttgaaaggttaacacatacatgccaggaatagcccttcattaatttttctatccatagatgttcccgtagtaacaaatttaacttgtgcattcttttagttcaatgtagtatattgacaactttattatattggccagtttcatttctgctaccgccaattgaaaagtttgttagtcctaa

SEQ ID NO: 496684 - DNA, 630 bp, Homo sapiens
atatatttgcatagttgtatttgcaaaatactggtaagcttataagaaacttacttgccaaatttattgtrtgagtaggagaaaaaagccgaaaattttattagctgagtcaaagtttaatcttaagaaaagcttcatattgacaattcagaacaagggacaactcttaggtaacaaatattagttggcaattattctttttgacagccttgaccaaaaagctaaaaaaaacttctgagaatcatagtaatctagaaagattcctgtatttagattgagaaaccctggactcaaatcttggttttatcacttaatatttgattttggtaaataacctaagctctttgagccggtttactcaccaaagaaattacatgtgataatctctacctgtatcacagggtcgttgttaagaattaagagacatgaaagttctctgtaaactactgtatttgtattaccagtaaactttgtaaataggaattgttttgtattacaagtgttcacagagtccaaagatgtttcaagctttgaaattctattttgctcaagctccaaaataaattttccattaacttatatttcaaacagagaattcacataaaaacttcttaaacatttattatatta

SEQ ID NO: 496685 - DNA, 561 bp, Homo sapiens
tccaaactaatgtgccatttttaccaccaggcaatatagctgcatttattcttaaccccaattttgccaggtggggtgaaggcacaatccacccccatcaggccccttaggaattctgacacactttaaaaacacagtgaagatttcttgcttaggaatcatccctgcttccagcacttgtagttgcagcccttggtcctaggaccactgcatcaggtaggagagagaaaaaaaatttcttacgaggtgatatggggaaaaaaagaaaaaaatatagtccgtatacmagtgtactcctcccttggcaagacttgcatagtcatatcataccagtatctctcaccccctcttccccaggtcaaccagaaaaactgaaaacatctagcagggacactctagtcccactcatgctgagtgtgagcacacacttgtgaaggcaggtaggccagcccttcctgcttttagctctttcttttttagacaaccaatgtcttaattgcctgttctacttctccatcaaatgattactctaaggatatatctctctgcccattgttggac

SEQ ID NO: 496686 - DNA, 527 bp, Homo sapiens
ggtttatgaggtgtagatgggcatattacctggtttgtccctaagaaacacttagccactccttcaatgactggttcagaaatgtgtcttggatgaagttccctagaagcagagcctgaggcaaggaytcagatgtaagaaaggcagggaatgctcttagagaaacctgtaagggagcaagatagagaaggagaaggagccaagtaacgacctgatgtcaggtaaaatctagtcttggtctggttttgtgtgtggagagggaagcttgcctctggaacacaaattacactacagagttgtttctgccttgaagcaaggaggttagcctgttaagaaactccatatctattagttattagtctatatattgagacagtgtaacttccccggcatccctaggctaggaggcttttgacaacctaaaacacctctcataaaccaaggtcacaggtttaaactgctggccacagcctcaaaatagctgcagggagtgggggaaagggtaaagaatggaaggggtgcaccag

SEQ ID NO: 496687 - DNA, 527 bp, Homo sapiens
ggtttatgaggtgtagatgggcatattacctggtttgtccctaagaaacacttagccactccttcaatgactggttcagaaatgtgtcttggatgaagttccctagaagcagagcctgaggcaaggactcagatgtaagaaaggcagggaatgctcttagagaaacctgtaagggagcaagatagagaaggagaaggagccaagtaacgacctgatgtcaggtaaaatctagtcttggtctggttttgtgtgtggagagggaagcttgcctctggaacacaaattacactacagagttgtttctgccttgaagcaaggaggttagcctgttaagaaactccatatctattagttattagtctatatattgagayagtgtaacttccccggcatccctaggctaggaggcttttgacaacctaaaacacctctcataaaccaaggtcacaggtttaaactgctggccacagcctcaaaatagctgcagggagtgggggaaagggtaaagaatggaaggggtgcaccag

SEQ ID NO: 496688 - DNA, 527 bp, Homo sapiens
ggtttatgaggtgtagatgggcatattacctggtttgtccctaagaaacacttagccactccttcaatgactggttcagaaatgtgtcttggatgaagttccctagaagcagagcctgaggcaaggactcagatgtaagaaaggcagggaatgctcttagagaaacctgtaagggagcaagatagagaaggagaaggagccaagtaacgacctgatgtcaggtaaaatctagtcttggtctggttttgtgtgtggagagggaagcttgcctctggaacacaaattacactacagagttgtttctgccttgaagcaaggaggttagcctgttaagaaactccatatctattagttattagtctatatattgagacagtgtaacttccccrgcatccctaggctaggaggcttttgacaacctaaaacacctctcataaaccaaggtcacaggtttaaactgctggccacagcctcaaaatagctgcagggagtgggggaaagggtaaagaatggaaggggtgcaccag

SEQ ID NO: 496689 - DNA, 450 bp, Homo sapiens
  misc_feature (1)...(450): n = A,T,C or G
agataaaagaaaagtacaacaagtcaacagggaaatccacaactcatagctactattgcattctagtgcatttcattccttttcagccttttttgtttgtttgttttttgagacagcaacttgctatgttgcctaggctggagtgcagtggtgccatcttggctcactgcaacctgtgccttccaggctcaagtagtcctcccacttaagcctcaggagtagctgaaactacaggcatgtaccatcatgcctggctcatttttgtgtttttagtagagacagggtattgccatgttgcccaggctggtctcgagctcctgggtgtaagcaatccactggctttagcctcccaaaatgtttggattacaggcgtgaggccaccctgcctggcccgtttcastctttttatgtgcatgtgagtatatatgaacnnnnnnnnnnnnnnnnnnn

SEQ ID NO: 496690 - DNA, 629 bp, Homo sapiens
cggctggtcaggggctggagaggtcacttcccaggcagcgcactctcatgctggcttcggctgtggtcagacacctgccttcctttccacacagcctgctcgagatttctcctggcagggggctggattccaggagtgcatgtcccaagacagccaggaggaagtcatgtcacctctcatgatctcgcctcaggagtgtctttttcaccatagtcacaagcccacccacaatgaggggaggggacacagagccccctccatgggaggagtgtcagcatcacattgtaagaagagaatacaaatgtggtcagttttggaaaatacaagccrccccacccactccagaatgagtttggattttattgtatacgtgacagtaggatggcaacaagactgggtttacatttgagaagtggctgggtggacggtggattagaagggagctgagtggaatccttccagttaggaggcactagccctagtccagctaaggggtgatgtggatttgcgccctgggcagcagtggagatggggtgggcaccaggacctgcacactttgtggctcactagtacaatgcccagactcagacatgtcagcaaggccatgcaggacgtgcttgggggtctag

SEQ ID NO: 496691 - DNA, 643 bp, Homo sapiens
gtaaaattgaggaagtcaatgtcttgctggggaaatggtcggcctgggagggcgggctctgcagaccaggggaggaggggcagccaggccttgaaaggggccaccagctacagggtctgtctctgggcctgggcacctcagccctgctgygttgctctgccgcctttcactgaacttctccccatgtctgctgctttatgccttccagccagtcatactgctcctctattgctaggggcagctctcagcatggccaagaataaagctggtgaataaagctggggtcatccctctttccttctctctgtgcacttcctataggtggtcagggcccttggaggcacgaccagacccctgaatccttctggtctagccatggtgggttgatgatgagttttgaccctgagacattttgtagagggcagattttaatcccaggaattacaagatgttccctggaaatggtggggccaggaaagcagggaggaaagagagtgctggtcagggaaagttggaggggaaggcaggtaggagtggatcagttatggtagcttgggatcatctcaatcagtgcttgtttgatgaatacatcagtggatgaaagaacaacgcgtgtgtaaaatgtacagaaaaagaaaatggc

SEQ ID NO: 496692 - DNA, 643 bp, Homo sapiens
gtaaaattgaggaagtcaatgtcttgctggggaaatggtcggcctgggagggcgggctctgcagaccaggggaggaggggcagccaggccttgaaaggggccaccagctacagggtctgtctctgggcctgggcacctcagccctgctgtgttgctctgccgcctttcactgaacttctccccatgtctgctgctttatgccttccagccagtcatactgctcctctattgctaggggcagctctcagcatggccaagaataaagctggtgaataaagctggggtcatccctctttccttctctctgtgcacttcctataggtggtcagggcccttggaggcacgaccagacccctgartccttctggtctagccatggtgggttgatgatgagttttgaccctgagacattttgtagagggcagattttaatcccaggaattacaagatgttccctggaaatggtggggccaggaaagcagggaggaaagagagtgctggtcagggaaagttggaggggaaggcaggtaggagtggatcagttatggtagcttgggatcatctcaatcagtgcttgtttgatgaatacatcagtggatgaaagaacaacgcgtgtgtaaaatgtacagaaaaagaaaatggc

SEQ ID NO: 496693 - DNA, 643 bp, Homo sapiens
gtaaaattgaggaagtcaatgtcttgctggggaaatggtcggcctgggagggcgggctctgcagaccaggggaggaggggcagccaggccttgaaaggggccaccagctacagggtctgtctctgggcctgggcacctcagccctgctgtgttgctctgccgcctttcactgaacttctccccatgtctgctgctttatgccttccagccagtcatactgctcctctattgctaggggcagctctcagcatggccaagaataaagctggtgaataaagctggggtcatccctctttccttctctctgtgcacttcctataggtggtcagggcccttggaggcacgaccagacccctgaatccttctggtctagccatggtgggttgatgatgagttttgaccctgagacattttgtagagggcagattttaatcccaggaattacaagatgttccctggaaatggtggggccaggaaagcagggaggaaagagagtgctggtcagggaaagttggaggggaaggcaggtaggagtggatcagttatggtagcttgggatcatctcaatcagtgcttgttkgatgaatacatcagtggatgaaagaacaacgcgtgtgtaaaatgtacagaaaaagaaaatggc

SEQ ID NO: 496694 - DNA, 639 bp, Homo sapiens
ttctgatgaggccagaggctctgtcccagacctcagaatagggctgcaggttatgaaaccacttatctgcctctagagtagattcctcagcagtggaatgtcccacaactcatattgcagttgtctggccccttttgttttggggtgtgggacaagagccatgaggagctggcacctttgcctaatctttcccttgttgtctgtgtaaataataaattgactgaaagtaaaagtggctcattgctgacattgtgccactgcactccagcctggcmacagagcaagactccttgaaaaaaaaaaaaagcggctaattgcattattagcagtcaaatcagtcaggacttggctttggcgcagccttgtctcacatgagcttaacaagtgacaaatgacagactgagacaagatatttgcaatttctaacatagaataatatctagttttttttccaagatggctgcctggaagcattttaatcacacctcatccacttagaagaaccaaatagtgtgtagacaatcacactttgaatacattatccaagagggaacttgagagttcaacagaaaagcaaaagaaaagtccaaaatcaaggaaatagaaagaaaacaggaagcttgtgtagttgggaccagc

SEQ ID NO: 496695 - DNA, 639 bp, Homo sapiens
ttctgatgaggccagaggctctgtcccagacctcagaatagggctgcaggttatgaaaccacttatctgcctctagagtagattcctcagcagtggaatgtcccacaactcatattgcagttgtctggccccttttgttttggggtgtgggacaagagccatgaggagctggcacctttgcctaatctttcccttgttgtctgtgtaaataataaattgactgaaagtaaaagtggctcattgctgacattgtgccactgcactccagcctggccacagagcaagactccttgaaaaaaaaaaaaagcggctaattgcattattagcagtcaaatcagtcaggacttggctttggcgcagccttgtctcacatgagcttaacaagtgacaaatgacagactgagacaagatatttgcaatttctaacatagaataatatctagttttttttccaagatggctgcctggaagcattttaatcacacctcatccacttagaagaaccaaatagtgtgtagacaatcacactttgaatacattatccaagagggaacttgagagttcaayagaaaagcaaaagaaaagtccaaaatcaaggaaatagaaagaaaacaggaagcttgtgtagttgggaccagc

SEQ ID NO: 496696 - DNA, 596 bp, Homo sapiens
ctggcaaaaaggccccgatttagaaagctggraagagatggtggcggtggtgctcatgtctactttttttctacttttaaagaaaacttctttaaaaagaaaactacaatgggggaaaaactccccatatcacgcccgggtagggaatctttgaggaaagtggaattctcccgagcttacatcttgccccttcacgaaagtgcgagaagggaatctctaatgcggtgtatacgtgtgtgcagcgggaggagtggaggccagcgagcggccccgtagtgagctggtattgattgcagctcgggtggacagactgcgggaaagtcagggcctggagctccagaggtgttggagccccggcagcagaagagctgcgcagtgccgccgcgcagagggacccggagagcgggctgggaagtataggagagtgcgcacgggtgtgagcatcgctccagggagagcgctcggctcccaatcccgagaagtaattgggagctggaaagctcaggcagggacgcagggagactgcacttaagccgtcagacacgcttatcccgcgaaaaagagctgggaataaagaggacaggaagcccgcgtgg

SEQ ID NO: 496697 - DNA, 596 bp, Homo sapiens
ctggcaaaaaggccccgatttagaaagctggaaagagatggtggcggtggtgytcatgtctactttttttctacttttaaagaaaacttctttaaaaagaaaactacaatgggggaaaaactccccatatcacgcccgggtagggaatctttgaggaaagtggaattctcccgagcttacatcttgccccttcacgaaagtgcgagaagggaatctctaatgcggtgtatacgtgtgtgcagcgggaggagtggaggccagcgagcggccccgtagtgagctggtattgattgcagctcgggtggacagactgcgggaaagtcagggcctggagctccagaggtgttggagccccggcagcagaagagctgcgcagtgccgccgcgcagagggacccggagagcgggctgggaagtataggagagtgcgcacgggtgtgagcatcgctccagggagagcgctcggctcccaatcccgagaagtaattgggagctggaaagctcaggcagggacgcagggagactgcacttaagccgtcagacacgcttatcccgcgaaaaagagctgggaataaagaggacaggaagcccgcgtgg

SEQ ID NO: 496698 - DNA, 596 bp, Homo sapiens
ctggcaaaaaggccccgatttagaaagctggaaagagatggtggcggtggtgctcatgtctactttttttctacttttaaagaaaacttctttaaaaagaaaactacaatgggggaaaaactccccatatcacgcccgggtagggaatctttgaggaaagtggaattctcccgagcttacatcttgccccttcacgaaagtgcgagaagggaatctctaatgcggtgtatacgtgtgtgcagcgggaggagtggaggccagcgagcggccccgtagtgagctggtattgattgcagctcgggtggacagactgcgggaaagtcagggcctggagctccagaggtgttggagccccggcagcagaagagctgcgcagtgccgccgcgcagagggacccggagagcgggctgggaagtmtaggagagtgcgcacgggtgtgagcatcgctccagggagagcgctcggctcccaatcccgagaagtaattgggagctggaaagctcaggcagggacgcagggagactgcacttaagccgtcagacacgcttatcccgcgaaaaagagctgggaataaagaggacaggaagcccgcgtgg

SEQ ID NO: 496699 - DNA, 596 bp, Homo sapiens
ctggcaaaaaggccccgatttagaaagctggaaagagatggtggcggtggtgctcatgtctactttttttctacttttaaagaaaacttctttaaaaagaaaactacaatgggggaaaaactccccatatcacgcccgggtagggaatctttgaggaaagtggaattctcccgagcttacatcttgccccttcacgaaagtgcgagaagggaatctctaatgcggtgtatacgtgtgtgcagcgggaggagtggaggccagcgagcggccccgtagtgagctggtattgattgcagctcgggtggacagactgcgggaaagtcagggcctggagctccagaggtgttggagccccggcagcagaagagctgcgcagtgccgccgcgcagagggacccggagagcgggctgggaagtataggmgagtgcgcacgggtgtgagcatcgctccagggagagcgctcggctcccaatcccgagaagtaattgggagctggaaagctcaggcagggacgcagggagactgcacttaagccgtcagacacgcttatcccgcgaaaaagagctgggaataaagaggacaggaagcccgcgtgg

SEQ ID NO: 496700 - DNA, 667 bp, Homo sapiens
agcttgtgaaaccaaacaagttatgtgcttccaaatacaatgctgggacacacataggacagacatttcaattccaaaatgagaaataggagaggctaaatggtaccagttcccaaataagtgcagactacaaggcaagctttatcagttcttaaggctcaggagtaatcttctttggctcagtgttctgtcctccaggcccactggggtggcaawgtcagtataatggccccactgtggcccacagtccagtataatggccccaacgtgactttcaccccaggccccagccctgcagttctctggggctgccgtcataggcctattgttctggtcaatttcatcctttgaaacctaaatggaggtagtcctgtgccccaggcctggtctatgcactctgcacaccagtaccatgtggatgccatggaagtttgctccctgtatcctccagaagggcagccactatggcccagaccacactgggggctgctggaaccacacctggaatggccaaagagcacagtgccagagtgtgaagagtggagcttgtaatgtgaggcagttccaggcagcacatgctgaggtctcaaaggcacaggcaacccctcctttgaaaccactcttcatcctgggtccttgcactttgggcatgtaatgggagcagctt

SEQ ID NO: 496701 - DNA, 667 bp, Homo sapiens
agcttgtgaaaccaaacaagttatgtgcttccaaatacaatgctgggacacacataggacagacatttcaattccaaaatgagaaataggagaggctaaatggtaccagttcccaaataagtgcagactacaaggcaagctttatcagttcttaaggctcaggagtaatcttctttggctcagtgttctgtcctccaggcccactggggtggcaaagtcagtataatggccccactgtggcccacagtccagtataatggccccaacgtgactttcaccccrggccccagccctgcagttctctggggctgccgtcataggcctattgttctggtcaatttcatcctttgaaacctaaatggaggtagtcctgtgccccaggcctggtctatgcactctgcacaccagtaccatgtggatgccatggaagtttgctccctgtatcctccagaagggcagccactatggcccagaccacactgggggctgctggaaccacacctggaatggccaaagagcacagtgccagagtgtgaagagtggagcttgtaatgtgaggcagttccaggcagcacatgctgaggtctcaaaggcacaggcaacccctcctttgaaaccactcttcatcctgggtccttgcactttgggcatgtaatgggagcagctt

SEQ ID NO: 496702 - DNA, 667 bp, Homo sapiens
agcttgtgaaaccaaacaagttatgtgcttccaaatacaatgctgggacacacataggacagacatttcaattccaaaatgagaaataggagaggctaaatggtaccagttcccaaataagtgcagactacaaggcaagctttatcagttcttaaggctcaggagtaatcttctttggctcagtgttctgtcctccaggcccactggggtggcaaagtcagtataatggccccactgtggcccacagtccagtataatggccccaacgtgactttcaccccaggccccagccctgcagttctctggggctgccgtcataggcctattgttctggtcaatttcatcctttgaaacctaaatggaggtagtcctgtgccccaggcctggyctatgcactctgcacaccagtaccatgtggatgccatggaagtttgctccctgtatcctccagaagggcagccactatggcccagaccacactgggggctgctggaaccacacctggaatggccaaagagcacagtgccagagtgtgaagagtggagcttgtaatgtgaggcagttccaggcagcacatgctgaggtctcaaaggcacaggcaacccctcctttgaaaccactcttcatcctgggtccttgcactttgggcatgtaatgggagcagctt

SEQ ID NO: 496703 - DNA, 667 bp, Homo sapiens
agcttgtgaaaccaaacaagttatgtgcttccaaatacaatgctgggacacacataggacagacatttcaattccaaaatgagaaataggagaggctaaatggtaccagttcccaaataagtgcagactacaaggcaagctttatcagttcttaaggctcaggagtaatcttctttggctcagtgttctgtcctccaggcccactggggtggcaaagtcagtataatggccccactgtggcccacagtccagtataatggccccaacgtgactttcaccccaggccccagccctgcagttctctggggctgccgtcataggcctattgttctggtcaatttcatcctttgaaacctaaatggaggtagtcctgtgccccaggcctggtctatgcactctgcacaccagtaccatgtggatgccatggaagtttgctccctgtatcctccagaagggcagccactatggcccagaccacactgggggctgctggaaccacacctggaatggccaaagagcacagtgccagagtgtgaagagtggagcttgtaatgtgaggcagttccaggcagcayatgctgaggtctcaaaggcacaggcaacccctcctttgaaaccactcttcatcctgggtccttgcactttgggcatgtaatgggagcagctt

SEQ ID NO: 496704 - DNA, 638 bp, Homo sapiens
tgcacacactggcttgccttccactatgaatagaagcagcctgaggccctcatcagaagcagatgctggtgcaatgtttcttatacagcctgcagaactgtgagtcaaataaacctattttctttatagattacccagccccaggtattcctttatatcaacacagatggactaagacactctccaactggaccttgagcattttgatagcatagcccccttcttaatcatctctatatgcccagtgctgagtatgatgactgatgtggaataagttacagaattcaattttcactatgttacagttgaattattatctcagatagttgagtacatttgagatckcaattttgttatccatttcagttgaatatttttcacagtatgatatcaactgtaaatttggtaagtatgcctaagtgacacagacttcaatgggcacataaaagtatatgaatcccttggatttgcaatgaatgacaaaatgatttctagattgtttttgtggttactaataatatttcttgagggtggtatgctaggcacatttctaagcatttttctcattgaatccttcagcaattcggtgtttagatttactgatgtttttcagactgagtgaacgtcacaaggtcaca

SEQ ID NO: 496705 - DNA, 608 bp, Homo sapiens
attaaccttgatgtatctgatcccagagcctaggttactaaccattatgccaagtcttttcaatgccattttatatatctgcatttattagacccaactatccttgaatctggccaaaatagagttaatggagatgttttaaagttaatcctattttctcaggataaacaggattttaatccctccyccccccaaacaaaaaatattcttctgttaataattgctttttctccccttttctctctgtcagggaaggtcagtttattatgggtcattgtggatgcaacaaaattaatgacaattgatattggtcctctgcttctcatattagtggctctgtatcagcatccactccccatgcagtgggcatgcccccctccatcactgttttcccatcagctgaggttttgccttagccagtgaacttttaatcactctgaatagctaatcaccataattcctcactggcaaaagctgcaagttcatcatgtgaatggacccagtgtccttgttaatcacagtaatcgctcaccactcatgagctgtgaaaagtagtgacaagtatcctcatcacacttggttgctcacaatctgagggaggctgatag

SEQ ID NO: 496706 - DNA, 608 bp, Homo sapiens
attaaccttgatgtatctgatcccagagcctaggttactaaccattatgccaagtcttttcaatgccattttatatatctgcatttattagacccaactatccttgaatctggccaaaatagagttaatggagatgttttaaagttaatcctattttctcaggataaacaggattttaatccctcccccccccaaacaaaaaatattcttctgttaataattgctttttctccccttttctctctgtcagggaaggtcagtttattatgggtcattgtggatgcaacaaaattaatgacaattgatattggtcctctgcttctcatattagtggctctgtatcagcatccactccccatgcagtgggcatgcccccctccatcactgttttcccatcrgctgaggttttgccttagccagtgaacttttaatcactctgaatagctaatcaccataattcctcactggcaaaagctgcaagttcatcatgtgaatggacccagtgtccttgttaatcacagtaatcgctcaccactcatgagctgtgaaaagtagtgacaagtatcctcatcacacttggttgctcacaatctgagggaggctgatag

SEQ ID NO: 496707 - DNA, 598 bp, Homo sapiens
ccattagaatataagcttcgtgaggacaggtaacttgtccatcttgttcacagctataacctcatgcttagaaagtgctcagcacatggcagccacttgctggatgttgctggatgttaaaaagaactgtgagcccaccatgggtgcaaaaaagtttaagctaatttatacttatattttaaaaatcaatttttaaaccaatttatgtcagatctgtctatgcttctaatcttggttgctggtacataaatatattaaacatatctttggctttctttgagcatttattatagcatagttaatgtgcagacaattttagtgtattttattgtatatttttcttatatttcaacaaacatgttttgggtatrctagacctgaaaatctgtgatgaaaatatgaaattgttttttcaaaagtagattcttagatccctgcttctgaaaacaaactggaatggggttttagactcataggagacttcatatacataaaggaatacataaatatataagtatatgttttttgaacatatatatatatatgcacacacatacattatcttattttcaaccacatcaggtacatgtgtaacttt

SEQ ID NO: 496708 - DNA, 598 bp, Homo sapiens
ccattagaatataagcttcgtgaggacaggtaacttgtccatcttgttcacagctataacctcatgcttagaaagtgctcagcacatggcagccacttgctggatgttgctggatgttaaaaagaactgtgagcccaccatgggtgcaaaaaagtttaagctaatttatacttatattttaaaaatcaatttttaaaccaatttatgtcagatctgtctatgcttctaatcttggttgctggtacataaatatattaaacatatctttggctttctttgagcatttattatagcatagttaatgtgcagacaattttagtgtattttattgtatatttttcttatatttcaacaaacatgttttgggtatgctagacctgaaaatctgtgatgaaaatatgaaattgttttttcaaaagtagattcttagatccctgcttctgaaaacaaactggaatggggttttaractcataggagacttcatatacataaaggaatacataaatatataagtatatgttttttgaacatatatatatatatgcacacacatacattatcttattttcaaccacatcaggtacatgtgtaacttt

SEQ ID NO: 496709 - DNA, 630 bp, Homo sapiens
gacagattcaaccaataatacatggtgatagatgatttatgagagtcataaaaagcataccgtttccgccttgctctttgaacacttgttcttggagccctatgctgccatgtaagaagtttgactgctcttacactcaccatattgtgaggaagcccaagccacatggagaagcctcatgatgtcccagttagtttcagttgagactagctcctgagttatgccagcctaggtgtcagatatgtgaatgaaggcacttctggataattmtaggctccagtggttggagctatctccagatatcttagtcatacttagccatgcatgtcttccaaatagaggtcccagaaattgggaagcagagacaaactattgttctctgtccaaattcctaacctgtagaatccataagtgtaataaaattattgttttatgtcagtaagttttggggtggttcattatatagcagtagatagctgtaacagtcagtttcacgaagccattcccccaagaaagtgtgagtaggagaactagtgtaactgcaggcacagttggtaaaaggtgataaaaatcatggtatcagtagaatttagaattataaggaaccttaaattccatctagtagatcca

SEQ ID NO: 496710 - DNA, 426 bp, Homo sapiens
atgcatggtaagagtttccagtcctctgcttcrctttttgacatcagagggccgaaaactctccccttggattatgctaacactgtcattttttgaacatgggtccaatggagaggtatgaggctcaattgcacatgcatacctttctgctttcataaatattcatggatcttcctataggttattgaatatatgtatctggccatcctgctcagcatacattcctgttccatttgcccctcccttgaagggtctgtttccagcttctggctggaggctatgcttcccagcctctcagaaatggccacctgcaggctgcaaccctttatgagaaataaagctctcctttccaaatttatgaacttcatcattcttcagtttacaagtgtttagcttgataattattcggtaaatgactgcataaac

SEQ ID NO: 496711 - DNA, 664 bp, Homo sapiens
catcctcttcaagaagtcagttttctcttttatacctaattattcaaaaatgttgtaaagagactgtggagattagtaaagtcaaccattttttagctctatttgcttggaatgttatttcatactttcctaatcccaaagctatggtaaagtagcattaatcaatgatgcatagacagtaatttgcctastcataaaataagcattgtagtttgaaaaatatagaaatatgacaaaaagtaattgtagaatgtttggaaaatatcctgatatcaaagaaaaattggaaacaaataataagggatacatttcagagctttttttttttttttaagatgggaccttaccccatcacctaggctggaataagggcatgatcatggctcacgtactgcagcctcaacttcctgggctcaagccatccttccacctcaaccttctgagtatctaggactacaagaacacaccaccacacttagctaatttttgtattttttgtagagagagactctatatatgttgaccaagctggtcttaaaccctgacctcaagccatcttcctgcttcagcctcccaaaatgttgggattacaggcatcagccactgcacccagcctccttccagtatttttacacgtgtttatttgattgaagacaatatgttt

SEQ ID NO: 496712 - DNA, 517 bp, Homo sapiens
atatgaagttgaaccatactgtgtttttctttccatgactggcttaattctattaacataattatttcaaagttcatccatcgtctttgatactgcagaatttagtgtttattcctctaagctgtaaacaactcctcagaagatgtaaaatgcccctaaaataagagcaaaaagaaaacctgacatttgatgatattccattacagttaataatttcgcttgatgccactgtgttatttctgtaaaggacaggccatccaaaatttaagaggtattacataaaaaatacaaataatgatgtagaattgattgtttttatttgaaactgtataagattttgtaagaagagagaaaaagtctttattctgtattttttattccaaagrgaattgctaattctatagagtattgtttctttatggggtatatatttaaattaagaaactatttctattaataattttaagtgtttcatataagaaataaataacatttcatgctacatcactgcccagaa

SEQ ID NO: 496713 - DNA, 587 bp, Homo sapiens
tggcagtccactttcactgtcttacctcctgggtgtatggactataaagctctgtgttattgttacagactaaaytgtgccctcccccaatgtaataggttgatgtcctaacccccaaagtgactgtacttgaagataatgtctttaaggagataattgtgtttaaatgaacttttaagagttgagccataaaccaatataaatggtgaacttatgagaagaggaagagaagatggccaactagacacagctatgaggaatatctgccactaagggacaaggatatttaaaaaactggcacatgatgagaaaaccttcagagggaaggcattgccacccccaagacttgccatgctcccctagaagactttagctttaggatggctgttggacctgaatggagcaggatgaccttgactgtgagatggggccagtctgacctgagcaagcccctgtttgatggcctctcccactgagaatgcccacatggaagatggtgcctctatgcctgccagtgccccactatagccgacaagtgtgcaccttgcaatgttgctggcacaagcaaacaagcacagatcccactg

SEQ ID NO: 496714 - DNA, 607 bp, Homo sapiens
tgtcatggtactcatctccttgacactttggtgaaatctacagaccccttcacaataatatttttaaatgcataaaataaaatacaaggatgacaaaccaattatactgaaatgaagatataaaaatattgtataacataaattgtatcatgataatatatgcagtgaattattaatacattaagtaaaaatatccaggatttcaaagtaatgcttttrgtgatattggcaaaagctgtaatgttatgtaaaataatatctatgatttctattgatgaccaagttaaggttctgataataacactgtggactgttagcagcattcattaattggaagaagtgcttaatttctatgaaaggttaattaaaataaaaatgtgttttttaattcaatttcaaggactttctgaatgccctaactttaaggaattttgctctagaggctcttcctgaaatctttcaagcagatccccttagacagatagagctagagggagttgatgagatgtagagaagagattggggaggttaacgcatttctatttacggaggggtaaacagacctgtacccaacactgaaaatgtcaaatgactgattcgttgccag

SEQ ID NO: 496715 - DNA, 590 bp, Homo sapiens
ccttgacactttggtgaaatctacagaccccttcacaataatatttttaaatgcataaaataaaatacaaggatgacaaaccaattatactgaaatgaagatataaaaatattgtataacataaattgtatcatgataatatatgcagtgaattattaatacattaagtaaaaatatccaggatttcaaagtaatgcttttagtgatattggcaaaagctgtaatgttatgtaaaataatatctatgatttctattgrtgaccaagttaaggttctgataataacactgtggactgttagcagcattcattaattggaagaagtgcttaatttctatgaaaggttaattaaaataaaaatgtgttttttaattcaatttcaaggactttctgaatgccctaactttaaggaattttgctctagaggctcttcctgaaatctttcaagcagatccccttagacagatagagctagagggagttgatgagatgtagagaagagattggggaggttaacgcatttctatttacggaggggtaaacagacctgtacccaacactgaaaatgtcaaatgactgattcgttgccag

SEQ ID NO: 496716 - DNA, 607 bp, Homo sapiens
tgtcatggtactcatctccttgacactttggtgaaatctacagaccccttcacaataatatttttaaatgcataaaataaaatacaaggatgacaaaccaattatactgaaatgaagatataaaaatattgtataacataaattgtatcatgataatatatgcagtgaattattaatacattaagtaaaaatatccaggatttcaaagtaatgcttttagtgatattggcaaaagctgtaatgttatgtaaaataatatctatgatttctattgatgaccaagttaaggttctgataataacactgtggactgttagcagcattcattaattggaagaagtgcttaatttctatgaaaggttaattaaaataaaaatgtgttttttaattcaatttcaaggactttctgaatrccctaactttaaggaattttgctctagaggctcttcctgaaatctttcaagcagatccccttagacagatagagctagagggagttgatgagatgtagagaagagattggggaggttaacgcatttctatttacggaggggtaaacagacctgtacccaacactgaaaatgtcaaatgactgattcgttgccag

SEQ ID NO: 496717 - DNA, 630 bp, Homo sapiens
tgcctagttcgtatctgagacttggtaatttataaagaacagaaatttatttttcacggtcttggaaactgggaagtccaagagcaaggcacagcaggttaaggcatggtctctcggcttccaggatgatactttgaataccacatctttcggagaggagaaacactatgtcatctcatgtcacaagagcaaaacaaagaaaacccacccttgcaagccttttttatacaggcattaattcattcatgaggatggagcccttatgacctaaaaacctcactaagtctccacctcccaacactatggcattgaagttcaagtttctaacacataaattgaggggaagacccattaaaactatagcagcattggtgtagatattacagctttttcrgttatctactttgttatttccaaatttgttgtttaggtattgattttgtttaaagcaccttttgccttagaaaaattattaacttttgtaaatgaaagtgcttatttcattttcttttacagatattaggtttcctgtcttggtgatgaacttattttccaatcctacattgcttatttagtcttgtacatgttttaagatttttagttcatcatacattgcttttaattcatgtt

SEQ ID NO: 496718 - DNA, 515 bp, Homo sapiens
agaatccagactatgcttcaacatgtcctgtaatttatcctgatcaaaagcattaattcccccatacatatttcctgtgcaaaaaaaaaaaaaaaactagtcaaaggaaaaaacataaatagctgaattcatttagagttatgtttagattctaaataataaccaccccctgatttataaattctataaatagaacttacaaatattttctgtggaagtaaatcacagattttaagaacaaaaatacaatgggtttaattttacttgaacattgtttctgttggaattatttawtttaaagtgacaaaaaatccactaaaaccagtttaagtaaaaaagagaatttattgaatttaaaaatttaaacttgtttaatagaatggcaatgtccagtctcaaaatgtgttatcagaatacactgtctcttatcacctcttatctctaccgtgttggtttcattctcaggaacacccttcccatgcagtagcaaaatggcccccagtaaccccagacct

SEQ ID NO: 496719 - DNA, 542 bp, Homo sapiens
tcttgacctgctgaggatgagatctgctgattcacctcacacactggtgtcaccctccgccttatgctcaggtcaggggcagggcacatcctcagtattattgcttggattctgaaatactacagaggttaatagtgtaacttttaatttttttcattcwgtaatcttatgccctttgtctgctctcagcccactggctggatccttcttttttcaagtgattccatctcagggctctttgttctgtatgcaaatttgaaagaaccatcctcttgtcaccactacctataccccctacccaggtcctcacacattcttatgcaagtctgaaccttaattgtggatgcagttcaaatgtttatcttaggatggtcctcagcctccaggaaaatcacataggatgcacatagaagtttagggaaggggcaccacccaacacacattggatatgtgtaagacttgtgtctactgtcaactccctattatataggctatgtggatgtaaggtccaggaataataataataataatggtcaactttt

SEQ ID NO: 496720 - DNA, 631 bp, Homo sapiens
gtggtggatggtgtgaagctcatggtggaaatggagaagaagttggagaaaggccagtccatygacgacatgatccccgcccagaagtaggcgcctgcccacctgccaccgactgctggaacccagccagtgggagggcctggcccaccagagtcctgctccctcactcctcgccccgccccctgtcccagagtcccacctgggggctctctccacccttctcagagttccagtttcaaccagagttccaaccaatgggctccatcctctggattctggccaatgaaatatctccctggcagggtcctcttcttttcccagagctccaccccaaccaggagctctagttaatggagagctcccagcacactcggagcttgtgctttgtctccacgcaaagcgataaataaaagcattggtggccttagctttgtgcgatagttattgagggaggacgtgcaattggccactgtgtggtctcagagtggtttgtcctgtctaggcatgtactaaacatgtcttatcccgggtctaaaatgaggcaaagttaggtcacagaatctagtccaaaaattagaaggctctatggggaatctgagacccagagagacactgagcccagtgtcactca

SEQ ID NO: 496721 - DNA, 441 bp, Homo sapiens
ctgtgtgactttgggcaagtcacttaacctctctgagccttattgttggggacgttaaataagtcaacatatgtaaagcacttagcacaktacttgacatacaggtgtattcaataaaagttaactgtcagggcctggagtggtggtgcgcgcctgtagtcccagctactcgggaggctgaagcgggaggattgcttgaggcttggaattggaggctgcagtgcactctgattgtgcctgtgaataactactgtgctccagcctgagcaacatagcgagaccccatcaagaacccatgtctaaacaaacaaacaaacaaacaaaagcttctttgtggagtggctgtttaatgtccatgttaacctccttcgagcacattctcctgtcaatgaagaggctggaaagctaaagactagattttccagagggaaagtaggaaag

SEQ ID NO: 496722 - DNA, 600 bp, Homo sapiens
gggccccaggcctccccaaggcacagcctgagatctggggcctcacaccctgattcagtcacagcaagaggtgcccgtggaacctgggcagacacacgyctcccccaggacacccccatgcccagggatgtcggaaccaaggcatggggaccagcctctcttgaccttcacatctggaaactcccatggggatatcccatacctgtagacagacaggccgccccaactcaccagggcttatggcccttgagttcaggacagcagcgtcaaggcagaaacaccctcacacctgcacatcttcctagccgacatgcccggcaccctcacacctgcacatctgcttaccccacatgccccggcaccctcacacctgcatctcctcttaccccacacacctggcaccctcacacacgcacatcttcttacccctcatgccccagcaccctcacacccacaactcctcttaccccacacctgggcaccttcatacctgcatctcctcttaccccacacctgggcaccctcacacctgcacatattcttaccccacacctgggcacccttatacctgcacttcttcttatcccacatacctgggca

SEQ ID NO: 496723 - DNA, 600 bp, Homo sapiens
gggccccaggcctccccaaggcacagcctgagatctggggcctcacaccctgattcagtcacagcaagaggtgcccgtggaacctgggcagacacacgtctcccccaggacacccccatgcccagggatgtcggaaccaaggcatggggaccagcctctcttgaccttcacatctggaaactcccatggggatatcccatacctgtagayagacaggccgccccaactcaccagggcttatggcccttgagttcaggacagcagcgtcaaggcagaaacaccctcacacctgcacatcttcctagccgacatgcccggcaccctcacacctgcacatctgcttaccccacatgccccggcaccctcacacctgcatctcctcttaccccacacacctggcaccctcacacacgcacatcttcttacccctcatgccccagcaccctcacacccacaactcctcttaccccacacctgggcaccttcatacctgcatctcctcttaccccacacctgggcaccctcacacctgcacatattcttaccccacacctgggcacccttatacctgcacttcttcttatcccacatacctgggca

SEQ ID NO: 496724 - DNA, 600 bp, Homo sapiens
gggccccaggcctccccaaggcacagcctgagatctggggcctcacaccctgattcagtcacagcaagaggtgcccgtggaacctgggcagacacacgtctcccccaggacacccccatgcccagggatgtcggaaccaaggcatggggaccagcctctcttgaccttcacatctggaaactcccatggggatatcccatacctgtagacagacaggcygccccaactcaccagggcttatggcccttgagttcaggacagcagcgtcaaggcagaaacaccctcacacctgcacatcttcctagccgacatgcccggcaccctcacacctgcacatctgcttaccccacatgccccggcaccctcacacctgcatctcctcttaccccacacacctggcaccctcacacacgcacatcttcttacccctcatgccccagcaccctcacacccacaactcctcttaccccacacctgggcaccttcatacctgcatctcctcttaccccacacctgggcaccctcacacctgcacatattcttaccccacacctgggcacccttatacctgcacttcttcttatcccacatacctgggca

SEQ ID NO: 496725 - DNA, 600 bp, Homo sapiens
gggccccaggcctccccaaggcacagcctgagatctggggcctcacaccctgattcagtcacagcaagaggtgcccgtggaacctgggcagacacacgtctcccccaggacacccccatgcccagggatgtcggaaccaaggcatggggaccagcctctcttgaccttcacatctggaaactcccatggggatatcccatacctgtagacagacaggccgccccaactcaccagggcttatggcccttgagttcaggacagcagcgtcaaggcagaaacaccctcacacctgcacatcttcctagccgacatgcccggcaccctcacacctgcacatctgcttaccccacatgccccggcaccctcacacctgcatctcctcttaccccacacacctggcaccctcacamacgcacatcttcttacccctcatgccccagcaccctcacacccacaactcctcttaccccacacctgggcaccttcatacctgcatctcctcttaccccacacctgggcaccctcacacctgcacatattcttaccccacacctgggcacccttatacctgcacttcttcttatcccacatacctgggca

SEQ ID NO: 496726 - DNA, 581 bp, Homo sapiens
acggcaggacctttagaagccagctaaaaacaaaccagctatagggaatggaggagtggaaaagccacatggaagactggaaaagtagtggtgccactgagccactgttgaaagtggagaaggtgtgatgagttggtttgggaaacggtgaggaagaggataagttaggagcgtgtgtgtgtgtgtgtgtgtgtgtgtgtgtgtgtgtgmgcgcgcgcaagagagggaccgagagagagaaagagctagattacgcttcaagtggcaataggcaagaagaattgtccagtgagcaattagaagatttcagaaaagaacggaactggagataccagtttgggattctacattctttattgggaaggtgaaggttggagccaggagggagtgaatgttgaggctgaacactgtcaaagtcccctctctattctttccatgagtttatgctttgtctgtctcttttgtgtctaccagtggactcttggccaggctgcagaatttcctggtttgttgaatgactagcaagagtttatagtaatataactagaatatttttacagttgaggtatatactacactaa

SEQ ID NO: 496727 - DNA, 609 bp, Homo sapiens
ttccagccagctaagactttcctctggaataagtctcagagttaaaaatgtcagaggactgcagtgtcctgacactagctggaaccagtgatgtggccatgttcctggcacctgagaccactcagtaccctacaccccagggaacagacagcccagcacatcagggagattgcccccaggacatagggagccaaagttcacacccctcagagtctgagagctgcctgcctagggccaccatcactgatagcaactctgccccctttagcagaggggtcacacactgcctgggggcccaaggactgaacttcttggggctgctgctaccactgccaccatgggtgcctgtgtgcatgccatcttggggccaaygaccggcccaccaagggcaaccatttccaccaccagcacctgtgcatgctgtccagggaccagaggacaatccatttagggtcactgctgccactactgatacttgcatgcactgcctggggatctgaggactggcccacacagaatctatatctacagcaaagcttcaccacagccttcacaaacaactgcagcctaagccaatgaggaacttggagatactggtgacactgatta

SEQ ID NO: 496728 - DNA, 573 bp, Homo sapiens
gtcagagagagtagacctttgaaggtaccagactctcatcagttagtctgtcctagatctgacaagggaaggtccgcagaggaagcctgcctgcatcaatgcagatgtccctatagatgcaggtctcccctacaaaagacagctttgcaggcctacttctgttcccaggctctctgaacagccatctcaaaatatgtcaaagaagtatattttggggtgaaatatttttatttgtgcaaagcctcgctcaaaggacatgtagaagttccctgtgtagatgaggggaagacagaaagatgaacttctatcatctttggttgtgagagagcaaccaaagataaggaacatggagcagtttcatgagctgcgtgcttggagtgaagggcgtgaggctgcacgggagcactggggccagattgcaragggctgggaataccttgctggagggtttaaacttgacctggtaggtgaggagttcttttaattttttttttttttttgagacagagtctcgctctgtcacccagactggagaacaatggcgcaatctcagctcactgcaacctctgcctc

SEQ ID NO: 496729 - DNA, 612 bp, Homo sapiens
tagtatattagggaggcagaaatcattgtggctwaaggcatgcattgtggaatcagtcttggcttggagtctcagctctgcacacacatgttgagaggtcttgggcaagataacctatactctcaaggcctcagtttccttatctgtagactagcaacatgagatacatagttcatgtaaagtgcctaacatgatgcctggctcaaagttagcattccataaatgctagttgttcttattcctataatatgatcttccaaggtcactggcatcatcacctctgaattacaatagagacagtgccatctacttttctcctcacctatctcccagcccaaacctcaaaaccaaccaaccctcaaggttagtgttgacagtaaaaatactcactgtgtccttgtcactgtttcagcgtttcaactccttgtttatacatagagtctatgctgaattatctgcactaatgaagcagagcaggatgaaggataatccaagaggctaatctttggggggcaccctctgacttctgtggagtagatttaccctgctaattatatagctgtatttgcttgggttggtgttaacattcaactgcattcctgaagcatatgt

SEQ ID NO: 496730 - DNA, 612 bp, Homo sapiens
tagtatattagggaggcagaaatcattgtggctaaaggcatgcrttgtggaatcagtcttggcttggagtctcagctctgcacacacatgttgagaggtcttgggcaagataacctatactctcaaggcctcagtttccttatctgtagactagcaacatgagatacatagttcatgtaaagtgcctaacatgatgcctggctcaaagttagcattccataaatgctagttgttcttattcctataatatgatcttccaaggtcactggcatcatcacctctgaattacaatagagacagtgccatctacttttctcctcacctatctcccagcccaaacctcaaaaccaaccaaccctcaaggttagtgttgacagtaaaaatactcactgtgtccttgtcactgtttcagcgtttcaactccttgtttatacatagagtctatgctgaattatctgcactaatgaagcagagcaggatgaaggataatccaagaggctaatctttggggggcaccctctgacttctgtggagtagatttaccctgctaattatatagctgtatttgcttgggttggtgttaacattcaactgcattcctgaagcatatgt

SEQ ID NO: 496731 - DNA, 602 bp, Homo sapiens
ccgtgtgccaaccttttcttaaaaatgttaaataagcttgtaatgttgtaaattcagagctgcacagatgaaattctgggctatggtatacaataagcctcccagtggttaccacactggatgcacggcaagagcataggacttcaatgtaatcgttaaactataaaactcttagaagaaaatataggagtacatttttacgattttgaagtagacaatgctttcttagataagacacaaaaagcacatgtgacaaaagaaaaaataaatggacatcatcaaaatgtaaattttttatattcaaaggacacccatgagaaagtgaaaagacaacccacagaatgggagtaaacatgcaaatcatatatctacaaagggacttgtgtcaagaatatataaagaactcctataactcaacaatagaaaatgaaaaacccaatttttaaaatgggtgaagaatttgaataggcatttcttcaaagaagatacacaaaaggccaataagcacatragcaggtgcaaaatcataaacacaataagatatcacttcacttccactaggaaagacaatgaaaattgttaggtcgtggagaaatcaaaac

SEQ ID NO: 496732 - DNA, 580 bp, Homo sapiens
tgtcatgtagagccacagagagcagttgggtgcctcaaagcagagaggagagcattaccagcgaacgagaaggccatgagctcctggaggtggggtgctgccgggggagggcggtacatgactttgccctggttaatatcctcttgcgtgaaataccrgataggagagtgagggtggtcccggtgctcgatgatacctgggaggaagagatttggcctcagcatcaacagtaattctcatcactgactgaatgactagagccatagagcctgctcttcttgttggtgggagtctgacattcttcggaaactgactgttctcaggttgctcttggtatgccactctctggttatttaaggaaagggcaaatctgaaacccaaatgagtattgactgagattcatgaaataccaaccacagtgtgatggttaatactgactatcaacttgattggattgaaggatgcaaagtattgatcctgggtgtgtctgtgagggtgttgccaaaagagataaatatttgagtcagtgggctgggaaaggcagacccaccctcaatctaggcggacaccatcgaatcag

SEQ ID NO: 496733 - DNA, 513 bp, Homo sapiens
tcacttggataactgctatttatctttctggattcagcattgacagaaccttctctaggaaacttttacagtggaaagcttctcatagggcttctagaagatggaataataatttctctgctaggtggtgccataactgggggaccaatgatacccaaatattgatttcatggacataagcctgaaatttcctccaaattttcaaggaggacccctggaacatctggaatactgtagaaaggacatcagcgatggatgggaggtcaatacggattccgcataaccttcctttcactctgggaattttaagttcctttttcaagtcaatgagaaatgtgaccactaggctttttggcccccaagtctgtgatctgggccaggcacttactatatacaaaaccaggacactctatcaaatcccatcagcgtgctgtgtgcctcctctaagtggaawccacaagcctcccacccaactcacagtcatatggagagatgcttccagagacactttag

SEQ ID NO: 496734 - DNA, 407 bp, Homo sapiens
tttttagcagcgacatcatattccagtattaagtaagcaaacaaaaaaactgccatttttcttacagtttgaatatttacttataatttgtctccatttttataactaaggctatgataacacttttgtgcataaatctttgtctgcatctcagattatttcctaaaggactatgttgaaagggtacaattcatattattattayagtttacatttactgagctctgaatatacattgggcaaaatattaattattataaacacataatttcatttgaagagaaaaagtaggcactgttattatccccattttataaatgaggaaactgagactctgaaaggttaagtcatttgcttacacatatcatatatagactaagtccagagcataacattttaaccactac

SEQ ID NO: 496735 - DNA, 495 bp, Homo sapiens
tgtgtcttggttgggccttttcactttcataggtactgttaaacctgtcctccaccatttaattgatgatcaaagcatatagatatgtctttagtgagcaacawcaaatctctaccatccaagttattacattagattataagaatatcaatgagtgttctgctagttcctaacagtggatatgcattgtgttaattttttcttggtgttttaattttaccattcctaccaaacaagaacacacatatcctacgaactttgactatatgtatcatttgacattcagtgactaacttttaccaaatatatttagggaagttacatgaaatagtcccatgagaggatactattttgtttattgtagggaatgtttgtaaaggacataaccttctgtagtccctcttatgttgacctatagagaaattgctctcagttttcattgccagaaaatgctgtgtcttctcggcaactgatctattttaaactcatgcactc

SEQ ID NO: 496736 - DNA, 495 bp, Homo sapiens
tgtgtcttggttgggccttttcactttcataggtactgttaaacctgtcctccaccatttaattgatgatcaaagcatatagatatgtctttagtgagcaacatcaaatctctaccatccaagttattacattagattataagaatatcaatgagtgttctgctagttcctaacagtggatatgcattgtgttaattttttcttggtgttttaattttaccattcctaccaaacaagaacacacatatcctacgaactttgactatatgtatcatttgacattcagtgactaacttttaccaaatatatttagggaagttacatgaaatagtcccatgagaggatactattttgtttattgtagggaatgtttgtaaaggacataaccttctgtagtccctcttatgttgacctatagagaaattgctctcagttttcattgccagaaaatgctgtgtcttctyggcaactgatctattttaaactcatgcactc

SEQ ID NO: 496737 - DNA, 630 bp, Homo sapiens
gccactgccttgccagcctaacagacatccccaacttccttgggaagattgttttaggcaacagaatggatctagatctatttagcccaacttggaagagtatatgaaattgccaacaccttctgctgtacctagataaayttcagttattgtagaagcacaagtagaggaggtacagaggcaggtacactggctgcagacagtgggaccactggaaggatctttttttgacaactttagtaacctcttacctggatcactgggatcctgtgttaggtcactgctctgggcaggcctgagcaccttgcttatggatagtcaaatgtactcctgggcctagtgaaatgtatactgccgatggctcaatgatgttgcaaagagattatgtcagtgcaggtgttacatcaatctgacaagaccaatcttcaactccaaatctggggaagtcattgggcataggaaatggaagaactttgctaaggggggccatctggatcagtggtaaactgcagaacagttctctgggtgaccttggactcacccagtttctcaccctttcctgtttgtagttcttaagtacaactgtagaatgttctgaggatgtaacatcttaatgagaggtgaggccag

SEQ ID NO: 496738 - DNA, 630 bp, Homo sapiens
gccactgccttgccagcctaacagacatccccaacttccttgggaagattgttttaggcaacagaatggatctagatctatttagcccaacttggaagagtatatgaaattgccaacaccttctgctgtacctagataaatttcagttattgtagaagcacaagtagaggaggtacagaggcaggtacactggctgcagacagtgggaccactggaaggatctttttttgacaactttagtaacctcttacctggatcactgggatcctgtgttaggtcactgctctgggcaggcctgagcaccttgcttatggatagtcaaatgtactcctgggcctagtgaaatgtatactgccgatggctcaatgatgttgcaaagagattatgtcagtgcaggtgttacatcaatctgacaagaccaatcttcaactccaaatctggggaagtcattgggcataggaaatggaagaactttgctaaggggggccatctggatcagtggtaaactgcagaacagttctctgggtgaccttggactcacscagtttctcaccctttcctgtttgtagttcttaagtacaactgtagaatgttctgaggatgtaacatcttaatgagaggtgaggccag

SEQ ID NO: 496739 - DNA, 431 bp, Homo sapiens
gaaagggttttaccacatgatcctatttaattattgcaatcayttaacaggttaagtttttttttcgataattgaatttgactaatttaattacaatccatatgacaatacatgtttgcattgtataagttaagacactgactcctctctctagctccagagtttgttctcccacacagtcactgcattcaaatgctaggtcaaatacttcctagctatgtgaccttaaatgggttgcttaaccttttaaggtattatctttatttaacataaaatagaaataataatagtattcatgtgatagagttatggtatgattgaacaaatgaatgctcctgtaagctacctatccaatcaacaagagtagcagggattcttagtgggaggtaaacatcagaattgtctgaagacaactgtcatagccccagctg

SEQ ID NO: 496740 - DNA, 554 bp, Homo sapiens
ctacttctccccttccctagtgtaagtttatttttgtttaacccttcataacggtgtagttaaattttcacaaaaccctataaatttgagattataaacctaaatttaaaaactaggaggtggtataactggtatttaaatctatgacactataattaatctgtacacttccaatgtacaaattaactttttatgaattactttgaatcattagttatttttgcatgagtcccactgctacccccattctcacatttatgaatagtgttcaggtctctgtctcatagtctttgtgtgcatagttgtatagtacatggctttatacacaatagaatctcattacctgtttgtggtttcttaccacaatggttctaaggcaggacaaggagaatacatcagaattatatgggaagttttttcaaacttcacacayagccgtaaaagatcctagttgtctcttctgtagtaagccaatagcactcatgggaatatgtaatatccttcaagaattttgggctgtaatacagattgaggaaaatgtccttataaaaatg

SEQ ID NO: 496741 - DNA, 525 bp, Homo sapiens
acatttttttttcttccttaaaatctttgaaatatttatgctagcaccttgcctttagttcatcataaaacctttctgtaaagaaggctattctggaacatactgccaatgtaattaccagcaactctgaacaactgcagttttaaggctgcatcttaatataactgattatttatatggcccgatccaacactgtttagaaagatgcttgcatgtttgtaggaagttaacacctagtgtttggctatacagtgccatcaaacagtcattagactacttgaacacattggatagtagctttaaagcaagccattacatcgtgcttttcccagacattactttcacatcaattactctttggccagtttaaggtaaactatcttctttgttttcatctgcgtgaacccagtatagaaaaataagaatcatgttgaaaacyacactattagtagtaaagcctaccaaaaagttcacaaagtgactacttttactaatccgttctgtaatttggatgttaaaagtttc

SEQ ID NO: 496742 - DNA, 608 bp, Homo sapiens
ttttcttattccctgtatgctctctttttgtcatgttccattctttcttcatgaatgcaatgtcttctcttattgctatgaagatactctatttttgagctttcctctgctcctagtgttatagtttttcttttatgctaatttttgtttctgtctttcatattgaaacctttccttatatatcttctaatccttgtctaattgtattttggaatcaggcactagaaaactaattgaaagccttatgtgggatcagggagttattatgctyatagaccgtgagtgtttctgttgcgtgatggactttttgtttttcttcattgtggttctctaaatatcagaacctgtgagatgttactcatggacaaaatcttttcaggcattgagctctacaaactagttagagggtggggtgccagccttctgagggctgggcaagtgagttttacagtacagtaagcatcttccacttaattcttctgttttcaggagggtttctaaccctcaacatttcctgagaaaattgaaagtatacttcctgatgtctatgatagaagaaggatgactcttctgctttatgaattggagaagggaatctctttttaaga

SEQ ID NO: 496743 - DNA, 664 bp, Homo sapiens
gctgctgtacagttattcataacagaggactctgtacaattattcataacacaagagccgtcattagggagaaaatgcctccttatagcaccactgagactgcaaggcaggaattccctttttccgtagggcacggttggcgtgtgcatttgaaaatgcttaaatatgctccttgctcccttctctcatccaatgacaggactgatgtgttgtcaagagtggtgctgccatagcaagggyccactggctttccaaaggacctcacttgcaatggtcactgcccatgttggtcttctctccatcgctaccaagactgttggaagctatgttcataagatggttactggggaagcctcaacacattaggataagggaccattacactaaacaaaattctgcaattaagccacctttaaggtatctcgttgaccatgaatctgaacctcttttttctttattttcaaaagcaatatgtatttctacaacattagaagtccaacttttcttccagttcaaccattgagggtcatcttcagctccacaagacgacaaactccatgagagcaggcccatgatgtgacttggttaccgctgtatccccagcaccttgcagagtggatggcatctggtgggcactcaatattcgttaatgagtgctaaatga

SEQ ID NO: 496744 - DNA, 669 bp, Homo sapiens
acctcactctttacggatgaaacagaagctcagagaagtacagtaacatatcaaggccacatagctgccaagtggcagaagtctgatttcagagcccacaaacttggccccctggcttcatgccttcctatagatcctaaccaccacttaatagaggacattcatagttcctcctggcttcctgggacctcaaccagtggttgcagggtggagctgggccaggatgaggacacagggatggggaccccagaaacagagaagacagaaggtaaggcagagactgtaggatgaagcggttagcaaggatttgggggagaacacagaagtgggcattctgaraggcctctaattttcctctatcactagctgtgaatacaacacaaccacacaactagcaagaggttaaaatttcaggcggccctggacttagaaatccattctactcccaaaaaggttttcttgcaaaccatctgtttctaatataaaatgcatttttcccccatagaaataatgttataaacagtgattaggttttcaggttagcccacaaaacctacttatccataatgtaactttactactatatatttgcaataaacaatagcagaaaacaatgagattgcagccatttgcattatatagcagttttcttctttacttatttgtgtt

SEQ ID NO: 496745 - DNA, 552 bp, Homo sapiens
gagccacagccgctgcgtacgtgattcccctcccccaggggccaggcttctacactttaacagaccagggcagattccatcttttcagggcacagggcggtggataatagctctcggaccctggtgctgtcccacagtagcagtgagatctggggagagtcacagctcttctgtgtkccagttcccccatatacaaaatgggcatgaagacacttagctcacaggacccttaaggggatgaaatgagaaaagataggtaaagctcttagcatgctgtctggcacattcaataaatggtattattattttacccacaaatccttggtgtcttggaagggaaagttacctggcggtcacggagctactgtgacccactaaacgtctgtggggtaggacaggaggactagggctgtcggtgtcccagacccccttgagcacctggtggagggacatcagacccctgcaccagcgggaattattccactgaaagtgaaagtatcgccgactggctggatgccacttcctcctggcgagccgagccgccccctcacc

SEQ ID NO: 496746 - DNA, 524 bp, Homo sapiens
cttttatatggagaatggaattggtcctagagtgggggatgtcatgctagagccttggttttgaaatttcagttctccttatcttactattatggactgaactgtgtccccawaaaatgtgtccccataaaatgtatgttgaagccctaactcccagtgcctcagaatgggactgtatttagagacgtgggtggttaaagaggtaaggaaggttaaacgaagtcattggggtgggccctaatccaacatgaccgatgtccttataaaaaggggagattatcccagctactagagaggctgaggcaggagaatcacttgaatctgggaggcggaggttgcagtgagccaagattgcgccactgcactccagcctgggtgacagagtgagactgtcacaaaaaaaaaaaaaaaaaaaaaaaaaattggggagattaggacagagatacagagggaagaccacgtgaagacatagagagaagatgaccatctacaagccaaggtgtaagggcctcaggagaaaccaa

SEQ ID NO: 496747 - DNA, 647 bp, Homo sapiens
cctccttcccaactgtaaatctccttgccttagagtccccctgccctccaagctgtacgtctgtcttccagatcttacctgacctgcagccccctccctcaccctcacctgcaggctccactacaattagctctaaccaagccacccagtattttgtgagcacagctgtgtgccagagcctggacagcctcatggggtaaggccacgccaccctcccatcycacagttgagtgtggaagactggatgtctcagggccagcagacgcccgacacgcagcctcattccccaggtggaatccacctgcagttatgggaggacaaaccaaccatcactattagaggattaggcctggctcagatgggggattgaggcttcggcctgagggcactgcccattggcggcaccacctgtgggcagcagcgggaggcagtggtgcctgtgggaggcagtagtggctcgtggccagaccagggctcggcagcagggaggcagctctttagggagaggcacaggcttaggtagcaagagacagatgccaggagaggggcccttcctcagggtccagcctcccattctgctctgccacgtttaccaagcagagtctcggggcatccgctgtaaccatggtggtgccaccactctgctg

SEQ ID NO: 496748 - DNA, 473 bp, Homo sapiens
gtcgttaaagtttgagttcactcagccttcaggcttccagcctaggcccacccttctctctccctgcttggtgtgacttgrccaaataacatgaccccactgtcactacggccaccttcttcatactccaccctaaaatccagcctcagagatgctgctgtcagttgcgctgtcaggaggctaggatcttatctggggctctaggacgcttgttggcgctacagttgtcaaaccttttgtctctacacatcctatggggggctggggtgaggatgagggttgggggtcatggaggctctctggtggcgtgtcaacctgagagaaccaggctcctacagacaaggccccacccccaaattctgggctccttcaaccccttatggtgggaaaataatgtgctctctcccaccccaacccccaccaccctgtgctctccttagagaaatgcctggatctctttcatctgatctgat

SEQ ID NO: 496749 - DNA, 586 bp, Homo sapiens
tgcaatgtcctcccagacttggggacacctgccagtgctctgcttggtgtaaccctaaagactagcagcagggtctgtgcttgtaatcccagccagcctgatcatacatcagtgggaggcctttgtcacaatcactccaagttttccaacatggaagaggctgccttagttgtcatgaatgagtgccctgtcactagcagcatgcaagcagaatccagggaagggttgatgaggacagcagaggaagaattcccaccttaagtggtatttggagtggataacctttgccctctgggtgtctgtmttctctcagtctccttatcaacggggaagctggggaggctgggagctcaggctgggccaaggctgccccaccatcctttgtgaacgaggccatcctgacagtgcctcacccttatgccaggcaaggtgctatgtgctggggccccaggggtgaacaggacagtgtccctgtccttggagagttcacagcccccttgtagatgactgcacagatagtcaacagcagcaacagtaaccgctcaagataacaggcaaagtgcttggagggggaccaggggagaag

SEQ ID NO: 496750 - DNA, 599 bp, Homo sapiens
cagcgtcattcatgtgcaatgtcctcccagacttggggacacctgccagtgctctgcttggtgtaaccctaaagactagcagcagggtctgtgcttgtaatcccagccagcctgatcatacatcagtgggaggcctttgtcacaatcactccaagttttccaacatggaagaggctgccttagttgtcatgaatgagtgccctgtcactagcagcatgcaagcagaatccagggaagggttgatgaggacagcagaggaagaattcccaccttaagtggtatttggagtggataacctttgccctctgggtgtctgtattctctcagtctccttatcaacggggaagctggggaggctgggagctcaggctgggccaaggctgccccaccatcctttgtgaacgaggccatcctgacagtgcctcacccttatgccaggcaaggtgctatgtgctggggccccaggggtgaacaggacagtgtccctgtccttggagagttcacagcccccttgtagatgactgcacaratagtcaacagcagcaacagtaaccgctcaagataacaggcaaagtgcttggagggggaccaggggagaa

SEQ ID NO: 496751 - DNA, 523 bp, Homo sapiens
ggaggatgcggcaccacactgacaacaaggggagtgtgtcaatgggtcattcagaggctgagactgcagcctgctctgygccagaatactggcagccagacttctgaactccaaacaggagaacagaagtcccctctggggagttgacagttcaagaagacagacctaacaataccaacatccagtatttcccctaaaggctcaaccctcccacccactcttgggcctggttctgtatcaagagcaaacactaaggacctccaggcatccctgaaagtctctaatgtgaatgtagagatctaaacagatcatgtgtttactcttctgtgtatgatcactaatttttctaacctcaaactctttgccaattgtccaaacatttttcagcattttcattcacacagatcatgaatggaagagagacactacacaaggagaaaagtcatcatcatataaccataataataacaaacccctctatccaaagagagacaacagcagataaggcattcatgaaaaaaga

SEQ ID NO: 496752 - DNA, 545 bp, Homo sapiens
gggtggcgtctggccatcccattctgctcacattctcaggggaagcttgcggggctctgcagctgtgggcggtggcctccatcagggggcagggcaggagggaggtgggccagggccaagaagctgagcggcgccacatagaaatttcatccacagcctcgtgggacagatgagcaaacagtgggaaggaggcccagagagaacttgaagatgtggagtcaggctgatctgcatttaaacattaggacaacctgatcccaaattacttcaaactgcatggcctcaggcaagaacctcacacttcctgagcctcattttcttctcctgaatatggatgttccgtgtgaagattggaaaataytccagcacattgccaatctacacgtgaagaacagtggcccagaggtattgagcagcttgcctgggatcacacagctggcgaggggggaagccaggataggaaccgtgttgggaagggttcagagtatggctccacccaaaccaaaccctttccagtctttgccactatcccatggtgtgcagtt

SEQ ID NO: 496753 - DNA, 511 bp, Homo sapiens
catgaagagaccccactccttatcccctcaaaattcacaggccaaggggcaacaactactgtaacacatgtaagtatatattgctaattattattattgttgttgttgttattctagccattatcttttagtatttgcagtgccagattaggctgttgacatttgctatctttggccctgccacgacatgtgaggcagggatcccatctccrtcctgcagatgaagaaatggaagcttggaaagacgaacggacgatcatgaagcttgcaaaaggcagaaccaggatgcaagccccttccccatgctggatgaagatcacatcaccaccaagaacagagaatggctcgcccttctaggagcaaaacagacagttttgaggcagcctgaagaaaaatgtcatcagagggagggttgacggactgatcagcaagactgtctccttgagggccccttaccttggtctccaggagacatactcggggccccagcatgccaggatgaaccctgagg

SEQ ID NO: 496754 - DNA, 645 bp, Homo sapiens
atttgaccccctcagggtacagaagaaacacagggaacacggtcctcctcagtgtccctcacctagccctttcctcttgttggatccacccatcaaacactgaggcagagctaaccctgaatgtctggaatttcatcaagtcacatatctacccaaatgcatttagtacttctccgctgcctccaggaaagctctattgatatctcctaaacctatatattctcataaaattatactcaataaatgtctatactatggccatgttcttactataattcacaacatccattccctctttattgtctgtctcatcaacacagtgrtatcctcacattgctgataaaatcagataaaacacagcaacattaacaccaaggttggcccagtccaagtcctggatgaacatcagtttcctcctttccttcttagaggaggtgcatctgaaccaagtcttgaaggctgagtaggagtaagccagacggccaagatgggggctggcatcctaggaagaaaacagaacatgtgcccaatgtggaggtgtgggagaacatgtcgtgtcttgggaaccatggagtgctagctggggctggggcctgtggaagggactggagagataggcagccaccagctaccagagacagggat

SEQ ID NO: 496755 - DNA, 645 bp, Homo sapiens
atttgaccccctcagggtacagaagaaacacagggaacacggtcctcctcagtgtccctcacctagccctttcctcttgttggatccacccatcaaacactgaggcagagctaaccctgaatgtctggaatttcatcaagtcacatatctacccaaatgcatttagtacttctccgctgcctccaggaaagctctattgatatctcctaaacctatatattctcataaaattatactcaataaatgtctatactatggccatgttcttactataattcacaacatccattccctctttattgtctgtctcatcaacacagtgatatcctcacattgctgataaaatcagataaaacacagcaacattaacaccaaggttggcccagtccaagtcctggatgaacatcagtttcctcctttccttcttagaggaggtgcatctgaaccaagtcttgaaggctgagtaggagtaagccagacggccaagatgggggctggcatcctaggaagaaaacagaacatgtgcccartgtggaggtgtgggagaacatgtcgtgtcttgggaaccatggagtgctagctggggctggggcctgtggaagggactggagagataggcagccaccagctaccagagacagggat

SEQ ID NO: 496756 - DNA, 345 bp, Homo sapiens
ccttgtctggccttcatttcccttttatcttaaacaactaaaaaactggacaaaatattcaaaacaagtattttcagacattgaacaagagccaatgcaagataatcaatgagagaaggaaaacaaatgagatatgccctatgattgccctggctttttgcctgatgatcctttccagaccaaagagcagagaggggtatcctgagcaaagcaaagaagcctcactgagattcaagttcagyaggtagtagttgggtaactgtgagctccagagagggggaagcactgtagaaaaagagttccagaaatctgtacaggaatcctcttgattctttgttggatgtg

SEQ ID NO: 496757 - DNA, 503 bp, Homo sapiens
tgtgtggcagtaaatggggttgggaatatgaagtcctctgccagggtggctgaaccactcatttgcttggtgctcataggtgagtctcttaccctctccgggactttactttcccccttgtctacacatagtagaggttgaagattggtctccaaagagcccctctggctccagctttctgtgccagatagagatatctgttggktatagctcttgatccactgatgggcagaacttccacaaggcacaaaagtcctggctgctgccagagaaggacagactgattggatgcttaatgaaagtgcttagtacaaagcagatactccataaacgttagtttccaaagcctcagtatgcccatctgctaaaagaaaagaacaatttctgacctgcctacctcaccagttgtagagcaagatccaatatatgtgagtggaaagtgttttctaaaggcgaggaaggattcttgccctggagttgggtggagaggaatgtcctgttga

SEQ ID NO: 496758 - DNA, 567 bp, Homo sapiens
aggaagaggagataaggaggggatcagtatgtggtgtagggagagagcttttgcacattttcctttgttttgatactaaatctctggggcctgttatttccatgtggccagaggggcagaggcccacaaaggtcatagcaatttttgaagttgatgagctgaaaactcacctgcccattgcttcaagccaggacattagtggagatgatgaatttctctgcgtggtaagatgcactctgaatcccagaacttttgaatgtcaaaccaggaaaggaattggcagattatttagtccagtcccctctttacacctgagagtaaagagtggccccagaaaagatgagtattcagcataagatcacccagcatttaatgatagaatcaaagcaggtagctccccatttgcagctgtggggcagaaacagccatayctttttctgtaagaatctctataggatggccctgtctatttgagaccactgcaatttcagaaaagaatgtggcctccttagtccaagttccctggaaggctgggtcataggcctcagagaccctcctcatgtgggt

SEQ ID NO: 496759 - DNA, 637 bp, Homo sapiens
ctgacacagatgcctccacagtggggccataccctcggggaatctgaaccacagagcagcagagttgaaatggatccgagagagccccctttccaagggggagaagcccacccaggaagaaagaggtgaaaaaagcaggcycaggtccccagtcttggaggtcaaggttctccccgactttgaggaattgcagatgcccatttcaaatgacatatttgagaaggaaaggtggctgaaacctacaaaagtcttctttgttaagtatcttatatcaaatgtatctctctttttttctctctgtagcatttttcagcccactgtcacgtgattgtttgtttaacagctccctgactagaacataaacaccgaggggatgttcctgctatatccccagcacccagcgcaatgtcctccatacagaacactcactaaacacgtgtttagcgaaagaagttaatccttatggtggtcctacaaaatcgatcttattatctctgtaaagactcagagtagtaaagtaacttgccagaagtcacataggtggtgagtgctcaaactcagggttgtcagattccaaagacagctctttccactaccctacccctcctcaatgaactgtactttccagagcttcttg

SEQ ID NO: 496760 - DNA, 639 bp, Homo sapiens
ctgacacagatgcctccacagtggggccataccctcggggaatctgaaccacagagcagcagagttgaaatggatccgagagagccccctttccaagggggagaagcccacccaggaagaaagaggtgaaaaaagcaggcccaggtccccagtcttggaggtcaaggttctccccgactttgaggaattgcagatgcccatttcaaatgacatatttgagaaggaaaggtggctgaaacctacaaaagtcttctttgttaagtatcttatatcaaatgtatctctctttttttctctctgtagcatttttcagcccactgtcacgtgattgtttgtttaacagctccctgactagaacataaacaccgaggggatgttcctgctatatccccagcacccagcgcaatgtcctccatacagaacactcactaaacacgtgtttagcgaaagaagttaatccttatggtggtcctacaaaatcgatcttattatctctgtaaagactcagagtagtaaagtaacttgccagaagtcacataggtggtgagtgctcaaaytcagggttgtcagattccaaagacagctctttccactaccctacccctcctcaatgaactgtactttccagagcttcttgcc

SEQ ID NO: 496761 - DNA, 528 bp, Homo sapiens
ctgctggtcagcagatctgggtttccagcctggtctgtggagtttttccacaatagcctggtcagccccatctgagatcaccagaccagaacatttcatttgcatggatggcctctcccctcrctccctgcctccacgatttctctgagaggtgaaggaaagtgtgagcacagggcctccctgcgtcagcctgtgggggtgccgcagcacagactcatcacctgctagcaagagcacccgcccacccgcggcccaccggggccttttctccaccgcctctcctctccattaagcagccctgctctgtcccaagcctcacagtctctggatacccatttaactttttaattgatgccagtggttggcagctcccctggccttgcctcccagccctttctctttgccccctcctcttctctttcccttgctctctgtgtgcctgcggcgctgtctctcaccttctccacattggtctggttctcttcttgtgcttcatctgccgctgtttgtctgtctctgacttcatga

SEQ ID NO: 496762 - DNA, 501 bp, Homo sapiens
gtcctgccagagaagaggcttgaagtatctcaaatgaaagtgaatggtgtgatttattaactcatactttgtctcctgagcaccaactgtagttctgccctattgtataaatcctaatgcatcctggctttaaacagtttttgagcatgtttacatccctcccatgctttgaagtatttatttgtgatacttactgtgtgccaggcactttttaaggtacttattggatattttatratgaaaataaagtaatataaatttgggtttatggtacaatcacaactctgtaaaatgtataagcactaggctgaagaatttaataacatttgcacaattgaaagtaattatgtcggtatccagatagcagttggttcttttcacttttcaaaattctcttatatgttggtattatactgattttgtaacaaagaaagcaaaaaataggtaaatactcaaatttgcatccagaggtaatttgtttaaactgcacgttatatgggt

SEQ ID NO: 496763 - DNA, 496 bp, Homo sapiens
tttctgtatttttagtagagacagggtttcactatgttagtcaaggtggtctcaatctcctgaccttgtgatccgcctgccttggcctcccaaagtgttgggattacaggcgtgagccactgcacgtggccaaagtcctgcatcttgattcatgcctgtattctcacaacatcatgagctatttgctrtttggcaaaggacaaattaaggcggaggatggacatttctcagggaaaatttcagctcttgtgtcttttttctgggtctacccctcccaacctgccaatcaataaaccatccattgtttctctttgacagaaactttggagacttgtaaaatgttagttctgattatacaccattgcttgcaggtatcaacaatgcagaagcgagggcaggtctctgagcctttgagtggcaacacaactgctgtcgtgacaataaaattagaatgggagatgaattccatcttttcttctgatgcttaattttttag

SEQ ID NO: 496764 - DNA, 612 bp, Homo sapiens
ctgaataaaaaatctaggccaaagcccagtaagattgacagcatactgggtagatagtttcctctaggtgaagaacttgttgcctcarctgctgaaagttttgctggcagaagggtcttcagttgttggtcctctcatagactgcccaaggtacctaggatcacaccctgcccctggatcccacattcagtgattgatcagtgcaggagtataaagtcatggctatcttgacccaactaggacaaccctaaagggacctcctatctccatagcttccagagggtggtctgagactgtcttgggactgcatcacagctagacttctccctctgcccctccctttcacaggtgtggaccccaaggcacttctcaataaacaccctatgtcttagactcttagaatctgctttgttgggaattcaacctacaacaaatacctattggggtttaaataaatgtacaggttggtgggaaagtagaaccaggattcctctcagaaaggagtataccaagcctatgatggcacaactcatttcaagcccaaaaggctggaatgaaatatatcagtgaataaaacaaacaaaaaagtctctacactcaggaacttacatt

SEQ ID NO: 496765 - DNA, 612 bp, Homo sapiens
ctgaataaaaaatctaggccaaagcccagtaagattgacagcatactgggtagatagtttcctctaggtgaagaacttgttgcctcagctgctgaaagttttgctggcagaagggtcttcagttgttggtcctctcatagactgcccaaggtacctaggatcacaccctgcccctggatcccacattcagtgattgatcagtgcaggagtataaagtcatggctatcttgacccaactaggacaaccctaaagggacctcctatctccatagcttccagagggtggtctgagactgtcttgggactgcatcacagctagacttctccctctgcccctccctttcacaggtgtggaccccaaggcacttctcaataaacaccctatgtcttagactcttagaatctgctttgttgggaattcaacctacaacaaatacctattggggtttaaataaatgtacaggttggtgggaaagtagaaccaggattcctctcagaaaggagtayaccaagcctatgatggcacaactcatttcaagcccaaaaggctggaatgaaatatatcagtgaataaaacaaacaaaaaagtctctacactcaggaacttacatt

SEQ ID NO: 496766 - DNA, 455 bp, Homo sapiens
gtcagtgctcagctctttaagcgtcccaaatcaaaatcagcgctctcagtactcatctctacctcacctgctgaggtcttcctgaaattccccaaatcaatcagtgacagccccatttccaagggcaccaatcacaaagggagcctaattctagactccttctctttcttcaccccagcgatattcacamggcattgactagttcactaccaaactgctttagcaatctgcatctacccttccatcctatctgctactgtcctatttcatctcatctatctagacttttgcaaaactgcttcctactggtctccttgactccagtatcttctttctctaatgtcttgttccttccagccaccatattgatctttctatactattgatttcatccgtccactctcttggcaaaaaacaaagaaaaaaaccataaatggttactatagcaggcattg

SEQ ID NO: 496767 - DNA, 447 bp, Homo sapiens
cttgggaggctgaggcaggagaatcgcttgaacctgacaggcagaggttacagtgagctgagatcgtatcattattgctcagcctggtcttctagagtgagcctcctgctgagtaataataataataataatgatgattattattattattattatgcttcaataaagctgatttaaaaataaaagatggtagccaagtaaaaaatcaaggaagagcattccagacataggaaaaaagagctgatgcgtagcctctgaagcagggaaaatctttttgcatcctrggaaggcctgtgtggatgaagcagggtaaagaagagggaaggtagcaagagatgaggcaaagacatgacatcctggacctggtggggttaggattttattctgtgtgaacagaaaaagcccttgatttgctatcaaaagtcctaaaccctggtctggactttc

SEQ ID NO: 496768 - DNA, 531 bp, Homo sapiens
ctgtttgcccaagtgctgcagggatcagaggagagaacaaaactcagtcctgataaaaagacaaaactgggaggtctcccagaggggctgacatcgagcgagctcttgccaaattactggggcttctccaagcagagggaatagcctgtgcaaaggcagggcagcctgagagaatatgttctcttcaagaactagccaatcaaatccacgtgtggcagaagagcagggtatatgttgggggcagggggcagggctgtgagggatgggtctggagaggtggctaggctctcaggacttggggctccttgagagtggatggtgggcagtggatggttttcaggcaggggactagcatgatcaggtccttttattacaygtgcatgcattactttcaacttccaacttccaactataactagttctttccatgacatcacattattagatccagcgacctttatttcttttttaaaaacatctttagttctttaatgaccatttcttttaaagtaattgctaaatgtcagatag

SEQ ID NO: 496769 - DNA, 659 bp, Homo sapiens
tgtgggatattgggaaattcactgctctgagccccagcttcctcatatgtaaagtacagataataaaagtacctgtcattgttcctatgaggactaaataacactcagcacatgtacacagtaagtactcagtaaatgttatcaccatcatcatggaaaacaggatatgtgagccagacacaaaaagggttatgtacgtttataccttattccctacctgaaaactcaatctgtttgattttttttacaaccccaaaacayagtggatttgaaagaaacagaaagacccccaattagttttatatagaacattaggataaattcatctttaaataaaaaaacagttcttataccaaaaattgtgtatgtttccaaaagtaaaactaattttttccatcaggtgtaatgtttaaatcacatatccctgaggtaaatgattataagtgaaactctcagggacctgccattggattctgtcttactccatcagcacatcatggggaactcagacctctggcacgtaagagttatatgctatataattattcagtgtattctgtgcctatgtttgcaaaaaagatacatttttaagctggtgctattaaatgagaaaacaaaatatatttacaaccagttgggaatctttcaagatgaaaaca

SEQ ID NO: 496770 - DNA, 620 bp, Homo sapiens
gttattagtattacccagccccacagaatactactcagcatctttctctgtatatttttccatggccacacatgtttacatgcactattttcctctgaaattatctctatgtgraacatcccgtgagtagcttgtgtcgggcaaaaccagagcctgggtagcagatggcatagctttgtagctgtcatgacttaaatggccactttgattttcattgcttcacttcatacaaattccccaatgtaggcttggtgctacaggtccctgcacgagggagacatttccttagcctaaccacgttgtttcctactgaaagcaaatgactttgctatgtcttccacttttactcttagcggcgataatcacctcaacagcaaatggattagccatatatttttcttgtctctatgcccatatctctttcttaaagaatttctacaaggctgcgaagcctttgaggccaaggacaatattcttcgctcctttgattgccagattctatcattgtgctggcacatagtaggtgcttaacaaatattaactgaaaaactggatgaatgtcacatacatctaaaagattttcataaggatttaaaattatttgtattgatctcctcttc

SEQ ID NO: 496771 - DNA, 218 bp, Homo sapiens
tcttattgttttactgtcactgagtttccatgaggtctttcacgtttgtccatactgcatagttatgaacgtgaagaacactaacattagttcttattactttttactttctgggtgcttgttccrcttccttgtgcattccatgaggacgtatcattggcaacaagttatgactgctgtccctttctccagttgaagggaccaggacaataatgcag

SEQ ID NO: 496772 - DNA, 572 bp, Homo sapiens
ctggtgtaacactaaccctgattttaaaatcacatcaatgctggagaaagcaaaacgttgttcataagttattccagaggaactgatcctatgatactctgcttttcaacagccccatcccgtttggctttcaaaaaccgtccttgtccaggcttctcccgagacttactaggaatgcccagtttaatcagaaatcttgaggaggaagtctagatscccgctggacttttctgtatagctccgcaggagattcaaaatgtgcattcatggtagagcaccagtgtgctaggctgttccctatcaatagtgtcaatgaaaagttcctcctggagtacttaaaggaagattcttggcaatcaaaattcttagcaaacttcaacaaaagtatagataataagattttaggccacacaattctgggcaattcttgggctgtgcacatgagggactgtcttcccagcacttatctgcccacacctgaccacaaggcatttgtcccagaggcatacatcacaggtggtaatgcattcctaaggtcacagagtctgtgaagtcctgagttattcataagc

SEQ ID NO: 496773 - DNA, 711 bp, Homo sapiens
ctgcagatatttcttgtttgacaaagtatatcaatatccgtcactgacaccaagattggatttttaaggcatttgtggtgcaaaagaaacaaaacaaattttaccttggcattctttttaaaacaaaacatctaaataaatcagacctggctaagaacatacctgaggccttggctggatttaattacacaaagaattggcaaatatacagtcktaatcaacaagcagactgtggcactcctcaaatcatctcaacactgacatgtcacaggctgttgattttccaacaaacgggaggctggagccattttggagccaaagtggatgaataagtatggaggccaccagtgcatctcactgatcatgggcaactttattctagatttagtctttccattacggttatgtaaaaatggttgaatagaaattaagatgagtacaaacaataataacacaaacacatttatagtttgttgaatgctgcttgcatgccgagcactacgtttactgtacatctcatattcaatggattcatttgttttggaattcacaacaactctgcgagctgggtatgttgttcatttcacagatgaggaattttcttctctaggggagatctagagaaattaagtcacctgcgcaaggttataaggatagttcatgtatcaaaaaattatgtgaagtagtaaatgaaaagctcatggaaaaaaa

SEQ ID NO: 496774 - DNA, 711 bp, Homo sapiens
ctgcagatatttcttgtttgacaaagtatatcaatatccgtcactgacaccaagattggatttttaaggcatttgtggtgcaaaagaaacaaaacaaattttaccttggcattctttttaaaacaaaacatctaaataaatcagacctggctaagaacatacctgaggccttggctggatttaattacacaaagaattggcaaatatacagtcttaatcaacaagcagactgtggcactcctcaaatcatctcaacactgacatgtcacaggctgttgattttccaacaaacgggaggctggagccattttggagccaaagtggatgaataagtatggaggccaccagtgcatctcactgatcatgggcaactttattctagatttagtctttccattacrgttatgtaaaaatggttgaatagaaattaagatgagtacaaacaataataacacaaacacatttatagtttgttgaatgctgcttgcatgccgagcactacgtttactgtacatctcatattcaatggattcatttgttttggaattcacaacaactctgcgagctgggtatgttgttcatttcacagatgaggaattttcttctctaggggagatctagagaaattaagtcacctgcgcaaggttataaggatagttcatgtatcaaaaaattatgtgaagtagtaaatgaaaagctcatggaaaaaaa

SEQ ID NO: 496775 - DNA, 498 bp, Homo sapiens
ctaagcattctagaatagaagtgattagataaatatgcagacaacamcgattccacatgtaattgtgataattgaatgtaaaaaaagacgaaatttgttttaaatgtcgaaaataattcttgagaaatctgttttgaaggtgactgtgtacaacagcatttttcttcttctcctcttagaaattatacaaacacaagaaggagaaagaaattaatgttaaacccttttccttgatactccatgaagtttatagctttcataagaatgtataaggagaccaaggctaagatggagcagaagctgcctgggaggaagagcggaggacatgaggagcgttttgaaaggatccagtggcagcaggtgtcagagagcatcagcaaaaatacacgttcttcagggaagtctttccctgatgtgccaacctgttggccataataaaaggttttacttgtggataatactgacaatatcctgcatgaaatatgactaaacagaaag

SEQ ID NO: 496776 - DNA, 549 bp, Homo sapiens
ggaagctaacagataaaaatgtagtagatgagaaaatgatctggctactgcaataattagaaagactgataagtagcatcttagaccacagaaagtagaggacatcttattagagcactccgttcgatatacagggactgcatgttctcaaagactctgatgtatgaggcatggtctactaacatcgccgcggtgataggggaagtagtgcaacgcctctgcttggcaccatgaggtaggatgtaggctcgtgcctgagtgagcccttttaggaaaagtggtgctgggccagggtcttccttcacatctgagtgctctattgcaccaccaccctctaagccaaaagaagttctgaaacattagattygtctgagtccaggacaatttcgcccttttgaacacaagctcccaaaaccttctacttctcagtatattgtaatggttaagagcacatattcctcctatccaatactggctttaccagttgttccaatgacatactgtataatgtaaggcaaattgcttagcctcttggtgggttagtttttt

SEQ ID NO: 496777 - DNA, 576 bp, Homo sapiens
taaattcacatatgtggccgggcgcgatggctcacgcctgtaatcccagcactctgggaggccgaggcgggcggatctcctgaggtcagaagttcaagaccagcctggccatggtgaaaccccgtctctactaaaaatacaaaaaattagccgggcgtagtggtgtgtgcctgtaatcccatctactcgggaggctgaggcaggagaatcgcttgaacccgggaggcrgaagttgcagtgagccaagatgacgccattgcactccagcctgggcaacaagagtgaaactccgtctcaaaaagaaaaaaaaaaaattaacgtatgttttactgtcattctggttctacttcaaattatacgagcatcattttcacaactttttccttcttcttcattctactttatgttctttctcctaaccaaatatgttcaaacttcctaaaacatctattttgtaaatgcaggcatgtgcataacttccttaaatcaggacacacctatctatgcactgagtagaaaggctaataagttcaaagtggtctcaataaatgtgttgccagccatcctgtccttcct

SEQ ID NO: 496778 - DNA, 576 bp, Homo sapiens
taaattcacatatgtggccgggcgcgatggctcacgcctgtaatcccagcactctgggaggccgaggcgggcggatctcctgaggtcagaagttcaagaccagcctggccatggtgaaaccccgtctctactaaaaatacaaaaaattagccgggcgtagtggtgtgtgcctgtaatcccatctactcgggaggctgaggcaggagaatcgcttgaacccgggaggcagaagttgcagtgagccaagatgacgccattgcactccagcctgggcaacaagagtgaaactccgtctcaaaaaraaaaaaaaaaaattaacgtatgttttactgtcattctggttctacttcaaattatacgagcatcattttcacaactttttccttcttcttcattctactttatgttctttctcctaaccaaatatgttcaaacttcctaaaacatctattttgtaaatgcaggcatgtgcataacttccttaaatcaggacacacctatctatgcactgagtagaaaggctaataagttcaaagtggtctcaataaatgtgttgccagccatcctgtccttcct

SEQ ID NO: 496779 - DNA, 561 bp, Homo sapiens
ttcctatctcagttcataatactaccctctgcctacccaacagttcagtgtaggagtgtagaacatgtccttttgtttttatttaactacatgtaaccacattctactttatcaatttctaattctaattccacaatttagcccaagcccatttaatttttatatctgctgttccccatactcatattacacactacatcgtttctttcctataataatgcaaccatctactaayggtttttctgtctacaactttactcttttcgttagaattcatgattcatgttgcaggcgcacaaaatctgattgaaaatgttataaaatgcatatttacagtaggagttttctggagacagctttgatattcaacctcttaagaattatattggaattatcttttaggaagggaagagtaggcaaataatattagctctaaagcactgaatataacatcttctttttgagaagtttaataaattattccataatcatgatatgtaagggactaactatcaaaaaacaacctctttgatctagcataattgacagatgggagaaatg

SEQ ID NO: 496780 - DNA, 600 bp, Homo sapiens
agctggcctatcccttcaattctggaaaacaataatttcctgggaaatttcattttgtatactgtcacttacatagtattggggagmgcctaagtccttagctagaagagaatctgggtacaattctcatttaaacaaaactgaggtgctattagtaatgaagaaagggcagaaagtgagttagataggcaatcagtcatgtctccacactcctgctagatgtactccatgagagcaaagtctctatttctaatattcctggctttgtgcttggaagctagcaaatctatgaactatgtattgaataaatcaaaaagcacaccatgattttattttgccaaccattttatgtattattagaaccaccagaaataaatgggtgggggattctagaaattactgtaataatacagtagaaaatctaacaaattttgtgacccatcagaactcaaaatggcaggtaagatttcagaactaaagttcaagcacggtaagaataagtctaaaaaggaacaatttagcatgcattgacttcctaacaccctcagattacgtgttattttggagagagaagttaacacatgttgaccacctatgaag

SEQ ID NO: 496781 - DNA, 600 bp, Homo sapiens
agctggcctatcccttcaattctggaaaacaataatttcctgggaaatttcattttgtatactgtcacttacatagtattggggagcgcctaagtccttagctagaagagaatctgggtayaattctcatttaaacaaaactgaggtgctattagtaatgaagaaagggcagaaagtgagttagataggcaatcagtcatgtctccacactcctgctagatgtactccatgagagcaaagtctctatttctaatattcctggctttgtgcttggaagctagcaaatctatgaactatgtattgaataaatcaaaaagcacaccatgattttattttgccaaccattttatgtattattagaaccaccagaaataaatgggtgggggattctagaaattactgtaataatacagtagaaaatctaacaaattttgtgacccatcagaactcaaaatggcaggtaagatttcagaactaaagttcaagcacggtaagaataagtctaaaaaggaacaatttagcatgcattgacttcctaacaccctcagattacgtgttattttggagagagaagttaacacatgttgaccacctatgaag

SEQ ID NO: 496782 - DNA, 600 bp, Homo sapiens
agctggcctatcccttcaattctggaaaacaataatttcctgggaaatttcattttgtatactgtcacttacatagtattggggagcgcctaagtccttagctagaagagaatctgggtacaattctcatttaaacaaaactgaggtgctattagtaatgaagaaagggcagaaagtgagttagataggcaatcagtcatgtctccacactcctgctagatgtactccatgagagcaaagtctctatttctaatattcctggctttrtgcttggaagctagcaaatctatgaactatgtattgaataaatcaaaaagcacaccatgattttattttgccaaccattttatgtattattagaaccaccagaaataaatgggtgggggattctagaaattactgtaataatacagtagaaaatctaacaaattttgtgacccatcagaactcaaaatggcaggtaagatttcagaactaaagttcaagcacggtaagaataagtctaaaaaggaacaatttagcatgcattgacttcctaacaccctcagattacgtgttattttggagagagaagttaacacatgttgaccacctatgaag

SEQ ID NO: 496783 - DNA, 661 bp, Homo sapiens
atacaagggctttactcttcaagtactctaattttttttaaaggagtttagattttttattataatctttcaaatatgttaggtgtgtttctttgcattctcaaacagaatttagtggatgcacccaaatattttcttgatgacttagtcaagcaaatactaatatatgctcttagaccttttgaggtatattcacaagtaaagataaaattctgtaataaatgactttaccttaaagtgctttttaatgtttcctttgggctattcatcaacttttaatagatttcttcccaattattttttctttttgatgtatttttcaatgttaatagttcacttggtctttttctcttcctatggggtaggaaataatataaccatacctgttatggttaacagaaaaaaaaaaaaaaagtactggggctatgaaaaggcctgcctgtgagttatgtgtaagagatgttgtgtatcagtcttatgatagaaacttcaacttttcaragaccttttaaaacttataccatagttcctatgtgttgttttatgatgataggtcaaaatattattgatatattcatttaacctctaaaccagcagtgttcaatggatataatgtatgtcacaaaatgcatgccgcatatgtaattttaaattttcaagc

SEQ ID NO: 496784 - DNA, 661 bp, Homo sapiens
atacaagggctttactcttcaagtactctaattttttttaaaggagtttagattttttattataatctttcaaatatgttaggtgtgtttctttgcattctcaaacagaatttagtggatgcacccaaatattttcttgatgacttagtcaagcaaatactaatatatgctcttagaccttttgaggtatattcacaagtaaagataaaattctgtaataaatgactttaccttaaagtgctttttaatgtttcctttgggctattcatcaacttttaatagatttcttcccaattattttttctttttgatgtatttttcaatgttaatagttcacttggtctttttctcttcctatggggtaggaaataatataaccatacctgttatggttaacagaaaaaaaaaaaaaaagtactggggctatgaaaaggcctgcctgtgagttatgtgtaagagatgttgtgtatcagtcttatgatagaaacttcaacttttcagagaccttttaaaacttataccatagttcctatgtgttgttttatgatgataggtcaaaatattattgatatattcatttaacctctwaaccagcagtgttcaatggatataatgtatgtcacaaaatgcatgccgcatatgtaattttaaattttcaagc

SEQ ID NO: 496785 - DNA, 610 bp, Homo sapiens
tgctgactgtgcaagtgggattagaactcagtttggtctgactccagagcctattctacttttattttactacctagtaggaagctcaagatctaacggaattttttcttccttgtccattttatattcttttgtttaatgggttttaggagtctcaattaatttttactaatgttttatattaaaattcaattttatctgcctgcaacatagtagaggtttaataattatttgttggagtttcaattcatgatgattacttccttatgcttttatggatgctaaatgtaatgctagcaccaagacttcatttctgggtgtaatccatctaaactggtgaatattatgcagtctaagtattagagtatatctgaggcaagcaaatttcagagtaatggtgaaagttgtaatctgttttaaaagctgaaaatcttagaatctacatttatttcagtacagggcactttaccttgtcacagaaactttcagctcatcttaacgaggactttattatttcttttrtaacctacatgtcaccacacccccaccccaccaattaaataaattttatatcattttatcagggtgaatgtgataacactttttcttg

SEQ ID NO: 496786 - DNA, 259 bp, Homo sapiens
atggtatacacttaaagtaccatgttcattcttagctggggcagttgtattcctttaaatttagaattaactgcaattgattgttttcctccaaagagaaaaaaatgtacaagaaaaaaaaataacctataagaaaacaaaattaaaattctaaggtaacaatacctataagaaaacaaaattaaaattctaaagtaacaatttggtcggtaaaatcygtattatcatttaaaaaatatttttattgtaccctgctctt

SEQ ID NO: 496787 - DNA, 603 bp, Homo sapiens
aattttgttttttatttatttttttctaattcaaatgagcttaaatrttaactattagccaccgttaatattacttaagggtgctattactcagtttgcattttcatctctacctcaatccaggtgaaacattcataaagtatttctcaaaaatacagcaacaaaaatatcatagtctctttaacagaatttagggtcattatgaggttcaactgtttcattttcaactttatataattgttaaacttttgaattctgccaatagtcaagctgtttacagaagtacacactgtaacataatttgctatttttaaaagaataatttatgatacctttcaagtgagggctgtgtacctgcattctttgcagatgtagatttattggaacaaattctaatgttttctctcctttgctgctgcttgatttgaaagaggaccctgatggaaaccagaaattaaacattattagtaaataatgataaattaatatgtgtgttaaaagataaatttgacagaaaaatgttaaaataacttcagaaagaaaaacatatcctatatttatgagttgcttttcttttacaaattcaatatttttaaaaattgt

SEQ ID NO: 496788 - DNA, 634 bp, Homo sapiens
cactttgagtaagtagagtaattgcttccacacctgtttccttgctaagttctgtcagaatgtcttggtacatattcaccatttgatcacagtgagtaaggacattttttcgcagattgtcccaatgtggagaaagctcaccaagttcttttatctcctggtttctgttaagagtggaagagaagagaaactttatttttatcwtaaatccataaacgcataacccttagtcagagttgtcaagataataagaaattatttcatcctaattcccaggaaagttctatgagcttattagcttaaatattttttaaaaattattttagcacaaaaaaatatgaatagcttaaccacacaaataaaaacattatgtcaaagggcaaaaaattagaaatgttaaattccctgataaatttttcacaaagatggcagacttcctattcttatatacatagggaagacatttagttaaaaagcaaattgtaaaacctctatgtaaagatggctaagtttttaagtttcaactgtacaaaatcaaagaatgtggaaagggctacctgaccatgttggaagcaaacatgagatacttagtcaattcagtttatatataatatagttacaaatatttttttaa

SEQ ID NO: 496789 - DNA, 578 bp, Homo sapiens
ctaagtaataagctaaactataataacagttattatcattgagatttcctgtgcattcaagatgtcaccattcagccacttttaatattgaatgtgttttggttatctttctaataatagctataaattagtttgaatccattcataccatctaaaatagtcctgctcttttgtgaagaagagcacggatttaaagagaaataaccacagaaataagagatatctttgcacatggaagagagcattagtctccttagaagcagggtgccrtagccagatgcaggctgttaaacaagggaagctgtggacatatgtatatttttaaaataaaattttatctatgtgtatattttaatgtaaagtgtttttaaaggccctttagccaaactacaagggttagtacctcagagatcagcattataatggaaaatgtatatgtggtgagttttcctttttccaccatgcctgttttcaagtatttcagcaaagtccgagttgacagtgatatactcctataaggtgtaaatttacatgaatgggaaaagttatcagatgcaacaagaaaaatcaaccttttt

SEQ ID NO: 496790 - DNA, 578 bp, Homo sapiens
ctaagtaataagctaaactataataacagttattatcattgagatttcctgtgcattcaagatgtcaccattcagccacttttaatattgaatgtgttttggttatctttctaataatagctataaattagtttgaatccattcataccatctaaaatagtcctgctcttttgtgaagaagagcacggatttaaagagaaataaccacagaaataagagatatctttgcacatggaagagagcattagtctccttagaagcagggtgccatagccagatgcaggctgttaaacaagggaagctgtggacatatgtatatttttaaaataaaattttatctatgtgtatattttaatgtaaagtgtttttaaaggccctttagccaaactacaagggttagtacctcagagatcagcattataatggaaaatgtatrtgtggtgagttttcctttttccaccatgcctgttttcaagtatttcagcaaagtccgagttgacagtgatatactcctataaggtgtaaatttacatgaatgggaaaagttatcagatgcaacaagaaaaatcaaccttttt

SEQ ID NO: 496791 - DNA, 623 bp, Homo sapiens
tgggcttccctttgttagttcttgccaggcccaacccaatgtcatagataagctggtgacytgtagatggccatttgtaagctacttcctcctcatttggtaaaacagatcagaatgctccccaacgttatttgtaaagtctgcccaatgttcagaaattgaatggccaacatgcactcagatcagggattatttttaacattactgtctgctcacaggtacacacacatgtatatacactcactctaaagaaagctaatgttttaagctaaatatggtaccactcttctgaaatgtataagacctgcagagcaatatactgtagtcatttcctgatatagaatgagagccaaaaaatacattcttctaagaactaaattctgtgcctgcctgcattcccactatgatactttagtgcacccatgttaccattaaaaatttttaaactaccacctcaaatatccttatagccaaactactactattgaaaagaaatgtgttcaattattattgcttttccctccctcagagatgagaagccaactgatccaaaatcaatggctcagatctccactgtggcaagcagaagcaagttcaaagccttttcatttatactccaaatt

SEQ ID NO: 496792 - DNA, 259 bp, Homo sapiens
tccattggtagtggcaaagacaaaaaattgaaagggtcaaatcggacacttatatgcccacatgtcttgcattttacttgagatcttagctgcccatggaacaaatccacaacaattgatctatttcttcttagatggttgtcycaggcctagcaataaaaaagatgagaattttctctcaaaatccaaaagagaagcatttctatataaattcaaagaagctagttaaatatattggatttaaatgtaaagaatataa

SEQ ID NO: 496793 - DNA, 258 bp, Homo sapiens
caaaaaattgaaagggtcaaatcggacacttatatgcccacatgtcttgcattttacttgagatcttagctgcccatggaacaaatccacaacaattgatctatttcttcttagatggttgtcccaggcctagcaataaaaaagatgagaattttctctcaaaatccaaaagagargcatttctatataaattcaaagaagctagttaaatatattggatttaaatgtaaagaatataatccttactcttcatttaac

SEQ ID NO: 496794 - DNA, 258 bp, Homo sapiens
caaaaaattgaaagggtcaaatcggacacttatatgcccacatgtcttgcattttacttgagatcttagctgcccatggaacaaatccacaacaattgatctatttcttcttagatggttgtcccaggcctagcaataaaaaagatgagaattttctctcaaaatccaaaagagaagcatttctatataaattcaaagaarctagttaaatatattggatttaaatgtaaagaatataatccttactcttcatttaac

SEQ ID NO: 496795 - DNA, 572 bp, Homo sapiens
tcgtgcaggctgccgtgtcttaaaactccagggggcgcctataccgacagggccttgtgaacggtgcccccagcgtggtgcaaccctgaggctctgagcttgtgtgtgtgttggggtgggaagaggcaaggaagctagtggctccatgggcatggaggcatgctccctgctctgggcctcrgttcatccatctgcagaaggggctacccttggtccccccatctaattgggcaaggctgtcccgggctcctgctgtccccggtgacctcagaaggaaggccaggcctctctgaggttggggaactgttcctgcacctcgcactacacatgtcctagccgctctgtttgtttatctgagagggacaaaggcattctttcccccagggacaaaggacgatgtccaaggcccagggaggggcttcctttggagaagagctgcgggacagaagagtcagttccttccgcagagccctcggctggacacgtgggaggctcctcaggttgttccaagtgtcagctgcggcaaggcctggaggacaggaagagggcagcggagcaggacacagggaagg

SEQ ID NO: 496796 - DNA, 585 bp, Homo sapiens
tgctctacttgggagcctggctctgttaggaaggtgcgggcaaccctgttcccccgccctaggattgaaccaggatgaagacatatccaggaaagccgctgtggccagcctgagcgtaagagagactgcgactccctgcccagtggaaatacactatactgcaagatgccaaaatgagccacttgaatcctttttttcgggaagtcaaaagtacggtgaggcatgagaagaaggatctccagctccaagttgttctccctcttgtggctgaacacactgttaccakatgcttatgaaaccatttgcatatggtacaagcccatgtgggagaaatgagagctctgacaacttctacctgtcttctgtcctctcctgacaatgcatctccatcactaatagtggcctctgggttttactttcttctgtgcacaaagaaaacaactggtggcacctgtacatagagaattccagaggcaggaaactctccttacttttggacagtgcacagcaaagagaatgtagttggaagttcagccaacctggattgcaagccacctggagcaacatggccttacatgagtcaca

SEQ ID NO: 496797 - DNA, 492 bp, Homo sapiens
ctcagaatacaaaaatgattttcctccataagagtttcttttcattagtttgcttcaaggtatttgatgttgaccgtgatggagttctctccagggttgaactgagagacatggtggttgcacttttagaagtctggaaggacaaccgcactgatgatattcctgtaagttatgattgtgtatgtcttgttgcgtataaacttccaatgggaaattggagggaatcattttctttaaaagcataaaataatttgttactgcttttagttactacattawgctactcaaaatatttatagctgaagatgcaaaattggaaagagagtttggcttagaaaatcttaaactgaactatgtaaaataagaatgaaaccataggaaagttatcttaatttttaatcatatatgagaatctatggtaattataaaaatacttgagcaaggccgggcgcagtagttcttgcctggaatctccgcactttgggaagccag

SEQ ID NO: 496798 - DNA, 513 bp, Homo sapiens
tattttaagaaattggcttatgtgattgtggaggctagtaagtccaaaatctgcaggatagaccagcaagctggagacccaggaaagaatgaaygttgcagctcaagtctaaggcagtctgctgccagattccctcttcctcaggagagaaagatgttaggagaggtcagtctttccatccccccaccattaagggcttcacctgatgaaatgaggcccacctagattatggaggttaatctgcttcactcaaagtctactaatttacatgttaatatcatcttaaaaattccttcacagcagaattcaaaatagtgtttgaccaaatatctggaccttaacatgtaaaattaataattacagagggacagattatggaagacaaagaacaaatttttttttaccaggtaaagaattagattcattaattttaggtaaactgaaattatcctaaattacttttaattcaaaccaaaagacaaggagagataatgtagaattgtctggtaaaca

SEQ ID NO: 496799 - DNA, 513 bp, Homo sapiens
tattttaagaaattggcttatgtgattgtggaggctagtaagtccaaaatctgcaggatagaccagcaagctggagacccaggaaagaatgaacgttgcagctcaagtctaaggcagtctgctgccagattccctcttcctcaggagagaaagatgttaggagaggtcagtctttccatccccccaccattaagggcttcacctgatgaaatgaggcccacctagattatggaggttaatctgcttcactcaaagkctactaatttacatgttaatatcatcttaaaaattccttcacagcagaattcaaaatagtgtttgaccaaatatctggaccttaacatgtaaaattaataattacagagggacagattatggaagacaaagaacaaatttttttttaccaggtaaagaattagattcattaattttaggtaaactgaaattatcctaaattacttttaattcaaaccaaaagacaaggagagataatgtagaattgtctggtaaaca

SEQ ID NO: 496800 - DNA, 513 bp, Homo sapiens
tattttaagaaattggcttatgtgattgtggaggctagtaagtccaaaatctgcaggatagaccagcaagctggagacccaggaaagaatgaacgttgcagctcaagtctaaggcagtctgctgccagattccctcttcctcaggagagaaagatgttaggagaggtcagtctttccatccccccaccattaagggcttcacctgatgaaatgaggcccacctagattatggaggttaatctgcttcactcaaagtctactaatttacatgttaatatcatcttaaaaattccttcacagcagaattcaaaatagtgtttgaccaaatatctggaccttaacatgtaaaattaataattacagagggacagattatggaagacaaagaacaaatttttttttaccaggtaaagaattagattcattaattttaggtaaactgaaattatcctaaattacttttaattcaaaccaaaasacaaggagagataatgtagaattgtctggtaaaca

SEQ ID NO: 496801 - DNA, 658 bp, Homo sapiens
gtattcttgtcatgtttccattcttactggaaatgcctccagtgtttctccatcaaatagtatactggctctaagactaatttaaaggacaagatggccaactagacacagccaggaagcactgttcctacccccaaaagaccaaagtttcaagtaaaccaacataacttggacagatcttcraagcgaaaatgcccagtggatgaagatgtgatgcagatgtggaggctgaggaggtaggaagctgggaaccttgttcagggtaggccaatgcttgagccaatcctgacctcaagtggctcctgggaatgggtgaatgaagaactgcaggactgcctaccctagccatggaccgctgggatcctggctatgggggccccacatctgccatggacatttgagctggcagaaggatccttccagagagtagacagagatggagctccagccagcatggaagcatgggcctttgtgcacagtgaggctgtgtccaaacatggacatagccacctattccccagggctccccactcaccgtctgagaagctctagctccagttgaccaccaggctaggaggaagctgggctgatttctctgtgggactggtacgtgtctgttctttaggccctcttgcccaccagcccctccaagggccac

SEQ ID NO: 496802 - DNA, 658 bp, Homo sapiens
gtattcttgtcatgtttccattcttactggaaatgcctccagtgtttctccatcaaatagtatactggctctaagactaatttaaaggacaagatggccaactagacacagccaggaagcactgttcctacccccaaaagaccaaagtttcaagtaaaccaacataacttggacagatcttcgaagmgaaaatgcccagtggatgaagatgtgatgcagatgtggaggctgaggaggtaggaagctgggaaccttgttcagggtaggccaatgcttgagccaatcctgacctcaagtggctcctgggaatgggtgaatgaagaactgcaggactgcctaccctagccatggaccgctgggatcctggctatgggggccccacatctgccatggacatttgagctggcagaaggatccttccagagagtagacagagatggagctccagccagcatggaagcatgggcctttgtgcacagtgaggctgtgtccaaacatggacatagccacctattccccagggctccccactcaccgtctgagaagctctagctccagttgaccaccaggctaggaggaagctgggctgatttctctgtgggactggtacgtgtctgttctttaggccctcttgcccaccagcccctccaagggccac

SEQ ID NO: 496803 - DNA, 612 bp, Homo sapiens
agacctgcttgtgtaattatttttaaaaagaaaacaggtttgtttccttgtgttgagaattattcaacatggaaagtgctacctaaaagaagagagagctcattgactccatttgttctaaaaaacaaacmaacaagcaacaaaaaaccctatatattttatacaagtagaaaccctatatattttatacaagtagaaataactagcaatatatttctatagggagaaataagccagcatattttcaacgttcttaagatttcatttctaaagcaaataaaacaaggcaaagccaatattgtaaaaaaaaaaaaaaaaaattaaacctaagtctacatgaacttagctgggtaccagttgagatatttgaagtttatctaccctgtagtcctcacatttaaaatttttctcaatagttgaatgtaagttatttacttctggattgaacaataaaatgtaaatggaggtttccaggaagatgaattgagtgtgccatactgcctgcctctgtaggctccacctctgggggcagggcacagacaaacaaaaagacagcagtaacctctgcagacttaaatgtccctgtctgacagctttgaagagagcagtggt

SEQ ID NO: 496804 - DNA, 612 bp, Homo sapiens
agacctgcttgtgtaattatttttaaaaagaaaacaggtttgtttccttgtgttgagaattattcaacatggaaagtgctacctaaaagaagagagagctcattgactccatttgttctaaaaaacaaaccaacaagcaacaaaaaaccctatatattttatacaagtagaaaccctatatattttatacaagtagaaataactagcaatatatttctatagggagaaataagccagcatattttcaacgttcttaagatttcatttctaaagcaaataaaacaaggcaaagccaatattgtaaaaaaaaaaaaaaaaaattaaacctaagtctacatgaacttagctgggtaccagttgagatatttgaagtttatctaccctgtagtcctcacatttaaaatttttctcaatagttgaatgtaagttatttacttctggattgaacaataaaatgtaaatggaggtttccaggaagatgaattgagtgtgccatactgcctgcctctgtaggctccacctctgggggcagggcacagacaaacaaaaagacagcagtaacctctgcagacttaaatgtccctgtctgacagctttgargagagcagtggt

SEQ ID NO: 496805 - DNA, 708 bp, Homo sapiens
catgacaaaagacaatagcagtcattgtgaaaattcaggcttctagtgacttggacaatctggaaaaggcataattattaattagaaaactcacattgtattaatgtttactgagcactatatttgtatatataagatgtctcctcgctcttggaacatcatgttttcttttcttttcttttcttttttttttttttttttgagacagagtctcgctctgtcacccaggctggagtgcagtggcgtgatcttggctcactgcaagctcctcctcccgggttcacgacattctcctgcctcagcctcccgattagctrggactacaggcccccgccaccgtgcctggctaattttttgtattttttagtggagacggggtttcaccctgttagccaggatggtctctatctcctgacctcgtgatccgcccacgttggcctcccaaagtgctgggattacaggtgtgagccaccacgcccggccagaatatcatattttcctactgttttccactccatttggcaaaagcctacaattctttgtcactgtattctactcagtgtctaattcacaataattgtcattaagataagtggacggctgatattctatttaatttgaacccaaagaaaaagaaagtggtaaagaaacacttcaaagaaagctttctaaggcatatttctgagtagctcctgttgtgtatgcaca

SEQ ID NO: 496806 - DNA, 580 bp, Homo sapiens
aggtcaatcaatttcttgggaaaagaagctaactagattataaaatgggatccctcctcaaaaggcagctcattcatgataactctctaaatggttgtatgaaaagataaaaataattaagtttcatcctggaccttttgatgctaacattaaaaggacagcactgtcttctcacaaaaatcccttatttttcttcttaccaatagaaatccatgatgagtgagcttgtctcattrtggcaattcctataataacagataacaactagtaacaaatgtctctgagtcaaatctctcttctgaccagccacactgaatgagataatttgtcatttcaatttaagtgtttgtgtgatgatgagaatactgaaaatgtgacttttaaagcacttgatgatactttgaattctttagtttttgtagttttggtccaaatttgcttgctttatttcctcataggtaatgaaaatataaatccttagcctaacacttttgcaaattatttcaaaatgagaataaatgaagtttaaattcattgtgtcttactcaaattgtttttactcatatggttgagtttcaaa

SEQ ID NO: 496807 - DNA, 603 bp, Homo sapiens
acccactgtcacttttctgctcttgaatttactcacttgtgcaataggaatatctctcagaatgttatcttcccctccccccctttttttttgactcaagagtctcaatttgttacccaggataaagtgcaatagtacaatcatagctcatcgaagcctctacctcctgtgctcaagtgatcctcccacctcagtctcctgggtagctgagactacaagcatatgccaccacacccagataatgaaaaagcaataccctagagatagggtcagttgcccaggcgtcataagttttaaagacaggttaaaaaattgctttgagttccaaagtcycttagaccagttatttcaaactctgtaactgaattgttttcctaattgttctagataagtttgcttctcccaaacaccaagaaggcaaggacaccaccattgggaaatgccccacatctaggcatgataagctacccaccacaccatggctttgttgttctcattagcaatggctaatgagcaaggctctttaaaagatgcaccctttttgtctgaccttgtctgctcgacactggcctcagatgagcctacactcaagatccaccccac

SEQ ID NO: 496808 - DNA, 491 bp, Homo sapiens
ttacccaggataaagtgcaatagtacaatcatagctcatcgaagcctctacctcctgtgctcaagtgatcctcccacctcagtctcctgggtagctgagactacaagcatatgccaccacacccagataatgaaaaagcaataccctagagatagggtcagttgcccaggcgtcataagttttaaagacaggttaaaaaattgctttgagttccaaagtcccttagaccagttatttcaaactctgtaactgaattgttttcctaattgttctagataagtttgcttctcccaaacrccaagaaggcaaggacaccaccattgggaaatgccccacatctaggcatgataagctacccaccacaccatggctttgttgttctcattagcaatggctaatgagcaaggctctttaaaagatgcaccctttttgtctgaccttgtctgctcgacactggcctcagatgagcctacactcaagatccaccccac

SEQ ID NO: 496809 - DNA, 357 bp, Homo sapiens
ctctacttttgtgtgggtccaggaatatgtccattgaccacccttaaataagccctcaagccccagatgacttagaaatctctccctgagatgaaaacaggatcttgtgtgtgattggttttagagttgaagagcttgggcctaggatcccacactcgcccttyatatgcctgtgctgcgtgcttcgaggacttccctctgcaaggatggtgatgctttcctagaacttatgcagaggatgaccctagggggcagcatttctacatctaagtgttggtctctgccacggtcacattctgtgttttgtaggcatctcttagaaatctattttaaaagattcttttcctggtcccttct

SEQ ID NO: 496810 - DNA, 357 bp, Homo sapiens
ctctacttttgtgtgggtccaggaatatgtccattgaccacccttaaataagccctcaagccccagatgacttagaaatctctccctgagatgaaaacaggatcttgtgtgtgattggttttagagttgaagagcttgggcctaggatcccacactcgcccttcatatgcctgtgctgcgtgcttcgaggacttccctctgcaaggatggtgatgctttcctagaacttatgcagaggatgaccctagggggcagcatttctacatctaagtgttggtctctgccacggtcacattctgtgttttgtaggcatctcttaraaatctattttaaaagattcttttcctggtcccttct

SEQ ID NO: 496811 - DNA, 515 bp, Homo sapiens
cttatacccggagtaatgcaaaagctttcaactgcttttcctgcttttgcccctgctagctacaatttacctcccacatggtggccaaagccatcgttctaaaacaatttcccatgttcctctgcgcaaaatctcccactgaccttccatctcagcagccactggcctcagccatctratctcctctggaccctcatttcctatctccctctcctttgttcccttctccccagccaccctcacctccctgctggtcctcaaacacaacaagcatatcccaatcttggtgtccttgcacatctgatttctgctggccagcacactcttaagcccccatctgttgatgtatgtcactctctgatttcactcaggtcaacaactaacctccctagagggctcttctctgacactctctgtgaaggagcatggccctcttttttgtctgtctcattctttggactcttccctgcacttacaggtagctgtcatcacactacatatttatttgcaaatta

SEQ ID NO: 496812 - DNA, 638 bp, Homo sapiens
cattcctttgctgaatatttaatcgtttgttttttcatatttatttatagggattattttaaaattctgcatatgaatcctttctgttgtttagcaaatatctttgcccagtggatgacttaccttttaactttgttcctgatgtcttttgttgagcaaaagtctttcattttaatgttatcagattwtcggtattttattcaatggtttgtgctttttgaatcattttaaggagatccttccctacaaatcaataagaaaaatacaaacaccacaataaaaataaaagtgtttataaaaacagacataacaggcagttcacagaggcaaaaacaccagtggcttatagacttaagaaatctcattagtaatcaataaaatgcaaaataaatctatactatgatatatacatttagtacttagaatgctggcatatatttaaaggcctgacaatgccaagtattggtgaacatacgaaacaataagaactctatgtaacctcagcactttgggaggccgaggccagcagatcacttgaggtcaggagttcgagaccagcctggccaatgtggcaaaaccccgtctctactaaaaatactaaaaattagccgagtttgatggcacacacttgtaatcgc

SEQ ID NO: 496813 - DNA, 589 bp, Homo sapiens
ctgtttgagtagtatccacaagagagtgggcattcctcactgggtagaaccatgcagaactctgattcccctgccaagtggtatcaaaaaaggctcagcaactagctgatcttttggccagcagagccagtcaatggtgattcctctgctggggtagtgtcagcasggctcagtgggaaggtaatcatcaattccctaagtggaagacacaggcacgattccaattcctccaccagggttctttctgtgggatccaatgacaagttgaacctaaatccctacccagtagcaacagggctcaatgaggcagaatgaggcagggttagtcaccattaggcttcacctcttgcctctggtgtcagagagacccagtggggagctgaatctctatacccacccagcatcattacaactgaacaaggtgattcaagttagggcttgtagggatcccacttcctgccatccatggggtcagcaatgctcaatgagaagcttgacctccacatccactggcaaagccaagactaaatgaggtagggcaaagagcgcctagtcagtactttgtcccccttctcccatgagcctgtgt

SEQ ID NO: 496814 - DNA, 589 bp, Homo sapiens
ctgtttgagtagtatccacaagagagtgggcattcctcactgggtagaaccatgcagaactctgattcccctgccaagtggtatcaaaaaaggctcagcaactagctgatcttttggccagcagagccagtcaatggtgattcctctgctggggtagtgtcagcagggctcagtgggaaggtaatcatcaattccctaagtggaagacacaggcacgattccaattcctccaccagggttctttctgtgggatccaatgacaagttgaacctaaatccctacccagtagcaacagggctcaatgaggcagaatgaggcagggttagtcaccattaggcttcacctcttgcctctggtgtcagagagacccagtggggagctgaatctctatacccacccagcatcattacaactgaacaaggtgattcaagttagggcttgtagggatcccacttcctgccatccatggggtcagcaatgctcaatgagaagcttgacctccacatccactggcaaagccaagactaaatgaggtagggcaaagagcgcctagtcagtactttgtcccscttctcccatgagcctgtgt

SEQ ID NO: 496815 - DNA, 602 bp, Homo sapiens
caaaacaacatattatctggtctgtcatagaaactgaaattygcatattattcttccagttggattagaagctatgcattaattaatatgcaaataatatttagaagactgtatcatcatctactaattatgaattagtaataaattagtatattagcttgctctcacttagtcctaaaggaacagcgcataagccaagtacatgtgttctgatcagaatactaatacattaattaatgagtaatctaattataacttggactagaaatactattgtcagtgaagggagtacagattttggtagggtaagaaggaagtaccaagactgggaaaaactgaggacactggggtagtgtggccatgcactgtcaatggaggagaggaaacagaaagaaacactgaaaacatatttttcgttcattgtcttgttctcacatgctgtggagaaatcaaaggactatatctaaattagagaggttataggtaatctctagcgaactgaggggcaactgagtaatcatctggatgaaactacttactgggaaaggtgataaaagcctggcccctcattcgtccagtcatcattcggaattgaattggag

SEQ ID NO: 496816 - DNA, 648 bp, Homo sapiens
  misc_feature (1)...(648): n = A,T,C or G
cagactgttnaatcagtatgattaaagcaaacgtatggttcccaaagacatccctcttacaaaacacatattttgattcatgaacagaatttgattttgagacattttctttattcagaaatgcccaatacccatcatttattccttccttccctcyttattttctttttcttcctaccttcattcttctctttctttttatactgatggataacattgtatgtgttttccatatacatgatgttttgaggatttattcattgcagaatgactaattatagttattaacatatgaattacctcacacagttattctttcatgtgatgaggaccctttacaaccattgttttaacatttttcagtaacacattatgacttacagtcaccatgctgtgcaatatactttttcaacttattccttatatttaactaaaatgttgtatcctttgatcatcatctccccagtatttccccactccagccatcctagcccgtttaccaccattgtactctctgcttctatgagttcaacatttttagatttcacatatgagtgagataatgcagtattgtctgtttatgacttttttcatttaacaaaatatcctccaggttaattcaagccattacaaataacagaatttcct

SEQ ID NO: 496817 - DNA, 542 bp, Homo sapiens
atagttcttaagggcctagacttaactgttgatatatttgatcagtgactcaaaatgcccaagcacagcactacctctgaaaagtgatgccttatttaaatttctaatttgataagtracacaatatattgtgatattctattatttgctttaaatgtgttgctcagaaaatgcaaaggaaacatctattaaataaaaaattaaaatcattttgcctaagttgaaagaaacttataaaagaagaaatgagtttaaattaagatgtaacacaagtaaatttcattttgaaattaaaataattttttcattttgtaacttttattttttaaagttttatgggtacatagtaggtatatgtatttatgaggtacatattttgatataggcatatgatgtgtaataatcatatcaggataaaggaggtatccatcacctcaaacatttaccctttgtgttacaaacaatccaattatattcttttagttattttaaaatgtgcaattaaatcatatttactatagtcaccctgtgctgttatcagc

SEQ ID NO: 496818 - DNA, 542 bp, Homo sapiens
atagttcttaagggcctagacttaactgttgatatatttgatcagtgactcaaaatgcccaagcacagcactacctctgaaaagtgatgccttatttaaatttctaatttgataagtgacacaatatattgtgatattytattatttgctttaaatgtgttgctcagaaaatgcaaaggaaacatctattaaataaaaaattaaaatcattttgcctaagttgaaagaaacttataaaagaagaaatgagtttaaattaagatgtaacacaagtaaatttcattttgaaattaaaataattttttcattttgtaacttttattttttaaagttttatgggtacatagtaggtatatgtatttatgaggtacatattttgatataggcatatgatgtgtaataatcatatcaggataaaggaggtatccatcacctcaaacatttaccctttgtgttacaaacaatccaattatattcttttagttattttaaaatgtgcaattaaatcatatttactatagtcaccctgtgctgttatcagc

SEQ ID NO: 496819 - DNA, 470 bp, Homo sapiens
aattacgtagcctgtaactgctagaaaaagtcagaaaactaagctgacaatttgcaactaaaaatcatgtttaaaaacctcaacttcacacacaaaactgcgtagaaacttttttactattacccagtacactgakttttgattctactatttaaagacatatattttgccctaaaatattccagactttaatttcccctatcctcatagaagacttattttttcattgtgaaaacggaagacttggactggaacttatcactcttaccataagataatcttcaaaattacatgtgtatatgtgtgtgtagtgtgtaattcagtctgttactatgtataaaacatccctgctttttataaagcccagtttctccctgagcaaataatgacaagtgaaagaaaaatgcctaataaaagatatttatttctaaaatactcattttagaataagtgtttttggcaagaagctt

SEQ ID NO: 496820 - DNA, 624 bp, Homo sapiens
cagtggtgacactaattgtcagagtaaaaatctgtcaaattagtgtcacataattaatatcactgatgtgcttaaatcagctattttgaaaaggtaatgagttgastataattaaggtttacccccaataactaggaagaggcccagccttctctgaagatatttatgccgcagaaccagtaaatacatttaggattctttaacaaggaagaacgggaaaattactaaacattctgcagtgtttgctacagagggcatgagacactcaggaaattcaaataattcagtatgtttgaaatataaagaagaagattggaaatgaagtgaatggaaaatcaaggtcaagccagatcttgatgggcctttaaagtcaccagtctgagtttagactttctcctgaaggcaatgggaagctattgtaccattgtaagcagggaaatgacacaattcgactggaaataaaagtctggatttattatgaagaatgaatggatgggacaagattaaagacaagagggcataaggaaacataaggcatggctgtcaagtaatgagatggtttccacatgacttgcaaataatattatactagctaacatttactcgaattagctcatgcaacct

SEQ ID NO: 496821 - DNA, 627 bp, Homo sapiens
agtgatttcatatggtgttacttgctcctatgattttcaaagatttatagataatctaatgtactcttattagacaatttaacttaacaaatttaaaggaggaactgtttttgtaaattcttgtagaccattaataccattcacaacatttcatccccagattatttgagactttgggaacatgagattctatgtgggtaaattttctaatttagcttctaatattttatctattgtacaaaagtgaaaatatgtgattcaattaaggggtagcttcaatttatayagccttaataaaattagatttaatgaattaaaaagtggcttacatctcaatttgttacaatatttagcttgttactttaatatggactaagatgttcagagctgtgaatttgtcattaatttccccaacatcccagtgaggaaaagtcagatcatatccatcttactgatggggaaattgggtcatataatgctaaaatgttttgttacgtgtcctacaactgtttagtatcaaatttaggaatagatttctccactaactggaagtgaactcattgaaaaatgacatttttgattatgtgttctgcatgttccaatgagaaaatgcttgcaatttaaact

SEQ ID NO: 496822 - DNA, 604 bp, Homo sapiens
aaaaaccataataacttttgaaccaatctaatatttatagtactttcgataggcatatgttttctaatcttayttttaaaagtagactagcccaaattttctctttaaaaagcccctgaaatcacatcactctttacatgtatggtccttgattgcctgtgggtatgttgttcaccctggcatttggctgttctgattgagcttctctgcatggctacatctcctgaaacacatcacaattcaccatggaaacaaatgagtagtaatgatggttatgtttcagccccaaaattgctccaaacaaccaggccatggcatcttgttttcctcagaatttaaggaaaatgaataaaacagcattagtgttacactaagcatgctgtagctttaagcatgtcgtgattctgtaatgcctgacaaaaggctaatacctgactcatttcactggaaaattcagtattttagcaaaacagattcatctaaatgtggcctgaaactacaaaggaactgaaaaaccaagaagcagcccctttcagttgtgaagtacagatgcctttgctttttcattggcaagggcaatagtttttgccattagatattttat

SEQ ID NO: 496823 - DNA, 603 bp, Homo sapiens
cacaatcatttgtctccctggctacacgaggaattgccatatgtgccatgctttcctttaggtagtttagtcctcacctcataaacattggcatggccacaggtttgccttagtcaacgaattataagtggacatgatgcatgccacaccaatgtagaaaccctagatgtgttggcatggtttttcttggcatccctttgagcttcttccctcagttatgagaatggcatgccctagttactggatattcctttagcctggcttctggagtgagaatacacatgcttytaggtcaagcccaggcaagcccaacagagctgcagcagactcacagctctcatgaaacatgagcacacatgtttgtgtgagtcactgaaatgttcaggtggtatgttaccttagcaaaaactaatctctacactcactgaagtacatgctctgaggctcaggaatttgtgttttaaaaagttctttatgtgattctggtaataagtcaagtttaggaaccactcttctggactacctacaccacctattctccttcctgccacctgcccatgtgaacagggcttgactaatgcttccaccgttcctataactcag

SEQ ID NO: 496824 - DNA, 577 bp, Homo sapiens
cgcagttgctcacgcctataatcccagaactttgggaggccgaggtgggtggatcacctaaggttgggagttcaagaccagcctggccaacatggtgaaaccccatctctactraaaatacaaaaattagctgggcatggtggcgcatgcctgtaatcccagttactcaggaggctgaggcaggagaatcgcttgaaccgggaggcggaggtcgcagtgagccaagatcacgccactgcacgtcagcctaagtggcagagtgagactgtgtcaaagataaaataaaaaataaataggctggcgcaagaatgtgtgtgattaaccactagagcaagcttgtccaactgtggtccaggacagctttgaatttggcccaacacaaattttaaactttcttaaaacactattagacttttttacaattttttttttttagctcatcagctattgttagtgttagcgtattttatgtgtggcccaagacaattcttcttcttccaatgcagcccaggaaagccaaaagattggataccccttcactagaggcactgcctctctttcctcactccctccctac

SEQ ID NO: 496825 - DNA, 577 bp, Homo sapiens
cgcagttgctcacgcctataatcccagaactttgggaggccgaggtgggtggatcacctaaggttgggagttcaagaccagcctggccaacatggtgaaaccccatctctactgaaaatacaaaaattagctgggcatggtggcgcatgcctgtaatcccagttactcaggaggctgaggcaggagaatcgcttgaaccgggaggcggaggtcgcagygagccaagatcacgccactgcacgtcagcctaagtggcagagtgagactgtgtcaaagataaaataaaaaataaataggctggcgcaagaatgtgtgtgattaaccactagagcaagcttgtccaactgtggtccaggacagctttgaatttggcccaacacaaattttaaactttcttaaaacactattagacttttttacaattttttttttttagctcatcagctattgttagtgttagcgtattttatgtgtggcccaagacaattcttcttcttccaatgcagcccaggaaagccaaaagattggataccccttcactagaggcactgcctctctttcctcactccctccctac

SEQ ID NO: 496826 - DNA, 237 bp, Homo sapiens
  misc_feature (1)...(237): n = A,T,C or G
ggcaaactaaagctctagttgttttgtcattaaagaaaaatgaaaatatatcaactaacaactaattaggcrttgaaataataataaaaattggtgggggcccaacagtgaaataaaattagaccagtccaaatgaaagcattgcttaagaatataaatttcaatataatagaaattaatgccaccagcctgagtactagttataagtcaagcattattactacagnnnnnnnnnnn

SEQ ID NO: 496827 - DNA, 621 bp, Homo sapiens
tgtcaatgtacctggacagacttttgtcacaaaccactgtctgctctataggcccaacagagtatgttccaggccaytatatgttcttcaagcccactgaatccccctaaaaatcatttactacccccctaaaatcatctacatctatctccattttccctaagaagtagggtatagaagcatctgtatcccactgggatattgggtatcactctatgatcttcccctgtgaatgctaatgaatttgtatgctttttgtcctattaatctgcctttgtcagttgattttttttcagagaactttcagaggacaaaggggaagttcctttggcccctatagggggcttaggaggaagttagggctggagatataaattgaggagtcatcaacatataattcatcatttcagttttatactctgcctatgtaccgcagagactgtttagagaatagatgaaagatcagaaatagtattcaaatttcctagattaggtttttttttttttttttttttttgctaaaccttctcttttcttagttattccttcattccgtgtataaaattagtatttacattttcagtcaaaatcctttgaggaatgagagagaaggggtaaaga

SEQ ID NO: 496828 - DNA, 629 bp, Homo sapiens
cttgggaggctgaggtgggaggaacacttgagcttgggtggttgaggctgcagtgagctatgatcacaccactgcactccagcctaggccacacagtaagaccctgcctcagacaaacaaaggcatgtggtgtgcagtatccttgaaacttagggtacagagattcctagagtgtgttgcatacacaggaagcccaaggagccctgatgcaagtgggccaaggaccatactttgagcaccactggtgtagtgaacacaggcaatggagacagacccagctctccctctagctctgttagctgtgtgatcatggtccagataactcaatttctscagccttccatttccgcatttgtgaagtggaggtaatactacttcatcaggacgtggtgaggattagctgagagacagcacgtggaggtctccattagggcccggcacagaataagcatatagtatatgcaggagggaggcctaaattgtgaacccacaggaattgctgcctctccctaatttccttcacgaaggctttaattctgcatttcagccagtcacatgcaaatgttaggctggttggcccaagatgcctatcagtgatacctgaaagtatcataacttgttgttgggtc

SEQ ID NO: 496829 - DNA, 641 bp, Homo sapiens
taaaaatctaccaaaaaattacatgttattgtatttaatattaaaatgctaaaagcttcttccttgagatcagtactgtatatggtatgactttatttgcataaaatacaaaacaggcaaagttaacttatctgtattacaatccagaatagtagttaccctattctggattcaggaaggaaatagtagaaagactcctggggtgctggtaatgtctgtttcttgatctgatgtggctataaagttatattcactttttgaaaattcattgatctgttcacttataatgcatgtaattttctgtatgtttacattaacaaaagattaatttaaaaacatgctgatagaaattttaaaatccaacttgtatttcaaataactagctttctctcaggagataataggttggaggatttttcaatgttcagacagttctttgccagcatgttgacccagccttggcaagggctaaatgatggataccttgggggcccatttatagaatttgagctccccagacaatgctcagaaaccagacaggtctttcatcrgctttcccatagctaagtgagcttttccaacacattttccaggcctcagataatgcaattctatttcaggaaactttcttagtgtgtgca

SEQ ID NO: 496830 - DNA, 607 bp, Homo sapiens
gggtagacagacatatttcccactctgtagaatataactataataaaaacatattgttgtaagtgctataatagaggtrtgacatgccacatgtagtgggacagttgggaagcagaaaaaaattattcccactgggggcatgtgggaggaccttacaaagatcctaccatctttctctctgtaagagagaaagtggcatttgcacaggaccttcaaagatagtaggaatttagtggagagatgagcattcagtgaacgcaacagagcacatggcttgttagaaatcacaattaatttggtatatttgaaacagatgaaactttcagggggagccataacaaagattttaaaaaaggggcatttagagttgatcacagaggacatgagtacgcagatgaggaatttgtgttttatcccatatgtagtagcaaactgaagacatttgagcaggggatttatatgttcagctcttttctttagaaagagttttgtcagtagcctttaagatggaatggagagatgggaggctagaaaaccaggtagggaactttggaatcaatggctgaagttttgtcttcttttttagagacagaatgaagctgaaagg

SEQ ID NO: 496831 - DNA, 464 bp, Homo sapiens
ccgctcctatatttctgctgtytgatctggatttagacatgggactgtgcactcagagagaaagagaactgggaagtctagatttagccagggaaaggtgaggctgggctcaggtctgagtgcattctgcattacctcttctctactagtcctcagtaaaaataagagatacagattggaaagtttctgagttgattttacattcaaatatgatgcacatgtagttataaaaatggctatttgttcaggtagagcagatctgaaagaaaaaatgatagtatgaaatggaggagtaaaacacactccctatgatggaacagcagtgagcttttaaaggtccagagctaccccaatttgattgtagaggctgtgcagtgtgcaacctaaacaactgtacattatgatcttgaatgggtctgaaatcccgttcgtatgcttacgtccacaaatgtcaaaggcacacc

SEQ ID NO: 496832 - DNA, 624 bp, Homo sapiens
acctgccatatcttgctagtgagacccaggtcccatcagacatcagattgcaatctaagatggagctagaagcttgaatatctctcctgggtgttctgacacactcattctccagcttgacttaaaaagaagagcttttttctccccttatggcatttttattctcataggaatcagtaagtagaaacctatttgtaaagtaatgggtaaaatgattactggsgttttttaaatgctctttctgatgtttccatttttatttaactcaacagtggcagatatactgacagccacacttattcatgatccagagaaatctttgcttaatactgtattaagcactattgagaaggaacacccctcggatggctttctccaggtgttcaggaccttcgctatcctccctccacaggggctgacaatacttcagcaaagttggctgttgaggatggaatttcattttgggcagagcaatgtctcaggataggcttgggagtctgccttccttagataaatgggcctaaagatggcaagatcatcttcccagcattgactgccacagcacatatgttaggaacagactttattctgactggggaaaggccactgaatgagcccttttta

SEQ ID NO: 496833 - DNA, 284 bp, Homo sapiens
agtatatctgccactgttgagttaaataaaaatggaaacatcagaaagagcatttaaaaaaccccagtaatcattttacccattactttacaaataggtgtctacttactgattcctatgagaataaaaatgccataaggggagaaaaaagctcttctttttaagtcaagctggagaatgagtgtgtcasaacacccacgagagatattcaagcttctagctccatcttagattgcaatctgatgtctgatgggacctgggtctcactatcaagatatggcagg

SEQ ID NO: 496834 - DNA, 284 bp, Homo sapiens
agtatatctgccactgttgagttaaataaaaatggaaacatcagaaagagcatttaaaaaaccccagtaatcattttacccattactttacaaataggtgtctacttactgattcctatgagaataaaaatgccataaggggagaaaaaagctcttctttttaagtcaagctggagaatgagtgtgtcacaacacccasgagagatattcaagcttctagctccatcttagattgcaatctgatgtctgatgggacctgggtctcactatcaagatatggcagg

SEQ ID NO: 496835 - DNA, 615 bp, Homo sapiens
tgcccctttggagaattcgtcctctgcctggagaactgcatcacctgaaatgcctgggaagtgatggtacccccattctatcttyactgtgggcaggtagaaaggggtggctgcagcccaacccaaggattgactggtacagggaaacaaaaggccagcccttccctcatgctgtggtgtcactcatgctccagacatatatgggatcagcctaagcctggacttcagtggacatgacacctttgcttgatttcctctcctgtcttctctggagacctctcctgagagtgctgtctccatgtgcacttacacaagagtctccatctcaggctttgcttctgggaatgccacccaggatggtcaccttaaatgaaatcatggatttaaaggacctgagagggccaggcacggtggctcacgcctgtaatcccagtgctttgggaggctgagtcaggcagaccgcttgagctcaggagttcaagacaagcctggacaacatggcgaaaccctgtctctacaaaaaatatgaaaattatctgggcatggtggcatgtgcctatagtcctagctactcgggaggctgaggtgtgaggatcacttgaacctgggcaatcc

SEQ ID NO: 496836 - DNA, 615 bp, Homo sapiens
tgcccctttggagaattcgtcctctgcctggagaactgcatcacctgaaatgcctgggaagtgatggtacccccattctatcttcactgtgggcaggtagaaaggggtggctgcagcccaacccaaggattgactggtacagggaaacaaaaggccagcccttccctcatgctgtggtgtcactcatgctccagacatatatgggatcagcctaagcctggacttcagtggacatgacacctttgcttgatttcctctcctgtcttctctggagacctctcctgagagtgctgtctccatgtgcacttacacaagagtctccatctcaggctttgcttctgggaatgccacccaggatggtcaccttaaatgaaatcatggatttaaaggacctgagagggccaggcacggtggctcacgcctgtaatcccagtgctttgggaggctgagtcaggcagaccgcttgagctcaggagttcaagacaagcctggacaacatggygaaaccctgtctctacaaaaaatatgaaaattatctgggcatggtggcatgtgcctatagtcctagctactcgggaggctgaggtgtgaggatcacttgaacctgggcaatcc

SEQ ID NO: 496837 - DNA, 592 bp, Homo sapiens
taggcacattcccattgcatctgcaatgttaccaaataggagttctagggcccttagaaagaatgttctgttgatctgattatagtgctttctatacagtgaataatctcggtgcaataagcactttctccttcccctaaccagtagtcttgctaacaaaataacttaattgagaaatgcacactgttggggcaagtggattgagttgtggctgaggctccttgtgtatcttttgttgtgcaatcaagtagcacttattcaccgactttgctcatgctgtcccgtctaaacaaaacccacctaatcttccaaatcactttgcaaaacaaaagaacacacagaagatatagaaaccaggaggaccaggcggctgtggagtattttaggcagcactccctctttccctgctagtaaccatgtatatgaaaytgctttagtaattatacatctgttttaaaattggaatcggaaaggatactctttccacaatcctataggaaccctccttggttgttcaaacatttggcaccactgcgtgtctgctgatggtttgccacagtcataggtgaggttctgggcagatactaacagc

SEQ ID NO: 496838 - DNA, 446 bp, Homo sapiens
tgtaggcagccctcccacctcagctgccaagctcttagcagatgaaataaaagtctatttataactggcctctgatggatttcctccctacctgggctagtgctccatcagcaggtgtactgaacagatggagaagggttttaagtttttcagttcaattagatcaactctctaggttctggccagcgcrttccctttctcacttagtttcttcctcttggcattaaaattgttgagcatagcaaaacacaaattaagtccaggagataaaatgcatatagtgcctgcctttaaaaaaagcactttggctcaggaaccatatttgacatcatatgctaaatctgttttaacccttttttacctagtgcttaattttaatgtgttttaaatcaatattagagtactaagatgctaaagagcacaaatgctttctttttttacttttc

SEQ ID NO: 496839 - DNA, 545 bp, Homo sapiens
gaccactgagacacaggcttgtaggcaagtaaacaacgctgggagtctcccaggaagcaatcgcctgtgcctgctggagaagtggcatggacaaacattctggctgatgtgcttttagggccctcgtacaatttcagcccccccccattatagaatcttcaaaagcaactctcacccccgcatctccccaccagcccttctgaataagaaagagtacccagggatgcttgggggtgtttagccttggcctgagaccaccagagatctgggaaaaagaagaaacagrcaggttaagaagcgggtggttaagctgggcaggccagagatgaagggaaaggctacaactgagaaaaacagggcagaatgcaccacgtcagagcggtatagaaggtacagaaggtcagaacgaggtatagactctgctgggggctggggacaggcacagatctcaggaaaggtcaggacaagggcagctttgggcagacgggctgccacgaggactcccgccttgtggggcacaggaggggagagccgtggcatagcat

SEQ ID NO: 496840 - DNA, 475 bp, Homo sapiens
atttgtgaaaattttgaagcaggtctgtattagtccgtttttaagctgctgataaagacaaacmcaagactggggagaaaaggaggtttaatttgacttatggttccacatggctggggagatctcgtgatcatgacggaaggcaaaaggcactttatacatggtagcagcaagagagaatgaggaagaagcaaaagcagaaccccctgataaacccatcagatgttgtgagacttattcactatcacgagaatagcatggaagagaccacccccatgattcaattacctcccgctgggtccgtcccataacacgtgggaattctgggagatacaattgaagttgagatttgaatggggacacagccaaaccatatcaaggtcactctcgtgatttctttttgggtaacacccatacaggtgtggactcctttttgtcaagtttctcagtttcactgtgcagaggctaaaagtgg

SEQ ID NO: 496841 - DNA, 475 bp, Homo sapiens
atttgtgaaaattttgaagcaggtctgtattagtccgtttttaagctgctgataaagacaaacccaagactggggagaaaaggaggtttaatttgacttatggttccacatggctggggagatctcgtgatcatgacggaaggcaaaaggcactttatacatggtagcagcaagagagaatgaggaagaagcaaaagcagaaccccctgataaacccatcagatgttgtgagacttattcactatcacgagaatagcatggaaragaccacccccatgattcaattacctcccgctgggtccgtcccataacacgtgggaattctgggagatacaattgaagttgagatttgaatggggacacagccaaaccatatcaaggtcactctcgtgatttctttttgggtaacacccatacaggtgtggactcctttttgtcaagtttctcagtttcactgtgcagaggctaaaagtgg

SEQ ID NO: 496842 - DNA, 475 bp, Homo sapiens
atttgtgaaaattttgaagcaggtctgtattagtccgtttttaagctgctgataaagacaaacccaagactggggagaaaaggaggtttaatttgacttatggttccacatggctggggagatctcgtgatcatgacggaaggcaaaaggcactttatacatggtagcagcaagagagaatgaggaagaagcaaaagcagaaccccctgataaacccatcagatgttgtgagacttattcactatcacgagaatagcatggaagagaccacccccatgattcaattacctcccgctgggtccgtcccataacacgtgggaattctgggagatacaattgragttgagatttgaatggggacacagccaaaccatatcaaggtcactctcgtgatttctttttgggtaacacccatacaggtgtggactcctttttgtcaagtttctcagtttcactgtgcagaggctaaaagtgg

SEQ ID NO: 496843 - DNA, 638 bp, Homo sapiens
tttatttgataacttaacacgaattaatcaaaattaattctaatcagatgcatttcttttttttttttttttttttgcaaatagttgcaaaaggactgaacaatgagaaaatgggggcagaagatgtggaacagtattttaggaatttggtattgaatgataagatagatacttacaacagtgaatggggaaaagaggggcagggtaatgtttcagatttgttgagttttcttgtcctttgacttatctttcttaatctctgcacgtttcactcattttacacatttacctggaacctaaaccctgaggttaaaactataaccctgtttggctgctcatagttttaattttagaaaaaaaaagatgaatctctctagacaggcagaatatwcatattcaaatggttttccttgagctctctgctatgtttgttgtggtcaaacattgtttcctagtcaaaatcccttctcaagagtcctctggaaacaactacacattttaggaatacaatgtgttcctgaaatgagtcttacctgccctccctcctctgcctggggatgtcttccatcagctgggagttgtgtgtcacctggatgtggaagaaacacaggagcacattttggaagcattcatcaaca

SEQ ID NO: 496844 - DNA, 607 bp, Homo sapiens
acatgcatgcacactcaggcacacacgtgcatcacaggtacatgcacacacgtgcatcacaggtacatgcacacacacacgggcacacatgtacatcacaggtacatgtgtgtacacaggcacacacaggcatcactggtacatgcatacacacacatgaacacacatgcatcatgggtacatacatggatgcacactgcacggacacaggcacacacattgatatggtttagctgtgtccccacccaaatctcatcttgaatttccacctgttgtgggagggacccagtcccagtcggaggtaattgaatcatgcgggtgggtctttcccatgctgttctcgtgatagtgaataagtctcacgagatatgttggttttaaaaatgggagtttccctgcacaagctccccctttgcctgctgccatccacataagatgtgacttgctcttccttgccttctgccatgactgtgaggcctccccagccacgtggaactgtgagtccaactaaacctctttcttttataaattacccagtcttgggtatgtctttgtcagcartgtgaaaacggactaatacacatgtctactgctttcctttgtgtgc

SEQ ID NO: 496845 - DNA, 607 bp, Homo sapiens
acatgcatgcacactcaggcacacacgtgcatcacaggtacatgcacacacgtgcatcacaggtacatgcacacacacacgggcacacatgtacatcacaggtacatgtgtgtacacaggcacacacaggcatcactggtacatgcatacacacacatgaacacacatgcatcatgggtacatacatggatgcacactgcacggacacaggcacacacattgatatggtttagctgtgtccccacccaaatctcatcttgaatttccacctgttgtgggagggacccagtcccagtcggaggtaattgaatcatgcgggtgggtctttcccatgctgttctcgtgatagtgaataagtctcacgagatatgttggttttaaaaatgggagtttccctgcacaagctccccctttgcctgctgccatccacataagatgtgacttgctcttccttgccttctgccatgactgtgaggcctccccagccacgtggaactgtgagtccaactaaacctctttcttttataaattacccagtcttgggtatgtctttgtcagcaaygtgaaaacggactaatacacatgtctactgctttcctttgtgtgc

SEQ ID NO: 496846 - DNA, 535 bp, Homo sapiens
ctcctggctgtgtgggctgccaggtggcaaagcagcacgtgcgggacggccgcaaggagagcctccatggcttcgtggagaccttcaagaaagagttgtccagagacgcttatccaggaatctacgccttggactgtgagatgtgctacaccacgcatggcctagagmtgacccgcgtcaccgtggtggacgccgacatgcgagtggtgtacgacaccttcgtcaagcccgacaacgagatcgtggactacaacaccaggttttccggagtcaccgaggccgacgtcgccaagacgagcatcacgttgccccaagtccaagccatcctgctgagctttttcagcgcccaaaccatcctcatcgggcacagcctggagagcgacctgctggccctgaagctcatccacagcaccgtggtggacacggccgtgctcttcccgcactacctgggtttcccctacaagcgctccctcaggaatctcgcggccgactacctggcacagatcatccaggacagccaggacggccacaactc

SEQ ID NO: 496847 - DNA, 123 bp, Homo sapiens
gtgatgtggaaggtccgacagcgcgcccagatccagccacgccaccggtccgcctctcccgccgccctggcctgtscttagccccaggcctcttccaaaaccgccatcagtcccgagagctca

SEQ ID NO: 496848 - DNA, 619 bp, Homo sapiens
tggagcctcgagggccgcctcctcggccaccttcttagcttctgggtatccaggtgggaascagcagggagctgtggctcgcaacatcttgctgccttcgggagcaccggccgggctctgctccgctcccaaatggcggcttgcctccggggccgcctccttggccaccttcttagcttctgggtatccagggcggaaccagcagggagctgtggctcgcaacatcttgctgccttcgggagcaccggcctggctctgctcccctcccaaatggcggcttgcctccagggccgcctcctcggccaccttcttagcttctgggtatccaggggggaaccagcagggagctgtggctcgcaacatcttgctgccttcgggagcaccggcctggctctgctcctctcccaactggcggcttcaatgagtgctgcggccgccacttgtcgcctttatataggcacagggcagactgggtgggacttctccttgataggttggtgcttcagtccaatcacattgagcctcatcttccaccagactccagcttgggaatgcctcagggggtgcgctaatggaatcaactggaactcccggttgctaaacttggagctaggttgct

SEQ ID NO: 496849 - DNA, 619 bp, Homo sapiens
tggagcctcgagggccgcctcctcggccaccttcttagcttctgggtatccaggtgggaaccagcagggagctgtggctcgcaacatcttgctgccttcgggagcaccggccgggctctgcyccgctcccaaatggcggcttgcctccggggccgcctccttggccaccttcttagcttctgggtatccagggcggaaccagcagggagctgtggctcgcaacatcttgctgccttcgggagcaccggcctggctctgctcccctcccaaatggcggcttgcctccagggccgcctcctcggccaccttcttagcttctgggtatccaggggggaaccagcagggagctgtggctcgcaacatcttgctgccttcgggagcaccggcctggctctgctcctctcccaactggcggcttcaatgagtgctgcggccgccacttgtcgcctttatataggcacagggcagactgggtgggacttctccttgataggttggtgcttcagtccaatcacattgagcctcatcttccaccagactccagcttgggaatgcctcagggggtgcgctaatggaatcaactggaactcccggttgctaaacttggagctaggttgct

SEQ ID NO: 496850 - DNA, 619 bp, Homo sapiens
tggagcctcgagggccgcctcctcggccaccttcttagcttctgggtatccaggtgggaaccagcagggagctgtggctcgcaacatcttgctgccttcgggagcaccggccgggctctgctccgctcccaaatggcggcttgcctccggggccgcctccttggycaccttcttagcttctgggtatccagggcggaaccagcagggagctgtggctcgcaacatcttgctgccttcgggagcaccggcctggctctgctcccctcccaaatggcggcttgcctccagggccgcctcctcggccaccttcttagcttctgggtatccaggggggaaccagcagggagctgtggctcgcaacatcttgctgccttcgggagcaccggcctggctctgctcctctcccaactggcggcttcaatgagtgctgcggccgccacttgtcgcctttatataggcacagggcagactgggtgggacttctccttgataggttggtgcttcagtccaatcacattgagcctcatcttccaccagactccagcttgggaatgcctcagggggtgcgctaatggaatcaactggaactcccggttgctaaacttggagctaggttgct

SEQ ID NO: 496851 - DNA, 599 bp, Homo sapiens
tggtgatgtggaaggtccgacagcgcgcccagatccagccacgccaccggtccgcctctcccgccgccctggcctgtccttagccccaggcctcttccaaaaccgccatcagtcccgagagctcaccctgcccacctcgccgcaaagcgaaagaaactggagcagccggcggcaggagagggcaaaaagccaagagtaaccccaacccccsactcccggtaccccggaatccctgccgcggcccctcgggcctgtccacatccctctgcccctcccagacctctgtccttccaccaatcgcctcccgcagccccgagccgccactcccagtcccccgagtccctgccgcgcgccctcgcgcctgtccacatccctctgcccatccgagacctctgtccttacaccactagccaccccacgtgggacttccatggcttctgagtacaaggccagccccccggcccaccagctttcggaatgcctgcttacctctttttctgtagaggcaccacagggaggtgggtgaagcacttcggctctggagttacagatctgggttcaaggccaaattccaccacttactaggtttgtaatattgg

SEQ ID NO: 496852 - DNA, 599 bp, Homo sapiens
tggtgatgtggaaggtccgacagcgcgcccagatccagccacgccaccggtccgcctctcccgccgccctggcctgtccttagccccaggcctcttccaaaaccgccatcagtcccgagagctcaccctgcccacctcgccgcaaagcgaaagaaactggagcagccggcggcaggagagggcaaaaagccaagagtaaccccaacccccgactcccggtaccccggaatccctgccgcggcccctcgggcctgtccacatccctctgcccctcccagacctctgtccttccaccaatcgcctcccgcagccccgagccgccactcccagtcccccgagtccctgccgcgcgccctcgcgcctgtycacatccctctgcccatccgagacctctgtccttacaccactagccaccccacgtgggacttccatggcttctgagtacaaggccagccccccggcccaccagctttcggaatgcctgcttacctctttttctgtagaggcaccacagggaggtgggtgaagcacttcggctctggagttacagatctgggttcaaggccaaattccaccacttactaggtttgtaatattgg

SEQ ID NO: 496853 - DNA, 599 bp, Homo sapiens
tggtgatgtggaaggtccgacagcgcgcccagatccagccacgccaccggtccgcctctcccgccgccctggcctgtccttagccccaggcctcttccaaaaccgccatcagtcccgagagctcaccctgcccacctcgccgcaaagcgaaagaaactggagcagccggcggcaggagagggcaaaaagccaagagtaaccccaacccccgactcccggtaccccggaatccctgccgcggcccctcgggcctgtccacatccctctgcccctcccagacctctgtccttccaccaatcgcctcccgcagccccgagccgccactcccagtcccccgagtccctgccgcgcgccctcgcgcctgtccacatccctctgcccatccgagacctctgtcyttacaccactagccaccccacgtgggacttccatggcttctgagtacaaggccagccccccggcccaccagctttcggaatgcctgcttacctctttttctgtagaggcaccacagggaggtgggtgaagcacttcggctctggagttacagatctgggttcaaggccaaattccaccacttactaggtttgtaatattgg

SEQ ID NO: 496854 - DNA, 476 bp, Homo sapiens
acctttttacagtgggtggcagggctatggagggaaaacagcaatggttctggcacctacttaacttgattccattaaattcacccaacaggcctccagagaasatattactgctttgatattacaaagggaaaaacagctatggcgtctctgaaaagcacaacgtgctaggactggaatgactttaaaaccacacataaatttctgagagatttttgccataaggtaccatccaccttactgtaaaccacatcctaaaattgtctgcagtgcaaatggattatgtgcatccaacaggaaacagcataggttgagaagctgttacttaatagcttcattgtcaccacgagtgtaaagtgtggggtctcatcacttttgcacccacgttttgcctgttggtttctccacactgtcaggagcatttgaccaactcactgtggctcagggtcccttacgcagcctgttggggaaaccag

SEQ ID NO: 496855 - DNA, 511 bp, Homo sapiens
gcaaggagagcctctatggctttgtggagaccttcaaaaaagagatgtgcasagacgctcatccaggaatctacgccttggactgtgagatgatgctacaccacgcatgggctatagctgacccgcgtcaccgtggtggacgccgacatgcgagtggtgtacgacaccttcgtcaagcccgacaacgagatcgtggactacaacaccaggttttccggagtcaccgaggccgacgtcgccaagacgagcatcacgttgccccaagtccaagccatcctgctgagctttttcagcgcccaaaccatcctcatcgggcacagcctggagagcgacctgctggccctgaagctcatccacagcaccgtggtggacacggccgtgctcttcccgcactacctgggtttcccctacaagcgctccctcaggaatctcgcggccgactacctggcacagatcatccaggacagccaggacggccacaactccagcgaggacgcaaacgcctgcctgc

SEQ ID NO: 496856 - DNA, 541 bp, Homo sapiens
tgcctggctctgtgggctgccacgtggcaaagcagcacgtgcgggacggccgcaaggagagcctctatggctttgtggagaccttcaaaaaagagatgtgcacagacgctcatccaggaatctacgccttggactgtgagatgatgctacaccacgcatggsctatagctgacccgcgtcaccgtggtggacgccgacatgcgagtggtgtacgacaccttcgtcaagcccgacaacgagatcgtggactacaacaccaggttttccggagtcaccgaggccgacgtcgccaagacgagcatcacgttgccccaagtccaagccatcctgctgagctttttcagcgcccaaaccatcctcatcgggcacagcctggagagcgacctgctggccctgaagctcatccacagcaccgtggtggacacggccgtgctcttcccgcactacctgggtttcccctacaagcgctccctcaggaatctcgcggccgactacctggcacagatcatccaggacagccaggacggccacaactccagcg

SEQ ID NO: 496857 - DNA, 541 bp, Homo sapiens
tgcctggctctgtgggctgccacgtggcaaagcagcacgtgcgggacggccgcaaggagagcctctatggctttgtggagaccttcaaaaaagagatgtgcacagacgctcatccaggaatctacgccttggactgtgagatgatgctacaccacgcatgggctakagctgacccgcgtcaccgtggtggacgccgacatgcgagtggtgtacgacaccttcgtcaagcccgacaacgagatcgtggactacaacaccaggttttccggagtcaccgaggccgacgtcgccaagacgagcatcacgttgccccaagtccaagccatcctgctgagctttttcagcgcccaaaccatcctcatcgggcacagcctggagagcgacctgctggccctgaagctcatccacagcaccgtggtggacacggccgtgctcttcccgcactacctgggtttcccctacaagcgctccctcaggaatctcgcggccgactacctggcacagatcatccaggacagccaggacggccacaactccagcg

SEQ ID NO: 496858 - DNA, 119 bp, Homo sapiens
gtgatgtggaaggtccgacagcgcgcccagatccagccamgccaccggtccgcctctcccgcctccctggcctgtccttagccccaggcctcttccaaaaccgccatcagtcccgagag

SEQ ID NO: 496859 - DNA, 119 bp, Homo sapiens
gtgatgtggaaggtccgacagcgcgcccagatccagccaagccaccggtccgcctctcccgcckccctggcctgtccttagccccaggcctcttccaaaaccgccatcagtcccgagag

SEQ ID NO: 496860 - DNA, 115 bp, Homo sapiens
ccacgccaccggtccgcctctcccgccgccctggcctgtccttagccccaggcctcttccaaaaycgccatcagtcccgagagctcaccctgcccacctcgccgcaaagcgaaag

SEQ ID NO: 496861 - DNA, 657 bp, Homo sapiens
ataagtaagagtttttcctcttctctatttgtttgattgtacttacttaattgcttattttctttgatctcttctttactttttcaaggctaactgaaatgttttaggctcattttgtttctttctctgccctcgtcctggaatcaaggaggcctgaatccttacaacggaaaattgtatttagaaaccttgcatcaatcaataaattaaagaacataaattttaatggacttctttcactttactcagatattatttaaatacaagagcaggtttttagtcacagaaagagaaggctatgtctctttttattaaaacaactattattcacagcagataagytgaaagcacagctttacaaagagactacatgggttcagatctagactcctctacctactagacagacatatagaacttgggaaaatatttcaaccagtctgtgtttcagtttacagtatgtaaagcagggacactaatagtatttatttttatcataaggattaaataagtagatgcagataaatgcatacaacagtactaatagaaagcagtcaataaatgttagctactattatatctggaacttggaaatttttaaaatatatcatttaatatttaatagtctacttttccattactccttacttgcattac

SEQ ID NO: 496862 - DNA, 622 bp, Homo sapiens
ggttgaaatacagaaaagaaaacaagcaatagagcagggtatgctaaaaaaaaaaaaaaaaaaaagaccagatgatagctttgccttaaatttcatgctgaggaatttgtattttgytcaaagggaaacagagtattttaaagggttagggtggaagtggtagtggtccaggcagagtagccttgagcagaactactggagagttgaagatgctgaaaccaggaaaagaatgtgactctaagaaagggaaagggaatgggtaaatgaactcaatgtgctgagaacaaggtctgttttccatttaattttaatgggacttttacagaactgcttgttcattcaaacaaatcagtttttgctggctactgtaaaaatacctgtggatttgtttgatgctctccttcgaatttctgtcaccattagtcgtgagacttgtgttgtgaactgcagaagatcagaaaatttttctgtcattgtattcggcggagcatttccaaaaacctgtagataagaaaagacattgttaatgaagcactgacaaatttttctttttattttgtgaattttcaagtgtggtatgacttgaaaatcaagtccagaaaagtctacctacacagttact

SEQ ID NO: 496863 - DNA, 622 bp, Homo sapiens
ggttgaaatacagaaaagaaaacaagcaatagagcagggtatgctaaaaaaaaaaaaaaaaaaaagaccagatgatagctttgccttaaatttcatgctgaggaatttgtattttgctcaaagggaaacagagtattttaaagggttagggtggaagtggtagtggtccaggcagagtagccttgagcagaactactggagagttgamgatgctgaaaccaggaaaagaatgtgactctaagaaagggaaagggaatgggtaaatgaactcaatgtgctgagaacaaggtctgttttccatttaattttaatgggacttttacagaactgcttgttcattcaaacaaatcagtttttgctggctactgtaaaaatacctgtggatttgtttgatgctctccttcgaatttctgtcaccattagtcgtgagacttgtgttgtgaactgcagaagatcagaaaatttttctgtcattgtattcggcggagcatttccaaaaacctgtagataagaaaagacattgttaatgaagcactgacaaatttttctttttattttgtgaattttcaagtgtggtatgacttgaaaatcaagtccagaaaagtctacctacacagttact

SEQ ID NO: 496864 - DNA, 617 bp, Homo sapiens
ccatgtagccaccttgactgggcacccttattttttccactcacattttgggctcctggagtaagaagataatgcagttacggacaaggctctagtgtcatcagcacaacttccagtttcttctcccaaagaggaattgaacaattttggccatattcctcccttctcacctggcatgtatctgtcgaaacgccattttatctttttctaaactaacattatggttaaagactctttttgagaactggtccctgatttctgactgcaagtttcctacttcctctgaacgtcctgcctctcttctctgtgcctcaagtagkacatgtaagataagtcactctatgtgatcatcattttggtatatgcattcaattcctacgtaaatgtgaaattctgcatgacagagcctcttcagatatgcaacaacatgccctctgagaaaacaacattatacgtatcacttaagtaagagaaagagaaaaacaaagtcaaaataggcttgagcaagcaggcaccaggaaagggtgggcagaaactacccactcgtccacgaattagagcttggagttagaaaatagaggaatgatgtacagattaacgtagcaagagaggtcttt

SEQ ID NO: 496865 - DNA, 623 bp, Homo sapiens
gagagataacgcagagttagttatgagaagaggagaaagaagagtatttctggcatcaaaaacagcaattgtgaagccccagaggtcaaagaaaatgaaatactgccacgacatttaacagatgctggactgcctgtcccagtagaaaaatctgattcttctaccatttttatccaagattactccatcataggcagatttgaattgactttatccatccctcaagggttcaagttttaacatccaaaactttatgttcagatcaaattcattatttttaaactctaaaatagcctttcttaytattcctttttaaattcattttataatttccctaacagatcccaattctcctatcttagcataactccagatcaaccacctaggattattcgatggagttatctgcatgaagtaattactttttttttcttgcaaccatttcatattccaagataagtctttagactttaaggcatgtactatctgttcagtttgcaaattttcttggaagttaaaagagaagagtcagcaatttacttcactgactgaaaaagaaactttaaaaaccattccacctctgcatcttttggcacttagaaaatcttgattaattctttaag

SEQ ID NO: 496866 - DNA, 623 bp, Homo sapiens
gagagataacgcagagttagttatgagaagaggagaaagaagagtatttctggcatcaaaaacagcaattgtgaagccccagaggtcaaagaaaatgaaatactgccacgacatttaacagatgctggactgcctgtcccagtagaaaaatctgattcttctaccatttttatccaagattactccatcataggcagatttgaattgactttatccatccctcaagggttcaagttttaacatccaaaactttatgttcagatcaaattcattatttttaaactctaaaatagcctttcttactattcctttttaaattcattttataatttccctaacagatcccaattctcctatcttagcataactccagatcaaccacctaggattattcgatggagttatctgcatgaagtaattactttttttttcttgcaaccatttcatattccaagataagtctttagactttaaggcatgtactatctgttcartttgcaaattttcttggaagttaaaagagaagagtcagcaatttacttcactgactgaaaaagaaactttaaaaaccattccacctctgcatcttttggcacttagaaaatcttgattaattctttaag

SEQ ID NO: 496867 - DNA, 493 bp, Homo sapiens
tagaaatggtagagctgagatgtaagcattctagaatctgtgcttttagccacttcactttgcacttcttttacatcaaaccttggaggcaagatagctcttctcagtctggaygtaggagttggcattacctttttgcctgttctcctagccaatgattaagtagtataaaaggcaagacgagtgagaccatcaaatgtactggtgggcactggagtgaatgagaacgcttaggaaaattaaactttaattgtcacactgctctttcagggcatcttcagatttgtctagcctacagtttctggaatctgtgcccacagaaacctgccagtctgagaccgttagtgcatttacaaaggcctcactagtgtttgcctctgtccatccacaccctgaaagattttttttctagttgctttagatactagggaaagcacaggaacctatcttgactcttgcgttttcaaggaatgaataatatagggcaagtcct

SEQ ID NO: 496868 - DNA, 493 bp, Homo sapiens
tagaaatggtagagctgagatgtaagcattctagaatctgtgcttttagccacttcactttgcacttcttttacatcaaaccttggaggcaagatagctcttctcagtctggatgtaggagttggcattacctttttgcctgttctcctagccaatgattaagtagtataaaaggcaagacgagtgagaccatcaaatgtactggtgggcactggagtgaatgagaacgcttaggaaaattaaactttaattgtcacactgctctttcrgggcatcttcagatttgtctagcctacagtttctggaatctgtgcccacagaaacctgccagtctgagaccgttagtgcatttacaaaggcctcactagtgtttgcctctgtccatccacaccctgaaagattttttttctagttgctttagatactagggaaagcacaggaacctatcttgactcttgcgttttcaaggaatgaataatatagggcaagtcct

SEQ ID NO: 496869 - DNA, 625 bp, Homo sapiens
ctgcctcatccattgtcaaaaggagagtaggatgctgatatggtttggctctgtgtccccacccatatctcatcttgtaagctcccataattcccatgtgttgtggaaggaacctggtgggagatcactgaatcatgggggtgggtctttcccatgctattcttgtgatagtgaataagtctcataagatctgatggttttaaaaatgggagtttccatttacaagctctctctctttgcctgctgccatccatgtaagatgtgacttgctcctccttgccttccaccaagattgtgaggcctccccagccacgtggaactgtaagtccattaaacctctttcttttgtaaatttcccagtctcagctatgtctttatcagcagtgagaaaatggactaatacacatgcttatcttttgaccccctactttttattatacaaattttcctacatacatagaaagcatagtacaatcaaatagctacataattccacctagttaaaatttgctatattttctttcctccctctctccccataagtttgtttttggcattgtagttgaactttgtgaaggtaagttggaaataycttaacacttgacttctaaatactaaaattcct

SEQ ID NO: 496870 - DNA, 603 bp, Homo sapiens
ggattaataactcattgcagaaaattcaggagatggaggtctagtctggtactgaattaaattatctacggtatttaatgttttactctagtagatttgctggtttggtgtctaccttaacttaaatatttagagaaaaatatggaaaagtttgtgagaaaatgaagtcttgtataaacatccttgtcctaattgttcacctttactgcagaaatcccagactggcaccagtgtggccgaagttcacactgtgttactataaatttacatgatgtagtggatgtyttaagaggtggaggcaatcccatattcaaaattgaaaacaaaaaaaatatttaaatacccaagtgagtaaaaatggactctcctggataagtctggaccatctttcaaagatattgagcgtctggaatttttatgtgcatttcgaggctgcagtttcctctgacagacaatccattgttattactggctgtaggcagtcctgaaagggcagagtcaggaaagacaaagaatttacagtacagaactttcaataatgtgttgatgtcaggaaaagagttgagccatttctgataagaaagaagtgttaatgttaagcag

SEQ ID NO: 496871 - DNA, 592 bp, Homo sapiens
ctgatatataacaataatggctctactacacctaaatattatccccgtaatgtatctgaaattatattagtaacacttctcttggtaatatccaattactttttatggtttctaactcacggttcatgtggcttttttcctttattggacatttggatgtagcagattattttattattttattttattctattctattttattttgtttggttttgagacggagtctgcttctgtggcccaggctggagtgcaatgtcgtgatctctgctcactgcaacctctgcttcccggtttcagtgattctcctccctcagcctcccaagtagctgggattacaggcrtgtaccaccacgcctgggtgatttttttatttttttagtagagacgtggtttcaccatgttggccaggctggtcttgaactcctgacctcaagtgatctgctcacctcaacctaccaaagtgctgggattacaggtgtgagccactgtgcctggcctggacacagcagatttgacacagtggttttgtctgaagacaatggaaaaagtgaatattttgacaaaacagttttgagaaatgtacatcaaaa

SEQ ID NO: 496872 - DNA, 592 bp, Homo sapiens
ctgatatataacaataatggctctactacacctaaatattatccccgtaatgtatctgaaattatattagtaacacttctcttggtaatatccaattactttttatggtttctaactcacggttcatgtggcttttttcctttattggacatttggatgtagcagattattttattattttattttattctattctattttattttgtttggttttgagacggagtctgcttctgtggcccaggctggagtgcaatgtcgtgatctctgctcactgcaacctctgcttcccggtttcagtgattctcctccctcagcctcccaagtagctgggattacaggcatgtaccaccacgcctgggtgatttttttatttttttagtagagacgtggtttcaccatgttggccaggctggtcttgaactcctgacctcaagtgatctgctcacctcaacctaccaaagtgctgggattacaggtgtgagccactgtgcctggcctggacacagcagatttgacayagtggttttgtctgaagacaatggaaaaagtgaatattttgacaaaacagttttgagaaatgtacatcaaaa

SEQ ID NO: 496873 - DNA, 367 bp, Homo sapiens
agatacgttaaaggacacaaaattacagctgtacaggaagaataagttctgttttatagcactatagggtgactatagttaacaatattacatattttcaaatagctagaagagagggtattgaatttttccaatacaaagaaattataaatgtttgagattatggatatgctgattatcctgatctgatcactaagcattgtatatattgaaacatcactatgtactccattaatatgtacaattattatgtgtcaattcaaaaatgaaaattatacagaaaaaaataaaacaaggatttcaaagaaatctctaaaagagaataaaatgaggkggacaattcctagcatttattataaaataatat

SEQ ID NO: 496874 - DNA, 657 bp, Homo sapiens
attccttaatatgataatataaattatttaccatttcttccattgttcaatattttataatgtttctatattttcagggtcctaataatagcttcatgagattgttgagaaaataaaataaagcctttaagttactcaaaaagaaaagcctgacagatattgatacctataagaataataatgattatttgtgatgtttttctattgttataagttagaatcaaatttctccttgcaattttttaatgagttttatgcttttagatgacataatttttaatctaggtttttttgtctctttttctagcaatkttctaaaatttccagaaatgatattataaaattagaaaacaagttttacttttcccttactaaatcaaatattttatattaaatttagaattttcaaagattcatgctgccttcattataatatataaaatataggtatttgttcaataaaaactttcaatttgcattaaaaattcttgaatgtgaacagattgatttcagatgactctttgaaatctttgagcagcattgtaccttactgaattccttttaatttaggcaacaaaacaaaacattttaccaacagttggcctactctagttattaaaacttttatacacagattgtcaccagcttagctaaaac

SEQ ID NO: 496875 - DNA, 638 bp, Homo sapiens
taattattactgaaagtaactgaaatagagttttattatatttcattcttagatatactgtatatgagtatacatatacagtatgtgcatgtatgcttgtgtgtgtgtctgtgcataaaagtttgggggatttgtcaaaatttaagtatggctactctttctgctaaatttgaacatattgcttaagtagacaccaaatttggaatrtctcttccacttctaaggatcaatttttttgtgccctatattttattcatttttttaagagttaccgcaagtcttcaaaaccgtaagtaaaacaaagtctgttgtactgaaatacaatttggaacaaggggcttctgcttgcagcttccatttctatagtgaccacacaataatcagtatcatcaaatgctaccattttagctcagaaatgtggtctctttgtgtcttatttcccaagtttttaaaagcagataatcaggaatttttatactgttttagttttgtcgccactattatagactctggattttcacacagtaagtgctgaagccaatgagattaagtattcacagggggtgcatgtggggcccacagcctggcatgaaaattgatttctagtacacaaataattcattctttatgacacctca

SEQ ID NO: 496876 - DNA, 638 bp, Homo sapiens
taattattactgaaagtaactgaaatagagttttattatatttcattcttagatatactgtatatgagtatacatatacagtatgtgcatgtatgcttgtgtgtgtgtctgtgcataaaagtttgggggatttgtcaaaatttaagtatggctactctttctgctaaatttgaacatattgcttaagtagacaccaaatttggaatayctcttccacttctaaggatcaatttttttgtgccctatattttattcatttttttaagagttaccgcaagtcttcaaaaccgtaagtaaaacaaagtctgttgtactgaaatacaatttggaacaaggggcttctgcttgcagcttccatttctatagtgaccacacaataatcagtatcatcaaatgctaccattttagctcagaaatgtggtctctttgtgtcttatttcccaagtttttaaaagcagataatcaggaatttttatactgttttagttttgtcgccactattatagactctggattttcacacagtaagtgctgaagccaatgagattaagtattcacagggggtgcatgtggggcccacagcctggcatgaaaattgatttctagtacacaaataattcattctttatgacacctca

SEQ ID NO: 496877 - DNA, 615 bp, Homo sapiens
tgaacactacacatgcatgtggagcaagcttgttcaacctgaggcccgcgggccacatgtggcccaggatggctttgaatttggactaacacaaatttgtacactttcttaatatattatgaaatatttttgcaatttttttaggtcatcagctatcattagtgttagtgtattttatgtgtggcccaagacaattcttccagtgtgggcaggggaagccaaaagattggacacccctgctgtagagcaaatataggtgacttctgaagtgtctgccatctttaagaggatatgacagttcataatagaatacattcattggaaagaagggatacttattgtagagaccagtaatttcatggttatcatcaagtggggagattggttaggaccacaggacttgatgatactccaatagaaatcatgttccagttacttgatgatagtccagtagaaatcattttccartttactgtgcagatggacatctgccaaagatcacagtaaagctgagaataaaggtgcccactaatttgtagtatggtgtgtgttttacacatcaatatttttctccatattcccttccttttatttatcttggttttgggagaatga

SEQ ID NO: 496878 - DNA, 625 bp, Homo sapiens
tgtgatggtggcgccatcctggtttccagcttatacctcctgacaactcggtacagaaaatgagtatcattgtaattaaagtttgatattttcttctaagtgactgatttttaatataaaagtatcacaataaagtttttccacagatatgtaattttaagttagataacattctaacatatacatggtttcaattttcttataagtctgtgaatcactcaagttaggcattgttaggttttttaaggaaaaactttgatgcccagaataactgtaacttatgcaaacacacacacacacacacacactcacacacacacgaagtaaatggtagaaatgaaagaagaagaagaagaaaaaaacattgggacattttgccctttatctttttattaagactgwcaataaatgatggtttggtttaagaggataagaagatagctgaaactctaataattggactttccaatcttaattatgctttagttcccttaccaggattaggaaacttctttgtgattcttttttaaaaataatttaatcaggaagtgacattaaattctgtttcaatgtaatgagaaaatagaaatatttatattgtcattacgatggcacttcaccagta

SEQ ID NO: 496879 - DNA, 562 bp, Homo sapiens
tgctcagggggctaagacaggaggctgcggtgagccatgtctgcaccactgcacaccacaccgggtgacagagtgagaccctgtctcaaaaaaataaaaaataaaaaataaacaaaacaaaaaagaaatcaataaaaaaagttgaagaaatcttcagttccgcttaatgataatcaattattaatacatcactaatttggccatttatatgagtaaaaaaatacattcttacctacttaattttgttatttctatcagagagaaaaagagagagatccaaagacaatattgttgaataactctctatgctcactactacytctaaaagcccctttaagaaatggaatatcatattttgaatgcatccaattaactaacatgacttttaaggagtattgtatactatcaaaggacatccccaatgtgaaaacctgttgcaactcatcactattctattgctccagttttcatattatattttaaacttttgaaatatttgtttaattctctttatgctttacttttttgtatgactggagatttgtaagacatgtccacaaat

SEQ ID NO: 496880 - DNA, 644 bp, Homo sapiens
ggtccctgctcatctcaaagggctggactctctcttctgtaatgaagatattaactttttattgttgcagttttggacattgagagtcttacttctctatcctgtaacataattattttaaagtcacaaacatcatagtgtcttagaaggatgatgtaacattttgaaaacaatgtacactttagcccytatttttggtaatttttgaaatatttcctacttaattctacatatcatttagaaaagttgcatgttatactgctttaagtttcttttaattgtgtttgctatactctttaacgaactatgtaaccttgtttgactttcatataaagtaaaataaagagggctctgagtccattgtatgatactactaaaataatgacatattctcttacctgagcctaagatgaccaagtataatgggttactttcttctcagcttcttctttaaagttgctgttcatttaatgtatttttcatggaagttgattatttttcaactccgtgggctctgtcttataataacatataattgtgccactgcatttgatcctaagtagattgacttacacattttatttatcccaatttaattaagcttcgtgggttcaagataattgttatcccctaaatgttctagc

SEQ ID NO: 496881 - DNA, 644 bp, Homo sapiens
ggtccctgctcatctcaaagggctggactctctcttctgtaatgaagatattaactttttattgttgcagttttggacattgagagtcttacttctctatcctgtaacataattattttaaagtcacaaacatcatagtgtcttagaaggatgatgtaacattttgaaaacaatgtacactttagcccttatttttggtaatttttgaaatatttcctacttaattctacatatcatttagaaaagttgcatgttatactgctttaagtttcttttaattgtgtttgctatactctttaacgaactatgtaaccttgtttgactttcatataaagtaaaataaagagggctctgagtccattgtatgatactactaaaataatgacatattctcttacctgagcctaagatgaccaagtataatgggttactttcttctcagcttcttctttaaagttgctgttcatttaatgtatttttcatggaagttgattatttttcaactccgtgggctctgtcttataataacatataattgtgccactgcatttgatcctaagtagattgacttacamattttatttatcccaatttaattaagcttcgtgggttcaagataattgttatcccctaaatgttctagc

SEQ ID NO: 496882 - DNA, 610 bp, Homo sapiens
aactcacacgtaattacacatttccctgaacttcataacctgacaaacgygctactcaatccgtcatttcaacaatctttcaccccctataactgccatcattctgcactttggttaatatgaatgtaaaaactcaatttaccaaataataaagcttttcactgcccttaagaactatgtttgcattttttaaaagacaaggtgctaaagatatataacatatgaaaaaaaaacaccaaggaaagtatggacacagtacattttcatccttccctgtagctgttgaggacattgccttttgtaccttgaatttctgtaagtgattctttccctgcactgtaacggccatgtttatcctctgcttccaagtacttgaatacctgatttaccttttggtttctgtaggactaaataacacaaaaagtaaatttctggcacaagttataatttaacttttttcagtgtgaattatctagtggatcctaagccatatgtttattcagtgtagggaaaaggtgtgttcttcaactattgtgaattatttaactgtcttaagtcatttttagggttactattatatatgtatctccctctaatttataatacaaag

SEQ ID NO: 496883 - DNA, 470 bp, Homo sapiens
tctttcatgggccttattatgactgtaatcatgtaattgttcacatgattgtttggtaaagtctttctctcatgggagacttcaaaatcctaaaggacagaggtttcttcattcaccactgtatcttcagcacctgaaagtgggctggtactcagtgggtgtttaktgaaacattgctgaataaatgaaggatttaatgatgtcatcgtatttggtttttaaaaaatatatgtgaaaatactaattttgtgtgggaccacatggatgatagaaaaagactgatgataaatttatttcacagtgtttttatttccgttcacaaaatttccagatgtgcttagtaaaattattgccagcttgtgaatgagaatctggatgagtaatttattcgaagatcatacatggaactaattatataagagtcactaagtttgccaaacttttcagttgcttttaatttagtcactctt

SEQ ID NO: 496884 - DNA, 466 bp, Homo sapiens
tttttatttccgttcacaaaatttccagatgtgcttagtaaaattattgccagcttgtgaatgagaatctggatgagtaatttattcgaagatcatacatggaactaattatataagagtcactaagtttgccaaacttttcagttgcttttaatttagtcactctttaacaaactttataacacattttcaaatcagatttttgtttatttatctcaagtcatgtgtaaagtcccactcagaaagatttttaggtgctatatataaataaggtkttaattagaacaagaacatatgtgcaaggtgaatgactcacacttatatatatatatatatatatatatatatagagagggtctttctctgtcacccgggctactagtgcagcggcacaatcatagctcactacagtctcatattcctgggctcaagtgatcctcctgcctcatcctcccaagtagtggga

SEQ ID NO: 496885 - DNA, 599 bp, Homo sapiens
aaatcaggagatgtaataaattgttgtaagtcaacaatttaaagttttgggacagtttgctatgtaacaatagatgcctacaatataattttattagaggacaggttctgatcatggctttcacacccttaacatcaaatctggccttggggatcttggctgagctccaaaagccatggtatttggttctctattggaggacaggagccagtccccaaccaaggtcctgtacctgaagacactcccaactcttggtctcataaaatccaactatctccccaggaagggccactttctttttgcacccccagaacraaacttgtttcccctaatgtgcctcataaaacaatattagctttcctctaggtcagggatatccagaactcaaggacttcgagaccagctatcttgcttaacaaagaaaaaggggaaatttctcgtggttccatggtaggaaaaatgctaccaccaataatcaaccaacttctcacccctgtaaaacaacatgccttattcagtggtggagggttgaggcaaagagggggtgtttaaatgttaccgttaaaaaaataattattggttacttattgtagtgtagc

SEQ ID NO: 496886 - DNA, 512 bp, Homo sapiens
tcaggtgcagggtctcaaaaatatcttaagcaccaatcttagtttttacaatagtgatgttatccctaggagcaactggggtgatttagaaacttgtggcctctggctgcgtgactttgaaaccataacatctaatcttgtggctagtttgtcattcctacaaaggcagtctggtccccagacaagtaggggatttatttagggaaagggccattatcatctttgcttcaaagttaaactataaactaagttcctctcaaagatagtttggcctatgcccgggaatgaataacgacagcttggaggttagaagcaagatgaaggcagttcagtcagatctctttcatggtcataattttctcattgttataatttttgcaaaggcagttttacaaaggtacctcatgagaaaaraaatcagcactggggatctgctacagtgagctcactaatggcaggtgacacctttatctctggcgagacctttctgtcaataataataataattatta

SEQ ID NO: 496887 - DNA, 512 bp, Homo sapiens
tcaggtgcagggtctcaaaaatatcttaagcaccaatcttagtttttacaatagtgatgttatccctaggagcaactggggtgatttagaaacttgtggcctctggctgcgtgactttgaaaccataacatctaatcttgtggctagtttgtcattcctacaaaggcagtctggtccccagacaagtaggggatttatttagggaaagggccattatcatctttgcttcaaagttaaactataaactaagttcctctcaaagatagtttggcctatgcccgggaatgaataacgacagcttggaggttagaagcaagatgaaggcagttcagtcagatctctttcatggtcataattttctcattgttataatttttgcaaaggcagttttacaaaggtacctcatgagaaaagaaatcagcactggggatctgctacastgagctcactaatggcaggtgacacctttatctctggcgagacctttctgtcaataataataataattatta

SEQ ID NO: 496888 - DNA, 623 bp, Homo sapiens
tgaaagtaaatggagtgaaaaggagaaagaaagaagtaagtcgagtaaaaagtacacagcaggtgggccaggcttggtggctcatgcctgtaatcccagcactttgggaggctgaggtgggcagatcatgaggtcaggggatcgagaccagcctggtcaaaatggtgaaaccccgtmtctactaaataacaaaaattagctgggtgtggtggcatgtgcctgtaatcccagctactcaggaggctgaggtgggagaagaatcatttcaacccgggaggtggaggttgcagtgagccgagatggtgccactgcactccatcctggcgacagagcgagactccatctcaaaacaaacaaacaaacaaacaaaaaaacaaaaaagtatacagcattcaaaagtgaccacattaaagaacgaatggatagaatggagaaaagacagacagattaatgtttctattgttttaatataacagtaatactcattaagtaacactaaagtactccgaagacacacaatactctgttgtactttgaaagcatcatgattacactaatgactactctaatggctggtattcacaaccatgccctactttgtctaaatatgtcatacctacaca

SEQ ID NO: 496889 - DNA, 623 bp, Homo sapiens
tgaaagtaaatggagtgaaaaggagaaagaaagaagtaagtcgagtaaaaagtacacagcaggtgggccaggcttggtggctcatgcctgtaatcccagcactttgggaggctgaggtgggcagatcatgaggtcaggggatcgagaccagcctggtcaaaatggtgaaaccccgtatctactaaataacaaaaattagctgggtgtggtggcatgtgcctgtaatcccagctactcaggaggctgaggtgggagaagaatcatttcaacccrggaggtggaggttgcagtgagccgagatggtgccactgcactccatcctggcgacagagcgagactccatctcaaaacaaacaaacaaacaaacaaaaaaacaaaaaagtatacagcattcaaaagtgaccacattaaagaacgaatggatagaatggagaaaagacagacagattaatgtttctattgttttaatataacagtaatactcattaagtaacactaaagtactccgaagacacacaatactctgttgtactttgaaagcatcatgattacactaatgactactctaatggctggtattcacaaccatgccctactttgtctaaatatgtcatacctacaca

SEQ ID NO: 496890 - DNA, 641 bp, Homo sapiens
ttgctatcacgaggacagtaccaagaggcgttgctaaaccattaatgagaaatctgtccccatgatcaaatcacctcccacaaggctccacctccaatactggggattacaaatcaatatgagcattgggtggggtcacatattcaaactgtattactttcccagcatgactagcctgaagagggatgacatgtgtcaacatttttttttctctgcacctttgccaacattaggaagtaccccaaaaatgaatgaawgaatttgaccaaagtgaacccacttggcaatttttgttcttagtttataagtgttaaaatatgcccttgtatttactattacgttctattcatcttctgtccattttctgatcattttttttcttttatatattggttacttactatgtttccagctctccacggagacctttctgtagaatatgataaatgtattcactcttgtattgtctacagaagtattttccatgctgttttcttttatatgcaaaagttttaaggcattttttttcagagctgtttttcagtccaacattcagagattagatcaatattgaagtccgttttctgattttctttgactgtattgcaagtttccctttcaaattaaatgttgttttgatc

SEQ ID NO: 496891 - DNA, 493 bp, Homo sapiens
gttcatgagcctctgtcaatgagtttctggaagctcaagcccattcccttcactgtatattttgagagcatccaacctgtgctatagcaatctgaaaggctggtgagaaaggaccccaaataatatcagaataaaggcatttattcagtgcattcttccyttcaccccaaatgcctaatggcagcatattatttcttgagaaagatttcagttgcttgttgtgattatgatccattatcaggtagatgtggggggcagcacaaaatatttgccattgagttttaatcagtgccatggaaaaattgtggaacatctcatttaaaattgcagtcatcttccttgacagcttcagtagaaaaagtggaaaactgaagaacattttttaaaaaagaaagcagttaaaatggcttccagttactgacaacctctctctcaaaccctgttattttatcatttatttaatgcaatctatgatttagctacagccttaaat

SEQ ID NO: 496892 - DNA, 493 bp, Homo sapiens
gttcatgagcctctgtcaatgagtttctggaagctcaagcccattcccttcactgtatattttgagagcatccaacctgtgctatagcaatctgaaaggctggtgagaaaggaccccaaataatatcagaataaaggcatttattcagtgcattcttcctttcaccccaaatgcctaatggcagcatattatttcttgagaaagatttcagttgcttgttgtgattatgatccattatcaggtagatgtsgggggcagcacaaaatatttgccattgagttttaatcagtgccatggaaaaattgtggaacatctcatttaaaattgcagtcatcttccttgacagcttcagtagaaaaagtggaaaactgaagaacattttttaaaaaagaaagcagttaaaatggcttccagttactgacaacctctctctcaaaccctgttattttatcatttatttaatgcaatctatgatttagctacagccttaaat

SEQ ID NO: 496893 - DNA, 493 bp, Homo sapiens
gttcatgagcctctgtcaatgagtttctggaagctcaagcccattcccttcactgtatattttgagagcatccaacctgtgctatagcaatctgaaaggctggtgagaaaggaccccaaataatatcagaataaaggcatttattcagtgcattcttcctttcaccccaaatgcctaatggcagcatattatttcttgagaaagatttcagttgcttgttgtgattatgatccattatcaggtagatgtggggggcagcacaaaatatttgccattgagttttaatcagtgccatggaaaaattgtggaacatctcatttaaaattgcagtcatcttccttgayagcttcagtagaaaaagtggaaaactgaagaacattttttaaaaaagaaagcagttaaaatggcttccagttactgacaacctctctctcaaaccctgttattttatcatttatttaatgcaatctatgatttagctacagccttaaat

SEQ ID NO: 496894 - DNA, 493 bp, Homo sapiens
gttcatgagcctctgtcaatgagtttctggaagctcaagcccattcccttcactgtatattttgagagcatccaacctgtgctatagcaatctgaaaggctggtgagaaaggaccccaaataatatcagaataaaggcatttattcagtgcattcttcctttcaccccaaatgcctaatggcagcatattatttcttgagaaagatttcagttgcttgttgtgattatgatccattatcaggtagatgtggggggcagcacaaaatatttgccattgagttttaatcagtgccatggaaaaattgtggaacatctcatttaaaattgcagtcatcttccttgacagcttcagtagaaaaagtggaaaactgaagaacatttttwaaaaaagaaagcagttaaaatggcttccagttactgacaacctctctctcaaaccctgttattttatcatttatttaatgcaatctatgatttagctacagccttaaat

SEQ ID NO: 496895 - DNA, 676 bp, Homo sapiens
cactgtcaatgctattacaaaaatcagataaaaatatcaacaagtgctgaaatatctttaaaaacaatggctgcaaacagaaagaygatgaaagttatcccagcaagagcaagggtggaaatgagcaaattaactgatgagagctcagggtaaaatatataattttgaaattatacgtatgctttcgaatatttcaacatgtgggaagaatcttttaatggtactccttcttataattggatacatttgtactcagctctgcactgcaatgaaatgacaaggactatgatttttgtagcatctaaactttacaaaacatttaaaagtgccataaaataggaacaaattatcctggtcttgcaaaaatgtttatagaataaaggtactctgaaaggaggcaaaaaacaatatttttgtaaatattgtagctgaagtatttatgcattttaatacagaaaatagaattgaaaatatcttctaacagattttgcacctgcagagagaataatttctcaattaaaatataatctatagaaaagagtcaactgaaagcactaataattttaaagtttttaaccataaattgcatcttggaagaaaattgcaaacatggcagcttcaaataggtgttctttctatactgtctattaagcaggagtagttccttctctccgtc

SEQ ID NO: 496896 - DNA, 676 bp, Homo sapiens
cactgtcaatgctattacaaaaatcagataaaaatatcaacaagtgctgaaatatctttaaaaacaatggctgcaaacagaaagatgatgaaagttatcccagcaagagcaagggtggaaatgagcaaattaactgatgagagctcagggtaaaatatataattttgaaattatacgtatgctttcgaatatttcaacatgtgggaagaatcttttaatggtactccttcttataattggatacatttgtactcagctctgcactgcaatgaaatgacaaggactatgatttttgtagcatctaaactttacaaaacatttaaaagtgccataaaataggaacaaattatcctggtcttgcaaaaatgtttatagaataaaggtactctgaaaggaggcaaaaaacaatatttttgtaaatattgtagctgaagtatttatgcattttaatacagaaaatagaattgaaaatatmttctaacagattttgcacctgcagagagaataatttctcaattaaaatataatctatagaaaagagtcaactgaaagcactaataattttaaagtttttaaccataaattgcatcttggaagaaaattgcaaacatggcagcttcaaataggtgttctttctatactgtctattaagcaggagtagttccttctctccgtc

SEQ ID NO: 496897 - DNA, 513 bp, Homo sapiens
taagtgctttgaaatcaatggcacgttaagcgagagttagaggtcattagagagttctgttctttataaccaactgacagcaaagttattttaaagagaaagactttatgtgagcactagtaaggttgctgtttagtcctaggcagatgggataatgtgttgcttctgggtttattgctcagctgtagattttgagagagtatttggtgatcttgttgaagcactgaggttcataagggagcagtatgtgttggaacttagtattaagtggtttagatgtgtcttgttcaggtagctactggtgttgtcttatatgatgtaatattagatcaggctaatttagctaagttaatcttgcatgtctcataaaagtcatatgctggactatggttggagtgggtgacaaaagggagaaatcctacttccatttttccagtaaggttactaaagaaaccttacttccattgttatrtactaaaggagttaatgtcaatatcaaagcagctagctctt

SEQ ID NO: 496898 - DNA, 296 bp, Homo sapiens
ttgttttttttttttcgattagtgcagcaaatttgggtagacttatgtttcttaaagacatgtaactttaaatgagagctgtgctatttagtcaaagtcagggtgttgggaagccttgatcatgtgatgtgtattcagtcaaatgacctggaattgatccagtttcctaacagtaacattatggtacaatggttgcctaagaccttyggtcatcatcgaaacctgaatgggctacagaaaaaaaaattttacaactaatcttttacactattggctgagagaagaggaaaggctga

SEQ ID NO: 496899 - DNA, 599 bp, Homo sapiens
tatctttatagcagtgtgaaaacaaactaacataccacgaaatgcataagaattgttatctggatgaccatgaataaaaagtacttgtatgaagcctgagtcagaggctttgtgccagcagtcatattttttacatcatgtagcaacaaattcttcatatatctatttttgtctaataggctgttagtttctggagggtggggaagtgtcctactcatctttatagccccagtgtcaggctcacagaaaggggggtccataaatatttgatgcatggatacatttcactgatacattactattgtcatatcactgggtaaaaatactcaaaagtggtagacaagcttacttataatggaggatcagacaaaacaatcttccgacttggtaatccagtgtactgtcctaaattattgaaaatatgcataaataaattgatcattattaaaataagatttaaatatctccaaagtcaccaaataacyaacactactattccttctcaccaatattctcatatccaagtaacttccaaaggtctactcatacatttggttgtatgtaacagttgaatcactgtgataattcagcccattttg

SEQ ID NO: 496900 - DNA, 599 bp, Homo sapiens
tatctttatagcagtgtgaaaacaaactaacataccacgaaatgcataagaattgttatctggatgaccatgaataaaaagtacttgtatgaagcctgagtcagaggctttgtgccagcagtcatattttttacatcatgtagcaacaaattcttcatatatctatttttgtctaataggctgttagtttctggagggtggggaagtgtcctactcatctttatagccccagtgtcaggctcacagaaaggggggtccataaatatttgatgcatggatacatttcactgatacattactattgtcatatcactgggtaaaaatactcaaaagtggtagacaagcttacttataatggaggatcagacaaaacaatcttccgacttggtaatccagtgtactgtcctaaattattgaaaatatgcataaataaattgatcattattaaaataagatttaaatatctccaaagtcaccaaataaccaacactactaktccttctcaccaatattctcatatccaagtaacttccaaaggtctactcatacatttggttgtatgtaacagttgaatcactgtgataattcagcccattttg

SEQ ID NO: 496901 - DNA, 512 bp, Homo sapiens
gtggctgcctagctgaacttgaatgaggagcaggtcgaggactatttctttcagctcaaggtgtaatagtgggtgtatgggctgagggtcctggccaagggcacaggctattggagccaggaccaggggtggcaggtagacccaggggagtcaggcccagaaaagttctggaccccaagggaatcttagcagtggctgggatctgagctgggtgggctgtcagaaggccccactgcacatcctggactggttggcagctttgagaagtcaggtgaatgtgttccatttttccatctgtggaatgggagcaagagagtctacttgccctctccccaaacccccctttcagaaagtatctgtgtggccaaagcaaggctgtgaacacaggggagagcaaggctgccccccgtcagcctcgtgtgaacctcacacttcttatttacacacaggctggcrtctgctcaccctcatcctcccagcaggaagggcttgcattttattgatgaagataa

SEQ ID NO: 496902 - DNA, 299 bp, Homo sapiens
ctgtccagaggcactctgcaccgtgtggatgactgtctgggtctggaagaaagaaaccaggtctcacccaggctctyctgagtaaagaccaccccagctcccaccagagggtgccacacggcaggcaccctccaggggcataaccagcccagtggccccacagaccccacggagggtgggtccaggggacgagggagaggcaaaggttaggaccctggagaagacagatggggacgctggtggctctggcccatctttcctctcggggaaacgtctctcagcctagcctccctttgcag

SEQ ID NO: 496903 - DNA, 299 bp, Homo sapiens
ctgtccagaggcactctgcaccgtgtggatgactgtctgggtctggaagaaagaaaccaggtctcacccaggctctcctgagtaaagaccaccccagctcccaccagagggtgccacacggcaggcaccctccaggggcataaccagcccagtggccccacagaccccacggagggtgggtccaggggacgagggagrggcaaaggttaggaccctggagaagacagatggggacgctggtggctctggcccatctttcctctcggggaaacgtctctcagcctagcctccctttgcag

SEQ ID NO: 496904 - DNA, 596 bp, Homo sapiens
tgcccagcagacagagacagggaactcttgagtgggcaagatgtggcccataggccctggtggcctgctggctggggccagcctctcaaaccctcggtccttcctgctgtctgctcagccacccagggcctctgtgttgaactcactttttgtctgcgccccctgggcctgggtgggaaacagacaggctgggagaacggcaccgtggagaaggcaggctgaacggggactgcgcggggattctgttaaaacaaaaggcaccggccggtgaggagaagcattaatagagccaaggagaagccgaaaggcagatgcaggggcrggaggcagagaacaggcaggcagggggatgcagcaagggggttagggccacacggaggcgggagcggaaagggccaggcttcggtgagcagcgcagggggacagtctccctccagctcttccctccccttccacccgcaggggagagagtcagggaaggagggaatgagagatgaggaccaaagggtgaggagcccagatttgctgagggcctactgtgcacttcgctcatctcagggagctcccttgaatgccaaaagggtaacagcagctcc

SEQ ID NO: 496905 - DNA, 623 bp, Homo sapiens
tgtgaccaggacagaaggagtctcagccccacgggtcttagggtcctgtgtggaggcagacacaaatccaattagttactcagacagtctaagcttgtgataaggagaatcctggccctgagaggacgcgacagggagctgagcttgtgtgagagtctgagaggcagcggaggccacaccaggaacgctccaggcggaaggccttccttccaggcagggaagtagcaggcagacgccctgggctggtaaggaactaggtagcaatggggctgctggaccccatgccaagctcccagcaaagtgcccagcgccctggctggggactcaggaggcccaagggaacaaagggrcccatcaagggtctgcaggttccaccgagagggtcaccagagagtgtcaagaagaaggcatgcacctctccccaccaccaccatataacaatggccaccgtgacctttgccctcctgaccaccttcagcagagcctcttcccagatgccctccgcagccccgagccccagcgtagtttccccacccatcccaggccccgtgggcaagcactttgtcaaattctctcttccgcgcctctttaaaggagctatgggccatggtgaggcatgcatc

SEQ ID NO: 496906 - DNA, 572 bp, Homo sapiens
actgtgtttccagaatctttattgactttacttcatagtacaataagatgaaaacaaaacgcaaaccgcctgatttccaagagcttatttaaaaccaaaaccaccatgtgagacttagttagyatagtacacattagatatggatgacatttctgcagtaagtcattgttttaagtctagtaaatatccagatgataacatctatttaagaacagcactgataattatatacgaggaggtcatgttaagtattccacaacaaattaaagagatgatgtccatgaagttatctatgctactctatataacagatggaaaaagcttgggtaatattcagtgcggatactgacttgtgttcctgactcataggcggtgctcagacacatttaacccactgtctgacagaataaatgaacgtgtcctgtaagtgaacccgttctgggcatgaggttaattattttctatatgagtacattaaatcattttcttttccaagggtaaatgaagccttcaatttgattgaataaaatacaagatgtgcaccaccatgcccggctaatttgtttattttt

SEQ ID NO: 496907 - DNA, 572 bp, Homo sapiens
actgtgtttccagaatctttattgactttacttcatagtacaataagatgaaaacaaaacgcaaaccgcctgatttccaagagcttatttaaaaccaaaaccaccatgtgagacttagttagcatagtacacattagatatggatgacatttctgcagtaagtcattgttttaagtctagtaaatatccagatgataacatctatttaagaacagcactgataattatatacgaggaggtcatgttaagtattccacaacaaattaaagagatgatgtccatgaagttatctatgctactctatataacagatggaaaaagcttgggtaatattcagtgcggatactgacttgtgttcctgactcataggcrgtgctcagacacatttaacccactgtctgacagaataaatgaacgtgtcctgtaagtgaacccgttctgggcatgaggttaattattttctatatgagtacattaaatcattttcttttccaagggtaaatgaagccttcaatttgattgaataaaatacaagatgtgcaccaccatgcccggctaatttgtttattttt

SEQ ID NO: 496908 - DNA, 572 bp, Homo sapiens
actgtgtttccagaatctttattgactttacttcatagtacaataagatgaaaacaaaacgcaaaccgcctgatttccaagagcttatttaaaaccaaaaccaccatgtgagacttagttagcatagtacacattagatatggatgacatttctgcagtaagtcattgttttaagtctagtaaatatccagatgataacatctatttaagaacagcactgataattatatacgaggaggtcatgttaagtattccacaacaaattaaagagatgatgtccatgaagttatctatgctactctatataacagatggaaaaagcttgggtaatattcagtgcggatactgacttgtgttcctgactcataggcggtgctcagacacatttaacccactgtctgacagaatraatgaacgtgtcctgtaagtgaacccgttctgggcatgaggttaattattttctatatgagtacattaaatcattttcttttccaagggtaaatgaagccttcaatttgattgaataaaatacaagatgtgcaccaccatgcccggctaatttgtttattttt

SEQ ID NO: 496909 - DNA, 572 bp, Homo sapiens
actgtgtttccagaatctttattgactttacttcatagtacaataagatgaaaacaaaacgcaaaccgcctgatttccaagagcttatttaaaaccaaaaccaccatgtgagacttagttagcatagtacacattagatatggatgacatttctgcagtaagtcattgttttaagtctagtaaatatccagatgataacatctatttaagaacagcactgataattatatacgaggaggtcatgttaagtattccacaacaaattaaagagatgatgtccatgaagttatctatgctactctatataacagatggaaaaagcttgggtaatattcagtgcggatactgacttgtgttcctgactcataggcggtgctcagacacatttaacccactgtctgacagaataaatgaacgtgtsctgtaagtgaacccgttctgggcatgaggttaattattttctatatgagtacattaaatcattttcttttccaagggtaaatgaagccttcaatttgattgaataaaatacaagatgtgcaccaccatgcccggctaatttgtttattttt

SEQ ID NO: 496910 - DNA, 443 bp, Homo sapiens
tgctcctttaccaattgtttctgtctcaggaattggtttcttgttgcactgtgatacacatgaagccatatacctttttcagctcattatccccagaatgtatttgtacattattaacacaraatagacacctaataaatatttctaaatttttattgttcttccttgccacaaaaagcaatcacttttttttagcatgatgtacatgcccttctatcatgttgccctgaactatttatcaaatcttatttcttcccactcccccatttgtttcccatgctgtggctgtacaaaactacttagagctctgtcaactctccatgctattttataataatcaacactaatgaaaagaaagggggctttataacagaggcagaactcattatgttctaaaaaatacacgcatgtttcccatgttgaatagtgtcccgcagaaagtc

SEQ ID NO: 496911 - DNA, 443 bp, Homo sapiens
tgctcctttaccaattgtttctgtctcaggaattggtttcttgttgcactgtgatacacatgaagccatatacctttttcagctcattatccccagaatgtatttgtacattattaacacagaatagacacctaataaatatttctaaatttttattgttcttccttgccacaaaaagcaatcacttttttttagcatgatgtacatgcccttctatcatsttgccctgaactatttatcaaatcttatttcttcccactcccccatttgtttcccatgctgtggctgtacaaaactacttagagctctgtcaactctccatgctattttataataatcaacactaatgaaaagaaagggggctttataacagaggcagaactcattatgttctaaaaaatacacgcatgtttcccatgttgaatagtgtcccgcagaaagtc

SEQ ID NO: 496912 - DNA, 443 bp, Homo sapiens
tgctcctttaccaattgtttctgtctcaggaattggtttcttgttgcactgtgatacacatgaagccatatacctttttcagctcattatccccagaatgtatttgtacattattaacacagaatagacacctaataaatatttctaaatttttattgttcttccttgccacaaaaagcaatcacttttttttagcatgatgtacatgcccttctatcatgttgccctgaactatttatcaaatcttatttcttcccactcccccatttgtttcccatgctgtggctgtacaraactacttagagctctgtcaactctccatgctattttataataatcaacactaatgaaaagaaagggggctttataacagaggcagaactcattatgttctaaaaaatacacgcatgtttcccatgttgaatagtgtcccgcagaaagtc

SEQ ID NO: 496913 - DNA, 516 bp, Homo sapiens
agaaatcaatcatactcacacctcctttttgaatttctggcctcgtgaatggtgaaaaaataaatttctgtcgtcttaagccccacggtttgtagtcatttgttctgttcctagccttaggaaactaacacagcatgctaagggaaaagaagaaaattctgcataaaatgtcattttactttttaaaacaactactgttgacagtaaatgagtattcttccaagattcatatgcagaacatatatgcagcccggaacattttttgggacccatggcataagtgattatgatmgataaaatccaaatattaacctgccaaaagagttattttatcttttgcagtcatttaaaggtaataagcagaggtcatgagccctataaaaattaatctattcatttgttgtcacttgatacttacgatccgttgacatatttaggttttaattctttgtacagattatggttcgtcttgcactgtaattttattgcacaacaaattttttatttatatatcta

SEQ ID NO: 496914 - DNA, 516 bp, Homo sapiens
agaaatcaatcatactcacacctcctttttgaatttctggcctcgtgaatggtgaaaaaataaatttctgtcgtcttaagccccacggtttgtagtcatttgttctgttcctagccttaggaaactaacacagcatgctaagggaaaagaagaaaattctgcataaaatgtcattttactttttaaaacaactactgttgacagtaaatgagtattcttccaagattcatatgcagaacatatatgcagcccggaacattttttgggacccatggcataagtgattatgatcgataaaatccaaatattaacctgccaaaagagttattttwtcttttgcagtcatttaaaggtaataagcagaggtcatgagccctataaaaattaatctattcatttgttgtcacttgatacttacgatccgttgacatatttaggttttaattctttgtacagattatggttcgtcttgcactgtaattttattgcacaacaaattttttatttatatatcta

SEQ ID NO: 496915 - DNA, 516 bp, Homo sapiens
agaaatcaatcatactcacacctcctttttgaatttctggcctcgtgaatggtgaaaaaataaatttctgtcgtcttaagccccacggtttgtagtcatttgttctgttcctagccttaggaaactaacacagcatgctaagggaaaagaagaaaattctgcataaaatgtcattttactttttaaaacaactactgttgacagtaaatgagtattcttccaagattcatatgcagaacatatatgcagcccggaacattttttgggacccatggcataagtgattatgatcgataaaatccaaatattaacctgccaaaagagttattttatcttttgcagtcatttaaaggtaataagcagaggtcatgagccctrtaaaaattaatctattcatttgttgtcacttgatacttacgatccgttgacatatttaggttttaattctttgtacagattatggttcgtcttgcactgtaattttattgcacaacaaattttttatttatatatcta

SEQ ID NO: 496916 - DNA, 438 bp, Homo sapiens
aaggatgcttcagtatgtatttctagtttccctccaaattcttgggctgatccttctcatmcttttttttttctttttttctttttttttttttttgagacagtctcgctctgtcacccagtctagagtgcagtgatgtgatctctgctcactgcaacctccacctcccaggttcaagtgattctactgcctcaccctcccaagctcccaagtagctgggattataggtatgtgccaccatgcccagctaatttttgtatttttagtagagacagggtttcaccatgttggccaggctggtctcaaactcatgacctcaggtgatctgcctgcctcagcctcccaaagtgctgggattacaggcatgagccactgcacccctcctgatccttctcatcctcttttgaagattctttgtcctgtctttaactgttggta

SEQ ID NO: 496917 - DNA, 339 bp, Homo sapiens
aagggcaattaatttatcaggtgacaagtcttacaactcaaggcctgctgagaggaatgccagacagataagaaacaatttgccaggagatcactgagaggttcctgacacccaggaggcccaggtgcctgaggaggggcagcaagcaggcagagtagatgaagtctacacacagagcacctgtgacccatgttcctccctgccccatccgcaggggtgcctgctcctccaagattagactaaggacaaaatracccagcctgaagtccccagggactggactcaggtgtctggactgaggaaaatccctctggtacccactgtcctttcctctatgac

SEQ ID NO: 496918 - DNA, 626 bp, Homo sapiens
actcgagtcccaagaggctggtggtggtggtggtggtggtaggggggcaggtgctgatatgaggctgaggtgggggagggtgacaataaacaagtacacagtaaataagagaatttcagagcatggtagagacaatgtgtgagggaaggcgcraggacagagctgctttggagagaggggtccaggatggcagctcccaagaggggcctttaggctgagatctgcaccgtgagaaggtgtaagctgggtgcaccctcacttatcaggctctcgtgtcatcctgctgggcatcctgttagcagccccgcatgctgactctcgtggagaacagggaaggccccaggtgactgggacagtgagacagctctgtgactgttccatatggacaggccaaaacagggttttaaggcacagtagcttcagtctcctctgttgcctacatctcctccttccctgttcttctgtctaagcggaaggagttagtatcagatttgatgtctctcctaccaaaataaacactagatttaaaaatatatattttatatttatataaatatatattcaaaaggactggagagctactgaggtggtaagaccttgaggccggttgtgcacaggtctgggca

SEQ ID NO: 496919 - DNA, 573 bp, Homo sapiens
tagattcacttccttcaaatccctatatggttatgcacataaattttgcatttattatcaggggttttatggacaacctgcatcctgtaatagcctatgggttctagttaaaatccttcatgtaaggtacaagcctctttttaaaaattttaaaatctgataaattctgaaaaatcaaaatgcttttctatattccaatgtttacacttgttcaaaggtaactatagtggatatctgctgcttttatctgcctagtacccattttatccttttcttctggtaacagtgcccaagcacccttttacaagggtgtgcacgtgacccaggttgcatcaagaagaatattgttggaggccgaaagactgagggttgtgatcaactcagtataccactgggggctatataagtaaacagcaaactgttctcgtaaacgcagaatgttggcaaactgacaaactgggtatgccacccagaaggaatgctgagggcagtcacgacccaggcacaagtgtttcttgtgaytaggcacatatgaagcctattagtaatcatatgaacctatgatcaattaag

SEQ ID NO: 496920 - DNA, 561 bp, Homo sapiens
accagcaatacattaatgttcaggcagcaaggcaaaaacactaacatgactcaagagctcttaactctagtctgatctcaaccactttccagccatatgaatgtaggaaaattgcctaggaagagagaggtatatttgaatggtttcaaaaataaaataaagatagaaataaataactgctctactaaattcaggggattgttacaaagctcaaatgaaataaagtattttgttgtgtgtaaaacattatacacatatcaggtgtgattaaactttaaaatgtattacctttattggcatatcacagcagtgaaaagcacasacttggagtcagactgccacctattagctgtatgatcttgaccacataacacttgtgcctcagtttctcttctgtaagataataataattgtaattatggacttattgtaaggactaaatgagataatattatataaagcacttcaaataattcctgacccggagtgttgtattttttattattaccattattatattattctctggctgaaaattctattgtgatttccatgcttggc

SEQ ID NO: 496921 - DNA, 639 bp, Homo sapiens
aaatgcaacatgcctcagtgtaattaggtaaaatcagatgttctaaagaatgtttttacttccatgtatgtgtacaaacaatttgtagcttaatttacaaatatatcaacttcttagctaagacataattatgttcttggatcttctgatataaaaagttaaatctktacagagaaagctaagaagatacatgagcacctttagaataatgattaataaacaagacatttgacaaaatgttggttaaaggcattaaaatcactcccttattcctgaagtttcagatctgggagattccagttttgaaaagaagtatataaacttgacatctgaggggatgtgtatatgaaagacccacaaaaatgtctattgagttctttcttcttcatcagaattaagtccacagatgaacaagctaagctttgtgtggggtcctgagataaccttcatcatgattttacagctaacaggcaaaactggtcatgcacttgtgcaattttcccgtttgtttatgtaaattcagccacacattcaaatgctgtcctctgttccatcaccttggttctcttagcttctgcttcctgcaaactaaatagccaagtgtcttcgtgtgtgcagctactacgtgatactttgcct

SEQ ID NO: 496922 - DNA, 608 bp, Homo sapiens
aacaaattttagctaagatttaaaaataccgtgttatgtgatgtggatatgccagacattacttagttactsccctactttttcttattatagttatttttcatttttttattgtaaatattttcataatgtcaatcaaagagtacttttgagatccaatgatatatactgaaactttgagaagctagttatgccattaggaatcccagtctcttaagagttttgcttaccatttaagacgaatctgaaagaaacagtcaatcaacattgcattaatccattaatgaatataattatatggatgtaactgagacaggattttcaatacacaaaacgtgtgctgttaagaaatagataaaaaggaagcctataaagattttaccccaagttgcaatagttccttgctatcaaatttttggattggtttataaaactttatgttcaatacttcctgtttaattcatgaagcatattctggccaatatgggtgaaaccacagagaaagaaaagtaaacaagtatacttaggataattcatggtaattgctcttatgaaagagattatgaatcattttatctctacaaatttgatgcatttccaagcattct

SEQ ID NO: 496923 - DNA, 559 bp, Homo sapiens
ggaacaaaatcaatagaagccaagaacaacaggcattgctctttcaagaccatttcatcagcatttagcagaagcaaacacaatgaggtatctataagctgcaagaataacaacattttcactttgttattcactgtgctctaacctgaaccccatcttcttgttccaaatgccatttcaatacttgaaattgctataactggtaaaatcacaaacacatttgtgaatttctatttgcttaaataagctgagtgtgtgacctttctctgtctcaggttcagataatcttcattaatagactattttctttttgcaaatattgttttaacccatctgaggctcaatgtcccttccctagaaataccaactaatggttctgtttccaccatgggatgtttaggttagacagtcagtgcacagggaaaattaacacagcctccacctgatgcagaccatgttaatttctgcccgcaccgctytgtgccgaatgcaccagtgcgccttggcaacagctctgggccccggagaggcaccttttctaaatgtatctggttactct

SEQ ID NO: 496924 - DNA, 393 bp, Homo sapiens
tggaaaaaaatgaggatcttaacattccaactgctttgaaattttatcactgaagtctttcgttaatattctccttacaaacatattagacrcaatagtcttttttttttgaaggttttgagctcaaggaaatttcatggaaaataaaaaaaaacatgaaaccttatcacttcagtataatctcataacagtttagaaaaagaatcacattgggtctgattttccatttcaagtgatctgtatggaagggctgaatgaacatgggttggtgaagtgaggcggtaatttcaccccgaaggcaatggcagcaaatacttgtagttagcaacgtataaaggtatgcttctcaacaagttcagtcactttagtctaccttaatgttaacctcacacc

SEQ ID NO: 496925 - DNA, 393 bp, Homo sapiens
tggaaaaaaatgaggatcttaacattccaactgctttgaaattttatcactgaagtctttcgttaatattctccttacaaacatattagacgcaatagtcttttttttttgaaggttttgagctcaaggaaatttcatggaaaataaaaaaaaacatgaaaccttatcacttcagtataatctcataacagtttagaaaaagaatcacattgggtctgattttccatttcaagtgatctgtatggaagggctgaatgaacatgggttggtgaagtgaggyggtaatttcaccccgaaggcaatggcagcaaatacttgtagttagcaacgtataaaggtatgcttctcaacaagttcagtcactttagtctaccttaatgttaacctcacacc

SEQ ID NO: 496926 - DNA, 605 bp, Homo sapiens
tgtgaggctctgtcaccttctccagccacgcctccctaaggagccctgctcttctgtgcacatcagcgaacaccagcaccacggctggtccctcagggcagggcatggaggcctcgcctgcctctcctcacaggtcttagctcactggtagtaatgtaaggagccacaaagaacagggtgaccaagtcatcctcgtggcctgggacttctctggtttcagcgctggaagtgcctcataccaagaatgcactcggtccctgccaactagaaatggttggttactttactaagggacagagttgaccagagtagggtctgggctcaagcagatggggaattcagggagcattcagaattgaggcctccctcagcctcccccacygtccaggtgagagggcacaggtgggagtttacctgattaccacacggggccaaggcagggctgacagacccagccaggtctgcacgcttctctgagtatcccagcttgaaacagtgaaaggagcaggtacttacagacagagccacaactcaattcaaagcaaagcaattccaccacattgtaatgactccatggtttacacactcactcggtagatttcatg

SEQ ID NO: 496927 - DNA, 601 bp, Homo sapiens
tacttacaaggctgcagctgcacaaccttctgatttggrctgggcttgctcgtgcaactgtggtcagcccaggggtcagctgtgggttggctgtgctggtcatagcaaagacagaggggcagagtcagctcagctccacagggtctttcggcctccagcaggctggcccaggcttgttctggaggtcacagggattcaagagagtcagtgaaagtgttcaaggcctctggaggcctaggctgctgcttccaccccattctattgtccagaataaatcacaaggccaaattcaagaggtagggacagagattccacttcttaataggaagtgagctgaagactcatattgcaagagatgtgaacacagggaggcatggagactcaaagttctttagcaagcaaactatcacaaggtaggtatttttataacatcccactgaggcccagagaggttcagtgacttgctcaaagtcagacagctaccaaggggcaatggtgaggtttgggcccagggctgtgcccttctctacaactctgctgcctcttaaaagctgtgagcaaaccaaggacagagaagcccaaggccttgggcttcggggat

SEQ ID NO: 496928 - DNA, 636 bp, Homo sapiens
gatgatgatgatgatgatgatgatggaaatctctgctcccaaagtcttacctcctgccagattccacagttgatatggacacagagctgggcaggaccacagggattatctgtttaaccccttcattttaaagctggggatacagccttggagaggtacagaggtatgtccaaggtcacacatccgagttggggcagagtcagggtcctgccctagccccgtcctggtctctgccccacttgggctgccaggcctcctcttgctgccacagattcttctctttcctcccagtccactgcagcaggacctggttcttggcttctcacctgtcccagcagactttaactatgaatgttcatcactgggttttaattatcctgcaagttctgcaagcactttccaggagacatttttctctattattttcytccagatgaatgagtttggactcatctgtctctgataaccaggaatagccacctcctgacagcaccaacacctgcttgcttctcaggggctcctgacccattgtttccagaaacaaagatctcccctgggtgcatccccctgtacaggatggggaaaccgaggcccaaagcagagggaccagctcgaggtcacacagcaggtcagcag

SEQ ID NO: 496929 - DNA, 661 bp, Homo sapiens
tgccgcctcccccaaaaccaatttcagtggcaggagaggaaaggcatggtacacaatgaggagagaaaaataactgtgaagmactttgcaaaaataaagagttatataaagtcccaataataataaatcaccttgcctgaggtatgaaaaccttaaaataacctgaaaaatcaaaacgtggaagagaagcaggaggcattgactagcttccagaaggtttgtgtgcttgccttaaattcctccccctcaacttttccagccaggtttcttaagggtaaacctcagtcaggttttcagatgaaaatagatctggcccctggttaaaactgccacccctagtccatgcctgcccctgggttcatcagaagagagcacagactctgggagaaacctcttcctcttccctgaatctggcacctgccttctggaatactgatgcatctgttttgtgcaggttttctctctctccttttgttctagagagaaagagagaaagagagagagagagatttttaaaaaataatcttcattcctggaaaaaaaaaaagaaagaaaaaaaaataggcctttctgaattcccagtcctggagctctgttctttatatatctacttgttccattgttaaataaacctacatatttaagggtgacacattctctt

SEQ ID NO: 496930 - DNA, 647 bp, Homo sapiens
tctattccaattagcatttgaaaccagaagggccagtgttcaaattccagtttcacaactgattgtgtgatcttgagacatttacctaagtttattttcttatctgtaaaataataactacttcccagagttcttataataaagcagttttcaaagtatagtcatacattagcagcagcactacctgtttaagatgcaaattctcaggtctaccccaagacctrcagaatgagaaagctctgagggtagagcctaaaaatctttaacaagcgtttccggtgattttatacatgctaaagttcgagaaccactcttataatgaattaaatgatacaatgtaggtaaatacccaggcacagtgccaggtagccatattacagagtgactgtaaaataagtatttgtttcttcctctgccactcctcactcccccaaacttcccacacacgctttaccccacacacacacctgtacaagcatgcgtgcatgtgtgcgcgcacacacatacacacacacatacacaccagtcaacaattgtttggaatagtgtacatgagataaaacacttttgtttcaaaatcacatccatttagagctggaagcatacctataaaacttgatatatctcaacacaaccagtaatgtcat

SEQ ID NO: 496931 - DNA, 647 bp, Homo sapiens
tctattccaattagcatttgaaaccagaagggccagtgttcaaattccagtttcacaactgattgtgtgatcttgagacatttacctaagtttattttcttatctgtaaaataataactacttcccagagttcttataataaagcagttttcaaagtatagtcatacattagcagcagcactacctgtttaagatgcaaattctcaggtctaccccaagacctgcagaatgagaaagctctgagggtagagcctaaaaatctttaacaagcgtttccggtgattttatacatgctaaagttcgagaaccactcttataatgaattaaatgatacaatgtaggtaaatacccaggcacagtgccaggtagccatattacagagtgactgtaaaataagtatttgtttcttcctctgccactcctcactcccccaaacttcccacacacgctttaccccacacacacacctgtacaagcatgcgtgcatgtgtgcgcgcacacacatacacacacacayacacaccagtcaacaattgtttggaatagtgtacatgagataaaacacttttgtttcaaaatcacatccatttagagctggaagcatacctataaaacttgatatatctcaacacaaccagtaatgtcat

SEQ ID NO: 496932 - DNA, 254 bp, Homo sapiens
ggtaatgagaactagctagtgtgagggtgctttattctacttacagggactcaattccacaaagaccrctgaaagtccacaaaagacttttcagaattgtctgttggacaggctggagtatttatccattgtctctttttccccaaggcttgagagtggcccccaggaacactgaactgtgggctgtgctttagcatgggttttttgtgttcctggaattggagaaggtcctgactactgactttagtcagtac

SEQ ID NO: 496933 - DNA, 613 bp, Homo sapiens
tgagattagtatggatagaacgaagctcgacgcactgccgaaggatgcaagcggtaaacgttggtgacatccaagtggtgctaattctgcaggcttgcagaatgcaagggctgtggaggcacagttttctctacctatatttcaaaggttgtcacagacagccttggaatccaagcagagatttgccagaggggcaaagccaccacagaaagtctccactagggcaatacctagtggagctgtgggagcaaggccaccctagagatcccataactatagagccrccagcatgcaatgccagtgtaggaaggctgcaggcatccaacttcaacccatgagagaagctgcatgggctgcaaccagcaaagccatgggagtgcccccaccccagggttttggaggttttggaggcccaacccctgcctagtatatgcagatgatgggacatgaagtcaagaagattattccccagctttaagatttagtgttgttttccctgttgtgttttggacttatttgggacttgtttccactttcttctttcctgttgctcctttttggaatgacattgcctatcctatgcctgtaatgtgttttgatttcacagattcac

SEQ ID NO: 496934 - DNA, 613 bp, Homo sapiens
tgagattagtatggatagaacgaagctcgacgcactgccgaaggatgcaagcggtaaacgttggtgacatccaagtggtgctaattctgcaggcttgcagaatgcaagggctgtggaggcacagttttctctacctatatttcaaaggttgtcacagacagccttggaatccaagcagagatttgccagaggggcaaagccaccacagaaagtctccactagggcaatacctagtggagctgtgggagcaaggccaccctagagatcccataactatagagccgccagcatgcaatgccagtgtaggaaggctgcaggcatccaacttcaacccatgagagaagctgcatgggctgcaaccagcaaagccatgggagtgcccccaccccagggttttggaggttttggaggcccaacccctgcctagtatatgcagatgrtgggacatgaagtcaagaagattattccccagctttaagatttagtgttgttttccctgttgtgttttggacttatttgggacttgtttccactttcttctttcctgttgctcctttttggaatgacattgcctatcctatgcctgtaatgtgttttgatttcacagattcac

SEQ ID NO: 496935 - DNA, 497 bp, Homo sapiens
tataagtgggagctaaattatgagaactcatgaacacaaagaagggcacaacagaggctacttgagggtggagggtgggaggagagagatgagcagaaaagataactattggatactgggcttaatacycgggtgatgaaataacctgtataacaaatccctgtgatatgagttcacctatgtaacaaaccttcacatgtacacccaaacctaaaattaaagtttttaaaaaatttgctcagttattaccaagacaagtcaatccatcgaatggaagaactagcacaactgatctttgaaaagtaaattgaaatgattgttcagtggaactaactgctcagttcagtcagactgggagagctataacctatctaggttcagcctatgtacacacagctgcaggttaaagctatgtctataaaagcacaggtacagttattaaggatcagagatgcgggagaataatggggttaagaatggagtaaacaatcaagatt

SEQ ID NO: 496936 - DNA, 497 bp, Homo sapiens
tataagtgggagctaaattatgagaactcatgaacacaaagaagggcacaacagaggctacttgagggtggagggtgggaggagagagatgagcagaaaagataactattggatactgggcttaatacccgggtgatgaaataacctgtataacaaatccctgtgatatgagttcacctatgtaacaaaccttcacatgtacacccaaacctaaaattaaagtttttaaaaaatttgctcagttattaccaagacaagtcaatccatcgaatggaagaactagcacaactgatctttgaaaagtaaattgaaatgattgttcagtggaactaactgctcagttcagtcagactgggagagctataacctatctaggttcagcctatgtacasacagctgcaggttaaagctatgtctataaaagcacaggtacagttattaaggatcagagatgcgggagaataatggggttaagaatggagtaaacaatcaagatt

SEQ ID NO: 496937 - DNA, 497 bp, Homo sapiens
tataagtgggagctaaattatgagaactcatgaacacaaagaagggcacaacagaggctacttgagggtggagggtgggaggagagagatgagcagaaaagataactattggatactgggcttaatacccgggtgatgaaataacctgtataacaaatccctgtgatatgagttcacctatgtaacaaaccttcacatgtacacccaaacctaaaattaaagtttttaaaaaatttgctcagttattaccaagacaagtcaatccatcgaatggaagaactagcacaactgatctttgaaaagtaaattgaaatgattgttcagtggaactaactgctcagttcagtcagactgggagagctataacctatctaggttcagcctatgtacacacagctgcaggttaaagctatgtctakaaaagcacaggtacagttattaaggatcagagatgcgggagaataatggggttaagaatggagtaaacaatcaagatt

SEQ ID NO: 496938 - DNA, 497 bp, Homo sapiens
tataagtgggagctaaattatgagaactcatgaacacaaagaagggcacaacagaggctacttgagggtggagggtgggaggagagagatgagcagaaaagataactattggatactgggcttaatacccgggtgatgaaataacctgtataacaaatccctgtgatatgagttcacctatgtaacaaaccttcacatgtacacccaaacctaaaattaaagtttttaaaaaatttgctcagttattaccaagacaagtcaatccatcgaatggaagaactagcacaactgatctttgaaaagtaaattgaaatgattgttcagtggaactaactgctcagttcagtcagactgggagagctataacctatctaggttcagcctatgtacacacagctgcaggttaaagctatgtctataaaagcasaggtacagttattaaggatcagagatgcgggagaataatggggttaagaatggagtaaacaatcaagatt

SEQ ID NO: 496939 - DNA, 617 bp, Homo sapiens
gcctcaaagtattccatttgtcttcaaaataatcacgtaattaagtaacatgtggtacaragttggattcttaggaatcacctaatcatgatgagctttcagaaaaatcaaagtaatttcccagtgctcgtaatcttcagacacctcatctcattgaaaatgagtggcatattatgcagccttaggccaggagattgctcaggtgcttggagagtgcacataataaagctaagactgagcttaagcccaggtgggtcagttagcttcacgcagagaaaatcttttttagccaccaactacacccaaattgtgatcacaagacaaattgtgtcatattagccataaagaagcatggacaagcatgtctctagctctatataacctattactactaatggaaaaataagtcctaacaccacctcttactggttacatcatctctccagggtcctgcctacaaacacgatatctttcagatatgtttttctctaaaatactactctttaacagaataaatgcctacaaaggggcttcatttttccacaggttctggacacccttcttaaagttattattttaattgagccctttctcctgaactctgaatcacaagtcac

SEQ ID NO: 496940 - DNA, 617 bp, Homo sapiens
gcctcaaagtattccatttgtcttcaaaataatcacgtaattaagtaacatgtggtacagagttggattcttaggaatcacctaatcatgatgagctttcagaaaaatcaaagtaatttcccagtgctcgtaatcttcagayacctcatctcattgaaaatgagtggcatattatgcagccttaggccaggagattgctcaggtgcttggagagtgcacataataaagctaagactgagcttaagcccaggtgggtcagttagcttcacgcagagaaaatcttttttagccaccaactacacccaaattgtgatcacaagacaaattgtgtcatattagccataaagaagcatggacaagcatgtctctagctctatataacctattactactaatggaaaaataagtcctaacaccacctcttactggttacatcatctctccagggtcctgcctacaaacacgatatctttcagatatgtttttctctaaaatactactctttaacagaataaatgcctacaaaggggcttcatttttccacaggttctggacacccttcttaaagttattattttaattgagccctttctcctgaactctgaatcacaagtcac

SEQ ID NO: 496941 - DNA, 500 bp, Homo sapiens
ttcttggattgctccttgggagttaagattgtcaatactcctgtgaagcaagggatttcagccatagaacaaagatttattgttgccacctgaaaagtttacaagtatttattgtgtatttgatacattgcttgaaaagatgaaatctgttaaagattcttttcgatgtccaggttaagaagaaacctccttgtattgagtgaaaytatatgttaaatgtattagagaatgtaggtggtatagaaattgatttttcttggtgtagaacaactcagttcggcaaagtttaaaatttgattaaacaagagaagtggttcaggttgaagatggacttgttaggaagtgatcaagtcctttaagtacttgtttctttttcaggttgtgatgtggccattccgaattttgttgagagtttggtttataattgtctcttttgtcttgttagtaaacattcatttgcaacagttttgaaggtgctgagtggaaaaccgaaacacatg

SEQ ID NO: 496942 - DNA, 557 bp, Homo sapiens
ctgggcctccggtaggtgtcaaggaatgggcagatggaatgctggggccagctcttgcctctgggtctgcagaatgcagagctggggrcatgcactgggcgtcaggtccccagcagggcagcagtgagtgcagcctcgctgctgggagaaactgccctgctcactcatcggagctcggggagcgaggcggggctgctcttagccctgccactaagttcatccacaacctcgagtagtatctctgggcctttgttcacctggcaaatgtgatgagtatattgcatttcccttatggctccccttagttctgaatctctgctggtgcgtgtataccttcaagccttctcattattgctgttctctgtgcactggccaggcaagcgggctggcaaccacgtttcgttaaccacctttattctacccaaagattgcttcttcattttccctccgtgtttcccccgtccaagcaaaatatcaaacctcttttttcaaagggtcatagtcaaatgagtgaaccaaagagatcaacgcttttgtaacagccccacatcagcagc

SEQ ID NO: 496943 - DNA, 557 bp, Homo sapiens
ctgggcctccggtaggtgtcaaggaatgggcagatggaatgctggggccagctcttgcctctgggtctgcagaatgcagagctgggggcatgcactgggcgtcaggtccccagcagggcagcagtgagtgcagcctcgctgctgggagaaactgccctgctcactcatcggagctcggggagcgaggcggggctgctcttagccctgccactaagttcatccacaacctcgagtagtatctctgggcctttgttcacctggcaaatgtgatgagtatattgcatttcccttatggctccccttagttctgaatctctgctggtgcgtgtataccttcaagccttctcattattgctgttctctgtgcactggccaggcaagcgggctggcaaccacgtttcgttaaccacctttattctacccaaagattgcttcttcwttttccctccgtgtttcccccgtccaagcaaaatatcaaacctcttttttcaaagggtcatagtcaaatgagtgaaccaaagagatcaacgcttttgtaacagccccacatcagcagc

SEQ ID NO: 496944 - DNA, 528 bp, Homo sapiens
gggttgtgccggctgaagtgctttgttggggcagtagcagcaaaatatgtgcttgctcatgcatgccaatagctttggctgtgtggctggttacatgcacatcaactggtgtgtagtaccagtggaagcgtggctgtggtacttgtgtcagcagtgctagttgtggggcacagcagggagagtattgctagtgtctgtgcacacycttgtgccagcggtggcagtggtgggggcagggcactctcaggcataggactgtcatcctccgtgcagggtttggtggggttaccagcatctgtgtacacatttgtcctggcagcagtgttgatatgggggcagctggttcgacagtgttcatgtgtggacatagcgcattcacagcattggtggttgtgatgcaggggtgtggcatgtctagcatctgtgcatgtgttcatgctggttgcagcggtggtggaggggaagtcagcaggttgtgcttatgtctgcagcagtggtacagcaaggtgcatgtacacatgtgcacca

SEQ ID NO: 496945 - DNA, 528 bp, Homo sapiens
gggttgtgccggctgaagtgctttgttggggcagtagcagcaaaatatgtgcttgctcatgcatgccaatagctttggctgtgtggctggttacatgcacatcaactggtgtgtagtaccagtggaagcgtggctgtggtacttgtgtcagcagtgctagttgtggggcacagcagggagagtattgctagtgtctgtgcacacccttgtgccagcggtggcagtggtgggggcagggcactctcaggcataggactgtcatcctccgtgcagggtttggtggggttaccagcatctgtgtacacatttgtcctggcagcagtgttgatatgggggcagcwggttcgacagtgttcatgtgtggacatagcgcattcacagcattggtggttgtgatgcaggggtgtggcatgtctagcatctgtgcatgtgttcatgctggttgcagcggtggtggaggggaagtcagcaggttgtgcttatgtctgcagcagtggtacagcaaggtgcatgtacacatgtgcacca

SEQ ID NO: 496946 - DNA, 596 bp, Homo sapiens
atgcactaaagtggcaagaacaagggtatgggcagagcaatgacagtgtttattgcaagaagtgggagagcttttcttcaattgtgaactaactatgttatcttaaatggggactttttagcatttttgaaattggtaggcacacgtgtgaatagcaggcagttaaagaagcgaaatgcagcagggtgcagtgtgatcccaacacttcgggaggccaaggygggaggaatgcttgatcccaggagttagagattagcttaggcaacatagcaaaccccatctttacaaaaaaaataaaaataaaaaaaggagatcctgccatttgcaatagcatggttgaacctggaagacattatgctaagtaaaataaaccagatacagaaagaaaaatactgcatgatctcacttatatgtaggatcttaaaaaaaaaaaaaaaaaaaaggcaaggccagggtggtggctcacacctgtaatcccagtgctttgggaggctgcagcagaaggctcacttgagtctagcagctcgagaccagcccaggcaacatggtgaaacttgatctctacgaaaaaattaaaaaattaactggatgtggcc

SEQ ID NO: 496947 - DNA, 435 bp, Homo sapiens
gaaggagaaacagccccttttaatcactcccaccagggaaccctcatctctcctgggctatttgaaatccttactcctttatgctaaaaagttacctcctccaaaaattcctttctaattattccatccctcccctcctctcccctgccccaatctcatgtaacactatctggttcctttcttatggcatccatcartgagagttcagcataggaaacagaaatcactacaggtattttaagcagaaaaagatttaatagagagatataagggcttacaaaatttggggcagggttgcgggagggagctctagaggtgggtcggaaattactcctggaactccgcaaaactgatctaccataagagccactacctccaaggccaccactgaaactattgcattcaagaacccaccactgtattctaggaatcagt

SEQ ID NO: 496948 - DNA, 435 bp, Homo sapiens
gaaggagaaacagccccttttaatcactcccaccagggaaccctcatctctcctgggctatttgaaatccttactcctttatgctaaaaagttacctcctccaaaaattcctttctaattattccatccctcccctcctctcccctgccccaatctcatgtaacactatctggttcctttcttatggcatccatcaatgagagttcagcataggaaacagaaatcactacaggtattttaagcagaaaaagatttaatagagagatataagggcttacaaaatttggggcagggytgcgggagggagctctagaggtgggtcggaaattactcctggaactccgcaaaactgatctaccataagagccactacctccaaggccaccactgaaactattgcattcaagaacccaccactgtattctaggaatcagt

SEQ ID NO: 496949 - DNA, 435 bp, Homo sapiens
gaaggagaaacagccccttttaatcactcccaccagggaaccctcatctctcctgggctatttgaaatccttactcctttatgctaaaaagttacctcctccaaaaattcctttctaattattccatccctcccctcctctcccctgccccaatctcatgtaacactatctggttcctttcttatggcatccatcaatgagagttcagcataggaaacagaaatcactacaggtattttaagcagaaaaagatttaatagagagatataagggcttacaaaatttggggcagggttgcrggagggagctctagaggtgggtcggaaattactcctggaactccgcaaaactgatctaccataagagccactacctccaaggccaccactgaaactattgcattcaagaacccaccactgtattctaggaatcagt

SEQ ID NO: 496950 - DNA, 375 bp, Homo sapiens
tattatgtgcccatgacattccaacatggcaaggttaacttcttagaacatgcagaatagcatttaaactccttacccatctctctactgcctgaattcacttttgattggggttcttggacaatggccctgaagatgctcagacacacccacatgaatacatcactcacagcataagcatgaacaattaaaatcgctaatgtttattagctacttaatatgtgctaggcactgcactaagcaacttgcatgcattatttcttctgaaacaatcttatgaggtaggcactrttattgtcctcacctcacagatgggatgagaaaaccaagacacagagaggttgtggggcttccccaaggatgcacagctaagta

SEQ ID NO: 496951 - DNA, 620 bp, Homo sapiens
cctaacatatagttgttcttcaacaatatttattggataaaaaaagaatattaagattcaataagctctggatagcaaggcaaaattgccttaagaatatccaatacactacaaactgtaaagttgtttttcttttaaaatgcactacataaatatgtcattcaaacatttaaaaatatataattaaacacattaacatattggcttgtcatgttacaagattataataggtaatatgtattttttaaattcccctctgtaaatattgttccttaagactgctsccactcaaggaaacatgcatcctgagaatagtacttttttttggtcaatcatctttttctctgctttaagataaagccagtaaatattttcctgttttctacaaggaataagaatgaaagattctatatttaggtaatttcccctatctccaattgatctttataattcacattttacaagtgcacccctcttttcatcaacattttgaaacatttgaaacagttctttttccttccacctagaaattagtggagtacacaatcctattttctgattcataatattatgactttctttgaaaaagtcaccattttttctgagtcagcatttcaaac

SEQ ID NO: 496952 - DNA, 620 bp, Homo sapiens
cctaacatatagttgttcttcaacaatatttattggataaaaaaagaatattaagattcaataagctctggatagcaaggcaaaattgccttaagaatatccaatacactacaaactgtaaagttgtttttcttttaaaatgcactacataaatatgtcattcaaacatttaaaaatatataattaaacacattaacatattggcttgtcatgttacaagattataataggtaatatgtattttttaaattcccctctgtaaatattgttccttaagactgctcccactcaaggaaacatgcatcctgagaatagtacttttttttggtcaatcatctttttctctgctttaagataaagccagtaaatattttcctgttttctacaaggaataagaatgaaagattctatatttaggtaatttcccctrtctccaattgatctttataattcacattttacaagtgcacccctcttttcatcaacattttgaaacatttgaaacagttctttttccttccacctagaaattagtggagtacacaatcctattttctgattcataatattatgactttctttgaaaaagtcaccattttttctgagtcagcatttcaaac

SEQ ID NO: 496953 - DNA, 607 bp, Homo sapiens
aaaggggaaaacagatgagaaggtgagtaatgcaatgaatgcttaccaaagaagttatcctggattatcccagtgggccctaaatccaatgacaagtgttcttatgagaacaaggcagagggatattaggcctaagaggaaaaggcaatttgaccaaggaggcaatgatcgctgtgatgcagccatgaataaaagaaagsctatcaccctcagaagctggagaaagcaacaaatgaattctccttgagaggcttctgaggaagcacaaccctgatgacaccttaattttggacttctggcatccaaaactgagagaaaaataaatatcttttgttttaagccactaagtttgtgagaatttgttacagcggcccataaaggtggggaaaaaggaagaaaggcatctatgtcaaagaagaaagcatgaactcacattctgtgcactttgcaaacaaatggtagctctttgtccaatagaaaacaataatgctgaagataataataggaacaactaataataataatgagcttaacacactttaaagtatttttaaagcttttaaatgatttgaagatgcagaatctcaatcattttctctttgtatat

SEQ ID NO: 496954 - DNA, 607 bp, Homo sapiens
aaaggggaaaacagatgagaaggtgagtaatgcaatgaatgcttaccaaagaagttatcctggattatcccagtgggccctaaatccaatgacaagtgttcttatgagaacaaggcagagggatattaggcctaagaggaaaaggcaatttgaccaaggaggcaatgatcgctgtgatgcagccatgaataaaagaaaggctatcaccctcagaagctggagaaagcaacaaatgaattctccttgagaggctyctgaggaagcacaaccctgatgacaccttaattttggacttctggcatccaaaactgagagaaaaataaatatcttttgttttaagccactaagtttgtgagaatttgttacagcggcccataaaggtggggaaaaaggaagaaaggcatctatgtcaaagaagaaagcatgaactcacattctgtgcactttgcaaacaaatggtagctctttgtccaatagaaaacaataatgctgaagataataataggaacaactaataataataatgagcttaacacactttaaagtatttttaaagcttttaaatgatttgaagatgcagaatctcaatcattttctctttgtatat

SEQ ID NO: 496955 - DNA, 607 bp, Homo sapiens
aaaggggaaaacagatgagaaggtgagtaatgcaatgaatgcttaccaaagaagttatcctggattatcccagtgggccctaaatccaatgacaagtgttcttatgagaacaaggcagagggatattaggcctaagaggaaaaggcaatttgaccaaggaggcaatgatcgctgtgatgcagccatgaataaaagaaaggctatcaccctcagaagctggagaaagcaacaaatgaattctccttgagaggcttctgaggaagcacaaccctgatgacaccttaattttggacttctggcatccaaaactgagagaaaaataaatrtcttttgttttaagccactaagtttgtgagaatttgttacagcggcccataaaggtggggaaaaaggaagaaaggcatctatgtcaaagaagaaagcatgaactcacattctgtgcactttgcaaacaaatggtagctctttgtccaatagaaaacaataatgctgaagataataataggaacaactaataataataatgagcttaacacactttaaagtatttttaaagcttttaaatgatttgaagatgcagaatctcaatcattttctctttgtatat

SEQ ID NO: 496956 - DNA, 607 bp, Homo sapiens
aaaggggaaaacagatgagaaggtgagtaatgcaatgaatgcttaccaaagaagttatcctggattatcccagtgggccctaaatccaatgacaagtgttcttatgagaacaaggcagagggatattaggcctaagaggaaaaggcaatttgaccaaggaggcaatgatcgctgtgatgcagccatgaataaaagaaaggctatcaccctcagaagctggagaaagcaacaaatgaattctccttgagaggcttctgaggaagcacaaccctgatgacaccttaattttggacttctggcatccaaaactgagagaaaaataaatatcttttgttttaagccactaagtttgtgagaatttgttacagcggcccataaaggtggggaaaaaggaagaaaggcatctatgtcaaagaagaaagcatgaactcacattctgtgcactttgcaaacaaatggtagctctttgtccaatagaaaacaataatgctgaagataataataggaacaactaataataataatgagcttaacacactttaaagtatttttaaascttttaaatgatttgaagatgcagaatctcaatcattttctctttgtatat

SEQ ID NO: 496957 - DNA, 574 bp, Homo sapiens
tcacatatagaattataagcacccctctcagacaaagctagcgaaatagagtcaatgaggaaaaaacaacagaacaaaaaaactcctctgtaagtcaaaaactctttggccatccccttctcctagcaggtatggtggaaattttcccaccctaaaataacactgattatcccatacaaactaaaccttcaatggtttaaagaacccaaatgttgaaaagctatgaataaaaaccaataatctaatcatcatttcaaagggtgacagataacaagtggtaacacctcatgtccacaacccaaagaaataacagggtgtgacctctgactaagactgaactcaaaacttccggagccactctccctgatatctgcctcttctttcctccctcctttactgcctctctccccacctctgtacaaccccactctcttctcccgctcatttattttaaaaaaaaggaaattttgtttcctgtctaaatgtctaaatctggtaatataaaagtttagtatttayccgcaggggggaaaaatccacctgcataacactcagtagaaaaaggcttccccac

SEQ ID NO: 496958 - DNA, 500 bp, Homo sapiens
tatgtaaataatctagcattttcatcgtaagaggttgttttatacatttagtgatttagagtccgaaaatctagatttaaatcctagctctaccccttactagttatataatgttgggcaagtcactcatctttactaaacctcattttatgaatctataaaatggaactaagagcactctattcatcacactgttgaattgaaagtatctatsaagtaatatatatagaagaactacataaattatgaagctttgttttaatagagccacaaagttctcataactcctcattaatatactggaaactccttccaccttctaaccccattatattgaaaagatttgggctttatcatctgcttaattcatgggattgtagaggtctgtggatgctgcatttgttgtttgaattaacaaaaccagcttgactgttttactgtggttgctatggttaccgtgactttttggccttctttcttgagggttgcttgccctctgt

SEQ ID NO: 496959 - DNA, 671 bp, Homo sapiens
ctgctaacacactgaactatttgctactcaaaataaccaaactgtatttccccrctcggcaggaagcactgacccacctctcaatcctacctgtgtcccagggtccagatcaatggcacttcctgcgtatattgttcctctcatcgcccctgcctcgggtctttggcatttgcatgactctaggcattattgctttctagtttggataacagataatgatgttctgtctctgcaccaagagcacaatcaggctcacactgcctaagccagagaatgcataccactaaacagattatatttagcttggtccacaaaataaaattatttaataagttgtaaacactgagaaattttaccaaaaaaaaaaaacaccaaacaacccctctagtcttttggcttctcttggaaaaccagaaggtctggcatcaagactcagactcctttaatagataccgtgaacagaaacctactccccattaaatgaggacttacgctcttcatttcacttgaatttccaccgcaggcatttgaatgtgccactgcttgtttaggccgtgcttggcagaagatgcccaaactcattgttgaacgaaacacacaaccaacaaagcaagcatatcttctcacttaccaagttgccttatttatttctggtaccttccccattctta

SEQ ID NO: 496960 - DNA, 671 bp, Homo sapiens
ctgctaacacactgaactatttgctactcaaaataaccaaactgtatttccccactcggcaggaagcactgacccacctctcaatcctacytgtgtcccagggtccagatcaatggcacttcctgcgtatattgttcctctcatcgcccctgcctcgggtctttggcatttgcatgactctaggcattattgctttctagtttggataacagataatgatgttctgtctctgcaccaagagcacaatcaggctcacactgcctaagccagagaatgcataccactaaacagattatatttagcttggtccacaaaataaaattatttaataagttgtaaacactgagaaattttaccaaaaaaaaaaaacaccaaacaacccctctagtcttttggcttctcttggaaaaccagaaggtctggcatcaagactcagactcctttaatagataccgtgaacagaaacctactccccattaaatgaggacttacgctcttcatttcacttgaatttccaccgcaggcatttgaatgtgccactgcttgtttaggccgtgcttggcagaagatgcccaaactcattgttgaacgaaacacacaaccaacaaagcaagcatatcttctcacttaccaagttgccttatttatttctggtaccttccccattctta

SEQ ID NO: 496961 - DNA, 671 bp, Homo sapiens
ctgctaacacactgaactatttgctactcaaaataaccaaactgtatttccccactcggcaggaagcactgacccacctctcaatcctacctgtgtcccagggtccagatcaatggcacttcctgcgtatattgttcctctcatcgcccctgcctcgggtctttggcatttgcatgactctaggcattattgctttctagtttggataacagataatgatgttctgtctctgcaccaagagcacaatcaggctcacactgcctaagccagagaatgcataccactaaacagattatatttagcttggtccacaaaataaaattatttaataagttgtaaacactgagaaattttaccaaaaaaaaaaaacaccaaacaacccctctagtcttttggcttctcttggaaaaccagaaggtctggcatcaagactcagactcctttaatagatacmgtgaacagaaacctactccccattaaatgaggacttacgctcttcatttcacttgaatttccaccgcaggcatttgaatgtgccactgcttgtttaggccgtgcttggcagaagatgcccaaactcattgttgaacgaaacacacaaccaacaaagcaagcatatcttctcacttaccaagttgccttatttatttctggtaccttccccattctta

SEQ ID NO: 496962 - DNA, 671 bp, Homo sapiens
ctgctaacacactgaactatttgctactcaaaataaccaaactgtatttccccactcggcaggaagcactgacccacctctcaatcctacctgtgtcccagggtccagatcaatggcacttcctgcgtatattgttcctctcatcgcccctgcctcgggtctttggcatttgcatgactctaggcattattgctttctagtttggataacagataatgatgttctgtctctgcaccaagagcacaatcaggctcacactgcctaagccagagaatgcataccactaaacagattatatttagcttggtccacaaaataaaattatttaataagttgtaaacactgagaaattttaccaaaaaaaaaaaacaccaaacaacccctctagtcttttggcttctcttggaaaaccagaaggtctggcatcaagactcagactcctttaatagataccgkgaacagaaacctactccccattaaatgaggacttacgctcttcatttcacttgaatttccaccgcaggcatttgaatgtgccactgcttgtttaggccgtgcttggcagaagatgcccaaactcattgttgaacgaaacacacaaccaacaaagcaagcatatcttctcacttaccaagttgccttatttatttctggtaccttccccattctta

SEQ ID NO: 496963 - DNA, 399 bp, Homo sapiens
ctcaggaactagtttcacaatgctctggaggaagaatgggactttaaggtactagtcacactgctgcaggctgtgctccaagggtggttgaggcacctgccagtgacaggcctcgccatgtatgaaagatggaggaatttcatgtacaatttatgaaactgtgaggcatgtgcaacttcagcagaaaggaaagatcagctattctaatgctgtatttgtacctgaaaaagctagttttgtctttgactgctggctcagaaagactccaggccctcaaagtacyactttcttggtgaagattctttcattggtgccacagggagccatcaggtcactatccaggcattaatgtctttacagccaaaatgttcaggtatcaatccactgtgctactaactg

SEQ ID NO: 496964 - DNA, 577 bp, Homo sapiens
gcctcagagcaagaggtataatcaggtcccttttctctagataactttcgtcaagtagtttccaagtaagatttctgaacttggataactggatcaggtatacatttttcctaatggaatgattattctttgcacagtaattcttttaggcagtctgctttagaatacaagtttgattggctggagatgagatactagagagacagaactatagatagcaggtgtcaggggaggaattggaggaacttcataagtatgaaaaacaacggcgaagacaaagtatattgccggcaagataaacggagtggatagtgggttgatttgaaagtttaattgtctttsttgttgaggtagaaggaagaggattagactaatcactctcttaaggtctattatagtttttaattacttaatgtgtgtaacttttaacttgcattatgttgcttacaaatcagtagggaagattatcttgcataagtgtttttataaataaggagtgttttgttcttaccagcctataaatggttagaggaaatccagagaaggtagtggcccatcactgataggccatccaact

SEQ ID NO: 496965 - DNA, 618 bp, Homo sapiens
tgtcatcgctgcattttatttcacaagaggagtgtgagggtcaaggggatgaaatgaggggctgcttttagggccctcctgctgtgccagttaccatctggcattaggcagcacttttatctactctttcccctttgacctttgtcaccctgaaatatatattttaaacagctactgtaagtatgaaatgaaagaaaaacaatcattggacggaaaaggacaacccatatgttccaaaggctgaatgcccaaggttgttttagaggattggatagacttgcacgtctcaggtttttgccatgcagaatcaatggatttatgcggataacagtgccttctgttgtacatgaattatcagaaaaaaatttttggagtgcattgcaattttttttaaagcataaaacatatttctagatacaacataaaccttggttatatgtcaactattctgcattttactctgtgaatttattgttaggcagttactgcaagtcactctggtttcaaaatcttcacggctccctctgctcaccctgctgctggggggcttttttcaggggttgtattataaaatatgcactggctstggtttttcataagatgttttgtggcttttta

SEQ ID NO: 496966 - DNA, 603 bp, Homo sapiens
gctccggtgattggctatgaggaattgctgtgtgctgagattttttgaacaatgttgaaggactgtttccttagactggcatgacacggcagtgatgcctaattttttagaaagttgcgagacagagagcgagcgagagaccgagagcgagcgaccgagagcgagcgagagcgcaagttccaacagtgccacctcctggccataatgtggtgagacaggcatgacctatgtctcggttctcatggtggcaactgttactgcttataatactaaaatgtgcaagtaactcttactggccaggtactgtagtaagcacagattgtaatcatggatgyattccacatggagtcttgggcaaccttttacgagtttcttgctagactcctccacaagactgtatcttgggagaacaggaaccatctcttctgcaactttgggaacccaatacttggcagttagtcactaagaatacaaatggcaggaacagaaagggctgtttgtgaatttgtttctcagtgtattaaaatcaattaaaacctcattagcaagcaatacaatgtcaatatcgcagtaaagtttctgctaaatctggttttccctgat

SEQ ID NO: 496967 - DNA, 649 bp, Homo sapiens
caaaaaagaaagcaaaacaaaacaaaaaacagatactgttttaatcaatagtacttctcacagagtatatttgggactccattttccaagtatatgataagattttacttttaagctccctgggcttgggtggaactgtgcaagtgattctggccaatgagatttgtgcacagtgatatgtgtcattattaggaaagacattcacatgctgccttcagagctccctcttttatcactcacatggcaactgggaatatttgagatggggtctggtctgyaagcctgttgctctgtgtgattaccataagcagatttccctgatgactcatgattgtgtagtgtgagtaaaaaacataaacactttgtaactttgtaacaattgtggttttgttcttgcagcataacctggattattatgatttatgtcccctatttgataccaccctccccccaaaaagagtgataagaaaggcaattagtggttgaccataaatatgtggaattgcataaaaggtagtacatttattaaaggtagtacatttatttaaaaaacaaaactagtttcaagacaccattccataaaagaagtcaactaaccaggttatccacttttagcctttaaatccctgaagtaacatcttacctcaga

SEQ ID NO: 496968 - DNA, 309 bp, Homo sapiens
gaccataaatatgtggaattgcataaaaggtagtacatttattaaaggtagtacatttatttaaaaaamaaaactagtttcaagacaccattccataaaagaagtcaactaaccaggttatccacttttagcctttaaatccctgaagtaacatcttacctcagagaaggctttcctgatagcccaattccatcatatcaagttatttcctccaagttataataaccaagttataattgtccttttattttctattttccctttactactgcaatatccagttgggcaagtgccatttctgcttatcca

SEQ ID NO: 496969 - DNA, 561 bp, Homo sapiens
taggtcaacatatgaattttgaaggaacataaactttcagtacatagcactcttattgtggagcaaaaaaaaagaaaaaagaagaatgcatttaagagacgggagaatagaagatgtgggtagcaaagctaaggtgatgttttttgatgtccarcctttgaaaaatttgaactgagtaaaatcaaaagaattgtatcaaaaactgctcagtctcaaaactgaatcctacctgctaggaagatttggcacaatgtaggtccagggattgattcaggtcagagtgccttggtagataggttccggggggacgcccccagtaggaggagagtgccattaaaagccctagatttcacttaaactttataacccttcattctggggagaaggaaagcaggaactttttatgcacaagaaggcgatttctttcaatatggaattcaaagcaaagattacccagtgttgttttttgtttgtttctgtttttgttcctgttgcttatcagaagcttcagaaacaaaggaagacaggagcaaagttcttagatttcagacactgtatgat

SEQ ID NO: 496970 - DNA, 649 bp, Homo sapiens
ttaatgccaaaagaaaacttatttttacaatgttataattaaaatcatatattatttacctcttctgtcacatatattaaaggaaactcaattattttgagagttaagcttatgtaggatatttttaatgaacaagtagaacagactatatgccaatgttcatatacctgtataattgtctatttcgactgaagagtataaaaaaagtcttaattttcctccgactggaataaagaaataaagttcagagtaattttcttctggaatgtgtattttaaaaattaaagtgtaatagctaatcaggttctatctggctactctactcaataattatgctcatacagattcctctggaagtacaaaaaagttgaagtttttctgtaatattttggaaatttcacatcttaatcaatagtttcagcgtggtgtttccattgrattgctcttacacaatgaattactgatagtttaaatgttacatatacattcattgttctctgaaataacacaaaaatccactgaagattaaagtggtagcattggaaattaggtctttagaaaggaagtttgaactataaaaaggagtttctcaaaaggtagaagaggtaggagaggtaagatttttctatttttaggcaatttcttccta

SEQ ID NO: 496971 - DNA, 462 bp, Homo sapiens
ctcatattagcacatttatgcataatgatatccaaataaatgtctttaaaatgagctatttcttcagattaagtaccatattaaggttggaaaattaaaggaataaaaaatttccatcagaatcaagttttttacctacaatgtttatgaccagatcttatggtggaacaggagtttctccaacttcactgtgtctgataaagaaaacggatatacatcaaaaacatgcttggttgattcccttgaacatttctgtgctccccttcaatttttacctgacagctctgagctttggaagaaaacccctgctgatatttctgttctaacagatatagccccctgacagggctacaatgagctatgatggcacctcctgtcccagttgtaagaagactgytttcatccttcaagagtgaaggagggtagaaagaaggttgatacatgtggccaaagcagttgcca

SEQ ID NO: 496972 - DNA, 593 bp, Homo sapiens
gtcgggatgtctgagggtgaggtgtacggaagtgacattgacacctctgaatagttttcaacactctttctagtccaagaaaacctgtgtgttaggaagataacaccatgcatctcaaaggttaatgtatttgataaaatcccttcaggccataatgtagaaaaaaagttatagcatttaaaataaagaaaaaacaaacatatgctatgttcagcatttgagatcatctaaatgtgagcaacttccaacacaaatcaaatactacaaatcaccccttcaaatttttccttcagartctcccttttctgaaatgcattccaattgatgaatatttctcacaacaatgcttttttcactttgtttcatttcagagtaaattattcagaaagatgcatgtttcatcttttgaaagatatttgaatcaggcttctgttgggcctggaaaagcaaagcaaaaaaaaagaaaaagaaaaccaaaaaacaaaaaacaaacaaaaaagaatgtaatgaatggcataattttactcttgttcattttttatatcaagaataatttattctttgttttgcatagtagaaaggtcacttaagtg

SEQ ID NO: 496973 - DNA, 593 bp, Homo sapiens
gtcgggatgtctgagggtgaggtgtacggaagtgacattgacacctctgaatagttttcaacactctttctagtccaagaaaacctgtgtgttaggaagataacaccatgcatctcaaaggttaatgtatttgataaaatcccttcaggccataatgtagaaaaaaagttatagcatttaaaataaagaaaaaacaaacatatgctatgttcagcatttgagatcatctaaatgtgagcaacttccaacacaaatcaaatactacaaatcaccccttcaaatttttccttcagagtctcccttttctgaaatgcattccaattgatgaatatttctcacaacaatgcttttttcacttygtttcatttcagagtaaattattcagaaagatgcatgtttcatcttttgaaagatatttgaatcaggcttctgttgggcctggaaaagcaaagcaaaaaaaaagaaaaagaaaaccaaaaaacaaaaaacaaacaaaaaagaatgtaatgaatggcataattttactcttgttcattttttatatcaagaataatttattctttgttttgcatagtagaaaggtcacttaagtg

SEQ ID NO: 496974 - DNA, 593 bp, Homo sapiens
gtcgggatgtctgagggtgaggtgtacggaagtgacattgacacctctgaatagttttcaacactctttctagtccaagaaaacctgtgtgttaggaagataacaccatgcatctcaaaggttaatgtatttgataaaatcccttcaggccataatgtagaaaaaaagttatagcatttaaaataaagaaaaaacaaacatatgctatgttcagcatttgagatcatctaaatgtgagcaacttccaacacaaatcaaatactacaaatcaccccttcaaatttttccttcagagtctcccttttctgaaatgcattccaattgatgaatatttctcacaacaatgcttttttcactttgtttcatttcagagtaaattattcagaaagatgcatgtttcatcttttgaaagatatttgartcaggcttctgttgggcctggaaaagcaaagcaaaaaaaaagaaaaagaaaaccaaaaaacaaaaaacaaacaaaaaagaatgtaatgaatggcataattttactcttgttcattttttatatcaagaataatttattctttgttttgcatagtagaaaggtcacttaagtg

SEQ ID NO: 496975 - DNA, 623 bp, Homo sapiens
tgcagtctttgtattattttagtaagcaacgacttattccaaatatttatgtctgagtaataattttatcaaatctcccatccagtccttggggggctaccccagcatatggaacatatattcatyttagctgagagaagggctttatgcatggcagacactcagagtggccacagatcccctccataaaaaaaaaaaaaaaaaaacctcgacaattctactatctaaaataatatgtagaattatataaacatagatgcatactttagacattatttgtaatatatttctagctgaggtggagtagcaaggaccacatttgccctcccatcttaacaacaacagataatggaggaaatatatgaaactaggttttgaagacattggataccaggcaatggaagataatgatcactaagagataagaagcaaatcatgaaaacattctgattgccctttcttagtgcctttggagggtccctatactgtggcagagggaggggtgacccaggcagacctcagagttcaccctgattgaggagacagagcaggtttaggagatgaaattggctatagtgtgtaggacagagaggaaagagatgtacagaataagaactctgaac

SEQ ID NO: 496976 - DNA, 623 bp, Homo sapiens
tgcagtctttgtattattttagtaagcaacgacttattccaaatatttatgtctgagtaataattttatcaaatctcccatccagtccttggggggctaccccagcatatggaacatatattcattttagctgagagaagggctytatgcatggcagacactcagagtggccacagatcccctccataaaaaaaaaaaaaaaaaaacctcgacaattctactatctaaaataatatgtagaattatataaacatagatgcatactttagacattatttgtaatatatttctagctgaggtggagtagcaaggaccacatttgccctcccatcttaacaacaacagataatggaggaaatatatgaaactaggttttgaagacattggataccaggcaatggaagataatgatcactaagagataagaagcaaatcatgaaaacattctgattgccctttcttagtgcctttggagggtccctatactgtggcagagggaggggtgacccaggcagacctcagagttcaccctgattgaggagacagagcaggtttaggagatgaaattggctatagtgtgtaggacagagaggaaagagatgtacagaataagaactctgaac

SEQ ID NO: 496977 - DNA, 326 bp, Homo sapiens
tatatgtaagtcaaacttacacaattgtacactttgagtatgtgcacaaatacagtgtgcttaattgtacttcaacaaagataatatcttaaaatgtgttcattggtggtgcatgagattatcaggttgtgaccttctacttcatggcctcaatcctcctgccctccaggtgccccctggccagccccctacaacatccagctgccatgctatgccaaagctgtggtctcttgacagcagcattctccttccctgtcttaaacataagtgccctcagactctactcagactctctgtttcatttmttttcttttcttttcttttct

SEQ ID NO: 496978 - DNA, 582 bp, Homo sapiens
ctacctaaaatcacaagtcacatacagaagccctcttctgtagctactgtgataamttcctttcaaattctaagaaagatattctctctttgttccttcttctgtttttaatttaatccactttttccagttttgttagttgaagagtctatcagaattagtgtaccaatttttgaaagcgaattcttcatctacttttcatggcttcgaatggccttagatgttataccccactgatggatagctacacttcaaacctgtttaagttataaacacaaatatctaattgcctgttggaaaactccatcccaatttaccattcatatctacaacacaacatgttgcaaaataaatgttttatatctagcttaaatgtgttctttatctctgatttcttacccagttgaataatctttgtcaataaaaagtttgtattcaagtgacatgtattcaggcctgaaaatatgtgaaagtttaattgtgaatttctgagattttttacctctccctttagagaaaagtttaagaatctcatgttttttgctgtcttcttctgcatgagggggttatttatttttcacc

SEQ ID NO: 496979 - DNA, 634 bp, Homo sapiens
atttgaagcataataaacttgagagcaagagtaagaagaactagcttgtgaatacttaaaaaataaaaaccactgatttgtaagactggacagtcaagaataaaggcaggcacagaaaacatggagaagcagaaacgcaatcatatcaggagtaggtcaaacttcacctcaataggagctgtttaaaaataataataaaatctatggacctatcatgcaggagaaaattgcttcaacttccccagcagggcactaaaactactagttgcagtgcaaaagaatctcatggtttcccagggcctgcaattcacttcccctacagggaaatcgccactaagcattttcttcttattgggaagagtaaagtatagtcgaatctgtctggctccgtggccagacagactgcatcaaaatccctgcttgctaccttagtttgaagcagtttcttcatctaaaaatatgtggatattacctatgatgtgaggattaaataaaagagcagtgaatgtgaacagcacagtgcwtgacatagtggaggtgtgcagcaaaagttaatcctccttctttcctacttcctgggaaaatcaaagaatcagggatgctgtagttgagtaagtaaattagccaacccttt

SEQ ID NO: 496980 - DNA, 570 bp, Homo sapiens
tgcttgcaaaccagctttctttggaagaaactaagatggatagctgtaaactggttgtaaaattgcttagccacagagagggctgaagcaaagccgtgtgtccaggatgcatccagatcactgaaagaaagaccaggccatggggagtcccaggaagaataaattcgtgaagtgaaaagaaagaaatgcctctcttcgtttgtttttctaatatttcttttcaatttgtcgaatacaaacagttcggsttttgcaagacagacaattttctccttcttcccgagtttcctcctgggcttctaatgtaaggatgtctaactccgggacagaaagcaaggaaggaagcacccgttctctccccgccctcctcacgcgccctctgcggaggactcccctgcggctgcttgggtaaatgggtctgagctgcagagccgtactactctgacgagggtctgtcagagaattccatttgagggaaggaagtaggaagcccacttggccatggactaccttcctaagtccacactctcaaatccaccagtagggtgaaacggtcgctaaattaacaaa

SEQ ID NO: 496981 - DNA, 645 bp, Homo sapiens
ccagtgactgaagactccgattccatttcacaatgtttacatatttcaaaacatcatgttgttacacaataactatatacaatgtttgttctttgaaattaattatgttacaaacccttacagaggagatcttagttggtttgattgaggtgcatacacggttcataattgtgtccaatcgagttgcaatggtctagcaagtaaaagctgtgacagaccgacttctaaggtggaccscaatggctcccactccccgtgtccacacccttgtaccattcactcctcttgattatgggctggatggagtgacttgcttctaataatcaaatctagcaaaagtgatgggatatgacttctgaagtcggttacagtcagtctctggcttccatgttgcacaggctctctcactacttcttggggtatctctttccaatctctcgctctggggaaagcaagccgccatgttgtgaataccctatggaggagtcggagtcttcagtcaccggccagcgagactgtgtgtcctaccaacagctctgtgagtgagcttgaaagcggatcctccccgccactgaacctggtggcagactcagccaacaacatctcgattgccacctatgagagacgctaagccagagaacccag

SEQ ID NO: 496982 - DNA, 389 bp, Homo sapiens
taatgtaagtcacagggagatagatggagttaaaagattctaggagcttgtatcatttgggccggggattaggctattgaaaaacttgagatgcttaaaaaatgcataacaaattttaagggcacacatgaaaaagaaaaatataaattagctaactaccaaaaatctagtgagggaaaataggataaaaaaacaacaatgtaataattattttttaaaaataaaaagccaagaaagtttctttaaaaaggccaaaaaaaaagacaagcagaaggcacaaagacagcagaatcaagtcaatttaaatatatgagtaatcacaaaaaaaacagattaaayatgccagttacaatcagagattgatggatttgattttgaaaacaaaataa

SEQ ID NO: 496983 - DNA, 568 bp, Homo sapiens
aatgtttcttctgaaacagtccacaatttttctcctatttttctgggtcccaaggcatttttcagcatttctcagttcagaattccagttataatgagtacttattattttagtagaattgaagtcaaagtattgtaagacaggcattacagttacacattttgagtaggtcttaactctgctattacactcacaaggtaactgagaataagaaatccattgctgggtgtattgcaactggcatgctaaattacagttgtagaatgtaaaaagaacatggttccatccttttttctttaagcaggtakaatttaattttaattttggcttttcctctgtcatgtaaagatcactatgccttagaatgttagtgtcttctctgtaattataactagtacatttgaaatcacaaaaccataacaaagagcatctttctaaatgcctctgtagagtataggttatcactggccatgcaggcttacctcccactcttaacattgtgccattagtagctaaaaatattcctctaatatatggctgctgtaataacaggtacacacagatattt

SEQ ID NO: 496984 - DNA, 605 bp, Homo sapiens
tttgcatcaatattcatacaggcttagaaaacaccccaaattcatgatttttaaccatgctttatatttaatcagagtatgtattatagtactaattaatcctctatcatttgatattttatggtttgcttcacccaatatyattcttataaacaatgttacgtgttgaaaagcatgtaaacaagcatctacacttttgagagcatttatctatgccaataaatattctttcataatattctttttaacaactgcattcagagaggggtgtagctacaaggccaaacagaaggctccactgcttgtcccaccccaactcaaggacaccaattcaacaactatgtaaccaaaaaaaaaaaaaaaaagcatcttcagtcaggtaaacactcacagtacctcgtgttaacattgtatcactgaaagaggcaatgaagagggcaggaaagacagtcttaaattgccagcattacccctcccccatcccctagcaatggtcacatggcatggagagagaatctgtgcacttgggagaggaagagtacagcaattgtgaaacattgcattgacctcggtgctgccctgactcagcagaaagtaaaactggg

SEQ ID NO: 496985 - DNA, 605 bp, Homo sapiens
tttgcatcaatattcatacaggcttagaaaacaccccaaattcatgatttttaaccatgctttatatttaatcagagtatgtattatagtactaattaatcctctatcatttgatattttatggtttgcttcacccaatattattcttataaacaatgttacgtgttgaaaagcatgtaaacaagcatctacacttttgagagcatttatctatgccaataaatattctttcataatattctttttaacaactgcattcagagaggggtgtagctacaaggccaaacagaaggctccactgcttgtcccaccccaactcaaggacaccaattcaacaactatgtaaccaaaaaaaaaaaaaaaaagcatcttcagtcaggtaaacactcacagtacctcgtgttaacattgtatcactgaaagaggcaatgaagagggcaggaaagacagtcttaaattgccagcattacccctcccccatcccctagcaatggtcacatggcatggagagagaatctgtgcacttgggagaggaagagtacagcaattgtgaaacattgcattgacctcrgtgctgccctgactcagcagaaagtaaaactggg

SEQ ID NO: 496986 - DNA, 518 bp, Homo sapiens
gctctccctccactccattacccacaccccaaaagggatgagtaacaggttcactaataaattcaaaactttttcagaaagcccatccacaycccccactgctccaagtttttaatactgaggcttcagcatcacttccccaaaagtctaccctggtgaatattcttcccataattccctcttgctctggtgttgaaggcagaatgagcttcgttgtgggacatgtcctacaattggtaaatgttagtatgcatctgctttctgacaccactgatcaaagggaaaagagggcatggaagagctcagatgtagtaagaacagcaacagcaatggtcatggaaatctggtctcgatttttggatgagggcctttgcataaagagctctgagatgcttccctaccttactgttattgtgagagagctgcccaggaccctctaaactcaaagtctccccatgattttctcctatctctcttgttgatctcactctccactgccaagaaatggaggtgagtgg

SEQ ID NO: 496987 - DNA, 547 bp, Homo sapiens
gcaggctggagtatttaaacaaccctatcccagtgctctgggatatcaataggaaaataagcatggagaacaatttgtaatgagataatctggttttcaacatgtgatttggttttcttcagattgtggcattggttttcattcagtctttatatgatgggctccacctagcatcatagagtcatgccttagagatctatgctctttgacatctagtctgtgagtgtgtgtgtgagaaagagagatacagggaattctctctcccacttctccgtttcctgtctcaggtcctgcctcttcctacacgawgattgactcaggaaagtccacatttcccagtcataggaagaagtcctacttaaggccacaacagttgcctacctgcaatgaatatttattgaataatgaatgagaagaaaactccatcccagttcaagacatgactccagcactgatacaagagccagaaataggctataagggggataagaggattagtataagacatctagtgagccacacctttccacctactgtggatccccag

SEQ ID NO: 496988 - DNA, 543 bp, Homo sapiens
tggtgatgcagtttgtgagtatggctcaaaggcaaaagccaatagagcctggcattgtggacggtgaagacttccaacaaaggcagacacacgatcagtcccttccccagggtgcagctaactggcacggggttcctcttaatctgcattaatgatgcagattaatgattttagcaacatgtatactaaaattacagtgatgcagagaagactagctagcatggtcttgacaaggatgacacattaatgacaatctgcattacttgaaaactttggaaaacaaaaaaaaagatttttatctatcaagcacaggaacaagaatgcccagcrcttcttgcagccttcctctcctctaaatgtttgtgctgttgttttctttcagaacttccctcatttcctcttatggatactgttaggcagtttttcaatgagcttacctgtcccaccacttcacattcttaccctgtccagcttgaaaggctggtgggacaggagcacaaagagagatcaaaggccatccttttgccctgagggtaatggcat

SEQ ID NO: 496989 - DNA, 588 bp, Homo sapiens
cacacacactcatgggtgcagcaaatcaccaaccacgatgtgcgaaagtgtggagatggataggagagggagagctttgcttccagggcatggggtgggatatggcagtaactggggaaggccttgaggagaatgcaggatgccatcacaggaactccatgagctccctggactcccacagcagtggagactcctccttcatcccgttgctcccactgacttcaggcggcacttgggcaggacgcataggctcattactgcagagctctgagagggagtagcagccgatggaccgggagaggagacaagtgtgctaaggacactgaatgggtggtgggtatgtcactgtcactctggtagcccctggcttagcccaaggcaccagggaacctggacgtgggctccaaggcaatgacagagagagctccaggagataccttctagctctgkcttgaggagtgaaaagggggttcccagtgctctgagaagatgaggaagtctccaattttatttattctttttcgtctattattttgaactcagtcccaggcaattctgctaccgtggctatgcaggaatggcagtggc

SEQ ID NO: 496990 - DNA, 579 bp, Homo sapiens
atcctttttggatattatgctatgagcctctacatactatacaatcatcttttttagcaagcattgcccctggaggtagcacaaaggccacgtgggtgactgtgtccatcttyccactgagccctgccactaccactgtgaacattgagcaagccaaattcacaccacctccttggactgcgcgggataaaagtgcagactttctttgttgttgaccccttctgggtagaaaatgggcactatttcacaccacctcattgtctacaaagtgcaggagctcagctcagctctttgctaggctctgttgaccctggggagtgagaagcagagggctgacttccgtcatgggagtagaggctcaactcaccctggaccccctgactctaccatggcagggagacttgtgtgtctcacttgtgtccccgggcagagggtgcaccatgagctccctgctcaaccccaccacagcgggccaccacctgctctgtggtagagggggcaggtggaaaatcagcacctgccaggccaccgacacaggtaggagtggtttgtttttttttcttgatatttgactggagt

SEQ ID NO: 496991 - DNA, 283 bp, Homo sapiens
aagggaggggtattaaggatctgagtactccatgggaagaccctcaatcagacctcttttcactcccctcctcattctgccttcaactgtgcaagctgttcttgaatcttgaacttttctttatttactygttctacctcttaagggcccctttccctttccttgaaggcacgtgcctatatgctggcatttgtgggcaaaggggagagacctgaatactccattcattggctgcaatttactaccccattttatgtgccttaactgactcttttctgtgtca

SEQ ID NO: 496992 - DNA, 477 bp, Homo sapiens
tgctcgatctcaaagggtcagaggacaaggctgctggcccagtaggtcccaagtccccagggtcagagcacgtagatccagaatgcagagctgagatttgtggttggagcasggtaagagccgtcactctcagagcatggggaagagtgaagcgggggttcaagggcacggcaccagtgattgcagcaggctcccctaaggtccaataacgtatatgataagggggtcatctcttctctcccatctcccccaccacagagcactactgcaaaggtgctgaatcacaaaagaggtgctaggctaggagccaatcggccagccattactctttttttttttttttttttggagaccagagtctccttgcgtttcccaggctggagtgcggtggcgcagtctcggctcattgcattctctgcctcctaggcccttttttcttttctctctctccccttttttttttttttttttaataag

SEQ ID NO: 496993 - DNA, 619 bp, Homo sapiens
aatgggataatggttgactaccatttattgagcacctagcccatgtcaggtactctacatgcattttctcatttaattccctcacctagactgtgtgctaaatgrtccattagccctactttcttttccagtaaagaaactaaggtttggataagtgaagttgcatgccagggtcctgcagctttacgtggtgaatcctggatttggacctagattgggctggctctaaagccaggcttctttcccctgctccactcttggaataaatgaaggattgttggttcaggatatgcagaaagctgcttagcaaaaggagagttggagaagcatcttggtttgagggtcttgaaggacacctactgtactcccagctgagaggactctttctcctcatcttcaggaggatgcctccagagcctggggttactgtaggcctttgccagaggcatgttcggacttagccagctgagtatcccctgtttcctgcttttaccatctcagctgctggtcaggaggtttgggaaggtgacatcatctagctgaatcagctgctgcttctagatacattactggaactgaaagtcattaccccttccttcctgctctgcaagtctcttca

SEQ ID NO: 496994 - DNA, 619 bp, Homo sapiens
aatgggataatggttgactaccatttattgagcacctagcccatgtcaggtactctacatgcattttctcatttaattccctcacctagactgtgtgctaaatggtccattagccctactttcttttccagtaaagaaactaaggtttggataagtgaagttgcatgccagggtcctgcagctttacgtggtgaatcctggatytggacctagattgggctggctctaaagccaggcttctttcccctgctccactcttggaataaatgaaggattgttggttcaggatatgcagaaagctgcttagcaaaaggagagttggagaagcatcttggtttgagggtcttgaaggacacctactgtactcccagctgagaggactctttctcctcatcttcaggaggatgcctccagagcctggggttactgtaggcctttgccagaggcatgttcggacttagccagctgagtatcccctgtttcctgcttttaccatctcagctgctggtcaggaggtttgggaaggtgacatcatctagctgaatcagctgctgcttctagatacattactggaactgaaagtcattaccccttccttcctgctctgcaagtctcttca

SEQ ID NO: 496995 - DNA, 619 bp, Homo sapiens
aatgggataatggttgactaccatttattgagcacctagcccatgtcaggtactctacatgcattttctcatttaattccctcacctagactgtgtgctaaatggtccattagccctactttcttttccagtaaagaaactaaggtttggataagtgaagttgcatgccagggtcctgcagctttacgtggtgaatcctggatttggacctagattgggctggctctaaagccaggcttctttcccctgctccactcttggaataaatgaaggattgttggttcaggatatgcagaaagctgcttagcaaaaggagagttggagaagcatcttggtttgagggtcttgaaggacacctactgtactcccmgctgagaggactctttctcctcatcttcaggaggatgcctccagagcctggggttactgtaggcctttgccagaggcatgttcggacttagccagctgagtatcccctgtttcctgcttttaccatctcagctgctggtcaggaggtttgggaaggtgacatcatctagctgaatcagctgctgcttctagatacattactggaactgaaagtcattaccccttccttcctgctctgcaagtctcttca

SEQ ID NO: 496996 - DNA, 569 bp, Homo sapiens
tgcctctttccacttggatgggaggccaagggatgatacagacgaccaccgtgagcccacttttacagctatagctcagtcaaaaaaaaagagggtgatagacatctcaggagggagttggccagtgaaaggagggttattttctaaatttttacagccatcagtacactatgaaaacaaaattttaaataaaatccaccttatagtaggacgatgctcaggactgttctactaataccacagaagagcagttctcaaacatttttatctcagtaccctgttatacccttaaaaattatcaaggacttcaaagagctttagtttatgtttttatgtaggttatctattaacattaatcatgttaaaaatcaaaactgataaaactttaagtatttaattattttaaaataacaacatacatgttatttattaacattttgtgaaaaaaacatacaatttccaagacmaaaaaaaaagtaagatgagtgtaattcttttacattttcacatatctttttaacatctggtttaatagaagtcaaatgctttcttatagctgcttctgcatt

SEQ ID NO: 496997 - DNA, 591 bp, Homo sapiens
ctgagaagtcaaggcatcagcagattcaatacctggtgaaggcttgctctctgcttcgtagacggcacatcttgcagaaggggtgaacagtatcctcacatggccaaaggggaaggcaacttccttcagttcattttataagggagctaatcctattcatgagggaagaaccctcgtgaattaatcaccttcttaaatctttaatacaattgagttccaacatatgaattttggagcgcaacaatattagggaagtggactccatctcttgaaagaagaatggtatgtgtgcacagggataggaggaattatctgtggccatcttgcaggcagactaccacacagtgctctgctttttcttatcattttctttgatgacatctgatcctttctcacaaatatctcctttgtaaaacactcagcacttattatttatatcagtcatttgggaattagtcatatgctgcctagtggaatttgttgtcattaaaaatttwttcctgttttgtcatttcaaaaacaatcacaaactcttggaggttaaagatgatgttctatatttccttgtaccccgtaaaaccagcatagtag

SEQ ID NO: 496998 - DNA, 630 bp, Homo sapiens
gctgttattaagaagaagaacaactgtacaaatgctgttaycaaaggatgtatgagtcaggcggaaaaaaaaggagaacacagaaaggtgaaaagtctttgtcaagcagaggagagaaattattgtcttgtaatatatatgagagagtctagccaaatattaaacatttttaaaatgaaaagaaatattatacatggtatgaataatatttaagtcattgcctaggttagaagattagatatatttacctattctacctacttcaaatgcttttttgctgtcattgtttggaacctccaaatactagaatgctttagaattataaaaccattgaccatgttcagttatgtttaaaagaaaacatcattctgaggaaactggaaattatatatttataaatgtttgtccatagcattgttgaaacaaatggctcaggtttcactgttaatccagttgctgatatttttgactactcaatacaccaaaatggtacagtcaagttggtgctaatagatgtcatttatttacacaaactgacaataggttcaccaaagttaagagacgaatttaagggggacagaaaagaaattcctgtgtgtgctttggcagcttagacatacttaccacgaa

SEQ ID NO: 496999 - DNA, 601 bp, Homo sapiens
ggagcaagcgataccaaagcctgatgaaaggagcctggatctcatccctgaataggccagttttgtgagaattaaattatcttttcacttcaattggattgtcatttgcaaccaaagacacctaattaatttagcttagaatacatgagcaggttattttcaagatagagaataccttttttaagaaatggggaaggagcaaagaatttgaaagagactgaaaataaaagagaagtagggataaagaaaggtagaggggcaatttaaacttcatctatatgcagactggcctcaaatgcatgtgtccattccatatccttaccmgaactccagactcatatatcagattacttatttcattttccatttggatagctccaaagaggtatatccatagttgttaagagaatggaatcaaacaatttaagctaatatcctggttcttccagttattggctatgtgaccttgagcaaggtatttaaattctctaagccttgatgtcttaaatctacataatgggcatattaactatctatttcatcaaattagtaagagcatgtaaggagtcaatacctgtaaagctttagaatagcatctggg

SEQ ID NO: 497000 - DNA, 532 bp, Homo sapiens
gaatgacatgcctgaagcaaagcaccaccctggcccaatggtctcaatggcaagcaggggtcatgcaccaccagacgytctgtgtgaccacatctgcaggagtacaagtgcccgaggagttgtggatggaatgggatgggcctgggaaacacgggcctggagaccagaagggtgaggaagaaaggagaaaagagagtagagaagagagaaaaggtggaaggaaaagagtgggagagtcagggaggcaggaggaagcgagctactactgtccaggaagggggcaaagctaccagagggcatcccacccctacaattgacacagctctcttatgttcctggtgccctctaatatataaaagcactctctgctaaacacaaatcatttactacttgtcaactcttcccttgactattttaagggcctaatgaaatgaaacttatgcgtgaagaaaagagattcataatacggttatttcaagaatacagaaaacagccacacacccctcagtgctgatgcagcactctaccttgc

SEQ ID NO: 497001 - DNA, 532 bp, Homo sapiens
gaatgacatgcctgaagcaaagcaccaccctggcccaatggtctcaatggcaagcaggggtcatgcaccaccagacgttctgtgtgaccacatctgcaggagtacaagtgcccgaggagttgtggatggaatgggatgggcctgggaaacacgggcctggagaccagaagggtgaggaagaaaggagaaaagagagtagagaagagagaaaaggtggaaggaaaagagtgggagagtcagggaggcaggaggaagcgagctactactgtccaggaagggggcaaagctaccagagggcatcccacccctacaattgacacagctctcttatgttcctggtgccctctaatatataaaagcactctctgctaaacacaaatcatttactacttgtcaactcttcccttgactattttaagggcctaatgaaatgaaacttatgsgtgaagaaaagagattcataatacggttatttcaagaatacagaaaacagccacacacccctcagtgctgatgcagcactctaccttgc

SEQ ID NO: 497002 - DNA, 575 bp, Homo sapiens
actgagctgtctgccctgtgcaacacagaccatcaattctaataagaagaaaaaatgtctaaccctttgggtttagtcaaaatgaaagttaaatatggaagcaactttgttaatagtgtagaggtgtgaaaccttctaaaacaaagttgtctggcctaaattgtctctatgttctctatagatgaatctaactcactgaaaaattaatctcatttttactttttcagcctcaataggacacagctgcactgatgttagtctcaattgatggagtgaagaagcctcatctttattcagtgtaaagcagctgccaagagaaatggcctttgagaggggtaataagttcatgaatatcacctgtgtcgtgcaaaacaatatttgatttttttgaaagtttaaattgattggaaagaacatatgaattaagtgctatctcgtgagtgaaaagttttgctgcagggtgacagagtgcrccatcaaggtgatgcatttcaaacattaccttcctgtgacacaagggagtcatggaccaaatggaacagaggaaattatgacccgctggccaggatggatct

SEQ ID NO: 497003 - DNA, 441 bp, Homo sapiens
tctctaaaacacaggtgcaacaaacaaaataaatacttcatatttttcttttggtgaatttcaaacatacaagtaaataattttcctcacaatttatacataaataattagcacacctattttttttcaagctggaacacgcatctggatttaattagaaaagcaagaaaacagcatctggagaggatcaggccagcctgttmtttatacaattataaacattaagagagaaaattctctttatgctcacactccaccgcagaaacaagaccttctaaaggaagttataaaatgttccactctggctaatacgacattaatatcattcaaagatgagtattataacccatcaaacctctattatgggtttttcacaattttcctttaatgctcagaaatttctttctcagaaattcaagactgaaatccaatagagccaaa

SEQ ID NO: 497004 - DNA, 524 bp, Homo sapiens
tggactgacaccgtgatttccatcagccaatggaacattaacaagtctgactcaggaaagcttgaaaagtgcccatacatttctgctcaatctcgccctgtgctggtaccataasagcgtgccctggcctacctattgaaagatgaaaaataggagacaggtcacttttcccaggtgaaaccaaactgtgctagttcagcccacagcccactgacataacagctctgccttgcagaagcacagcagaccacagacacatgagcaagcacagcccagatcctcagtagactagattagctgaaccccccagactcatgagctaaatgatatgttaatgttgcatgccactgagattttgtggttggttgttattcagcatcattgtgtcaatagataactgatgcactcgcatcataatttccaaaccactccatttgtgattacatttggttgagtcatgttgacagaggagtactcagacagttctgaggccagtgagataaaggtgtagcatagacagccag

SEQ ID NO: 497005 - DNA, 524 bp, Homo sapiens
tggactgacaccgtgatttccatcagccaatggaacattaacaagtctgactcaggaaagcttgaaaagtgcccatacatttctgctcaatctcgccctgtgctggtaccataacagcgtgccctggcctacctattgaaagatgaaaaataggagacaggtcasttttcccaggtgaaaccaaactgtgctagttcagcccacagcccactgacataacagctctgccttgcagaagcacagcagaccacagacacatgagcaagcacagcccagatcctcagtagactagattagctgaaccccccagactcatgagctaaatgatatgttaatgttgcatgccactgagattttgtggttggttgttattcagcatcattgtgtcaatagataactgatgcactcgcatcataatttccaaaccactccatttgtgattacatttggttgagtcatgttgacagaggagtactcagacagttctgaggccagtgagataaaggtgtagcatagacagccag

SEQ ID NO: 497006 - DNA, 603 bp, Homo sapiens
tctagagaactcataaactcatgtaacccttaatataaacaagcgtaactttttatatttcaaatatatgggctatatatcttttccaaattttatctttttaaagtacagagattttattctgtgtctcttaatttctctagagctcatatatcacttgctctttcatttggccattaatttatttgttattcattcatttagttgtttctatgagcacagcattgtgccaggtcctggctggaggagaaaggacggaaaatccaatgataactaagacacagtttttaaccttagcaaacttgtaatacagcaggggggatggatcagaaaaacaccataatacaagatgatctttaataagtacagaaatagacagtcgagaggtacctttgaaggcaagccttgaaggacaagtaggaggtcaacagatgcagagatggatcagggaagaaatggatagcattctccacagaagaaagataatggataacaaagtggatgcagaaaactttgagatatgctcagaragcaactaacgttttactttaatgtgaatagcaataggaaactgaaagaggctatgcaaggcttaacatagaa

SEQ ID NO: 497007 - DNA, 609 bp, Homo sapiens
ctgcatcaccaagtctgtggtttaattttatcacccaaaggagatactttgatttgcagccaggaaatgtctcatttgttagtgttagagataatcaggatgagtcaaatggaaactggcctgccaaatgagtcaggcaagttgctagggaygtggccacagtgccttgtggtcatagaaggcccagcaaagatgtggcctttatgcaatatcttatttgattttgaataaaaatatagccttatataacaacaggaaaagagaaaacaaaaagcttctgtcttgttttacctcccctaaacctatctctactgcatattaatgaagaaaaccttcttgaactcataactggaacctcagggacccaaccctgtctctgtcaaaatttcccagcctagatgcaaggcaggggttctccattcttaggctcactgctttgaccctgactagctgagtcaaggagatatttgggagatagtcttttttaatattcttgattacgataatgggcatatattgttagtgctgacttcatgggatgttgtgagaattcagtaaacaaatgcctgtgtgctttgccaagcatatgaaacaatgaaagttattaaa

SEQ ID NO: 497008 - DNA, 594 bp, Homo sapiens
cctgcattttatatttctactcattgtttttgttggggggtatatgacacactaccccaaaatatggcaccttggcatttgataaaacagcagaagcaaaaacgttcctctgaccttctcccrcccttttcccttgaggcaggtcataaaaaaattctctgaccttcctctgaagtaggtcataaaaccttcattccagaggtgctcaacctatacctggaagaaaagaaatgtccttatcctcagagacacagagataccaagaagaatctgaacaaacagtccttacaaagttcccccacaacttgttaccattagcaccagactattttatcctccaatcatatttacccatgactgcccattcttcatcaaacttaaacataaaaatacacaagtttacctatttatttgggtctttatttccaaaggcttccatgtcatggaaaacttacattaaataaattgtatgattttctcttatgaattctcttttgtgatggggacctcagccgtgaacctgagatggaaaaaaaaatttccttttccctacactcctactttttccatttgaaaacatagataataaactga

SEQ ID NO: 497009 - DNA, 573 bp, Homo sapiens
tcttggcttttgccaatctgtgtattcagaatgtcttccttcacccctaattggctggtcaargtgttttccttaaaaaggctataacctccttaagaggaattctggaatcaaccattaaagttataaaatattttaccctgatatattaataattcccaaagctatcaaagtagtggagaaagtggtaaactctcgcattacttctcagctgtagagtcaatttacactgcttctagaaatttaacaacatttattaaaaataataacgttcatatgtttttgccctggaattccactccacagaacttcacatacttcatagtaaatactcaatatatgatagctatcattattggttattattccaaggtaactaaatttatacctgttaaatgcacaaattgttctttgcaacattatatattatagaaaaatttggaaacggtatgtacaattggtgaacagctaaattgaatactaatatttgatgggatataacgcagccactaaacatttccatgttactactggaatatacctttatcatctcacaaatttttttgtgaaaaa

SEQ ID NO: 497010 - DNA, 611 bp, Homo sapiens
atcatatctcatgagacttattcactgtcacaagaatagcatgggtaagagtggccctcatgattcaattacctccccctgggtctctcccgcaacatgtgggaattctgggagataaaattcaagttgagatttgggtggggacacagccaaaccatatcagatgttaacgtcagctctggtatgaactaaaaaatatattacttcagattctaaactttgtaaatagttaaaggctaacaaagaatatgatagagctccaacatcataatgaagcgtagagtttgccatsttaatactttgcagtgagtggcaactatcaccgtggtgagccttgcatgtttgatttatgaaaatgtatgatgccttaccaaaggagatttatatttgttgtccactatgaaaactaatcttaccaaccaacacaagaagcaatttcaaagaattattttcttgctctagtattgttggtttctcttctgccattatccttttaatctttattctttttagcccaatcattgatgtaaaagtgaatcttttgttaatttgaaagttgttctgtttgtttgaagtgggggtaaaatgatttatcataaaactgccagaaa

SEQ ID NO: 497011 - DNA, 603 bp, Homo sapiens
atttgctaattaagtaaatgaataaagagtcgatgccataatccaaacctgtaagcatatcattgccatggcaataaaaaattggcttaggcagcccagcacagtrgctcgcacctgtaatcccagcactttgggaggcccaggcaggtggatcacctgaggtcaggggttcgaggccatcctgggcaacatagagaagtcccatctctgctaaaattacaaaaattagccaggcgtgttagcacgcacctgtaatcccagctacttgggaggctgaggcaggagaattgcttgaacccaggaggcagaggttgcagtgagccgagatcacaccactgcacaacagcctgggtaacagagcaagactccgtctgggaaaaaaaaagaaaaaaaattggcttaggagcaagagagacagccatttctaaggccaccatcaacttttatgttcttgttggcatgactaaaagagatggaggagctgatctattatttagccagttgtgtattgcctaagcagttgattcaactcattagggcataagtcacattagggaagggatttcctttcttgctcatgctctaccctcagtgcctgaactg

SEQ ID NO: 497012 - DNA, 603 bp, Homo sapiens
atttgctaattaagtaaatgaataaagagtcgatgccataatccaaacctgtaagcatatcattgccatggcaataaaaaattggcttaggcagcccagcacagtggctcgcacctgtaatcccagcactttgggaggcccaggcaggtggatcacctgakgtcaggggttcgaggccatcctgggcaacatagagaagtcccatctctgctaaaattacaaaaattagccaggcgtgttagcacgcacctgtaatcccagctacttgggaggctgaggcaggagaattgcttgaacccaggaggcagaggttgcagtgagccgagatcacaccactgcacaacagcctgggtaacagagcaagactccgtctgggaaaaaaaaagaaaaaaaattggcttaggagcaagagagacagccatttctaaggccaccatcaacttttatgttcttgttggcatgactaaaagagatggaggagctgatctattatttagccagttgtgtattgcctaagcagttgattcaactcattagggcataagtcacattagggaagggatttcctttcttgctcatgctctaccctcagtgcctgaactg

SEQ ID NO: 497013 - DNA, 637 bp, Homo sapiens
ttactaaagtctagaaaaacaatctaatttttagcctggacactttaattaatttgtagcaaaattttggagaaatattctaacatctgagtttcaatgtccttataagagagaaattgcagtattttgtttagtttttgttatatgtcttaattgatttcagttcttccatttggtacatatatttacctgagaaataaatgttactagttccatattactgatgagaaactaaggcccagagaagttacyagaattgaccattgtcttatagttggtgaagtacttaggttacttaaaaaaaagttaccttaaccttttttcttttattatttttaattgacatataacaattgtacctatttatggggtacagtgtgacattttgatacatgtataccatgtgtaattatatcaggctaattatcctatccatcatctcaaacatttaccatttctttgtgttggaaacattcaacatctcccttctaactatttgaaaatatacaataaattcttgttaattgtagtcaccgtatagtgctatgcaacaccagaacctatttctcctttctagctattaatttgaaactattaaccaatgaacctctcactatccccattcccttctaccctt

SEQ ID NO: 497014 - DNA, 637 bp, Homo sapiens
ttactaaagtctagaaaaacaatctaatttttagcctggacactttaattaatttgtagcaaaattttggagaaatattctaacatctgagtttcaatgtccttataagagagaaattgcagtattttgtttagtttttgttatatgtcttaattgatttcagttcttccatttggtacatatatttacctgagaaataaatgttactagttccatattactgatgagaaactaaggcccagagaagttaccagaattgaccattgtcttatagttggtgaagtacttaggttacttaaaaaaaagttaccttaaccttttttcttttattatttttaattgacatataacaattgtacctatttatggggtacagtgtgacattttgatacatgtataccatgtgtaattatatcaggctaattatcctatccatcatctcaaacatttaccatttctttgtgttggaaacattcaacatctcccttctaactatttgaaaatatacaataaattcttgttaattgtagtcaccgtatagtgctatgcaacacyagaacctatttctcctttctagctattaatttgaaactattaaccaatgaacctctcactatccccattcccttctaccctt

SEQ ID NO: 497015 - DNA, 553 bp, Homo sapiens
ctgcatagatcttgggtctccttgctgccacctcacatcttttaacccctccaaatagccggatctcatcttgggagtatcttaacaccttgagttttcaaggggcttgaagttctgcatcttgggattatcagagaaaggaagaaatctgaaagactaagtgtttacttaaaagagactgtttaaatggaaagagtgggatctactgtaagttggtaaattttagacacatactcccacctttttcttcatcctatcatcactccactgggtatataagtcctcctcttaggactgtggagtggtgggctgttcacagaagaaattttggaaagagcgtggtagctgagcactgtgtttagggcactaactttttataaaccagacacacagtgtgagaggcactcactcttgcaacggtgggtrtttcttcccagattgctgccaaagggacagcttggagctgagtcagctccccacatacagactgtagtttcaattttgtaggaaatattttctagctaatgaggtatggatgttataagctatggct

SEQ ID NO: 497016 - DNA, 553 bp, Homo sapiens
ctgcatagatcttgggtctccttgctgccacctcacatcttttaacccctccaaatagccggatctcatcttgggagtatcttaacaccttgagttttcaaggggcttgaagttctgcatcttgggattatcagagaaaggaagaaatctgaaagactaagtgtttacttaaaagagactgtttaaatggaaagagtgggatctactgtaagttggtaaattttagacacatactcccacctttttcttcatcctatcatcactccactgggtatataagtcctcctcttaggactgtggagtggtgggctgttcacagaagaaattttggaaagagcgtggtagctgagcactgtgtttagggcactaactttttataaaccagacacacagtgtgagaggcactcactcttgcaacggtgggtakttcttcccagattgctgccaaagggacagcttggagctgagtcagctccccacatacagactgtagtttcaattttgtaggaaatattttctagctaatgaggtatggatgttataagctatggct

SEQ ID NO: 497017 - DNA, 594 bp, Homo sapiens
tcttccaatgcttttttggaaatgcctgtgttgctttatgttgcattttcattcattcatagttgcttctgctaataaaggtcctctggtggcagtaattcttttcagcagattgaagtcgtttagtaatgaaatccttggtgtattcactaacatgaagtgcgatctgtccttgcacctggtacacattcagctttacagacagtcgcattgctattcatgccttttgtttagtcacacaagggaaatagaacaagaagtataggttttcaccttggcttttataacgtaccttatgagctatgcacctccttagaatgaatttggcagtcctagttcttaggcaacaatgatttgtaactggacttaagaaaaagggacattaattgctagtaattagtagttcacrgggatttttttttattctgaattaatcaatccccttgagaaaagtgaggaccagaaaaagcaaggttttagctttagaattcaagcatttcaagtttagtgtcataccaatgattcattctagttttattttggagctctcaaagcttcacgtcaccctctctttttaaatttaatattgtttta

SEQ ID NO: 497018 - DNA, 419 bp, Homo sapiens
gcagacagatggaactgtggccagccacttcaccagtgaagtcccaaacacccctctgcaggcatgataagctagggtagttcttatcttttcctgattcctgttctctgtgtgtttagtggggaccacagcaggcagggtggggtgttggtggaatttgggataagtggagtctgggcaggcctggagctctctgtctgccttctgggcccgtgttggctgaccctgttgccccctctgccctgctttggctgagctgaattatttcttggtccttcccttctgggggcttytcgcttaacctcctttgttgtccctgataaaggggccttgttagcccgcaccttccctccttcgtcacttgacttctgcctgctcattctttgtaccttagttttagcgtcacctcctccaggaag

SEQ ID NO: 497019 - DNA, 608 bp, Homo sapiens
attcttgtacttcgggggcctctggtccctttacagatagggcaaggcacagagagggcgaattacgtgcccagggccacacagccattggcagccaccgtccccacctcctcccagacaccagggctcggtgacagccgttgacgcagcttcaccagctcagcacaaacgtgtggttttctccactgttgattcataacgaatgacagatgggaagtacgataggggcccccatctggtcactggggctggcaggtgccatctgcccacccagccacccaccttcccgcccccaaccggatagcagcaacgaggggcagtcccacccaggacaggcaaagaaacgcagaaataggtcatggccgtgcagatcttccaggatggttgaaacagaaatgaccagcaaaactgggagacgaggctgagccacaggccccacagggtgagcccagggggccactctcctagcatctccctgcggcatttttggacaggatacsagcacccgccatcttcacagcctggaccagggtggcagaccctctgtggctcccgctggcttcagaattaatgagccggctccctggatccagggcccaggctctgcc

SEQ ID NO: 497020 - DNA, 545 bp, Homo sapiens
tgcagccatctctggaacagaatgagtgggcctggcctcctgccctttgtagaacatccacaccagggtggggaggagacagtcagggcctctgaggccagctcctcccagggctagraaagctggcttttcttctcttaccccaagtgggacctgcctagtcagccccacacacccttcaaagatgctttttcaggcccaaaggaatgacccctctctagccacttagcatttactgtgagccaggtgctctgtgcacactctacaaacctagtctcattttgtcttcagaacaactctggcagcttggaatgatgattttccccattgtacccataaagaaactgaggctcaaagaggtgacctcctcaaggtggcccagcagagctggaactcaaccagatctgtctgattttgtgagattttatacttgctcttctttctctcttgacccgtggaaaacttctaccttacccagaagggaaatggctgaaaatgagatttaagaactgctcagatgaatctgtcagtcacagatggatgat

SEQ ID NO: 497021 - DNA, 582 bp, Homo sapiens
ggctgaaaatgagatttaagaactgctcagatgaatctgtcagtcacagatggatgatatcaggggcttgctcgactttctttttcctcatatgctttctagattgcaaggccctgagcacaggatggggagcttcattctttctatagtctccatgtgctctacagggtgctcaggaaatggtgagggggcatagacccactaacattaagcttcttagcagcagaaagccccaaacaccttttgccctaacttccaatgcaatacatgtattagtccatattcacgttgcygataaacacatacccgagactggacaatttataaaagaaagaggtttattggtcttacagttccacgtggctggggaggcttcacaatcatagcagaaggtgagaggcacatctcccatggtggtggcaagagagaatgagagccaagtgaaaggggtttccccttatcaaaccatcagattttgtgagacttattcactaccatgagaacagtatgggggaactgcccccatgattcaattatctcccaccagatccctcctataacacgtaggaattatgggaatat

SEQ ID NO: 497022 - DNA, 582 bp, Homo sapiens
ggctgaaaatgagatttaagaactgctcagatgaatctgtcagtcacagatggatgatatcaggggcttgctcgactttctttttcctcatatgctttctagattgcaaggccctgagcacaggatggggagcttcattctttctatagtctccatgtgctctacagggtgctcaggaaatggtgagggggcatagacccactaacattaagcttcttagcagcagaaagccccaaacaccttttgccctaacttccaatgcaatacatgtattagtccatattcacgttgccgataaacacatacccgagactggacaatttataaaagaaagaggtttattggtcttacagttccacgtggctggggaggcttcacaatcatagcagaaggtgagaggcacatctcccatggtggtggcaagagagaatgagagccaagtgaaaggggtttccccttatcaaaccatcagattttgtgagacttattcactaccatgagaacagtatgggggaactgcccccatgattcaattayctcccaccagatccctcctataacacgtaggaattatgggaatat

SEQ ID NO: 497023 - DNA, 605 bp, Homo sapiens
tctcagccagggaggagactcttccactgttgactgtgcctgttcccactccccagccaccacagatatcccctgggaggctccttggggcataaatttgaatgtgttcccattcactatcagaattctgtttcatatggaattgagtamtatcttcctgcatccttggtatgactaccataagcattttcctacttgggaactttgagtggtttctgcccaaagatatagtgatgaatgaaacactagctctgaattccatgagattctggaagatctattccatttcccctctcagcctcttgcttagaagcatttctgctgggcagcttctgaaagatttctcctttcctgccctctaggcctttgcttgtagcatttgttccactggaatagcctgccactttctgccagccttccaggccagcataagtgccagaaatccactaaaaacacttatctccatcagtatggtgtcattttcctccttcctttctgtgtcccttgtgtttgatgtgaagtttgtccttagtatggagcaggagcttaaacacaggtgttccagtgtcttcctgggcttttaaaactgcaaggttgaaatgccc

SEQ ID NO: 497024 - DNA, 565 bp, Homo sapiens
ctggaaagtggcagatgcaagtccatggaggactgcctctagagatgtatgcccactcagtcccagaatttccaatgtggaatcagcctcagaaggcctgtggtgtaacctctcactcaacacaggactctcttctgagtacttctgacagaatagtctctgcttgctaaccaccagtgaccggaagctcactatcttctgacccagaccctttcttcttcagagagctctgactattagaacatttttaaagatgagatgaactctctcttcctgttttcctcgttctgggggcacgcaggccacatccttctcctccatgtggtagcattttaaagattaaaagaaaatactcatgcccactggaccccagaactctttcctttccaggcaaagtatctgtatctcctccctcttcagaactggattacatggtacaagtcattctatcgtgggtctgcccaactgtgttaagtcattcaacaaattgcctattaaaatggaagatcataatgccrcctctgaacctgagaaataagtgtatttttttctcctctaacaatag

SEQ ID NO: 497025 - DNA, 385 bp, Homo sapiens
tgggaggatgttcaaacaagagaagtgcagaaaaagacccagccttccttagagcttggggcccatccagcaattgaaagtgtactgttccactgtcaactttttgagagaagctrcatcgcaaagccatccctcttttcatctttccctgcctaacttacattgaaaactgaaaggatcagaccactcaggggctcttgaaaaaaagtacattagtccagaaggaaacaaatggaaaagctctccaagaacagtaaatattctttgtactgatgtactactttcatctgcaatttaaaagggctttgtgtttaagaaaatgtcactgtcattccctaccagagggccaaggtaaacccagacacacaggatgaaaggactttca

SEQ ID NO: 497026 - DNA, 539 bp, Homo sapiens
acaaaaaaaaaaaaaagaaaaggtcctaacagccagtggtctcctgatttaaaacaacaacaacaacaacaacagcttatttgttccccaggttgagtcttttgagaatggccataatttttcagtcatgccaggagtggtcattcttagaacagggctggtaggggtaccaggatcaagggtttgattagacattgaggatggagagtagaaacaataaaaacaatatcttaaggcaggttgatgaaccttgagcaaaatgcaaaggtgttcatgcattcagggaatcatacaggcaacgggctaggaaccaagttatgagaacaaaggagagcctatgaaaaagccatggagcaagaacatttgacaataagtgtccrttaagagtctataatgttaatgatcttgacccaatagttctactcttaagactctctcctaaacaaataaggaatttctgtccatataacagacttcccttgcagtgtctccttgctatgccaaatcccaaaacttgaatggatgtgcgaatagacagc

SEQ ID NO: 497027 - DNA, 403 bp, Homo sapiens
ggttccgtttgttacaagcaaccaggaagcctggtttcaaggattaattagggacataggggagaggaaataggcaatttcactaaggaaaaaaatttttctgtatatcaattgccccttctccttttctgatctttttgttgaaaggcacaatgtgagacaaatgatgatagtaccttatcatggagtcatgggagaatataagaatgcggtaagttggagaaaaaggaaaagaaacgtgaatgtctctgttagctccgcctgctgtaataaaataccatagactaaatacaatagaaattkcttgaacaacagaaatttctttttcctagatctgaaggctgagaagtctaagatcaaggtgctggccaattcatacaggagtcttctttctttcttgagg

SEQ ID NO: 497028 - DNA, 627 bp, Homo sapiens
cagaccaaaagcatttgggagattctgccaaatcrttagctctctcttccccttgatttctcttgacttccaatccttgactgagcctttagatacaactaatgcagggagcacacagtagtggtgtcttcgtttccacattgtcttctttgtgctgtgatccctgttgatattatgaccatctttcaaatgcttcagggcaatgcaaatgtttcttctaagagcataccctgaaatggccttccatttggattatggcaacagcccaaactcatggcaacagcatgccaatttcagaaaaaatatggacaaatccaaacactagatccatttttcatttagaaagaaaagaggtgatcttacaggaaggctttgttgcattagggtgagtgggtgtgactgacagtaggaatgtggagaccttagtgggcatcccacttttattatcatcaaactggatctagagcaatcttttacagtcaatgatttagcttcctctttcataaaaggggatactgatgtcttccttagagagttattttgagtatcaagtaaattaattgatgtcaaaatgcattgcaaactaaattactgagtaaaattgaatagtgggtattctgttttata

SEQ ID NO: 497029 - DNA, 627 bp, Homo sapiens
cagaccaaaagcatttgggagattctgccaaatcattagctctctcttccccttgatttctcttgacttccaatccttgactgagcctttagatacaactaatgcagggagcacacartagtggtgtcttcgtttccacattgtcttctttgtgctgtgatccctgttgatattatgaccatctttcaaatgcttcagggcaatgcaaatgtttcttctaagagcataccctgaaatggccttccatttggattatggcaacagcccaaactcatggcaacagcatgccaatttcagaaaaaatatggacaaatccaaacactagatccatttttcatttagaaagaaaagaggtgatcttacaggaaggctttgttgcattagggtgagtgggtgtgactgacagtaggaatgtggagaccttagtgggcatcccacttttattatcatcaaactggatctagagcaatcttttacagtcaatgatttagcttcctctttcataaaaggggatactgatgtcttccttagagagttattttgagtatcaagtaaattaattgatgtcaaaatgcattgcaaactaaattactgagtaaaattgaatagtgggtattctgttttata

SEQ ID NO: 497030 - DNA, 627 bp, Homo sapiens
cagaccaaaagcatttgggagattctgccaaatcattagctctctcttccccttgatttctcttgacttccaatccttgactgagcctttagatacaactaatgcagggagcacacagtagtggtgtcttcgtttccacattgtcttcyttgtgctgtgatccctgttgatattatgaccatctttcaaatgcttcagggcaatgcaaatgtttcttctaagagcataccctgaaatggccttccatttggattatggcaacagcccaaactcatggcaacagcatgccaatttcagaaaaaatatggacaaatccaaacactagatccatttttcatttagaaagaaaagaggtgatcttacaggaaggctttgttgcattagggtgagtgggtgtgactgacagtaggaatgtggagaccttagtgggcatcccacttttattatcatcaaactggatctagagcaatcttttacagtcaatgatttagcttcctctttcataaaaggggatactgatgtcttccttagagagttattttgagtatcaagtaaattaattgatgtcaaaatgcattgcaaactaaattactgagtaaaattgaatagtgggtattctgttttata

SEQ ID NO: 497031 - DNA, 627 bp, Homo sapiens
cagaccaaaagcatttgggagattctgccaaatcattagctctctcttccccttgatttctcttgacttccaatccttgactgagcctttagatacaactaatgcagggagcacacagtagtggtgtcttcgtttccacattgtcttctttgtgctgtgatccctgttgatattatgaccatctttcaaaygcttcagggcaatgcaaatgtttcttctaagagcataccctgaaatggccttccatttggattatggcaacagcccaaactcatggcaacagcatgccaatttcagaaaaaatatggacaaatccaaacactagatccatttttcatttagaaagaaaagaggtgatcttacaggaaggctttgttgcattagggtgagtgggtgtgactgacagtaggaatgtggagaccttagtgggcatcccacttttattatcatcaaactggatctagagcaatcttttacagtcaatgatttagcttcctctttcataaaaggggatactgatgtcttccttagagagttattttgagtatcaagtaaattaattgatgtcaaaatgcattgcaaactaaattactgagtaaaattgaatagtgggtattctgttttata

SEQ ID NO: 497032 - DNA, 480 bp, Homo sapiens
cttgctgtattcttagtatgctaggtatattatgccccaggattattacgtgctatgtatcaagatttttttctgctgtgaaaattatgttcactatttgtataaatcgtatatagcattccctctgttctttgaaaatagccttaatcattattctaaaagacattttatcaaaaacatttttgattgtctttattatctcgttttgcatgccacagaaacaactacatttccttgtcaactggattattcttgacataaactctcattagatctttcacatttgcaaattgccaataataaaataaccrcagccttttgagtctctgtcatctacagagagcttttgtttttctgtgactcttccctgaaagctctgcaatcaggtataaaccctcttatggccctgaggaaaaggattgaatcagaaggcatcatctgggcagtttttcagatgataccaaaattttcagatttctt

SEQ ID NO: 497033 - DNA, 553 bp, Homo sapiens
caagaatccgaaactaaatcagaaatagcaatggattgcaaattcattccagttctgatgtgttaatagtccttgctttaaaactgtattgagaaagatttcaagactataccagagtacagaggaagtgtgtcataattgattagtgatgtctgccttgggmgtggatggagaaacatttatctacctgccaaattttctgatccctctattagttctaggcagattttactttgtgttcagattctgaggggctatctgttacatgcagaagatcaaaaattcttggtcgatattctcagccccacaaaaataccgctggggagcaccactgtctacctattctattgctatctctggtcccaagaccagggacttggtcctgactttttaatggtctctggcccaagccttgggactgatgcttcatttagacattctaatccttgactttgtctttgtggattagtgtctttctgatctcctggttccttgatttctggacctcccctttgcttgaaatggcagttaattgattcccaaaggttctgaa

SEQ ID NO: 497034 - DNA, 553 bp, Homo sapiens
caagaatccgaaactaaatcagaaatagcaatggattgcaaattcattccagttctgatgtgttaatagtccttgctttaaaactgtattgagaaagatttcaagactataccagagtacagaggaagtgtgtcataattgattagtgatgtctgccttgggcgtggatggagaaacatttatctacctgccaaattttctgatccctctattagttctaggcagattttactttgtgtycagattctgaggggctatctgttacatgcagaagatcaaaaattcttggtcgatattctcagccccacaaaaataccgctggggagcaccactgtctacctattctattgctatctctggtcccaagaccagggacttggtcctgactttttaatggtctctggcccaagccttgggactgatgcttcatttagacattctaatccttgactttgtctttgtggattagtgtctttctgatctcctggttccttgatttctggacctcccctttgcttgaaatggcagttaattgattcccaaaggttctgaa

SEQ ID NO: 497035 - DNA, 553 bp, Homo sapiens
caagaatccgaaactaaatcagaaatagcaatggattgcaaattcattccagttctgatgtgttaatagtccttgctttaaaactgtattgagaaagatttcaagactataccagagtacagaggaagtgtgtcataattgattagtgatgtctgccttgggcgtggatggagaaacatttatctacctgccaaattttctgatccctctattagttctaggcagattttactttgtgttcagattctgaggggctatctgttacatgcagaagatcaaaarttcttggtcgatattctcagccccacaaaaataccgctggggagcaccactgtctacctattctattgctatctctggtcccaagaccagggacttggtcctgactttttaatggtctctggcccaagccttgggactgatgcttcatttagacattctaatccttgactttgtctttgtggattagtgtctttctgatctcctggttccttgatttctggacctcccctttgcttgaaatggcagttaattgattcccaaaggttctgaa

SEQ ID NO: 497036 - DNA, 523 bp, Homo sapiens
cattagtggctactcacgtgccacataattaaactttataggaataaatgtagggctcatacaaatatataaacaaattatcatcatatgtaatactttacagccagtttaaaatgctgccaactcattatttttccccttggaataaaataaaatacctggcaatgctgcccagctttttttttcttaacttatccaaatatatacaggagctgtaaccacgaacatcacattgactgatcacttaatttgttttcaattttcgtttaaagcaggtttcaactcaatttatttgtatttgttaaaccaacaaagattcctcctgctccagatggacagaagtctaatttactccttttgctaacaaaaatcattattgaaaatrtaatctgtgtcccatgaaggtactgattaacatttaaatgctctagtaaatgagaattttgttaatgtgatgtatatcatttgtatatatctatacccacccacacagatacgctgccttgtttcataagaaacaatc

SEQ ID NO: 497037 - DNA, 491 bp, Homo sapiens
ttaaactttataggaataaatgtagggctcatacaaatatataaacaaattatcatcatatgtaatactttacagccagtttaaaatgctgccaactcattatttttccccttggaataaaataaaatacctggcaatgctgcccagctttttttttcttaacttatccaaatatatacaggagctgtaaccacgaacatcacattgactgatcacttaatttgttttcaattttcgtttaaagcaggtttcaactcaatttatttgtatttgttaaaccaacaaagattcctcctgctccagatggacagaagtctaatttactccttttgctaacaaaaatcattattgaaaatataatctgtgtcccatgaaggtactgattaacatttaaatgctcyagtaaatgagaattttgttaatgtgatgtatatcatttgtatatatctatacccacccacacagatacgctgccttgtttcataagaaac

SEQ ID NO: 497038 - DNA, 623 bp, Homo sapiens
tgaaaatgcccatggacatctattttaaaggaagataattatttaacgctatgaaaaatcaaatctaatgtcaatttactttgcaagaaggctaacaggaatgtaaatttcaagtttctcctgaactccgcaacaaaactgtttcagttagctggaaagccagatgtaaggtgcagaaasattaagaaaaagactgatgtgtttatcatcatcttcattagaagatgcaagtttacatttctccataaagatgcattttccttctggacatccaaggtttatggttttggggtacctggtcttagtaggtagctcctggggaagggctgagatcctagcttttggcaagagaacagaactttacatctccatctcatagcaaaaactgacactctacatggcaaatagactgcatagataaatggatcagtagtttagggaaagagcaaattatgcagttctggtcaaagaaagcaaaaataagcttgttgtagagtcctaggaaagtgtttttcattcttatacaagaggaacaaagaacgaatatgccattgttaacttaaaaaaagaaactcagacagacaggctgtctggaacaaaagatttcatttgggaagagcaaa

SEQ ID NO: 497039 - DNA, 606 bp, Homo sapiens
atgaaaggatccataattacttttgtgagtctcatcagttttctggtcatttaatgcatatctatgtatataatgaatgtttgcagyttaaatgtccttgatattttcttaaaggaagaaagggaattaaatatggagcactcagttactaggtggaggacaaatgaacacaattagcacattatgagacgggagaaaaacaagtcatgtgcaatctgcagccaaggacagaacatgatttcagtagtccctgacttctctgaacactctccttcagtaagcttaggtacagctcaaaatagaaagagtatgagttaggaagtcaggctgtcctgggttcaaagcctggcttcatcgcctctagtaagtatggccataagcaagtagaggatatggaatctcagttcccttagtttattaggtaggaagactaaataagatgacacgtgtaaggaatagcatgatgcctgagacatggcagttacctaaataacgattaatttaaaaatatatatatattatggctccaacggtcaatacatttcatgcaaagaactttaagatgaatattcccagtcctcctctccctcgagcttcaacttttcc

SEQ ID NO: 497040 - DNA, 678 bp, Homo sapiens
atatgcatttataattacaaatactatcaaattaattgtggcattgaaaccacactagtgtcatcactttccacraaagtagatgaatggaggctgcctttgatatggcccttgctttccactcttcttttctttcccctctggtgccatgctcctccatcttctggcatgcggccacctccttctcaaatgtggggttctgaatcagcagtcttccttacctccacatctctactcattcctactggaacattgcagacaagattggtgatcctttctaccatcatctttttatggcttcttgattttctcaactccaatgtctctaaacttgggaccccattatcaaacagaattgctctatgccagggtctgaaagtagaaaatgcccctctctgatcccaaccttttgtatctttattctactctgccctcccaatggatctgcccttagctccattttcatacaatagttcctccaagtcagcacatcagacactaaaattagaccatgtcttttagcttttcatgaaaccctatgaaaaccgaaccattaataggccatatcaacatggtctcaccaattttcaagaatcttccactctcttgatcttctgttattctcatgatgaaccctggggcacttccatcatctgcttcttcacatcatactttcag

SEQ ID NO: 497041 - DNA, 623 bp, Homo sapiens
aaaagactccatccagattcaaagtgaaattctacctttatactaaataatatagagagtaaaactaaatcaaagagataaaggaaaaaagaaatagctggtactgggcaattaaaagggctatactcctcccaaaacccttatcaagtgataatcacaattatttatttatatgatcatctcaacagacttgctactccttgaaaacaccttttatctttttcatctttgtatttcttttgcccagcacagtggccagcatatagtagggactcaataaatgtttgttgcatccatgaataagtacacgagcttattaattttaattgagacctaatctccaactttactggaagcctgagattgaaaacagaaagacaaaaacacacaagaaatgatgtgytgtgatgaaagaaaaaatgacttggtaaatatatggtatagcttatattaaatctgagggaaaatcaatctataataagccattatttcattacttgaatgagttaatgaatgaatgaacaaatacagtaaaaagggagtgagtctacagccactgaagtccttctaagcaatccaaaatttagtgcctacaatgaaatgctgagattgattctgggatt

SEQ ID NO: 497042 - DNA, 596 bp, Homo sapiens
tctcagcagttgcagctctttgaccattcagatccactcttcacacaagctgcttcacctcttctaggaagcaggtggaaggggaccgctccctaagtactctgcaccccaacctgagaaggccacaggatgtggagaagagagctaccttaaatctcaggcccagccctctttggagcttatctcccacccccacatcttgaagcacccagcagggctgaggaagagagggccaaggaagaagacacagccagcaccctggctggggagaaggcaaaggtacaggaggttggagtgagggccagagtgatgctggggctcagaatcttccagcgaggcagcctctgctcctctgtaaccagattccagccttctgtctcagagccataaacacgaaaccactcaaggtctatctaggaccctgcaactccaggaccagcacatgcagggccacaggcccgcggctgaaagctgattgccctctgcccctcagccaagcccttctcacatccccgtctccccagcttcccacagggcacaggctgccagacacactcctgtccccagcrtgtgtgtgctgaggatacacacacaca

SEQ ID NO: 497043 - DNA, 357 bp, Homo sapiens
gaagtagggcctcgggtaacccacagggctcattcatccaatcagactggagtcacctgagatgtccagggtataagaccataatgaccaggggtttccccacagtggggccaggatccctaaggccgtaagggttggaagaaggtcacgctatgcatggtgagtaggaagacgggccgagggtgttcccttgttccacaggctcccaactcccagcaaagccggmgggctatgggtgcagtgctgccacgtcaccacagggaggagacatggtcctgtgggactggccctctccttgcagccctgagctgtaacctggtgggtgccctccaggatccactcccgggtcccggctca

SEQ ID NO: 497044 - DNA, 563 bp, Homo sapiens
taaacactgtagcttaggtttacttatattttaattttacgtaactggagtaatatagtatacatatagcatacaattttttggtctgacttcttttgatcatgtttatgagatttcatttttttttaccactttgtggcttgtttsggtttttttaactttcaaaaatggtgtcttttgaggaatagaatctcttaattttaatacagttaaatggcttatcaacatttcccttttaacaggaatttatcaacatttccttttcagttagtgcttttgtgttcttattaaaaaatcgttcccgtttctgaaatcatgaagatagtcacctaaattatcttctgaaacattgttttacctttcatatttatcacaacaatccactctaattgttttatgtgtatgataatgggctagaggtcaagggtttttttccccccacattgtatccagttttcttagcactaccaattgaacagatcatctttcctcattactccaaagtgctacctttatcacaaatcacgtgtctttatatgcactggtatgtttctgagctttct

SEQ ID NO: 497045 - DNA, 537 bp, Homo sapiens
aaaattaacatttaatgatacccttccccatggccccaagtgtcaggaaccctttcatgttatccttcctgcaaaataaaccagaatggataaggcttttggtatttcagtaagtcacaatgctgccatgaagaagtaaacaagaggagcaatgctttatcgtggatggtagatagagttgaaaatattacctctccagaagtgtaagaaagctaaggcaaaactgcttcataggatttactttgtgggttcaagtataagaaataaggattgtgctttctttaaatctgagtcccaggaatcattaggcttttttaagagatatggtcttgctctgtcacccaggctgaagtgcagtggtgaggtcatagctcactgcagcctccaccatctgggctcaaggtgtsctctcacctcagcctcccaaatagtggggattacaccacgcctagcaatattcttatactttaagaagtagttttaagtaacttccataatcattctgtttctcagaacttcaaatgacctaatcattat

SEQ ID NO: 497046 - DNA, 631 bp, Homo sapiens
caggtagtgaaaaaattttcctttcctcggatcttctgtgtaattcaaaatggaattttctgaagcatttgggtcaacaagttactcataagaatatataagtcattgtttaagcagttcatgttgattatttactccccaagatcatacttgagaaaatccttagatatggatatattagtttcctagagctgctatacaaaagtaccacaaatagagtggcttaaacaacagaaacatatcatctcactgttctggaggctacaattcttgaaatcagagtgtgagcagggacatattccttttaaaggcactagggaaggacctattccaggcctctctcctagtttctggtatagttccttggcttgtggcagtgtaattccaatatttacacggcattcactctgtgtgtgtactgttaaaaaaattgggggtgggggaagtcattaggctggggcgggctccagtgctttaaattcctrggtaagcaaactgaagcccaatgtaaacagtaaaactagagagatttaccaaacagatgccaccagtgaacctctaactagagattttaccaataagaaactgccaactaacctttagctagagactttacctatcagaaactgcc

SEQ ID NO: 497047 - DNA, 631 bp, Homo sapiens
caggtagtgaaaaaattttcctttcctcggatcttctgtgtaattcaaaatggaattttctgaagcatttgggtcaacaagttactcataagaatatataagtcattgtttaagcagttcatgttgattatttactccccaagatcatacttgagaaaatccttagatatggatatattagtttcctagagctgctatacaaaagtaccacaaatagagtggcttaaacaacagaaacatatcatctcactgttctggaggctacaattcttgaaatcagagtgtgagcagggacatattccttttaaaggcactagggaaggacctattccaggcctctctcctagtttctggtatagttccttggcttgtggcagtgtaattccaatatttacacggcattcactctgtgtgtgtactgttaaaaaaattgggggtgggggaagtcattaggctggggcgggctccagtgctttaaattcctgggtaagcaaactgaagcccaatgtaaacagtaaaactagagwgatttaccaaacagatgccaccagtgaacctctaactagagattttaccaataagaaactgccaactaacctttagctagagactttacctatcagaaactgcc

SEQ ID NO: 497048 - DNA, 631 bp, Homo sapiens
caggtagtgaaaaaattttcctttcctcggatcttctgtgtaattcaaaatggaattttctgaagcatttgggtcaacaagttactcataagaatatataagtcattgtttaagcagttcatgttgattatttactccccaagatcatacttgagaaaatccttagatatggatatattagtttcctagagctgctatacaaaagtaccacaaatagagtggcttaaacaacagaaacatatcatctcactgttctggaggctacaattcttgaaatcagagtgtgagcagggacatattccttttaaaggcactagggaaggacctattccaggcctctctcctagtttctggtatagttccttggcttgtggcagtgtaattccaatatttacacggcattcactctgtgtgtgtactgttaaaaaaattgggggtgggggaagtcattaggctggggcgggctccagtgctttaaattcctgggtaagcaaactgaagcccaatgtaaacagtaaaactagagasatttaccaaacagatgccaccagtgaacctctaactagagattttaccaataagaaactgccaactaacctttagctagagactttacctatcagaaactgcc

SEQ ID NO: 497049 - DNA, 631 bp, Homo sapiens
caggtagtgaaaaaattttcctttcctcggatcttctgtgtaattcaaaatggaattttctgaagcatttgggtcaacaagttactcataagaatatataagtcattgtttaagcagttcatgttgattatttactccccaagatcatacttgagaaaatccttagatatggatatattagtttcctagagctgctatacaaaagtaccacaaatagagtggcttaaacaacagaaacatatcatctcactgttctggaggctacaattcttgaaatcagagtgtgagcagggacatattccttttaaaggcactagggaaggacctattccaggcctctctcctagtttctggtatagttccttggcttgtggcagtgtaattccaatatttacacggcattcactctgtgtgtgtactgttaaaaaaattgggggtgggggaagtcattaggctggggcgggctccagtgctttaaattcctgggtaagcaaactgaagcccaatgtaaacagtaaaactagagagatttaccaaacagatgccaccartgaacctctaactagagattttaccaataagaaactgccaactaacctttagctagagactttacctatcagaaactgcc

SEQ ID NO: 497050 - DNA, 635 bp, Homo sapiens
ttcataatggcactgtatttccgccttgtaatcccattggctaacatgaacaatcagattatttttcctcaagcctcgctttttcattcttggggtataaagttttgaaaacaataatccagttaggcacaatggctcatgcttgtaatcccagcactttgttggggtgaggcaggggaatcacttgaggccaggagttcaagacaagtatgggtggcatactgagaccctatttctataaaaaatagaaaaattagctggagtgatggtgtgtgcctgtagttccacctactcaagaggctgaggtgggaggattgtttgagcccggtaggaggaggctgcagtgacctgagatcatgtcactgcactccaacctgggtgacagagtgagattatgtctcaaaaaaagaaaaagaaaactgtrtaaaatctgattcaactgaccacatctctgccttcccacacccatccaagtaagataaaacaacagataacaagaagaaaaaggcagggggaaagaatgagggaagtgtttattgagactgaaatggaacactcttctcttttatgagttaacagcagtgtgttaagaggctggtttcaaactgactccaaaatgataactggcagctcat

SEQ ID NO: 497051 - DNA, 638 bp, Homo sapiens
attacaaaagcaagtgttccgactgcggttttgcattgtgctgaagtgctttcggataatttttttaaaaatgaaatttaccaaataatgctgtaagaactctgttctttataagaactctyaggttatcttcagacaacaaaagccaatgagaaagtcaagatcaccttttcaaatctcatgctctcctgaatcataatggggaacgcagagggaaagctgttggtctccaggtactgattcatgaggtagaccccgaggtacacatcttgtttgccaggcaggaacactcctgggcaagaaatcttaaaaagaaagaaaacaacaaacaagagagagaaaacagactttgctttgttttgttacacggggctctatttctcttaagctcctacagacactgacattttccccatcacctcactccctcacctgtacctcccaacgccaacatcctcccctctgctctcctcacattggaaattccaactccctcccacgtctccaccaggtgtcacaatcgcgctctcgccggctcctctccccgcccctccgggatggtagtgcggaagcggaagaggctgcagggccgggaagcctctgtttggtccggccaggtcccgggatccgggccgccc

SEQ ID NO: 497052 - DNA, 638 bp, Homo sapiens
attacaaaagcaagtgttccgactgcggttttgcattgtgctgaagtgctttcggataatttttttaaaaatgaaatttaccaaataatgctgtaagaactctgttctttataagaactcttaggttatcttcagacaacaaaagccaatgagaaagtcaagatcaccttttcaaatctcatgctctcctgaatcataatggggaacgcagagggaaagctgttggtctccaggtactgattcatgaggtagaccccgaggtacacatcttgtttgccaggcaggaacactcctgggcaagaaatcttaaaaagaaagaaaacaacaaacaagrgagagaaaacagactttgctttgttttgttacacggggctctatttctcttaagctcctacagacactgacattttccccatcacctcactccctcacctgtacctcccaacgccaacatcctcccctctgctctcctcacattggaaattccaactccctcccacgtctccaccaggtgtcacaatcgcgctctcgccggctcctctccccgcccctccgggatggtagtgcggaagcggaagaggctgcagggccgggaagcctctgtttggtccggccaggtcccgggatccgggccgccc

SEQ ID NO: 497053 - DNA, 578 bp, Homo sapiens
tgaatagggtgattaaattggactgatcatgtgggatgggatagacatgagtctactcatgcaatgtctacttaggtttcttaatcatttctgcaattgttcttcgggtgccaatcatctatctgctgtccattattagctattatgtatttggtcttgcagtggtgaatagaaggcaaaatctactttgatgcctttatatatctactagtaggtactaggcttgctattgtaactgtgcacaccaagaaccaagtttcagcttggttactgtgttgaagacacctttgctatatttcaagtcattccttcttttctcaattttttttaattgacaaaaattttatatatcgtgtacaacatcaatcmatcttggcatctgtatttgtcagggttgtcttagagggacagaactaataggatatatataagggggagtttattaagtattaacttatataatcacagggtcccacaacaggctgtctgcaagttgaagagcaaggagagccagtcagagtgccgaaactgaagaacctggagtccgatgttcaagggcaggaagcatcaagcatggg

SEQ ID NO: 497054 - DNA, 582 bp, Homo sapiens
tgagttgtctgaaatgacagaaatagaattgagaatatagataggaatgaagatcatcaagatttgggagaacagcaaaatccaatcaaaggaaactaagaatcrcaaaaaaatgatacaggagttgacagatgaaaatgccagtataaaaaagaatctgatagaactaaaaaacacactattcctccctctaccattaactttccttcatctcttgttatattggcatatgtgaaattttattccgatgtattggccatttatgttttctgggaagaatgttaaaatggaagatgtgaaaagaatgggttaaaagtggaggtggataaggagaccacttagaacttactatagaagttgaaggaaggaggcggtgatgtcagaatgagaaggaagggaccagataaggaattatttagaaacttagtttcaattttatctttgctatgttactttcttcattgaaaataaatgtggtctatccatattatttccttactctgtgtcactcatgccaatagatcactcttctctcaatgtatttgactagatcttagtcttagaatatttctgtggtgtagt

SEQ ID NO: 497055 - DNA, 582 bp, Homo sapiens
tgagttgtctgaaatgacagaaatagaattgagaatatagataggaatgaagatcatcaagatttgggagaacagcaaaatccaatcaaaggaaactaagaatcgcaaaaaaatgatacaggagttgacagatgaaaatgccagtataaaaaagaatctgatagaactaaaaaacacactattcctccctctaccattaastttccttcatctcttgttatattggcatatgtgaaattttattccgatgtattggccatttatgttttctgggaagaatgttaaaatggaagatgtgaaaagaatgggttaaaagtggaggtggataaggagaccacttagaacttactatagaagttgaaggaaggaggcggtgatgtcagaatgagaaggaagggaccagataaggaattatttagaaacttagtttcaattttatctttgctatgttactttcttcattgaaaataaatgtggtctatccatattatttccttactctgtgtcactcatgccaatagatcactcttctctcaatgtatttgactagatcttagtcttagaatatttctgtggtgtagt

SEQ ID NO: 497056 - DNA, 582 bp, Homo sapiens
tgagttgtctgaaatgacagaaatagaattgagaatatagataggaatgaagatcatcaagatttgggagaacagcaaaatccaatcaaaggaaactaagaatcgcaaaaaaatgatacaggagttgacagatgaaaatgccagtataaaaaagaatctgatagaactaaaaaacacactattcctccctctaccattaactttccttcatctcttgttatattggcatatgtgaaattttattccgatgtattggccatttatgttttctgggaagaatgttaaaatggaagatgtgaaaagaatgggttaaaagtggaggtggataaggagaccasttagaacttactatagaagttgaaggaaggaggcggtgatgtcagaatgagaaggaagggaccagataaggaattatttagaaacttagtttcaattttatctttgctatgttactttcttcattgaaaataaatgtggtctatccatattatttccttactctgtgtcactcatgccaatagatcactcttctctcaatgtatttgactagatcttagtcttagaatatttctgtggtgtagt

SEQ ID NO: 497057 - DNA, 556 bp, Homo sapiens
ttttgtcagtgattacaattttattgttgacactgtacctctgtattagtgttggtgcaaggctcataaactttagcaacttcattactcaccaattagtttcaaatgaattttactatcttgaatctaatggtgctcttcatggagtaggctccatgttcataaaggatttaaggatttcacatctgaggatctggagggatagcacagattcagagacaccaattttttcatgtgcgtgcgtgtgtgtgtgtgtgtgtgtgtgtktgtttgtttagaaatgacgtctcgctaggttgcctaggctggccttgaactcctggtctcaagtgatcctcctccctcagcttcctgagtggctgggactacaggcttgtgccactatgcccggcttaccaccagttttttagttgggaatttttatttgacagagatgcctcaggtctctaagtcagaggaaaatggcttccaattactgccttccaatttcattgatgcaaccttcccttttctcagaggctgtacacaagtgtggaaaatgccctggaaatggaac

SEQ ID NO: 497058 - DNA, 570 bp, Homo sapiens
actcacaactgaagactggcttgtaggtccagtattgtttctactacactgagtagtttaaaatatcttaaaataatctctgatataagtaatattaaaatttggaaaacatagtgaagaattagtctctttatcttccttttctaataggaatatcatttttctaattataaaaacagtacatactcattgtaacaaaatccaagccattcagaagtgcatagggagaaaatgaaggattcactacaatcccagtcttccatgaaaatcactgttaatttgattcaccatttttacgcttttctctttctcaaacatacatacaaagttaaaaattagttcatattayacatactatttgcgtcctacttctttttcttagcaatatttaatggacacatgggcaacagatggacatagtttcttgttagtactaacttactgtgtttattgttagaatcttgttagtatctaacttagtctgcttattggctggatgatagtccagtgtgttactgtactatacttaagcaatcgtctcctgatggatatttatattgttttcagtct

SEQ ID NO: 497059 - DNA, 563 bp, Homo sapiens
aaccatgtatctgggagagaggaaagggacactccagcttgaatccaaactttgaccaygtctggtatgtctggccaactgctgccagatgttgaggtgggacagccagaagtccaagggaatgacagggtgagaaacctcctgggaagaggacgttccaacaggaatcaggcatattcctgttggacccagcctcagagtctagtggtcagagtggcaggttgtgcccaaatgaagcaggctgtctctcactctgacgtgtcccaagtttagccccatggactcacagcttagcaccctggagagggagaaaactgaaagatctgattcactctttggagcataagcattatgagactggaccccacgtgggtgccaagttcagtgtaaaaagatatcatgctagatttcgtgtttgtgcagctttctccacacttcgcaaaagcatggctgacacccagtttggcaactgaggaagcactcaggcctggctgcagagaaagagagagagatgacggcagaaatggcaactgggcccatcggggaactcagtgttttatgga

SEQ ID NO: 497060 - DNA, 563 bp, Homo sapiens
aaccatgtatctgggagagaggaaagggacactccagcttgaatccaaactttgaccatgtctggtatgtctggccaactgctgccagatgttgaggtgggacagccagaagtccaagggaatgacagggtgagaaacctcctgggaagaggacgttccaacaggaatcaggcatattcctgttggacccagcctcagagyctagtggtcagagtggcaggttgtgcccaaatgaagcaggctgtctctcactctgacgtgtcccaagtttagccccatggactcacagcttagcaccctggagagggagaaaactgaaagatctgattcactctttggagcataagcattatgagactggaccccacgtgggtgccaagttcagtgtaaaaagatatcatgctagatttcgtgtttgtgcagctttctccacacttcgcaaaagcatggctgacacccagtttggcaactgaggaagcactcaggcctggctgcagagaaagagagagagatgacggcagaaatggcaactgggcccatcggggaactcagtgttttatgga

SEQ ID NO: 497061 - DNA, 577 bp, Homo sapiens
ttctcctgcctcagcctcccgagtagctgggattacaggcatgtaccaccatgcctgtctgatttttttttttttttttttttttagtagagatgaggtttctccatgttggtcaggctggtcttggaactcccagacctcagaatgactatgcccagccttgtgcctcccaaagtgctggcgattacgaggcatgtagccaccatgtcccgaggcttggttttcttatttttatacgatcaggggtctcaagactcctggggctcaagcaatcctcttggcctctgggctcccaatgtgcttggattataggcgtgagccactgcaccgagcaacatatttttcttttaaaaccaaytgggaatgaatataactttatataacaccaggttatataaagtgtatggtgcgcatgatcttacgtgagatgtggtcattctgaggtcagtagtgtcatccctatgttatggagattaggagagagaaaaggactgtgacaaatacttactgatacccaatgtgtgctgtgttatgcaagggcttttgaatagcttctgtctcttaatacttgaaatta

SEQ ID NO: 497062 - DNA, 577 bp, Homo sapiens
ttctcctgcctcagcctcccgagtagctgggattacaggcatgtaccaccatgcctgtctgatttttttttttttttttttttttagtagagatgaggtttctccatgttggtcaggctggtcttggaactcccagacctcagaatgactatgcccagccttgtgcctcccaaagtgctggcgattacgaggcatgtagccaccatgtcccgaggcttggttttcttatttttatacgatcaggggtctcaagactcctggggctcaagcaatcctcttggcctctgggctcccaatgtgcttggattataggcgtgagccactgcaccgagcaacatatttttcttttaaaaccaactgggaatgaatataactttatataacaccaggttatataaagtgtatggtgcgcatgatcttacgtgagatgtggtcattctgaggtcagtagtgtcatccctatgttatggagattaggagagagaaaaggactgtgacaaatacttactgatacccartgtgtgctgtgttatgcaagggcttttgaatagcttctgtctcttaatacttgaaatta

SEQ ID NO: 497063 - DNA, 521 bp, Homo sapiens
caaagtttggcccacatatcaaaatccagtaagctctaggaaattctggatgatgtgttcattcattcactcattcattcaatagtcattaaaaacctggaaaaaagcctactgtgggcaaaagcagaggtggttcctggcatcatggaaattatatcctggtcgaggagaaagacattaatcaagtaatcacaataaaatgcaaaattcccatacggtcaacacaatacaactctcctaattaaatgctcttaygtaccacacaaaagcatgtgattgggagagttgaccagttcaggaggtcagctcacacgcccctgaagaagtgatgacgggccaataggacaagtaggagttaggaaggaaaagggggaaggaaagaattccaggcagagggttctgaggtgcaaaggccctgagacacttgtgagagatgatatgtgtatgatcctaaaactaaaatcctttcccagggcttctgccttacattagaaaatggaaatacattctcagcacttcag

SEQ ID NO: 497064 - DNA, 503 bp, Homo sapiens
tgagccgctgtgtttggccttctgactgttcaaacgttccttccatgaagccagaatctattccctaatactgtccatyctttgattccagtttttgcttcagcatcgtaactggcacacaatgggcttagagctatgtgagcattctgccccctgagttcccttcagatatttttaaaactagcttgggctcccttgagtggcttctttcattgccatcactatttgatcccgaccttggattatgaaccttccttttgaggcctgaggtgggctgcttgaagtcctagcagctaatatgccttaccacaggcagaattttacaagtcagcaaacctggactttagcttcctttgtaacacttctgagtcctcttccctcttccaaaatttctatatttaggagctcagagtggttctgttaccattttgaggttgaccacacccaaacctcatctaacgtgtctgtttactacaggtatatgggaattcaatgaagaacac

SEQ ID NO: 497065 - DNA, 503 bp, Homo sapiens
tgagccgctgtgtttggccttctgactgttcaaacgttccttccatgaagccagaatctattccctaatactgtccatcctttgattccagtttttgcttcagcatcgtaactggcacacaatgggcttagagctatgtgagcattctgccccctgagttcccttcagwtatttttaaaactagcttgggctcccttgagtggcttctttcattgccatcactatttgatcccgaccttggattatgaaccttccttttgaggcctgaggtgggctgcttgaagtcctagcagctaatatgccttaccacaggcagaattttacaagtcagcaaacctggactttagcttcctttgtaacacttctgagtcctcttccctcttccaaaatttctatatttaggagctcagagtggttctgttaccattttgaggttgaccacacccaaacctcatctaacgtgtctgtttactacaggtatatgggaattcaatgaagaacac

SEQ ID NO: 497066 - DNA, 503 bp, Homo sapiens
tgagccgctgtgtttggccttctgactgttcaaacgttccttccatgaagccagaatctattccctaatactgtccatcctttgattccagtttttgcttcagcatcgtaactggcacacaatgggcttagagctatgtgagcattctgccccctgagttcccttcagatatttttaaaactagcttgggctcccttgagtggcttctttcattgccatcactatttgatcccgaccttggattatgaaccttccttttgaggcctgaggtgggctgcttgaagtcctagcagctaatatgccttaccacaggcagaattttacaagtcagcaaacctggactttagcttcctttgtaacacttctgagtcctcttccctcttccaaaatttctatatttaggagctcagagtggttctgttaccattttgaggttgaccacacccaaacctcatctaaygtgtctgtttactacaggtatatgggaattcaatgaagaacac

SEQ ID NO: 497067 - DNA, 638 bp, Homo sapiens
ctgggtgtggccacgttgctaagatctagccaataggcaggatacaagtaaaagtggtatacacaactcaagcaaatgtctttaagggggaagaacacattttttttcctttgtcttttttccttcctgctggctagaatagggataaaatggccaagactccagtagtcatcttggacctcacagaagtggccacattccagaaacaatgcagcagaaggctggaaggtgacagagtcccttaatatctgcagagccacatattggccctagacactcatgtctagaaattttatgggagagaataaaactttctcagttctaagcccctcttaatttgggtttgaggtcacttgggtcacatgcagcaaaacctaattataacaaatacatctggattttatggagccatggaggtctgagaaaattgagaaccaatatagtgtttataagccctgaaactagataaagtcagaatgataatggtgtatgtgtttcaaaataaaatttcttttattgtctgtttttactagaatgcaatacttgctcattttaaaaagagcagacagataaaaagagctttattacttytagcccagggggtccaccaccaccccttgtgattgccctaccctaca

SEQ ID NO: 497068 - DNA, 594 bp, Homo sapiens
ccatttgtttcttgacgtgtgactacaaagggatttgcttaattgaaatttaatcagctgtatatttacatatgtgcacttttctgtatttggtgatgtttcataattttttaaaaggctttatgttacctggagcctgccacagggacctgccactgtraaatgagatgtttaaataaaaataccagcttcagcagagctcctttcttttcattgatgccactgcattataaagtacatgtcagatcagttacggtgaaagtggcataacatgacttccaaggctaggtcataaaaggcctcccagcttctgtacggctcctttgccatgctcatcctcaggatgctccctgttggaacacagccaccatgctgtgagaagctccagccacactgaggccaataggtcctccagttgagagccccagctgagcccaaacttgtcatcatcccaaccaggaaccagccacgtgagtgaacaaacctgcaatagatctccacccccagccattgaagtcttcccagctgtttccccagacatcctggagcagagacaagctaccctcttaccctcaacccatgcccatagaagtt

SEQ ID NO: 497069 - DNA, 587 bp, Homo sapiens
ctgtttccccagacatcctggagcagagacaagctaccctcttaccctcaacccatgcccatagaagttcccaacccacagaaatcacaagcacaatgaaatggctattgtgtggggacatcaagttactaatgtctgtttcacaacaatagcaattgggacaagtcaccataactccattacttccagttgttgtaaggacttcatgaagataggcattttattcacattttctgtagggcataggtaaggctcagagtatgaggtgaattgcctcgtgttgtacagtggagcctggatttaaacctgaatatgtctgtcctgacagcctgtgctctgcctgtatgtgttatagactgaatgtttgagttcttcccaaattcatatgttgaaaccctaaccctcaatgtgatggtattaggaggtaagaactttgggaggtaattaggtcatggaggtagagccctcgtgatgggattagtgcccktaaatgaacagacaagggagaaagatgatttctctcttcaccacaagaggttaaagaaagaaggcacccatctgcaaatcaagacgagagccctctccag

SEQ ID NO: 497070 - DNA, 618 bp, Homo sapiens
gttctattaactattcatttagcaccctccagttcattcattcattcattcattttatgtatttgacacacttactgagagcctcctgttggctaggcatagttctaggcactagcgacaccaaggcaggggaagtggagtgacaggaaataaaaatacacaaggtaattsaaactgaataatgctatgaaggaaaaaacaagcactgctgtaatggagaataattgagaaacatctgtgaggagttgacaatttggcctgagacctgaaggctatgaaagagccaaccatgtacgtatttggggttaaagcactacaagctgaaggatcagaaaatataaaggcctcaagtaagaaaattaatagacatattccaggaaccgagcaaaggtgtgtgtgccgtgcaagctagggcaggacaacaggaataaactgagacaacgtagaagcacctacagaaccaggagatgcggtcaccctcctcatggccttcccaacactgttccaaggccaaacactgccatcctgtagtcctagagccttactccttcccagtgctccatgctgtggctgtggctgccccggtgagaactgatcactgaaagaatttttttcagc

SEQ ID NO: 497071 - DNA, 618 bp, Homo sapiens
gttctattaactattcatttagcaccctccagttcattcattcattcattcattttatgtatttgacacacttactgagagcctcctgttggctaggcatagttctaggcactagcgacaccaaggcaggggaagtggagtgacaggaaataaaaatacacaaggtaattgaaactgaataatgctawgaaggaaaaaacaagcactgctgtaatggagaataattgagaaacatctgtgaggagttgacaatttggcctgagacctgaaggctatgaaagagccaaccatgtacgtatttggggttaaagcactacaagctgaaggatcagaaaatataaaggcctcaagtaagaaaattaatagacatattccaggaaccgagcaaaggtgtgtgtgccgtgcaagctagggcaggacaacaggaataaactgagacaacgtagaagcacctacagaaccaggagatgcggtcaccctcctcatggccttcccaacactgttccaaggccaaacactgccatcctgtagtcctagagccttactccttcccagtgctccatgctgtggctgtggctgccccggtgagaactgatcactgaaagaatttttttcagc

SEQ ID NO: 497072 - DNA, 375 bp, Homo sapiens
ttgatcaaaaataaatacataactaaaataaaatcccagtgtgatcatgggctgcaatagaaggagatgtcttgtttcaccctgctcctcagatcatgcctggaatgtgcccaactgcagtcagttatagtggtctttgtgcatcattagcaaaccactgacaaactaaaatgcaaccaggtgagagagctcaggttgttgaagytggccaaaactatggtccatggggaacagtgggaaaatctgaagatatttaataagaatggtgattctcaactgagaatggttttgcccataaaggacatttgtcaatgtctggagacatttttggtggttacaactgggagtgtgcccctaacatctagtgggtagaag

SEQ ID NO: 497073 - DNA, 571 bp, Homo sapiens
atacataactaaaataaaatcccagtgtgatcatgggctgcaatagaaggagatgtcttgtttcaccctgctcctcagatcatgcctggaatgtgcccaactgcagtcagttatagtggtctttgtgcatcattagcaaaccactgacaaactaaaatgcaaccaggtgagagagctcaggttgttgaagttggccaaaactatggtccatggggaacagtgggaaaatctgaagatatttaataagaatggtgattctcaactgagaatggttttgcccataaaggacattygtcaatgtctggagacatttttggtggttacaactgggagtgtgcccctaacatctagtgggtagaagccaaggatgctactatgcatcctacaatgcacagggcacccccccgcaataaagaatgatccagctcaaaattacagtagagctgaagctgagaaggcaaagatctacctacctaaccaagtgcataagatggtttgagaactatgcacacatggaaccaattactccacaggaataagtcttgtgttgcaggacatttccagttagaat

SEQ ID NO: 497074 - DNA, 571 bp, Homo sapiens
atacataactaaaataaaatcccagtgtgatcatgggctgcaatagaaggagatgtcttgtttcaccctgctcctcagatcatgcctggaatgtgcccaactgcagtcagttatagtggtctttgtgcatcattagcaaaccactgacaaactaaaatgcaaccaggtgagagagctcaggttgttgaagttggccaaaactatggtccatggggaacagtgggaaaatctgaagatatttaataagaatggtgattctcaactgagaatggttttgcccataaaggacatttgtcaatgtctggagacatttttggtggttacaactgggagtgtgcccctaacatctagtgggtagaagccaaggatgctactakgcatcctacaatgcacagggcacccccccgcaataaagaatgatccagctcaaaattacagtagagctgaagctgagaaggcaaagatctacctacctaaccaagtgcataagatggtttgagaactatgcacacatggaaccaattactccacaggaataagtcttgtgttgcaggacatttccagttagaat

SEQ ID NO: 497075 - DNA, 647 bp, Homo sapiens
tgcagcctcattcagctcatctggacttgcgcaatggcaacataattctctgccagtgcttcttaaccgcatccacagcatgmgatgtttgcattgcacattgatgtcaacgagaaggtgtgcttgtggctggaaacagatatagattctggctactccagtttcctcctagttgtcccaaagactgaagagatcaatatcttgaagcatttacagatacaggtgttatatccttcctagtaccctgggtaggaagttttgcactagattcttcccagtacattagctttcagagcatttatttatcttgtatcaccaattcttaacagtgtgcctatcacatactaagtatctaacgtgtgtcattgaatcgatacaaagttctaaagctgatatcttgaaacaaagattcttcatttcatgatgagcaaaaacttttggggatccataataaagctgtacttctatgcattcatctatgtttctttcaagaccattttatagagctctccctctctcactacaaagcaccttttcaatttgtcctggagttctacttgggagatgcctggactatcacttaaggctcctggcccctgctctgtattcttacattgctctatgctttcttatgttatgtgttccac

SEQ ID NO: 497076 - DNA, 622 bp, Homo sapiens
ctgggagtgaaggtggtggtgtcgggtccaggcagcgggaaggccttgatctcttggttccttcttggagctgctratgggctgcagcgggcgggtcggtctcggctgcttcaccgggttattttataaaagaggaagaaaaaaaaaaagtctcctgagggggagaggcgaattttttgtaaaatcagggaggggggtgttgttaaacgatttttttagatttttattttttattttttaataataaatgtgtgttccaagcgcacactccgcactctcagcactaaccgtggggtagaagggcccacaggtgaattttaaaggaggatcctccatcagatatgcactgctggctcaaatcagcatgtcccctcaaccagtctcctctggaatgcacttggatttaatccactccaaccatagtgtttctactttgaacttatagtcacaccagtgtctcattcctttgacgggattattgtattatctgtgtatgcatatgcctctataccactggattaaagctcctaaaaaagcaaggatactgccttctttatgtttgtattaccaagcatccaactctgtaatgtttcttcccaacaagcaggggctacccaggcca

SEQ ID NO: 497077 - DNA, 622 bp, Homo sapiens
ctgggagtgaaggtggtggtgtcgggtccaggcagcgggaaggccttgatctcttggttccttcttggagctgctamtgggctgcagcgggcgggtcggtctcggctgcttcaccgggttattttataaaagaggaagaaaaaaaaaaagtctcctgagggggagaggcgaattttttgtaaaatcagggaggggggtgttgttaaacgatttttttagatttttattttttattttttaataataaatgtgtgttccaagcgcacactccgcactctcagcactaaccgtggggtagaagggcccacaggtgaattttaaaggaggatcctccatcagatatgcactgctggctcaaatcagcatgtcccctcaaccagtctcctctggaatgcacttggatttaatccactccaaccatagtgtttctactttgaacttatagtcacaccagtgtctcattcctttgacgggattattgtattatctgtgtatgcatatgcctctataccactggattaaagctcctaaaaaagcaaggatactgccttctttatgtttgtattaccaagcatccaactctgtaatgtttcttcccaacaagcaggggctacccaggcca

SEQ ID NO: 497078 - DNA, 622 bp, Homo sapiens
ctgggagtgaaggtggtggtgtcgggtccaggcagcgggaaggccttgatctcttggttccttcttggagctgctaatgggctgcagcgggcgggtcggtctcggctgcttcaccgggttattttataaaagaggaagaaaaaaaaaaagtctcctgagggggagaggcgaattttttgtaaaatcagggaggggggtgttgttaaacgatttttttagatttttattttttattttttaataataaatgtgtgttccaagcgcacactccgcactctcagcactaaccgtggggtagaagggcccacaggtgaattttaaaggaggatcctccatcagatatgcactgctggctcaaatcagcatgtcccctcaaccagtctcctctggaatgcacttggatttaatcyactccaaccatagtgtttctactttgaacttatagtcacaccagtgtctcattcctttgacgggattattgtattatctgtgtatgcatatgcctctataccactggattaaagctcctaaaaaagcaaggatactgccttctttatgtttgtattaccaagcatccaactctgtaatgtttcttcccaacaagcaggggctacccaggcca

SEQ ID NO: 497079 - DNA, 622 bp, Homo sapiens
ctgggagtgaaggtggtggtgtcgggtccaggcagcgggaaggccttgatctcttggttccttcttggagctgctaatgggctgcagcgggcgggtcggtctcggctgcttcaccgggttattttataaaagaggaagaaaaaaaaaaagtctcctgagggggagaggcgaattttttgtaaaatcagggaggggggtgttgttaaacgatttttttagatttttattttttattttttaataataaatgtgtgttccaagcgcacactccgcactctcagcactaaccgtggggtagaagggcccacaggtgaattttaaaggaggatcctccatcagatatgcactgctggctcaaatcagcatgtcccctcaaccagtctcctctggaatgcacttggatttaatccactccaaccatagtgtttctactttgaacttatagtcacaccagtgtctcattcctttgacgggattattgtattatctgtgtatgcatatgcctctataccactggattaaagctcctaaaaaagcaaggatactgccttctttawgtttgtattaccaagcatccaactctgtaatgtttcttcccaacaagcaggggctacccaggcca

SEQ ID NO: 497080 - DNA, 538 bp, Homo sapiens
tagcataaaacatgtattatgcaaggaacctatcaagagtaacaaagacacttctatctcaggaaattccaaggatttagaagttcctaggaaccaggaacaaaaccagacaaattctttattatacaatagtatgtatttttttaaggtggcctcaaatccttcttgaaataaggtagaggatttatgtatgtttgtgtgtrtatatataaataaaaatataaacattatatgtttatactaaaggactattaaccattgtcatatggatttctagaactaaaggttgccttagaaataatttggctttatattcttattttataaatggagaaataggccaagagaagggaagtggcttgcttagcttcttagtggcagagttggaactggaagtttaggactttaaaccttacatttaatgctcttatcatcttcatagcctcaagctcctcctataacactggtcatgaactgactatctcatacttttctccctgccttactgtgcctagaaacctcaggccactttcaggag

SEQ ID NO: 497081 - DNA, 662 bp, Homo sapiens
acctgtcttatttgtctgtttgcctactgtctggcttcactagaatgcacactcctcaatagcaggaacctggtgtgttttgtgtattgcttatttcctagcaccccgattatagtggggacatagtagaccctcaatatgtakttttcaagtgaatgaatacccatctgtggtcttcagtaggctgtgaactccctgaaagcaggcatggtggcttattttttggtatccccagtgcttagtacagggtatgaaagtcagtaaaaattcattgagtaatattgaattaaatttgtcctctatgatagtctatgtgaccttgggaaagttccttaatctctttgaacctcatttataatacctttttctcagggttgtcaagatgaaaggtgatcaatggatgcagagttctacaaatgtaggggattgttatttttatcatgggtcacttttctgctaaacaggcccacagagctcgtattaataatgcattcctcagtcttgccaaagatacttcttattggccttcataagactgagatgccccatgtgataagttctcaagaggctgaaaggatgttataataattcttttgcttctgtactctttatagtaatgcaagcctacgtggtaatgtggagctgcctacagacacgttgct

SEQ ID NO: 497082 - DNA, 662 bp, Homo sapiens
acctgtcttatttgtctgtttgcctactgtctggcttcactagaatgcacactcctcaatagcaggaacctggtgtgttttgtgtattgcttatttcctagcaccccgattatagtggggacatagtagaccctcaatatgtatttttcaagtgaatgaatacccatctgtggtcttcagtaggctgtgaactccctgaaagcaggcatggtggcttattttttggtatccccagtgcttagtacagggtatgaaagtcagtaaaaattcattgagtaatattgaattaaatttgtcctctatgatagtctatgtgaccttgggaaagttccttaatctctttgaacctcatttataatacctttttctcagggttgtcaagatgaaaggtgatcaatggatrcagagttctacaaatgtaggggattgttatttttatcatgggtcacttttctgctaaacaggcccacagagctcgtattaataatgcattcctcagtcttgccaaagatacttcttattggccttcataagactgagatgccccatgtgataagttctcaagaggctgaaaggatgttataataattcttttgcttctgtactctttatagtaatgcaagcctacgtggtaatgtggagctgcctacagacacgttgct

SEQ ID NO: 497083 - DNA, 662 bp, Homo sapiens
acctgtcttatttgtctgtttgcctactgtctggcttcactagaatgcacactcctcaatagcaggaacctggtgtgttttgtgtattgcttatttcctagcaccccgattatagtggggacatagtagaccctcaatatgtatttttcaagtgaatgaatacccatctgtggtcttcagtaggctgtgaactccctgaaagcaggcatggtggcttattttttggtatccccagtgcttagtacagggtatgaaagtcagtaaaaattcattgagtaatattgaattaaatttgtcctctatgatagtctatgtgaccttgggaaagttccttaatctctttgaacctcatttataatacctttttctcagggttgtcaagatgaaaggtgatcaatggatgcagagttctacaaatgtaggggattgttatttttatcatgggtcacttttctgctaaacaggcccacagagctcrtattaataatgcattcctcagtcttgccaaagatacttcttattggccttcataagactgagatgccccatgtgataagttctcaagaggctgaaaggatgttataataattcttttgcttctgtactctttatagtaatgcaagcctacgtggtaatgtggagctgcctacagacacgttgct

SEQ ID NO: 497084 - DNA, 644 bp, Homo sapiens
caggagaaacaggacttcatatggtctttgaaagataggtaaggtctgatttgggacacctactttcacgtccacaagtggatgagaatctcaccttgaaatcctgttacttcagtcaaaacattcagtttaatatcatgttattcgcttaattcgacatagtggtcacttctcgaaagcgaaggagagaaacaagaatgaggagggaaggatttctcagaggctttaactgtatctttattttacttctttaaaaaaaaaaatagacacgcagggaagatcgggtgaagacactggaagaaggccatttataagccaaagagagagaccttacgagaaatcaaccctgtcaaccgaacaccttgacctcatgcttctagcctcctgaattgtgagagaataaaattctgttgtttaagccacatacaaaataataataatatgtaataaaaaaatgaagcaaaaatggcaaaatgcaaagatttgacaaatttaggtggtgggggaaaagttaaattgtttcctttttattgaagacaccacaggcctccgggaataataattgatttttttaagataaagcatttcattgtgytttttgtgtggacaagcagtataaggaagaataaacatgtgtgaagcca

SEQ ID NO: 497085 - DNA, 644 bp, Homo sapiens
tccagctagtccttaatgcctgatactatactgtttatttaaaaagcacacagtttatcatttagcctcactcttgagcatgccgtttgcacaagccctacatgatggccatatgctacaggagcttttaaatcactgcagattgycagccccaaacggggtattggtaacggtgattgcattagtttgttagggcttcagtaaaaaggtacgcaaactggttaaaacaaaagagattcaccccatagttctggaggctagaagtctgaaatataggtgtctgcaagggcatgcttcttctaaaggctctagtggatccttttttcctctctgggattctggtgttgttggcaatccttggtgttctttgtcttgtagatgcctcgttccagtcacatggccccttttctctgtgtcttcacattgtcttttctctttgtgtccaaatttcccctttttataaagatactagtcatattggatgaggagccactctaatgacctcatcttaatttgatcattgttaactcctatttctgtaaagtcagattcatagatactggggattaggacttcaacattttattgaggaacacaattcaacctataatagtgattaaggtggaagctgaagtttaatagca

SEQ ID NO: 497086 - DNA, 644 bp, Homo sapiens
tccagctagtccttaatgcctgatactatactgtttatttaaaaagcacacagtttatcatttagcctcactcttgagcatgccgtttgcacaagccctacatgatggccatatgctacaggagcttttaaatcactgcagattgtcagccccaaacggggtattggtaacggtgattgcattagtttgttagggcttcagtaaaaaggtacgcaaactggttaaaacaaaagagattcaccccatagttmtggaggctagaagtctgaaatataggtgtctgcaagggcatgcttcttctaaaggctctagtggatccttttttcctctctgggattctggtgttgttggcaatccttggtgttctttgtcttgtagatgcctcgttccagtcacatggccccttttctctgtgtcttcacattgtcttttctctttgtgtccaaatttcccctttttataaagatactagtcatattggatgaggagccactctaatgacctcatcttaatttgatcattgttaactcctatttctgtaaagtcagattcatagatactggggattaggacttcaacattttattgaggaacacaattcaacctataatagtgattaaggtggaagctgaagtttaatagca

SEQ ID NO: 497087 - DNA, 644 bp, Homo sapiens
tccagctagtccttaatgcctgatactatactgtttatttaaaaagcacacagtttatcatttagcctcactcttgagcatgccgtttgcacaagccctacatgatggccatatgctacaggagcttttaaatcactgcagattgtcagccccaaacggggtattggtaacggtgattgcattagtttgttagggcttcagtaaaaaggtacgcaaactggttaaaacaaaagagattcaccccatagttctggaggctagaagtctgaaatataggtgtctgcaagggcatgcttcttctaaaggctctagtggatccttttttcctctctgggattctggtgttgttggcaatccttggtgttctttgtcttgtagatgcctcgttccagtcacatggccccttttctctgtgtcttcacattgtcttttctctttgtgtccaaatttcccctttttataaagatactagtcatattggatgaggagccactctaatgacctcatcttaatttgatcattgttaactcctatttctgtaaagtcagattcrtagatactggggattaggacttcaacattttattgaggaacacaattcaacctataatagtgattaaggtggaagctgaagtttaatagca

SEQ ID NO: 497088 - DNA, 566 bp, Homo sapiens
caaagctacagggaggcatattaattaaaatgtcttctttttgtcgggccattgtcagtcttttcacttttagaaggctacagttgtgggtttacaatttgttatttcctgccatttccaagatggttgcataatgaaagcataccacattttaattttcaggaacagtcacttaggtagattaataagcaggaatatctaattgtcaacttggggctgggaggaaggagtatctactttcaaactgagactgttgggaaccatcttgaaaggcagcttttagtaaatcaagagataacttccttcagaatgatctctgcagagttcccatttccttctggtgtcacacacttagacatggcaggagagatcttggcccttgagctttttkgtgtctaactgcatgttactccataagaggtataacaagagacatgaaagaatcccactcactggttttatttccactctttgtttataccttcactgccaatgaataaggaataggagagaaacatacctcttaggtaatatagagaaaatattgctttgattttatctactgc

SEQ ID NO: 497089 - DNA, 566 bp, Homo sapiens
caaagctacagggaggcatattaattaaaatgtcttctttttgtcgggccattgtcagtcttttcacttttagaaggctacagttgtgggtttacaatttgttatttcctgccatttccaagatggttgcataatgaaagcataccacattttaattttcaggaacagtcacttaggtagattaataagcaggaatatctaattgtcaacttggggctgggaggaaggagtatctactttcaaactgagactgttgggaaccatcttgaaaggcagcttttagtaaatcaagagataacttccttcagaatgatctctgcagagttcccatttccttctggtgtcacacacttagacatggcaggagagatcttggcccttgagctttttggtgtctaactgcatgttactccatargaggtataacaagagacatgaaagaatcccactcactggttttatttccactctttgtttataccttcactgccaatgaataaggaataggagagaaacatacctcttaggtaatatagagaaaatattgctttgattttatctactgc

SEQ ID NO: 497090 - DNA, 566 bp, Homo sapiens
caaagctacagggaggcatattaattaaaatgtcttctttttgtcgggccattgtcagtcttttcacttttagaaggctacagttgtgggtttacaatttgttatttcctgccatttccaagatggttgcataatgaaagcataccacattttaattttcaggaacagtcacttaggtagattaataagcaggaatatctaattgtcaacttggggctgggaggaaggagtatctactttcaaactgagactgttgggaaccatcttgaaaggcagcttttagtaaatcaagagataacttccttcagaatgatctctgcagagttcccatttccttctggtgtcacacacttagacatggcaggagagatcttggcccttgagctttttggtgtctaactgcatgttactccataagaggtataacaagagacatgaaagaatcccactcactggttttatttccactctttgtttataccttcactgccaatgartaaggaataggagagaaacatacctcttaggtaatatagagaaaatattgctttgattttatctactgc

SEQ ID NO: 497091 - DNA, 605 bp, Homo sapiens
caatgtaagtaatctctgtgaagctcctagcagagggttagatgcacaacaaatgcttctccccacttaagtcacagctgtaaaaatgtagtcctttctgccccaattacatggtttgtttcccttctcctcatgaccactgtcttgtttatatgaatgagacgtggtaatacgcagactgatgcattaaaatgctaccttattaattcaggacacccccaccccttactagraattcatgatcactctgtcagggcccaggctgaaatttactttgtccatctaatcttatgggagggagacagggaggcccaggtggaaaggagaggcatgatctgacgcactttgtggccagaactgcttgcatgaggtacatgatactggatttgcttcatatttaatatataactgacataatgggctgtcaggagggcaaatgcataatgccactttaatgtcttacggcatccatataaactggggagggggactggatgatttcctaaatataaacacatccacaaactccacaatttggtaattatgcaagagccattgtctggctgttccctgtgttttcaggcatgtcaggtacccttgcaaat

SEQ ID NO: 497092 - DNA, 605 bp, Homo sapiens
caatgtaagtaatctctgtgaagctcctagcagagggttagatgcacaacaaatgcttctccccacttaagtcacagctgtaaaaatgtagtcctttctgccccaattacatggtttgtttcccttctcctcatgaccactgtcttgtttatatgaatgagacgtggtaatacgcagactgatgcattaaaatgctaccttattaattcaggacacccccaccccttactagaaattcatgatcactctgtcagggcccaggctgaaatttactttgtccatctaatcttatgggagggagacagggaggcccaggtggaaaggagaggcatgatctgacgcactttgtggccagaactrcttgcatgaggtacatgatactggatttgcttcatatttaatatataactgacataatgggctgtcaggagggcaaatgcataatgccactttaatgtcttacggcatccatataaactggggagggggactggatgatttcctaaatataaacacatccacaaactccacaatttggtaattatgcaagagccattgtctggctgttccctgtgttttcaggcatgtcaggtacccttgcaaat

SEQ ID NO: 497093 - DNA, 567 bp, Homo sapiens
ttggtagttgtttttatggatgtgaaaaatattaccactgcaactagcaagaactataaatgatacattattgcaagtgttctaaaaaatcagaacaaaactaatttattatagttctgtcttcattatacaccacgtgttggtgagttaaacacaacaaamttgtcttttcttttaaaagtgtctactaaagataaaaagaataagataacaattaacatgtagtttgttacattaaaaaatctgatatacatatttctattgcctgttagcttgttctaagcctctttaactattacaacaaaaaaaaaaaaaaggaaagaaaaagaaaattcattgtttaaaggcaaacattcaattcagttgatacaacattacagtacagtcaactaacatcattcaacgaaggtaacaagtctagccttagcttcttgagttaaaagtctatagaccagattgctacaaaagtttcaatgctgcttcaaaaccgtatgttagctttttggaggacaaagtactttctacggatggcttcagaaggggtcatgctactggtaaaagcacagg

SEQ ID NO: 497094 - DNA, 567 bp, Homo sapiens
ttggtagttgtttttatggatgtgaaaaatattaccactgcaactagcaagaactataaatgatacattattgcaagtgttctaaaaaatcagaacaaaactaatttattatagttctgtcttcattatacaccacgtgttggtgagttaaacacaacaaacttgtcttttcttttaaaagtgtctactaaagataaaaagaataagataacaattaacatgtagtttgttacattaaaaaatctgatatacatatttctattgcctgttagcttgttctaagcctctttaactattacaacaaaaaaaaaaaaaaggaaagaaaaagaaaattcattgtttaaaggcaaacattcaattcagttgatacaacattacagtacagtcaactaacatcattcaacgaaggtaacaagtctagccttagcttcttgagttaaaagtctatagaccagattgctacaaaagtttcaatgctgcttcaaaaccrtatgttagctttttggaggacaaagtactttctacggatggcttcagaaggggtcatgctactggtaaaagcacagg

SEQ ID NO: 497095 - DNA, 648 bp, Homo sapiens
tggcatgaatccaaacccaggaaggtgtcttgggacagacgggaagggtgtctatgaaagagccctagggaataacgtcgacctcagagtctgatttgacttcaactgatcaaaagcaagcaggctagcctccctgtgaaatatacagatgcgcaaactgtgaaaggtagagacggccttacagatcacaggacacatctacaataacctctcattttgcagaggacacctcagagaggtgaggtcacatatttggaggccaagctccactctccaagcaccctgtcctgcactctagatagacaatcccacattgctttgctttgtctaaggttaaattcatattctttgccacgagggcagggtctacagttctttgaatgacattagtctttagtgctccatcaatgaatcatttatcagtagcacaggaaaacatcactcaatttagggatagttcagtggctggttttctttaataacctccattttgacctttgcttaggtaggttgggggttgtacagatagctcaatcaattacactgatggccaacttatttcaaaaaattagtcaggtcagccgaacaatgttcactgatttyttttttaacatggcagtaaattgattgtaatgttgatctgtgctg

SEQ ID NO: 497096 - DNA, 646 bp, Homo sapiens
taaactatatggggcactcatgtcacttagggtctatgataaatttgcttctctgcttcataaaatatgactttggtgctagggccttttgtctttcagagtgggatttgtagtctatcaccatgagaaacaaccggatcttctaaataagcaagttcctaggctccggccagacctaccaagtaggaagtactggggataagtctcagcaatttgcatttttcataaaaacacaatgattgttaggcacacttaagtatgaaatctaaagatatttttttcttattcctgctctgccaagtgtcttggacaagtcacaccaactttctgtgtcctatgatttggtgaataaaataagttggtcttagagatggagactcagtctgaatttaaatctgacaattgctagctgtgagcctttgagaagagcatgtgaacaaacttagccgtgtctgcatcatttataaaatggaaatattaacgtgtttagcttaacacgcacatgttgtgaagataaaattagatwataggagtgagtaaaacttgtaaaccttaagaacaatagagacgagaacatttttctttgctgtaaaatagaagataaagacttcccaggtgtgatatgagggcaaatacaattatttag

SEQ ID NO: 497097 - DNA, 477 bp, Homo sapiens
ctcagcaaatacctatttatcacctgttctatactaagcattgagcttcacagcaagatagagaatcagaacatgcatgaaccgacccctggatgaagctagagcccacaaggagagaggagaaatgagaacgttgatgccgtgggagaagcacatcgtgaaggtgagcaccaaactagtttccatgaagtcccagagaggtctgggagggaggatgtgagggtgggttcctcggaaagacgggtatggaaggacaagtgaaaccaaaaaaggggaaamaaagagagaacgtttgaggcagaaggaatgacattcacaaaggcacagtcagtaaacagcaaggtgtgtttgcggagtgacacagagggtcggatatgaggtatgtgagcatcgccagaatgacaagcaaagcagagaatgctgatgaggttgggaggtctgactcctggacatcagaccaggcaggttagaatttaa

SEQ ID NO: 497098 - DNA, 594 bp, Homo sapiens
ctttgttgggaatagaagggaggaggacaaaggtgaaagcaggcaggggacagcactaatccaggtaagaggatggatcggatcaatcagtggtgatgggggagagggtgatgagaattagggggactctggggatattytgaaggaatatatcagcacttgctgatgaattggatgtagagtaagaaggaagagacatgtcaaggatgacttctcggttttagactgtgtgacaggaggagcagagttgccctttactgaggtggagaagatgtggaggaagtgagtttgctggagaagattaagagtttgatttctgacttgtgacaattgagatgcattttggacagtcaagtagagacgtcaagacagtggaatatatgagcctagacttctgcgagaggtctgagattgagacataaatttaaagtcatcagcacatgaatgaatagtatataaagccatgagttgcagggaagagtgagtgtaaaaagagaagaaaagatgtccaaggaccaaaccttggggcattcattgtaacaatgcactgtccccttgtggtcatcgaaccactctcttaacgatgacaaccat

SEQ ID NO: 497099 - DNA, 594 bp, Homo sapiens
ctttgttgggaatagaagggaggaggacaaaggtgaaagcaggcaggggacagcactaatccaggtaagaggatggatcggatcaatcagtggtgatgggggagagggtgatgagaattagggggactctggggatattctgaaggaatatatmagcacttgctgatgaattggatgtagagtaagaaggaagagacatgtcaaggatgacttctcggttttagactgtgtgacaggaggagcagagttgccctttactgaggtggagaagatgtggaggaagtgagtttgctggagaagattaagagtttgatttctgacttgtgacaattgagatgcattttggacagtcaagtagagacgtcaagacagtggaatatatgagcctagacttctgcgagaggtctgagattgagacataaatttaaagtcatcagcacatgaatgaatagtatataaagccatgagttgcagggaagagtgagtgtaaaaagagaagaaaagatgtccaaggaccaaaccttggggcattcattgtaacaatgcactgtccccttgtggtcatcgaaccactctcttaacgatgacaaccat

SEQ ID NO: 497100 - DNA, 559 bp, Homo sapiens
aataggggtataagattacatctctatttgtttatgtttttatatttamtaaaattaattcaaacacacggttttaaaaaacaaaacagacacagagtgttaaaagaatgagaacaatcttctttctctagcatctctccccaagaatatccatttcaaaatttcttttcctgtttatccaagaagaaatttaaaaaaacaaattttatgtacagacttaattatatgtatattatttcttttacacaaacaggtacaaaacgtactgttgagtactttgatttttcacttagtatatcttggagacttttcaatgatcatgcacagatctttctggcatctgcatgccactcagttgtttagatgtgccataatatatttaaccagtgatttctctgtctcattataatatatattgtaagaaacagtgtaaattattgttatgcaattgccgaatccaatagtaagtatattgaacattttgacagatataagttctaagagtatgtgacagtgtttattaggcatgtattaatattatattacatctatctgtgta

SEQ ID NO: 497101 - DNA, 559 bp, Homo sapiens
aataggggtataagattacatctctatttgtttatgtttttatatttactaaaattaattcaarcacacggttttaaaaaacaaaacagacacagagtgttaaaagaatgagaacaatcttctttctctagcatctctccccaagaatatccatttcaaaatttcttttcctgtttatccaagaagaaatttaaaaaaacaaattttatgtacagacttaattatatgtatattatttcttttacacaaacaggtacaaaacgtactgttgagtactttgatttttcacttagtatatcttggagacttttcaatgatcatgcacagatctttctggcatctgcatgccactcagttgtttagatgtgccataatatatttaaccagtgatttctctgtctcattataatatatattgtaagaaacagtgtaaattattgttatgcaattgccgaatccaatagtaagtatattgaacattttgacagatataagttctaagagtatgtgacagtgtttattaggcatgtattaatattatattacatctatctgtgta

SEQ ID NO: 497102 - DNA, 510 bp, Homo sapiens
attgccccatgcctgtcagttatttaaatgtgtattgcttaaagtgcatttttcttaatcactgaattaattttcctctaagattgcaatccaagttttaacctttgatacgataaaataaatgctgtgaggaacaatgagagcttagagcttccaaataatttcttgggtgaataaatgaataatrcgagggcaaatgttcagaaagaaagttttgattagaaataaagtatttgcttaaaaccgttactgaagtttccttagagtataggaaactttagattattcctggggtgtcatgggggcatcgaaaattaaagttttccttgtccctgcaaatgggagaatccatttgagaatagcactattttttacctaatagaaaacttctcccttcccattttcccattagaaaccctgttaaaacttcaaacagtggaaatctcattaactttcctcctgagcatctgcagacattatgagataattacaagccagagtgtgacaaaa

SEQ ID NO: 497103 - DNA, 510 bp, Homo sapiens
attgccccatgcctgtcagttatttaaatgtgtattgcttaaagtgcatttttcttaatcactgaattaattttcctctaagattgcaatccaagttttaacctttgatacgataaaataaatgctgtgaggaacaatgagagcttagagcttccaaataatttcttgggtgaataaatgaataatacgagggcaaatgttcagaaagaaagttttgattagaaataaagtatttgcttaaaaccgttactgaagtttccttagagtataggaaactttagattattcctggggtgtcatgggggcatygaaaattaaagttttccttgtccctgcaaatgggagaatccatttgagaatagcactattttttacctaatagaaaacttctcccttcccattttcccattagaaaccctgttaaaacttcaaacagtggaaatctcattaactttcctcctgagcatctgcagacattatgagataattacaagccagagtgtgacaaaa

SEQ ID NO: 497104 - DNA, 459 bp, Homo sapiens
accctgacacacacacaacttagcttagcttttgagtctcaaagtaccatccaatagaaagtaggaactatcaccaattcctccctcaaatactcatacgaagaggaattttaagggactctgatgcartttgcatcttctgtgattaattttataagattcactatttgagaaacagaatagattttgatttttgaatgtttcatttgtatgcctttaaacctaaagtattggtcgtctaataatttagactttgtatatcacaagttttgagagttaaaatagttacagatacttagcattgatgaccctgttctcaaccaggagtgattttgccacctgacgacatttgacagtgtctgaagacatttttggctgtcacatgggggaaggactgctattggtatctagtggctagagtccaggggtgctgccaaaattctacaatgcgcaggacag

SEQ ID NO: 497105 - DNA, 657 bp, Homo sapiens
tctttatagcagaactctttaccaacctcccctcttcagattcacccatgccttccattccctctgtaaaatcacctgatgtcccagcttgtcagttatgcttttcctctagcaagccagctcatgtttgatcctaccagtggagttgcatgcttaacaaamgtcagttctgaatctgtttatgctacttgtaactataattaggaaattcaattattatgtaaaccaacaaacatgagtgtgaaaaaaattatttttctatgaaaagtaaatggaatgctttggaatgacttgaaaaaaatgaagcctttcccttaccctccaaataaaacacagaaaaaacaacctactgcagaatttggaataggtgagataactgttaaaacagggaaaacatctagaaggatcaattagtttcaatcaattagtttcataaatatctttaagttccaaagctgaatggatgggtaatacttacagaaaagagttttgtaagaaaggcagcatgagacttagcaaacactgtctctaagaaggggtttagttgtatctcaaaatacagaggaatgaatgtttacttaaatgttttaagtcaaaataaaatatttaagatataagtatataatttttattaaatgcgctaactgattttgcaat

SEQ ID NO: 497106 - DNA, 476 bp, Homo sapiens
ttcgtcttagccaagaaaggaaacatccaggatatatactatggtgaatttactaaagatctctcggtactatgagttatgaaagttatcaaaaactgtcttcctgtgaaggtcagtttatttgattttttatttatattatacctcctctccccttttcctccattcctcaaataattcatttattmattcaacaagcacttattgaaacaattgctatgttctgagaatatgactaagtggagttgaataagttaatgtaagcatgcatccaaaaacccattctgatttaaaatactcacagatcactgcaaaacaattggaggcataaaaggggagaaagagcaagaaaagactcaacagagaaacaggttggaaattgtgaggggcactggtaatggagaatgagaggaaagaataggtatgacgtgttggctggttacattgggagggggtggtgctaggaagcaatcgaa

SEQ ID NO: 497107 - DNA, 476 bp, Homo sapiens
ttcgtcttagccaagaaaggaaacatccaggatatatactatggtgaatttactaaagatctctcggtactatgagttatgaaagttatcaaaaactgtcttcctgtgaaggtcagtttatttgattttttatttatattatacctcctctccccttttcctccattcctcaaataattcatttattcattcaacaagcacttattgaaacaattgctatgttctgagaatatgactaagtggagttgaataagttaatgtaagcatgcatccaaaaacccattctgatttaaaatactcacagatcactgcaaaacaattggaggcataaaaggggagaaagagcaagaaaagactcaacagagaaacaggttggaaattgtgaggggcactggtaatggagaatgagaggaaagaataggtatgacgtgttggctggttrcattgggagggggtggtgctaggaagcaatcgaa

SEQ ID NO: 497108 - DNA, 461 bp, Homo sapiens
aaaactgtgggcccaaggccgtgggtggtggctcacgcctgtgatctcagcactttgtgaggccaaggtgggtggatcgcctgaggtcaggagtttgagaccagcctggcaaacatggtgaaaccccgtctctactaaaaatacaaaaattagtygggcgtggtggcaggctcctgtaatcccagctatttgggaggctgacgcaggagaatcacttgaacccaggaggcagagcttgcagtgagctgagactgcgccactgcactccagcctgggcgacaagagccaacttcgtctctaaataaataaagcaaacaagctagctagctagctagctgtgggcccaaaaactcacccaaggtatacgccaacaagaatgcacacgtatgcacaccaaacaggcaggcacactcatgaaggcccaacaatggaaaacaactatgcccaccctgagaagggac

SEQ ID NO: 497109 - DNA, 461 bp, Homo sapiens
aaaactgtgggcccaaggccgtgggtggtggctcacgcctgtgatctcagcactttgtgaggccaaggtgggtggatcgcctgaggtcaggagtttgagaccagcctggcaaacatggtgaaaccccgtctctactaaaaatacaaaaattagttgggcgtggtggcaggctcctgtaatcccagctatttgggaggctgacgcaggagaatcacttgaacccaggaggcagagcttgcagtgagctgagactgcgccactgcactccagcctgggcgacaagagccaacttcgtctctaaataaataaagcmaacaagctagctagctagctagctgtgggcccaaaaactcacccaaggtatacgccaacaagaatgcacacgtatgcacaccaaacaggcaggcacactcatgaaggcccaacaatggaaaacaactatgcccaccctgagaagggac

SEQ ID NO: 497110 - DNA, 517 bp, Homo sapiens
gccaagctgcttccctcctgcctacccccaccaccccatagaccagtacccaaagttagaccctgtgtcccaagcagccacagcagcaggcatgcagcaggcactcataaacattcattaggtgagcaaatgctggtcagacccaatgctgagaagagacagagtgaaacaacatgtgaaagataaggaggcacgtggggaagatggaaatgtccagtaccctccttgccactggttctaaaattgtgttgtttacattctkaaatagtcagggctcctaacgagcatctgcttatgtggcttctctattactgttttgtggggttttttctgagacagggtcctgctctgtcacccaagctgaagtgcggtggtacaatcatagctcactgcaacctcgaactcctggcttcaagccatcctgcagcctcagcctcccaaagtgctgggattacaggtgtgagccactgcatctgggctgttgctgtatttgatgttaccatgtactacaacagtg

SEQ ID NO: 497111 - DNA, 324 bp, Homo sapiens
cgtgtctgagcacctcgtttgtccacactcagagaatctcaagagctcagctctggtccctgcaatgtccagaccatcccccacatggctctcctggaggtgttcggcaaaggcacaggctgccgtggggcagaagattcccacataccagacagtaaggagctgcgtgtgactggaaggatgaggacgacccagagaaygctctctggcccctggtccttggggaggaatgggggacctgcaggggaccaccttcccactctgggagccagattccctggctttgtccagagcagccaacccactaccccactcaaaatgaac

SEQ ID NO: 497112 - DNA, 597 bp, Homo sapiens
gattatgtgacctataattagaagcatgagatccttttggtcaaaccaacatatgagctctgatctcctgcttgaaaagttctttcagtattataacaccctctcctacttgccagactgtttgaattttgctaagcaataatgtattgaatgtgatgtttctttctatgtgtgtatgattataattaatccaaaaagtaaacaacctagatccggaagtaattttatagcttatagaacataatgagaatcacacatcttatttargtgctttcttactagaggagctccataatcacttataaatccagtgtaattatttccttacttttctttcggttactgctccataagatttcaaagaatgcctacctctaaagttcactcttaattaaataaattcatcctaataatacctagaaatacccatattaatctttttaaaaggcagtgacgttatagagtcagaaggtccttgtgaacagttcatatctttagagatggtctcatttattttgactgtgtctatattttatgattgcttatgtagcattttcaactttaaaattcatgtcaatgaatccttctcaacaccag

SEQ ID NO: 497113 - DNA, 594 bp, Homo sapiens
gcgtgccactgccacgggtgcaaaacaccaggtctccccaactcatctacaagctcatatcacccccatcaacggctcaacaccgtggtggagaagggttgttagttgaggcctgctaggagcaaggagagtgagtcctggggctcccgcgcgactcctctgctgrgacctagagagctggcctggcgtcagcggcctccacctctgcctctccggctccgactctgcaatagtgaactgcatctgctcctcacagccacccgccttgtgctgagacttggaatttttctcctcctcctaacccatccacaatcaatactgacattgagagcaaggcacttcagatctcccccaaatcttaagatttcaccaagtcagccacgcttacaccctaactcaactccctcaacccctgccacttccaatcctggtcccgtgctcaggggccagggccgacagaagatggcagcagaagagaaccttaagtgtggtaggtcggcagtaagacttagacaaagaagaaaaagagcccgagaaagatgagcaggcccaagagaaggaaacgcagcagagggagaggaaaacccccaaggg

SEQ ID NO: 497114 - DNA, 611 bp, Homo sapiens
gaagtaggcagtcctgagagctttaaatcctaagtcactcaagtgaaaaggggaggaatcaggatgtgtattaaggtgacagatgaaggtttyattcctgtgccacgccactgaagtcacatgaaatggattgtctttagctcacttaatctggataaaatttattcttagatttttcccacggttaaatgcagttctgtagtttaaatgaatgcgtgtacatgtgcatatctgtgtgtgtgtgtgtgtgtgtgtgttgttgcatcacgtgattgtggggagaggggctgtaggagaaacgcaagggaaaaggcagtgagcatcagagactaggtctttacagtgaaattcttccttatttctcaaggcagtagtagctgaaaattacctaatcaagtgaccaggcaacagatccaagaaggaggccttctgtaagggagaattcatgaataatgaagattgattatattccctacctatttaaaggatggccctcttttttcttcttagttgacctcatctccctcccttaatcttcgtcatgactggagaatcatagccccttggaatttcaggctgacctgccctgtcctagacttcctgaacctccc

SEQ ID NO: 497115 - DNA, 622 bp, Homo sapiens
ccatcagttctaacaagttctcatggaatgcagtctttttaccctgcaggggcagagcactaggctaggtacagccacaagggtacaaaggcaccaagcagcaatagtaaggctcctaaccccttaagttgtgaaaccaagcctgtggtcatgggcaagtcaagagcagttaatgacttaagacttaagacttaagaatattcataaaattaaagcaaataatycggatttctggctgcagccacagtaacccactctagccaacagaagggggaaaaaaggtctttatttaaaaaaatacaaggatttcttatgaaactcaaggaaagacatgcacctaagcctcaggtagtgctagaaacaagaacatgtcctactaggacattttatgtgatttcaagtttattttctctatagccaattgggacccatgcttttcaaagtctgagttacgtgataaaaaaaaattttttttagttccttcagggaggagtgtgttagttttgttaataatgcctgatgattgtccccatccagggcatgatttacacgcaattccatttccaaattcccagggaaggagcttgattggctcagcttgagtcaggtgctcactctatga

SEQ ID NO: 497116 - DNA, 622 bp, Homo sapiens
ccatcagttctaacaagttctcatggaatgcagtctttttaccctgcaggggcagagcactaggctaggtacagccacaagggtacaaaggcaccaagcagcaatagtaaggctcctaaccccttaagttgtgaaaccaagcctgtggtcatgggcaagtcaagagcagttaatgacttaagacttaagacttaagaatattcataaaattaaagcaaataattcggatttctggctgcagccacagtaacccactctagccaacagaagggggaaaaaaggtctttatttaaaaaratacaaggatttcttatgaaactcaaggaaagacatgcacctaagcctcaggtagtgctagaaacaagaacatgtcctactaggacattttatgtgatttcaagtttattttctctatagccaattgggacccatgcttttcaaagtctgagttacgtgataaaaaaaaattttttttagttccttcagggaggagtgtgttagttttgttaataatgcctgatgattgtccccatccagggcatgatttacacgcaattccatttccaaattcccagggaaggagcttgattggctcagcttgagtcaggtgctcactctatga

SEQ ID NO: 497117 - DNA, 569 bp, Homo sapiens
ttcaagtccctgtgcattttaaggatataaatactgtttagaaagagaaaaagtaaggatcagatggtacagagtatatgagcagggtctaaacagggggaaaagtcaggaacagtgtgaacaygaggagacacaggtctcaagcctgtggctgccagaggcagctctgcctgtctcctttgtgtggctagcacctagcccagggctgacaccagccctgtcggtgctagttcacctaatcaaacatttagaggggggtcactcctgttggaagagtgtgcacaaaccaggaacggtaaaatctccaggtggtgagacaataggtgactttcacgcttttctatatcttccattctttctaagaatgtttatttcatagtcagggaaaatgtttatttaaaaagcacacttgtgtttccagggagatcatgtatgtcccgtcatttggtgagttaaaagatgttgtgtcaactgcttctctcccttctccactagcagtggtgatgcagctcccagacccctgcgagggcagcctctctaacggctgctgaggttgaactccctgggag

SEQ ID NO: 497118 - DNA, 655 bp, Homo sapiens
aagtaagagaataaacattgaacgtttaattattgacatagaagggagactatacataattacagtgaatccagatgagattaaaacagtaagaatgctaatagataaataagactaaaacaagcagcttaataataaatggtgtctctaaggtggatattcctcccaaagcaaaaaataaaaataaaaaaagggcactcagagatataacacaaaataatttccctgaaatgaagagaaaatcacatctgcagatccaggagcacacactgattcagcacatcccrtccttgaggtttccaggcagaaaaagcaaattatttacctgggagaagaaatccggatggcctcagacttttccatgttgacatccaaggccagaagacagaaagtctgcagtgcttgagggagagagagcaccacccaatgaccagagttgcttttatttctaatggttacagagcaacattgtcaaacatgaaataaatcaggaaatgtagagcctgtgagctcttgctggggggaaactctcctgaaaactaaagccagccaatggagagaccaatcagagtaagaatccaggaatgacaaatccaggaatgagaaacagtctggtggggagcactgactgtgtttaaatataatatgatatttt

SEQ ID NO: 497119 - DNA, 524 bp, Homo sapiens
tttatatcggtatttttcaaattatttgactgtgaaatatatatatatatatatataaaatctatatgtcctaaacaaaagttttataaacaatacttgcctttaatgcacatgatacattttgatattttctactctattgtagttttttaaagcactggccatgacagtaaattgattcattatgtaacctgcagtttggaaacccaatgagggtcagayaccaagaagcagggtctggaggagattgtaagggaaggcaggccaggtcctcagcctttgcatttgatgagaagctctccacttttctacctccaccagcccccaacatccaagacattggacaaacaggaaactaatgaggtggcctgagaaatgctctcaggagagaaagaggctaaaacagaggaaagcctgagtgagtatccaggacaaacaggtccccagaagctcccagtgatctatgggggtgggctaggactggtgaagctgaaaagttaggggaaggcacaccctgctataga

SEQ ID NO: 497120 - DNA, 498 bp, Homo sapiens
gtgactcgaaatagaaatttaagtagtgcaatctctagtcatcagcttaaattagtgttatttaataatatcacctataactttgtacagtgccttttatccatactttattaatctgacagcacattaaaagtataaaatattaaataatcatcagaaataccgaaagtttagaggggttgttttacttctagtacatggttcctatttaaatataaactacctaatacaaatgtgtaataaatgtatgcatttctcccaaatgctcagcctctttgcaaacaaattgaccttcatgacagctctataaaatgggaatagactggcaatttacattcattttccatatagtatactatgagaataattactttccagtgcgatgtttgttggtgcacaatggaattggtgccccctaarggtgtacagcatgacagtcctgtttgcttctcagatgaggccttcctgttaaatgtgtttaccaaaattattccaaga

SEQ ID NO: 497121 - DNA, 628 bp, Homo sapiens
tttggcttattctaatttttggattttacaaataatgccrctttgaatattcactgcagcattacaaatctaaggtagacagtatcagttgagcagttaatcccccgcagttaatcccatgcatgttcattttccttgggtagataataaaccaggaaaggaacccatgatgagtcataaaaacaagtacaagtttaactttataaaaaactgccaatctgtcttccaaagtggctataacattttctcatttctatcagcaatgaatgagacttccattggctttacatacttgccaacacttagtatagtgagtcttttcaatttcagccattttagtggatatccagtgcttgtttgtgaatttaattttcattttgctgatgaccagcaggatgggacacatacaatatgcttatttgccatcatgtatcttcctcagtgaagtgtctgttcaaatttttgcacattcttaattgttacatgttttcttattgagttgtaaaagtttttcacaaattctggatacaagttcttagtcagatatatggttttgcaaatattttttactgatctgtcaattacctttttcttaagagtctttcaaaaataaatggtttttaacttt

SEQ ID NO: 497122 - DNA, 628 bp, Homo sapiens
tttggcttattctaatttttggattttacaaataatgccgctttgaatattcactgcagcattacaaatctaaggtagacagtatcagttgagcagttaatcccccgcagttaatcccatgcatgttcattttccttgggtagataataaaccaggaaaggaacccatgatgagtcataaaaacaagtacaagtttaactttataaaaaactgccaatctgtcttccaaagtggctataacattttctcatttctatcagcaatgaatgagacttccattggctttacatacttgccaacacttagtatagtgagtcttttyaatttcagccattttagtggatatccagtgcttgtttgtgaatttaattttcattttgctgatgaccagcaggatgggacacatacaatatgcttatttgccatcatgtatcttcctcagtgaagtgtctgttcaaatttttgcacattcttaattgttacatgttttcttattgagttgtaaaagtttttcacaaattctggatacaagttcttagtcagatatatggttttgcaaatattttttactgatctgtcaattacctttttcttaagagtctttcaaaaataaatggtttttaacttt

SEQ ID NO: 497123 - DNA, 628 bp, Homo sapiens
tttggcttattctaatttttggattttacaaataatgccgctttgaatattcactgcagcattacaaatctaaggtagacagtatcagttgagcagttaatcccccgcagttaatcccatgcatgttcattttccttgggtagataataaaccaggaaaggaacccatgatgagtcataaaaacaagtacaagtttaactttataaaaaactgccaatctgtcttccaaagtggctataacattttctcatttctatcagcaatgaatgagacttccattggctttacatacttgccaacacttagtatagtgagtcttttcaatttcagccattttagtggatatccagtgcttgtttgtgaatttrattttcattttgctgatgaccagcaggatgggacacatacaatatgcttatttgccatcatgtatcttcctcagtgaagtgtctgttcaaatttttgcacattcttaattgttacatgttttcttattgagttgtaaaagtttttcacaaattctggatacaagttcttagtcagatatatggttttgcaaatattttttactgatctgtcaattacctttttcttaagagtctttcaaaaataaatggtttttaacttt

SEQ ID NO: 497124 - DNA, 507 bp, Homo sapiens
tgtttaccctgctgccccaaaactttctgccacgaaagttgtctgctggatgtcrtacgtcaacagagcacaaagccaagtcagccatttttttcacttaatacatacacactttattgcatttttgttttttgtttttgttttgaatcagtaatacaaagcatgcaaggctgccatgtcccaagcctgtgtggggctggagagctggagcggacacagcagtatgcctgcccttcactgcctgtagcttatggcccagtaggggagacaaacattaatcaaaacacatgtgtttatggtagatgtggataagtgctacagaggagaaacagggttgtgaaagaagaatggagcaggaagttgcggtcccaattcagactatggtgaaggggagagcttctgagttgactttgaggaggaataagagttaggtgttgctgggaaggggaaagaggggatgcgtagggactttttttctgcaggaaggctctgaggcagaaaactcca

SEQ ID NO: 497125 - DNA, 599 bp, Homo sapiens
tgcaatcatggtgacaattgctactaaattaatatgtgacagtgccaggtgctgttctaagctcttgacaaayagtaactcatttaactagtagtagctgatacagcattttataagaaacttaaatcaaagtgattcacctgtgtttggagacgaaaaataaaaaaggcatagtatcaacccattactattctgtgctctgggcaggcccagtcctcccatgggaggcagtgacgaagccacaggctgccaagatcactctaccccggcaccctcccgaggcacaaggagattgaacatttccctctccctatgcccattttgtttaagcagcaatgacaatgaggaggccacatgagacaatgtggatataactccggatctattacttaccctcttggtctgattaaaagcaggagcaggaggtccccatgcttagaggctctctccaacccatggctccaaataactttttatgcttcactcaaaatctcccattcctaccagccattcctttctgtggtacaaagccctcccttccccatgttccccaaccttccccaaagggaaccaagggaaccacaaggtggctgagctcc

SEQ ID NO: 497126 - DNA, 543 bp, Homo sapiens
gttcaagggaagggaagtgacagagaattccaagggtagagctgagtacaaacagaaaccagtaatcacacagtaatgggaagtggcaaaggcttttcacttgataaagctctctttaaatgtactagtggggccagaaccagaactaacaactgagcagctaaagatctcctcatcttccctctcaggacacctgcagtattatggcacacccaggtcagggccaggtggttatagraagggatttgtctttccttccttcaacatgatgtggagagaatggtgaacacgggggcaggctaggggctggcacaccctttcttagcatttttcttctttgcttctggggttggtgaaggagagggggagcgcttcctcttcttatagtttccccccttcttgtcccgtcgatctgaatctgggctgttcacctataggatggagaatcaggacaaatgtcagcctacaatccccactgaagatttgttctgagacttatgctaagggcgccaggaaaaaaagaacaggatttgtcacctcatc

SEQ ID NO: 497127 - DNA, 489 bp, Homo sapiens
tgcccaataacagagtcccccgatgagcaaaagctgctaagagtggagaggatgatatatgcacattgaggaagttaggagaccttttaaatcacagaggggcctgtcatgatggctttaactatttctatcctgatttcatacctgcctccagcacctcgataagcctgtggtwtttccagctcctgcatatcttgatgcagttgagtgagaatgaagcgattccacctctgaatgagcctggccagattgcccttgcctgaggcctcatctgagtcagccaggattagaccgagggctgaggcctcaggaatagtacggaatgcccgaagaaaattattgccctggaaatgtgttggtggaaaggggttattttgtcttttgtgtccaccttccttccccttccattttaagtgtctccaagtactgacctggcaagggtcaccacgagagaggtccaacatgtgaaacaggaagcccagctcacat

SEQ ID NO: 497128 - DNA, 552 bp, Homo sapiens
ctgctggggtagggtggggcggggctgggaagccttgtgccttctgattggctggctctgatccggcctgattgtcccagatatccgtctgtcattacagtcagagaggacagaacctatccttattattgcagagaaatggcgtattttacctgaagcataatcctttatacatattctaaatccgtgtcacattctgtaagtaaaatgcccccaaatgcaaatgtccccccaagaaactgaaaatacacaaatagatytgtcaagtttgcaggaactatgtatgtggatgaggcaaagagaagttcacctggccaagcttacctggggccagatctgaggaggcgttcatggaagtctttccaaagtcttcgcccaggtcgagacagccaatggttctgtctcaggatggaccgtcatggtcaataggtggtagcgacctgggactctgtgatgagaaccacatcagggtttaatcaaaggatgtgtgattgattaacaatgcctgccgttggcacaggaagggaggctgtggcccatatgccatgtgcg

SEQ ID NO: 497129 - DNA, 608 bp, Homo sapiens
ctgctggggtagggtggggcggggctgggaagccttgtgccttctgattggctggctctgatccggcctgattgtcccagatatccgtctgtcattacagtcagagaggacagaacctatccttattattgcagagaaatggcgtattttacctgaagcataatcctttatacatattctaaatccgtgtcacattctgtaagtaaaatgcccccaaatgcaaatgtccccccaagaaactgaaaatacacaaatagatttgtcaagtttgcaggaactatgtatgtggatgaggcaaagagaagttcacctggccaagcttacctggggccagatctgaggaggcrttcatggaagtctttccaaagtcttcgcccaggtcgagacagccaatggttctgtctcaggatggaccgtcatggtcaataggtggtagcgacctgggactctgtgatgagaaccacatcagggtttaatcaaaggatgtgtgattgattaacaatgcctgccgttggcacaggaagggaggctgtggcccatatgccatgtgcgtcatcagcatctcatagtcatctagtcccctttcagtagagctgcctgtgagaagg

SEQ ID NO: 497130 - DNA, 592 bp, Homo sapiens
tgttgaggttgggcctccaggcatcaggggagacgtcattgctgatgcctgtccttaaaggatactggctaggtcaccagagacagccaattagcataaagttgttttctaatggcctcttagaaaaatcatcacattgcagttactgccgtttaccatgctatggggttcgtttgggagcttttttatttttttatttttattattattattttttttccccaagatggagtcttgctctgacrcccaggctggagtgcagtggcacaattttggctcactgcaacctccgcctcccgggtttgtgtgattctcctgcctcagcttctcgagtaactgggattacaggggcctgccaccactcctggctaatttttgtatttttagtagagacggggttttgacatcttggccagactggtctcaaactcccaacctcaagtgatcctcccacctcagcttcccaaagtgctgggattacagatgtgagccaccacacctggcctgtttaggagctttttaagttattttttattttaaaaatttgcataaaatatatataccataaaatttacaaacttgaccattttca

SEQ ID NO: 497131 - DNA, 357 bp, Homo sapiens
ctgaggagagccccccagctcccaccctgattctacagtggggagtaactgttgagatgggccaggccctgacgctggctttacgtttgcacagtcctgggcagggcttctaccttctgagcgcttcctcatcagtgaactgggtacacccacacrgggttctcgtgttgcttaaattagcgaatgtgtgaaagatccagtgtagggtctggctcaccgcaggctcactgatggctatggcgattgtcagggtcacagggcctccgctgaaaggtgatacctggttcagggtcagttaggtctcccatcatggggccctccttttcctgacagggtcaataaactaaatgaatcgtg

SEQ ID NO: 497132 - DNA, 452 bp, Homo sapiens
tctttgagtctcagtttccacacagtgcccatgggratttccttccttgatcctcataagaggattgcccatgagaaacagtgtagaccacatgtggcatgggtcggcccagaaggacacagaacccacaggttgccagcaggcattgctctgccatgggggcagtcctcgagctgtccagccagccaccatgagctcttccctctggtcccccaagggacaggtgtaggggctgccctgccttagaaacctcttgccctgcaggagccaggatctcctgtaacaaatccacaaacatggattccagggtccctacaaaggacacacccaatagcaagggcattgcactcaggagaacccgaagtgtggtgtccctgtcagtatttatagttctcccagtgcagatgcagtttaccagccagtttaccccagcaagctggcctaggaacaca

SEQ ID NO: 497133 - DNA, 580 bp, Homo sapiens
gctgtgtgacgttgaaccagttacataacctctctgagcctcatctgcatactggggatrataatagtatcacacacaccccctctgggatatcatgaaggctcagatcatgcatctatgagcaacaagcagagtatctggtacaagataggcggcctacatacgtgggtccccttccttcatgccctcttcagtagatttcattaccctagatccagggacacgtaacagccctagacatacagcctagcctgccaaaggtgttcaatgagtgtttgcggaatgaatgaataagaatgaatgggactggaaccccaatcttccacaccatgcctagtgctcctctctctctctctctctctctctctctctcatacacacacaccctccttgggggtgtcattgtggcttcctcactcctatcaagatcctaaaacagcaaagacaattaatgcccctggagcttggcagtggagcccacacgtgctttcctgcaaacctctctctccatggacagacaggccgtttatcagcctccctgtgggacacctgctcattaccagccactaatgggttcagg

SEQ ID NO: 497134 - DNA, 610 bp, Homo sapiens
gctgtgtgacgttgaaccagttacataacctctctgagcctcatctgcatactggggatgataatagtatcacacacaccccctctgggatatcatgaaggctcagatcatgcatctaygagcaacaagcagagtatctggtacaagataggcggcctacatacgtgggtccccttccttcatgccctcttcagtagatttcattaccctagatccagggacacgtaacagccctagacatacagcctagcctgccaaaggtgttcaatgagtgtttgcggaatgaatgaataagaatgaatgggactggaaccccaatcttccacaccatgcctagtgctcctctctctctctctctctctctctctctctcatacacacacaccctccttgggggtgtcattgtggcttcctcactcctatcaagatcctaaaacagcaaagacaattaatgcccctggagcttggcagtggagcccacacgtgctttcctgcaaacctctctctccatggacagacaggccgtttatcagcctccctgtgggacacctgctcattaccagccactaatgggttcaggcctcactgtgatgtgttatctcgttactga

SEQ ID NO: 497135 - DNA, 580 bp, Homo sapiens
gctgtgtgacgttgaaccagttacataacctctctgagcctcatctgcatactggggatgataatagtatcacacacaccccctctgggatatcatgaaggctcagatcatgcatctatgagcaacaagcagagtatctggtacaagataggcggcctacatacgtgggtccccttccttcatgccctcttcagtagatttcattaccctagatccagggacacgtaacagccctagacatacagcctagcctgccaaaggtgttcaatgagtgtttgcggaatgaatgaataagaatgaatgggactggaaccccaatcttccacaccatgcctagtgctcctctctctctctctctctctctctctctctcatacacacacaccctccttgggggtgtcattgtggcttcctcactcctatcaagatcctaaaacagcaaagacaattaatgcccctggagcttggcagtggagcccacacgtgctttcctgcaaacctctctctccatggacagacaggccrtttatcagcctccctgtgggacacctgctcattaccagccactaatgggttcagg

SEQ ID NO: 497136 - DNA, 502 bp, Homo sapiens
tgaggctcaggttttagttacttgcctaaagatcacctgagcatataaggaacagagtcagaatttgaactcaggcctgactgtagagcccttagccatcatagcattgtctctactgagaaaccctgttcaaagcagtttcctgtttatgaagacatatatcatggtttgccaattttgtggtgacttacacgtatacagggttgtgctccttctgcgagtggatgcrctaatgaataaataatgttagtaaaggcctgtgagtgaaacatgctatggatgctgcaagatttgtctagaatagatacctgcctgcatgcagagtctttccttccctgagattcacagagcaatgcctgcttgccatagctgaaggttttttggtgtttttttttttttttgagacggagtcttgctctgtcgcccaggctggagtgcagtggtgcgatctcagttcactgcaagatccacctcccaggttcacgccattctcctgcctcag

SEQ ID NO: 497137 - DNA, 629 bp, Homo sapiens
ctgcaatgagcttggcttagacttcatgggatgcttttgcttctgaatctgtgaatcaagggggttgcacaggtgagtttgcatacctaatttcctcacactctacttctatccttcagacatcagtaccattgtccagagaacctgacatgttgtatgcaatttctgtgtcagagtggacctgagaaagttcctggtgcctaaatatgggttttgaatcggcattggtgatatctgccatggtggcattctgaatttgatgacataaattktccacacgaattgtcactgaatccttggtaagtttctcctctggtggaatatctaatgaaatagttctcacgtctacttggatcaagctatcgttcatggcaggataacaaacaaaccaggttctttggctcctcattatatgatgtggcctgatctaaagattacagccctttcatattcttttaggataatatggagaaagttatgattggtcaaaactccacctgcaagcctatagtgggctcctcttgagggagtcaggaaaaaccataactaggtgtcctcaaggtgacactatcggttggctgtcagagtccaagtctctgttatcacttcaccagaactgtagtggctga

SEQ ID NO: 497138 - DNA, 581 bp, Homo sapiens
ctttatctacccctttggttgttgaggtgttttaaaacaaatcgcagttgcacatcatttcactcccatccatcatttcttaaaaattaaggatattttcttttataactatattgccacttgggaaaaattttaaatgattatttatcactaaaaaatgtgtactgactgtttatcttcctcctcattgcaaaaatgcatataataggagaaaaagaaaaataagggtaagaaagcaaagtgaagccaggaataagagtattgaatatcagtgtatacagaaggtcccattctaatcttaaactcagtcrcttgcttcaccaggaccaaggcaggagggaaactctggcagtcacaagatttagtgtttatgaaggggaacggcatcatttctctggagaacatagcttttcctgtctgtaagctgtgtggggaatttctcctggatgtcttcatgaagaagacggtatgagatttattggccaatatactttacaaaatccccacaataaatacaaaagaggttttgtgccactccttgttagagtgtcctcgttgcataccaaggtctaacgctgaat

SEQ ID NO: 497139 - DNA, 575 bp, Homo sapiens
gcttttgtggagggacagacttttggaattcatactctgccatttttgctgatacctcacctaccagagtaacctgatgcctgtcttcatccatttacaaaaatacatttgtggaaaaaaactcagaaaagtcagaaattttacattgtttctttttttgtcttcagcttacatattcattctttattctctgtagaattttatcctaataaaatatatctttatgcttaaaagtyttttattaattactgtataatctctctctggatatatataaattaaattttaaaattcttcgactatatgcccttgctattgaaaaatttcccctggattaaattggaattatattattataactcatcattaatttaaatatattaaacatatgatcattcttatcatattttttggaaacatctgaaatgaatggagcactcccttcctttcagtttatgtacctttggatgaatcacttattgctaaaatgaggcagggctcagagtgtggaaatctcatttacataaataagttaacaaaatagaaaaagtctaattataacgatgtcactcatt

SEQ ID NO: 497140 - DNA, 575 bp, Homo sapiens
gcttttgtggagggacagacttttggaattcatactctgccatttttgctgatacctcacctaccagagtaacctgatgcctgtcttcatccatttacaaaaatacatttgtggaaaaaaactcagaaaagtcagaaattttacattgtttctttttttgtcttcagcttacatattcattctttattctctgtagaattttatcctaataaaatatatctttatgcttaaaagtcttttattaattactgtataatctctctctggatatatataaattaaattttaaaattcttygactatatgcccttgctattgaaaaatttcccctggattaaattggaattatattattataactcatcattaatttaaatatattaaacatatgatcattcttatcatattttttggaaacatctgaaatgaatggagcactcccttcctttcagtttatgtacctttggatgaatcacttattgctaaaatgaggcagggctcagagtgtggaaatctcatttacataaataagttaacaaaatagaaaaagtctaattataacgatgtcactcatt

SEQ ID NO: 497141 - DNA, 620 bp, Homo sapiens
taacctcactctcagaaagcttgtccaatatcttttgaaccaactgcatcaaaagtcatgaaaaaaattatgaaaatccccttcacttgagtttattaaaaacaccgggtacttttgacatgctattttattgttacctatttctccaactagatgtaggcacagttattcactcattcaactaacatgtttattacattttaaagttcttcatttgatattcctaaaattataaaagtgacacatgcttattataataaaaaagtcaatataaaaatgtatgcagaagacgctaatcgtttctcccaatctcggttccttaagtaacattttaatacactggtaagtatccttccacactgtcataattcccaggaaacagcttgagactggatatgcacacagaaggcttactgagacttactcctgagggctacggcacctgggggaagtacaggaagtggaactggccagagggaacgttggagktgtcctgcattgaaaaaggatccaggtcttagggccccacacacacccgcctctctttggctctgggctgcccccagggagaggatgggcaaagcagctctttttggctggtggtgattcctgaaaaggga

SEQ ID NO: 497142 - DNA, 637 bp, Homo sapiens
taaacacaaggtatgaataggagtctaagatcattttcttcccacttcagcctttcctagccctgccccatacacagaataatgtttgtttctccatccactgatagatctggtacctggcactgagtatggagttggaatatctgccgtcatgaactcacagcaaagcgtgccagccaccatgaatgccaggactggtgagtaggaggactgctgaggaagaagaccaggttagsctataagcctaaggagtcatggaggctcgtcccagcaaaaattaatcagaaagcaatgtcttccagtgaacagggctctggtgacaactgtcagcctagaaacaacatccaccctatgcctaatccttgatctctgacaggcaggacagagtcaccctcttccccacagacctgtgctcggtcccccgtggtctgaagagctgctcagggctgtacagagcagaggtggaaaatcctaaataggttgatgccattgcaggccatatttttatctagaccaccccgacagcaggcagaatggggcatcctcgccctgcatacaccacagaggtcctcacaaacaacacttgggtgaaggtctagacttgcaacaacccattaaatctgagggcagaagaaaa

SEQ ID NO: 497143 - DNA, 637 bp, Homo sapiens
taaacacaaggtatgaataggagtctaagatcattttcttcccacttcagcctttcctagccctgccccatacacagaataatgtttgtttctccatccactgatagatctggtacctggcactgagtatggagttggaatatctgccgtcatgaactcacagcaaagcgtgccagccaccatgaatgccaggactggtgagtaggaggactgctgaggaagaagaccaggttagcctataagcctaakgagtcatggaggctcgtcccagcaaaaattaatcagaaagcaatgtcttccagtgaacagggctctggtgacaactgtcagcctagaaacaacatccaccctatgcctaatccttgatctctgacaggcaggacagagtcaccctcttccccacagacctgtgctcggtcccccgtggtctgaagagctgctcagggctgtacagagcagaggtggaaaatcctaaataggttgatgccattgcaggccatatttttatctagaccaccccgacagcaggcagaatggggcatcctcgccctgcatacaccacagaggtcctcacaaacaacacttgggtgaaggtctagacttgcaacaacccattaaatctgagggcagaagaaaa

SEQ ID NO: 497144 - DNA, 651 bp, Homo sapiens
tatcttctgcactggactgtgaattctcaagggcagcctgggaggacaactcgtctcttcacacttgcctggcccagtatgagtcactgggcaggcaatccataattgtcattaaataaatgagtgggtgagcaatgaatgaatgaatgaatgaatgcagccgtgcctgcagaagtgaacgctgaagacagtgtgtgagctaatagaggtctcctgtacatgaagggtctcacctagaggaccatgaccgacccgttttcgactcctctggagtatgagggatctagattcattataggaaagaagttcctgatgaagaattgttttagacactaagaaccgtgtgccatccttcctccaaaaatctatcccttagaaagagtctagatttttcttcgatatcattgaggcattgtccagaatccagcaggattcctaggctttgactgtgaaatggaacagatacatggtgtgccactgttaacaacagagagcaaatagatcaccagtgggtttttaaggagccaccgggcttgttagcgctctgcayatagccagacatataaatacaaaagtgataaacaggcaaccaggagcccagtgtcagatacctgcttgttctacaggtctgctcaggcccacctgcgctca

SEQ ID NO: 497145 - DNA, 656 bp, Homo sapiens
tgtttctaccagccctttttctggtcatttctgggctccgtgcaaccctgagcatcttggagagattgccaaggagaagaggagaggagaggggacagctatggtgcatgaggaaatgacacctgccttctgacgggtacagcagagaataatgtgtcacaggagaaatgcgccaagtccactctccctcctttggctgtgtgagggactacccacccacctcctgctcctcgtattgcctgtgttcatgcctgcaccccaccagccatccactacctagaattaacaagaagtctatcaggattaaatgtgcctctggaggcccatatgtgggaacagattttgtttttaacttttgattctagaaaatttcaaaaatacataaaaatagagtgaattgtcaatgaaccccatgtactaatcactcctctataaaaatcatcaacccaacatctctcttgttgcatccctaaaccccattccccacactcccacacacacccacrtaggatttttttgaagcaattctaacttatcatgtcatttcatccataaatatccatagatatagttttgactagagcattaaccctccaaactctctcaggccccccaaaaatcaacttaggccttgacacacacctgcctttggggat

SEQ ID NO: 497146 - DNA, 625 bp, Homo sapiens
agctgccaccgaagttctactatgggctagtgcacatgtcacttaaggaaaagcaagaagatgaaactcccagaatccccctgccactgtgaaaagctcatatatcaagtgaaaaacagggaataagaagggagtatttttgccaggtccccgaagggtggatggggcaagggttgtggaataggtgagggaggaagggtgcctgcactttragaaaaggtcagaaaggatagaaagcttggagtaaaggaacagtaatcctgaggacaaaggcatgttcagaatttatgggttttgaatctgcaagtgaatttaaagtctaccgcgggtgggttgtggtgaatgtgccacagccccagaatttcaggtcattccttttaatttacttgtttgcagctacacaatagtttagatgccctttcaatgctgtaaggatggaaaaaggtgatatgattatccccgctgaatatgtgggcaaacgaagcctccctccaaaaacttaacagtccaagatcacccggggcccagccaggaatggaacctagaacctcttgaattctagctccttcccttccactttgctcacaaagggcacatccacttctgagtgcataactcatgtggt

SEQ ID NO: 497147 - DNA, 574 bp, Homo sapiens
atctggggccagaaataactccccatagactccataagaatgacaccaccctatgaggatttggcaaatggaggatcaatttttaagaacatttctttggccactcctgagtttgctgagtttgccaataaaaattagtgatgaggtggtgcagattggctcttgccaaagatcaaatgtttgatggttgcggttaacattcatcagaggtttttggcatttatcgtaatgaacatgcccccggctatttaggagaggatagtcatgtgtgtttgtgtgtaaacatctttatatacacacacaacacatttcaaactaagacattgctatgagataattgtttatgagccagagctaatattttgctatatctggagtttctcatggtgctacattcggtgtgaatctgtcgatgtcttgtttccccttcacccagatgaattaggactcagtgacacaaccacataygaagtacaaagaaaggaaaaaggaagcttggaaaaagataatacaaagaagagaagaaggagacaagagggagagggaatgagaaagagtaacttgacgaaattga

SEQ ID NO: 497148 - DNA, 547 bp, Homo sapiens
agcaggtgaaagaaaatctcttcaaaaatccagcccaagtcagttggggcccaacatgctaaccatcccatgggatccccatgcttcttctgacctgttggtaaagtctcagtatttccttgtagcttcatctttttagtttctccctttaccttaatctttactaacgcctttccagggacaggcagcagccatgaatatctagtcttcaggactattcatttagcaactgacccagtaccagcacaaaatgactcataacaggtctgcagaaccactgaatatattcaagaatctagcatgtgcagaggaagaagaaaaagaggaaggaaagggagaggaatgatggcccttaagacatcctgtgggactagcccacccttgagatactcagagcctgtggtaccctgggaatttctgtgggcaagtgygtgtttgtttgtatgtgcatgcacacacatgcatctgtgtgtgcacatgcatgcatatgtgtttgtgtgtgtgagaacaaaggaggagcagagcgccctgggaaaaatgtttttta

SEQ ID NO: 497149 - DNA, 530 bp, Homo sapiens
caagcagctaacgagtagttttaggataaataatgtatggttaactctgtcttgaagaagagttttagaggtgaggwcaaaactcaggagctgtgtacggtggcaaatgtaaaggaggagacatggtcatagatcttagaggcagggtgatgcagtacaacatgccaccaagactcacttgataaacgagcttcatatgccagacacactcccataggcttatcaaagtcttactgttccttctatagcaattttgttctactggagaaaacatttcagaacaagacgagcaagagatatatttttatgcagactactcctccttacatgtaaaagtaaattatttgcaagcttcacgtgtcatttctaaccaatgatttgtgacggtcttacagtggatggcagtatggtagttggtccctgctggtgtgatgctagtcaagtcaatatgctttgaacagctaggctaaggagtcactcttctccttgttatctatgtgcggttgaaaaagatcaattcagctctctgg

SEQ ID NO: 497150 - DNA, 638 bp, Homo sapiens
tgtcacaggcacacaagcaagagagggaatttacagtatctggaaaagatggaaaaggtttcacacacaagttgaaagtcaagctaggaattgaagtttgaatagaagtaccctaggcagggaaggaggagaggacattctagaaagcagatggcaaatgtgtagctaactgatgccagaatcaattggtaatattactttaggaacatgtacaagaaagtatgtcagctccccatgttgatgctaaatttgccttcatcaggaatgtggtggtagagtgagagtggctgtacaattccctgctaaagggcaccattaaaacaaacaatgtggctggtagatccctttgagccacttgaaacttctgttattttggatacaaagactgtcatttgtgaaagtggatacaagacaagaagcttgcagagttccaaatcaaaataaatgctttccccccttagaagaacattacgtggaacyacagactcatggaacacattgctctcctgtgggaaagctgtcttgttaactttgccacaagttaacaagacagtccttttctgtttgttttttactcttatcccataataaaccagacaacctaaattagagtagacagttccccttcttttttttaa

SEQ ID NO: 497151 - DNA, 630 bp, Homo sapiens
ttgttcttcccactgactctgaacagtgcacttaataatgcctccactgggaattccaaacaataaaatacatgcgaattgccttttagaaggaaacacagaaaggaaacactgattcttgcacattcttgttcctgtgagttaaacaatattttctatgttgtctcttgcatttcaaagagtggacattccctaaacrtacctagaagaaggtctgaaaggtgctgtcagaaaacattcactcgatttcttttccagcaacagtaacattttaataataccacctcacatttgcacagtgcttggtgtataacaaaatgcatttgcagtcattatctatgtagttcacaaagtaatcttggaaagaagctaaaaaccattttagttatgagcaaactgggcctctgagatcaacatgtcactcaagacacaacaactagtagtcacagcagaatttgaacacaggtctcaaacttttcctctacaaactggcaacagttagaatgctctgggtcatccataaacttaacgcagttagaaccacttattgcatacatcaacatcatggatgcagagactccaatcccacctgtactagctatatgtcctagagaaatttattcatgttct

SEQ ID NO: 497152 - DNA, 287 bp, Homo sapiens
gggagacgagtccagccaggacgcccttagagaaagcatcccttcctctctccatttaccatctggagtgatgggcacactcattcagttgccccctcacttgctcagacacaggctgcagtgtgaagggcttcctggctactaagcctctttagccaagtatccccwgccctctgagctcagagctcccaaattcgtgctgtgctttcaagagcctgattcaccatccctgcaggtgcttctggcagtccctggaaggcgtctcagttgtggctcacacacagccc

SEQ ID NO: 497153 - DNA, 272 bp, Homo sapiens
ctggctagaggcagagcttagtcttcccatcctggaactctgacttctgaccatgcctgacctaagtgatctggaatggcaaagagtgaggtccccatgcataggatattctgcaaatatttgttcaaggtggatttaagggtgaggctgagctctgtggtgggaatgaagaagaytattaacagcactggcattcacctcttactcagctaaaccaaagccctcacttagggggacctacaccctgggaggctgtttagagaacctctggt

SEQ ID NO: 497154 - DNA, 571 bp, Homo sapiens
cccgagtctaatcaccacgatacgctgcagctccaattcacatgaaggaaggaagtcccaggtctctgtgctactcaggcctccaccagtcttggtcctgggtattctgaagacacacagtcacccacrgtattttttactgaagtattttagatgctggttcagcccaatttcttctagaatatttaaaacaagaacaaaacatccccacagcatctgacccttcatgtgcaacctcaggctctttccacagtctcccccatgcccagcctctgccatgatgggctctgggaagcacagcccctgtggaaagctctggctgctttcccagctcccagactcacatgatgagccatgccgccagacacggggtctggcttcccagaagataggataggcgatgtggcccagaaacacaggagagttgactccctcacccctgaccagtgggggacaagaggtaggagagaaccaaggataaatccccactccattcctccatgatgggctgtttcgaggcatggcatttctgtaaatctgttcagagacattccccatggcagaatgacca

SEQ ID NO: 497155 - DNA, 576 bp, Homo sapiens
ggtcacactgccagaaagttggtggagcagggagggaatcccagaagtgcagggaagaccagcggattattcaacgtcagccagcacatcagtaatgggcaagcactttgatttcctggttcccagccaggacttgatctactagtccttccttctgtaagggccagagagtaaacaccaggctttgcggcagggccacgtcttgacttttgtgggtccttggcacttttaccttcttgrgtccctttcttggtaagaaaatataaaaaatattacaacatattatacaatttttacaatattttgtctatttacaataaagacaaagatagcctaggttggatttcttattattatattcatgtttttcttcctattttaaagtaaattagaattaaaacatttttgtgagcccctaaaagtaactgaggcctgaggcactgtgtctggtgggcccagtggagtgctaggccctgcttgtctggcaacctgctctccccttttcctacccatctctgccgctatatggcaacagctgtcctggatggtataggaatgaacatgtggactgtgttc

SEQ ID NO: 497156 - DNA, 292 bp, Homo sapiens
ataccatctccctttctcttccctcatcctgcctacaggctcctccctaccmctaaaaaaatattttttcctggcatttttattctaccattatatagtcatcagcattgtactggcctttttatggctgatggagcccaggcgggctgcccgatgaggggagacagcatttggccgatggggctggtatgtgccattattgctggccattgcgccttggtcctctacagctccatcctggctcattaaaactctgagccaaatagccatgcaggcgcctgctgcagcactg

SEQ ID NO: 497157 - DNA, 710 bp, Homo sapiens
tggcattgtagttgtgttttaaattagtcaattatcttttagaaatatgtactgaaatatttgtggatgaaatactatgatctctgcgatttgcctcaaaataatccagagtagaggagaggaaaatgagcagggttagaaatgagacataattggttatgacaaatacataaggattcatcatagaattctacctctgtatatgtttgaaatgttctataacaaacaattatgaattcaaataaaacaaaaccatattgacaggaattgtggaaagatatacaacaagtcactaacaatggttactcagggaaacaggattaccaattttttttccttcttttcgcttgtcagtatattattaattttattacaaatgagcatgaatcatttatatacttaaaattacttgtggaatttttttttctctcaacttttaggttcagggggtgtatgtgcaggtttgctacatgagtaaattgcgtgttgctgaggtttagtgtacaaatgatcccatcacccacgtactgagcataatatgtgactggtagtttttcagcccatgcctccctgctcaagtagtccccatayctattgttcccatctttgtttccatgtatatacaatgtctaactcccacttaaaattgagaacatgcagtgtttggttttctgttcctgcattagttcgcttaggataatagcctccag

SEQ ID NO: 497158 - DNA, 609 bp, Homo sapiens
ctgcatccccacacaatgtgctgatgcaacttagatggatcagaaaacaattgtctgaaatactttgtgaatttattaaactagccagagagtttcagaaaagctaaatagatataaatatgttttgttttctgactcagaatcagatgtctgactcagaamtcaaacagcatggggtggcagtggtcatggcgggatgtgcgtggacgtgtttgtgtgataactgcagtcattgacatttgtttgcagtctatctggaacatctgctatatagaacattttgaaaatacgtgctatctaaatttccctcttctctcaaagattgaatttaaagggcattgttagaaagatcgtaagtacatggtcatataagcaaaatcctgatttgtatgggttttttgggcagcaaaagatacaagtaacaagtaagggatttcataaatctggacaggttatgcataactcaagacagaaaggaagtgtccactctacgttatccaggcagaaaaaaatacacgtatcaacccagggcagctttcatattctgcttttaagtgtatttgaatctattgggccgtgaagataaactgggaagacaacaatagcaag

SEQ ID NO: 497159 - DNA, 608 bp, Homo sapiens
tgcatccccacacaatgtgctgatgcaacttagatggatcagaaaacaattgtctgaaatactttgtgaatttattaaactagccagagagtttcagaaaagctaaatagatataaatatgttttgttttctgactcagaatcagatgtctgactcagaaatcaaacagcatggggtggcagtggtcatggcgggatgtgcgtggacgtgtttgtgtgataactgcagtcattgacatttgtttgcagtctatctggaacatctgctatatagaacattttgaaaatacgtgctatctaaatttccctcttctctcaaagattgaatttaaagggcattgttagaaagatcgtaagtacatggtcatataagcaaaatcctgatttgtatgggttttttgggcagcaaaagatacaagyaacaagtaagggatttcataaatctggacaggttatgcataactcaagacagaaaggaagtgtccactctacgttatccaggcagaaaaaaatacacgtatcaacccagggcagctttcatattctgcttttaagtgtatttgaatctattgggccgtgaagataaactgggaagacaacaatagcaag

SEQ ID NO: 497160 - DNA, 605 bp, Homo sapiens
catctataaagagaaagtacatgtatgatttttcaaatttacagaaaagtttcagcgtttagagatgacattttgtagagctgttttaaaaacatatgactatgttctatggagcyaaaatgtctggactcaaataaatgagtctgaatcctttcctaactaagaaactttagatctacacgtttaaccttcatagcctgttttatgttctataaaatgggagagataataataacaacaatagtaagaataatctcatagggctgtgtaaacattaagtaaggtaatccatgtaaaacatttggaacaatacttggcatgaaaacaatgcaagaaagacagtagaaaggaaaaaaagaacaagaaaaataaatcttcaaattaaaaagggttgagtgaaaacagaacttaaaaatacaatttacgagaaataaaagccctgaagagttgtgaggattttacagatgtcaaaaaggaagaggcaaaatatgaaaaagaaatcagagaaactcctcacccgtaccggcttgactgagcctgtttacctgttctggggacttctttcagaattcaacccccagatggcaatagaaaccatggtgatt

SEQ ID NO: 497161 - DNA, 605 bp, Homo sapiens
catctataaagagaaagtacatgtatgatttttcaaatttacagaaaagtttcagcgtttagagatgacattttgtagagctgttttaaaaacatatgactatgttctatggagctaaaatgtytggactcaaataaatgagtctgaatcctttcctaactaagaaactttagatctacacgtttaaccttcatagcctgttttatgttctataaaatgggagagataataataacaacaatagtaagaataatctcatagggctgtgtaaacattaagtaaggtaatccatgtaaaacatttggaacaatacttggcatgaaaacaatgcaagaaagacagtagaaaggaaaaaaagaacaagaaaaataaatcttcaaattaaaaagggttgagtgaaaacagaacttaaaaatacaatttacgagaaataaaagccctgaagagttgtgaggattttacagatgtcaaaaaggaagaggcaaaatatgaaaaagaaatcagagaaactcctcacccgtaccggcttgactgagcctgtttacctgttctggggacttctttcagaattcaacccccagatggcaatagaaaccatggtgatt

SEQ ID NO: 497162 - DNA, 605 bp, Homo sapiens
catctataaagagaaagtacatgtatgatttttcaaatttacagaaaagtttcagcgtttagagatgacattttgtagagctgttttaaaaacatatgactatgttctatggagctaaaatgtctggactcaaataaatgagtctgaatcctttcctaactaagaaactttagatctacacgtttaaccttcatagcctgttttatgttctataaaatgggagagataataataacaacaatagtaagaataatctcatagggctgtgtaaacattaagtaaggtaatccatgtaaaacatttggaacaatactyggcatgaaaacaatgcaagaaagacagtagaaaggaaaaaaagaacaagaaaaataaatcttcaaattaaaaagggttgagtgaaaacagaacttaaaaatacaatttacgagaaataaaagccctgaagagttgtgaggattttacagatgtcaaaaaggaagaggcaaaatatgaaaaagaaatcagagaaactcctcacccgtaccggcttgactgagcctgtttacctgttctggggacttctttcagaattcaacccccagatggcaatagaaaccatggtgatt

SEQ ID NO: 497163 - DNA, 511 bp, Homo sapiens
atcaactttatccacatcagactagcaacagttaaacaatctgatgctattgaattttggtgaggatgtagaatagtggggcctaattgctggtatgactatgaattgccacacccattctgaagagcagyttctctgcacatggtacctcagcaactccaattatagctatgcaccttagagaaattctcatctccatgcacatagacactatacactcatgtagcatagtttgtgacagcaaaaatgtggaaataaccaaaatgactcataggagaatggatgaacaaattcaggagatgaaaccttgcacaggacttaagcttaatgaactttagctacatatatcaacataggtaaatctcaaaaacctaatgttgactaggaaagaaagctacacaataataaatggaatgataatatttattcaaagtttgaaaataagtcaaataatatcatttattatttatagtattatactttcaaagtaataagtatacaatatacatag

SEQ ID NO: 497164 - DNA, 511 bp, Homo sapiens
atcaactttatccacatcagactagcaacagttaaacaatctgatgctattgaattttggtgaggatgtagaatagtggggcctaattgctggtatgactatgaattgccacacccattctgaagagcagtttctctgcacatggtacctcagcaactccaattatagctatgcaccttagagaaattctcatctccatgcacatagacactatacactcatgtagcayagtttgtgacagcaaaaatgtggaaataaccaaaatgactcataggagaatggatgaacaaattcaggagatgaaaccttgcacaggacttaagcttaatgaactttagctacatatatcaacataggtaaatctcaaaaacctaatgttgactaggaaagaaagctacacaataataaatggaatgataatatttattcaaagtttgaaaataagtcaaataatatcatttattatttatagtattatactttcaaagtaataagtatacaatatacatag

SEQ ID NO: 497165 - DNA, 536 bp, Homo sapiens
gcgtgatgagaaatagaaattcccttcaagccagtcccgcaactacacccggccctggctcaaagggaagccctagacaggagtgcacttgaaggtggggacgctgagcggccgctaggacttgtggctggtgttctcggccatgccctggcccaagaagtcgttggtgaagatgcctcagcggagcggggcgcccgccgggccgcacgttggggttgttcacggtcgcccacacgtcgtcgtgcacgaactcgccctgcagggagcggccttagcacaggcagctcgccccggccagcagcacctcttcctccccactgcgaatgccccgatcatgctcccccagacccaacacacaaacacccttgggaacccacgcgggtgccttctgtttaccgcagcgctcaagcckcgggcgcttgagtcccagatggcgaaagttcgcgcgcaggtggagtggggatcccggcgtgcggctgcccaggagaggagggcaagggcaccccggggtcccgcctgcgggtgtgcgggggtgc

SEQ ID NO: 497166 - DNA, 589 bp, Homo sapiens
gctgtagagtactacatcatgtagatgaaccataattaaaccaattagtcacatttttcttgactaggttgcctttcattttcctttgtgatataaaaaaagtcaaatatcaatcccaagaaattaaattactctcacagttatagtatacatttatcatatattttgataaagatttgtctggtatgaayagttctttagaaattattgcccaagagcccactacaatcttcagtttcaatcttgagttttatatctactccacatggatcaactgctgaccaggccaaatccgtcctaatcctgagcaagactcagtgtgtcataatctctgtttcacctgtacccaccaaagtttgatggcagagtttcaatggttaccagtgttaaaaggaagggtgcagggaatctttggttgttgtctaacttgggagaaaggatttagccaagagacaattagtaatgtaaggcaaaggtttataacgagataagagtatactccaagagaggaatgggttgaccctgctggaaaacagctccaggctggtctggctggaaaaataacaatagcagagtttatttaaataga

SEQ ID NO: 497167 - DNA, 589 bp, Homo sapiens
gctgtagagtactacatcatgtagatgaaccataattaaaccaattagtcacatttttcttgactaggttgcctttcattttcctttgtgatataaaaaaagtcaaatatcaatcccaagaaattaaattactctcacagttatagtatacatttatcatatattttgataaagatttgtctggtatgaatagttctttagaaattattgcccaagagcccactacaatcttcagtttcaatcttgagttttatatctactccacatggatcaactgctgaccaggccaaatccgtcctaatcctgagcaagactcagtgtgtcataatctctgtttcacctgtacccaccaaagtttgatggcagagtttcaatggttaccagtgttaaaaggaagggtgcagggaatctttggttgttgtctaacttgggagaaaggatttagccaagagacaattagtaatgtaaggcaaaggtttataacgagataagagtatactccaagagaggaatggrttgaccctgctggaaaacagctccaggctggtctggctggaaaaataacaatagcagagtttatttaaataga

SEQ ID NO: 497168 - DNA, 380 bp, Homo sapiens
gtttatacatagccaggctcttgagaacactcaaaatctgtgctaatcaaagcttaggtggttgcttgagctggagctaaacataatccttaaaaaggggctccctacactgtgctccgcttttcctcttagcctcttcccctcaacgaaatggtargagttcagctgacaacagggtaaacagattattgtgttattgctggctgattgccggagttattttggagcttcataattcatttaaagagatttttgacatttatgaaatgacttctataatcaactgacagtgcaatatcctataattgttcaattaaaaatgactactagtgcagtcatttattagtagaatcagataattgtcttgccactaaagagta

SEQ ID NO: 497169 - DNA, 505 bp, Homo sapiens
agggcaacatagtgaggtcccatctctacaaaaaaaaaamaaaaaactttttttttaaattagccaggcatggtggggtgtggctatagtcccaactactcatgagactgaggcaaaaagattgcttgagaccaacaggttgaggcagcagtgagccactccagcctgggtgacaaagggagaccctgtctctaaagttaaaaattaaaaattaaatcctcacattcagcttaacagaaggctgcaaaaaagctgtctacccaacagtagaaaggagaaacaagatttgtcagtcttgacccagactcaatgtgcttaaaaataaaaatatctcctgagatttataactgcaggcttaacgtcatgcagttaagattaaaattctgtctctggttttaaaaactccaaaacaagaaattaacagataaaggtcggacaaatatgatttcacaatccaaaattacaaaccacatcagcaaacaagtcatcatgagtaaaaatcagc

SEQ ID NO: 497170 - DNA, 505 bp, Homo sapiens
agggcaacatagtgaggtcccatctctacaaaaaaaaaacaaaaaactttttttttaaattagccaggcatggtggggtgtggctatagtcccaactactcatgagactgaggcaaaaagattgcttgagaccaacaggttgaggcagcagtgagccactccagcctgggtgacaaagggagaccctgtctctaaagttaaaaattaaaaattaaatcctcacattcagcttaacagaaggctgcaaaaaagctgtctacccaacagyagaaaggagaaacaagatttgtcagtcttgacccagactcaatgtgcttaaaaataaaaatatctcctgagatttataactgcaggcttaacgtcatgcagttaagattaaaattctgtctctggttttaaaaactccaaaacaagaaattaacagataaaggtcggacaaatatgatttcacaatccaaaattacaaaccacatcagcaaacaagtcatcatgagtaaaaatcagc

SEQ ID NO: 497171 - DNA, 659 bp, Homo sapiens
aagtggatgaagattcacagtcacaacaaatgcggtaaatacaataaccaagaggagacagagaagggagatgaagtgagcagtgagaggagactataattgtttgggaaatgatgagtacaacggttaagggagaaggaaggaagcaagcagccaggagcaacagtgtgaaaggagacaagaagagttaatgyagactgacatgtggagaaagtccgttgtaaacatgatacaaaacacagatgaaggaaagtctgaggagctagagcatgagttcaggtttgaacatgagtctctgaggcatttgaatcagaaaggtaaaaatgaccaatatgcaactagaaatacaggtctggctctcagaaaagaactctgaattggagctatcagttaaacaaattatcctgtgactattcagggaatggggagagaaaagagcagagtcctaagaaatgcagatcatttagaaagcagcgttagaggagtccaggaggagagagatcaaagagctgagtaactggtctggtctcaaaagccagaggctaacagagctgacagaaaaaggaagtagtaaacagtgtcaaatgggtaagagaaataaaattaagccccagaacaataattcagaggtggggtgatgacagtaagagtcaggtggc

SEQ ID NO: 497172 - DNA, 637 bp, Homo sapiens
gattcagcacgtaccccctggtgttgttaatggtaacaagagttgtattggaaatgacacttatttttggaagacacagggacaactgagtcacccatagtattttaggggaaagaatgaaacaagaaaccccaaatgaacaggtgaagatttactaggcagatttctgtcttgtactgaacgttttttgggtcaagattatatgcatgtgcatgagctcagatggaactgtcctgacctgtggaggggctgaatttagcagtgagctcaggctcaggtcacttagagtcatccagcagaaaatggctggtgtatcytggggctttgtatgcttaagagctgtccggcaagcacgcagcattcctagagcacgctgggctcgcctgtctcccattgattcaactcacagacaggcttgtgctcagtcaaaacatgtcagtcattgaaagtatattctcactggttagtgtccttttagaaaccaaactcagctttcttcagggaaacaatttgtgctgatgggtacacctctttctcttcatcctgtgcacagtaagatgctgctatgagggggtgtctgttcatgtcagccctgcttgtgagaatggtggagagggaaggaggtggatgggtgcag

SEQ ID NO: 497173 - DNA, 637 bp, Homo sapiens
gattcagcacgtaccccctggtgttgttaatggtaacaagagttgtattggaaatgacacttatttttggaagacacagggacaactgagtcacccatagtattttaggggaaagaatgaaacaagaaaccccaaatgaacaggtgaagatttactaggcagatttctgtcttgtactgaacgttttttgggtcaagattatatgcatgtgcatgagctcagatggaactgtcctgacctgtggaggggctgaatttagcagtgagctcaggctcaggtcacttagagtcatccagcagaaaatggctggtgtatcttggggctttgtatgcttaagagctgtccggcaagcacgcagcattcctagagcacgctgggctcgcctgtctcccattgattcaactcacagacaggcttgtgctcagtcaaaacatgtcagtcattgaaagtatattctcactggttagtgtccttttagaaaccaaactcagctttcttcagggaaacaatttgtgctgatgggtacacctctttctcttcatcctgtgcacagtaagatgctgctatgagggggtgtytgttcatgtcagccctgcttgtgagaatggtggagagggaaggaggtggatgggtgcag

SEQ ID NO: 497174 - DNA, 602 bp, Homo sapiens
gcacagcgtagtcgcagcatcagatagcaatggtgatggtggcagtaatgacaagggaattcaagatctttctttctcatctacataatattcctggcataacagaaagtgaaagtggaaacctgatggtctgaaattattatatatttcacagactttccaaatctaactatgaaaacttctgtgttatgtaacaaggggtataaactagaactctagctagtaagggaacttctgtagactgytgaatgagacttgagtggtttatatcattgaaaactcagcatctacaggacttaacaggagtggctgtctacctaggcgcaaaccacacgtgcagtctcactgtgtgtcagcagctaagcagcccaggtcctgaatcctgtattaagatgctcacatgagttttgtgatatttatgtcatcccacgataagatgacttaaaaaaaaaaagctaaataaatctaattaataccccactcctactataggacacaggagtcaaaagttaagtaggaaatgcatcacccactcacacacactaagtccccaggagcaagagggctgcttccctgtgtaaagtgttatcctaaacaatcag

SEQ ID NO: 497175 - DNA, 602 bp, Homo sapiens
gcacagcgtagtcgcagcatcagatagcaatggtgatggtggcagtaatgacaagggaattcaagatctttctttctcatctacataatattcctggcataacagaaagtgaaagtggaaacctgatggtctgaaattattatatatttcacagactttccaaatctaactatgaaaacttctgtgttatgtaacaaggggtataaactagaactctagctagtaagggaacttctgtagactgctgaatgagacttgagtggtttatatcattgaaaactcagcatctacaggacttaacaggagtggctgtctacctaggcgcaaaccacacgtgcagtctcactgtgtgtcagcagctaagcagcccaggtcctgaatcctgtattaagaygctcacatgagttttgtgatatttatgtcatcccacgataagatgacttaaaaaaaaaaagctaaataaatctaattaataccccactcctactataggacacaggagtcaaaagttaagtaggaaatgcatcacccactcacacacactaagtccccaggagcaagagggctgcttccctgtgtaaagtgttatcctaaacaatcag

SEQ ID NO: 497176 - DNA, 388 bp, Homo sapiens
actttgcagcaagacccatgtaaagctggggtgtggccaagagctgctcccctggaatgcagacctgggcagccaagacaataagggatagaggcaaagaatgggaaagagagcaggaaaaaaaaaaaaaaagccgtggtaagattggaaacagtcaaaaagaactaacgataaagtgtggggattttcttctctccttgactttacattcttatatggggattatgtgttttatatacagacagaagagtttaaaatggattattctcagcatctatattacaattgaaagccaaaaagtaaatctgtacagcagttactggggttttagactctttagattgaggaaacgttgaatgkgatatgacattctaacaatctgtcttga

SEQ ID NO: 497177 - DNA, 621 bp, Homo sapiens
ttcttcaaaataaagcaatgtgggatgtgaagaaggggaatgagcaataaaaatcagttctcttccaagccttaagcttacaaagcaatccagctagggagacaaataaaacaatacaagcaaaaacatgtcttagaataacatttttgaggatgaagataatatatgcttgatatggggcattcataaaatataaagaaaaaaattacctggagatcaccattgtgaatatatctatgtattttcttacagactctatacttctctaaattttcttttctactcatctgcaatcattttttgtgtgtaattttgtattctcctttttcagcattatgtcataaacattttctgaagtcaacattccgaaaacataggtatgacttttattgctgtttttttatcaacaaaatttacacacatagaaaaatttagaaaataaagaaaataaaagctactgatgctattgatgatayaaatgcacatacatttatgtgaattctgtaatctatgtataacatgtatgtgatcacattatctttattattttgtgatatgctttttgatacttagcaatatagtgtggatatctatcatttatctgccccgtctttcaaatgt

SEQ ID NO: 497178 - DNA, 300 bp, Homo sapiens
actgctcctcagtctgtgaatctcaatgaggctgtagaattgggtctcttgaaggagtacaagcagttcagttggttactcttcagtcttgagcgccatctgcactgttggaggctttgtgttcacgaccttattcacaggcatcacttagactctattgtctaaggcrtggagggctgacagggtgtgatgcagccatttcctgatttgcacatttagactgagtgttcaaagccacagagcattgtctttgttgatacactcagccctacattctgttaggtgtttttgctggttttg

SEQ ID NO: 497179 - DNA, 667 bp, Homo sapiens
ttaagttgatattattcaaacttaacattttaagttgttaactgtaacctttagaaattgctaaraaagtaactagaaaaatataataaaaaaaatgagagggaatttaaatgaatatattagaaatttaacataaaagatgggagtaacagacaactgttggaagaaaaatgacataagacatagaaacaaattggtagtcagaaatcctaccttaaaaataaatatattaaatgtgaagcactaaacattacaacaaaaaggcagagattgttcaatggataaaaaacaacatgtatttcaacaacatacggtctacaagatatgacacgttagattcaacaacacaaataagttgaaagtaaatagatgtaaaaacataccacataaaaagtactgagcagaaagcttgagtggctacactaataagagacaaaatgtaaataatctgtttataataacaacaaaagaataaaatatagagacaaatttgacgaaagatgggtaaggatattatataaaaactataaaatataaaagaacttaaataatatctaaataaaggagaagatagcccatgttataatttaaaaggcaaaatattattattgtaccactactttcaacatcaatctgtatatctatgcagttaccattaaaatcccag

SEQ ID NO: 497180 - DNA, 628 bp, Homo sapiens
atgttttattttcaatttcatcagatgattggcctctcacatttgtcctaatttaagtctagagacagattagcgcagaaaagataatgatctaattgaaaactaatgcctgagtcttaaaatccagtttctcattgattttgccaacttcacaaagtgtcatctctggcatatcatctttctctgtaaagcttctcaaaccacttagactcactttgccaattgaaaacattccttttctgcttgaaaagatcgtgatgaacttcaaagccagaaatgtgatgcatctgaaatggcctataatttgtagcatgaatatgaaggagagcagatttttaaaattgatataacaggtaaaaaagttatgaccatttccctctctcaggttttattttatacaaataatgtatcaaaaatcatygattatacataaaacgttgctatgaattcatcttaaaagtctgcttagacagtatgtccctccaatcctccaaaatattcaacagatgtatgaaaaaaatcactgaatcagaaatgcatttcttattgcccctataaaatactttccaagtacattgttatgcaatgcgggaacattgctaccgaggattatacaagatattattta

SEQ ID NO: 497181 - DNA, 421 bp, Homo sapiens
aaaaaccacaaaagaagtaaaacagccagttcctgccttaacagattaaccaacattccaccattccaccattgtgactggtccctgccctaccttaatggatcgattgaccttgtgacattcttcttctggacaatgagtcttatgatctccctaccatgtaccttgtgacccccctcctctgctaacaatagataaccaccttttagtgtaattttccattacctacccaactcctatagggcaaccccttccccatctcccttcgctgactctcttttcagacwcagcccacttgcacccaagtgaataaacagccttgttgctcacacaaagcctgttggtggcgtcttcacacagacatgcgtgacatctgctcacccacctctaatactgcagattgaacagttccctttggaaa

SEQ ID NO: 497182 - DNA, 547 bp, Homo sapiens
actgctctggcccatacacctagcggcatgaaaggcttctacctttgagtggggcccagagcaggaaaagcctctgcagcaggtccaggcttagctgtaagcagccctgcactcactagtgttagaggcctaggtggtgggaaaagatgctgtgcagagcttatggcaagccctagtggaagaatcactacctagtcacgtggtcccctaagactcttttgcaaggccatggcatctgcaggggagcatcacgtgccttttgaaaaataactcctggtgtgatwctgagtcctagttgagacacagtacctgaacacaggataccaaatgagtatgcatctggaactacccatcatgagctaagagttattacacccaccaagtcataaggtcaggcaattcatcatgacttataagtgctttagctgggatcaagcacaagaaactgagagtacagcaagctgcataagcaggcagcctggaccctcataataactaccactgttgcacaagtgcccctccccaggctcataagggccacagaaga

SEQ ID NO: 497183 - DNA, 547 bp, Homo sapiens
actgctctggcccatacacctagcggcatgaaaggcttctacctttgagtggggcccagagcaggaaaagcctctgcagcaggtccaggcttagctgtaagcagccctgcactcactagtgttagaggcctaggtggtgggaaaagatgctgtgcagagcttatggcaagccctagtggaagaatcactacctagtcacgtggtcccctaagactcttttgcaaggccatggcatctgcaggggagcatcacgtgccttttgaaaaataactcctggtgtgatactgagtcctagttgagacacagtacctgaacacaggataccaaatgagtatgcatctggaactacccatcatgagctaagagttattacacccaccaagtcataaggtcaggcaattcatcatgacttataagtgctttagctgggatcaagcacaagaaactgagagyacagcaagctgcataagcaggcagcctggaccctcataataactaccactgttgcacaagtgcccctccccaggctcataagggccacagaaga

SEQ ID NO: 497184 - DNA, 519 bp, Homo sapiens
gggggagggagcagctcttctgaggagagtccgccccaatatctgcccaccatgtattcattgaaagggcttgttacaccacaaacatccaccagatggctttttgaggtcgggttgtgagacacctgtggccttgtcaaagcactcaaaccgcattctcaggaggctgttttcagcgttccttatcacacactccactccttgtcctgttttcagggtcaaggaattatattctcatgcacaaataacatacacacagtgcctcagcatttttccatgccccaacctcaaatgccttgtacataagtttgagtatgtggctgtgcgccccccacacttttctggcccaggttgttttggtcaggcattggggaaacatcaacccaaygtgtaaaaaacattaaaagagcaatttaaatcttttctgaattctcttgacaaagaccaaagggaatccattcatgacaccctgtagaacttcttaaaatagtctttcctgaattctcttaaaatcttaca

SEQ ID NO: 497185 - DNA, 531 bp, Homo sapiens
tatacaaaatgcaaggcttttagaaaagttgttgtaaatttaaataaatctttagtttcactattgcccactgaaaattgttgaaattcccctacctggcactgcacattctctgagacccaatccattcaccttcccagctttctctcttctacacttccacacaccatggtaccagcaaaactgagcgtttcatcttcacctcgtgcctctatgcctctgttmggctggatctgaaatgttcttgccaccagccaaacactagccaccctttattgcttcaacatagaaacatggcatatgttgctgactgtcaaaagcagattacatgtatatgtatgtatacatatacatatatgcatatacaagcatgtgtgtgtacatatgtgtaatacacacacacacctttttaagaatgcttattttgaaggaataagattacaggcttggcaggcttttattttcatctttaagctattttgtatttgcaaaacaaagaataaaagaattctacaaacaccaatttagaaa

SEQ ID NO: 497186 - DNA, 637 bp, Homo sapiens
ccaagttatacaaaatgcaaggcttttagaaaagttgttgtaaatttaaataaatctttagtttcactattgcccactgaaaattgttgaaattcccctacctggcactgcacattctctgagacccaatccattcaccttcccagctttctctcttctacacttccacacaccatggtaccagcaaaactgagcgtttcatcttcacctcgtgcctctatgcctctgttargctggatctgaaatgttcttgccaccagccaaacactagccaccctttattgcttcaacatagaaacatggcatatgttgctgactgtcaaaagcagattacatgtatatgtatgtatacatatacatatatgcatatacaagcatgtgtgtgtacatatgtgtaatacacacacacacctttttaagaatgcttattttgaaggaataagattacaggcttggcaggcttttattttcatctttaagctattttgtatttgcaaaacaaagaataaaagaattctacaaacaccaatttagaaagagaggttgagacttacattaaaaattttttagcagtacttcaaggccaattccttgaagccattcccaaaagctgcaaggaatttctgtcacctctaaa

SEQ ID NO: 497187 - DNA, 635 bp, Homo sapiens
ctgccatgcatgaggatactccagcagcttatggagaagtccatgtggtgaggaactggggtcggtccacaaccacctgagtgaacctgaaagtggatcttcccctcactcaagcattgagttgactgctggcccaaccaacagtttgtctgcaacttcatgggagatcctgactcagaagcactcaattaactcatgaaaacggtgagataaatttttgttgttttaagccactaagtttgaggtgatttgttacatagtaatggataactaatatagcagggaatcaaatgattttcacatcacaggcaattctgatttrttaatcaaaccacatatttaaacagaaaaactttgtcctactccaatggaaacactttttaataaaaaaaaattagagctgtagaaataaggaagctttgactatcagggaaagcaaatggaggctgatggccagggtatgctccctgtcaaaagctggcctcctcaccaaatcacctcaacattgctgaacttgttcccattttctttattatattagcagagaatgcacaaattagagatttaattgagctaacaaccatctccttaaaaatatgaaatttctctgagggtgtttaaatgactagttatcc

SEQ ID NO: 497188 - DNA, 589 bp, Homo sapiens
tggtgaggaactggggtcggtccacaaccacctgagtgaacctgaaagtggatcttcccctcactcaagcattgagttgactgctggcccaaccaacagtttgtctgcaacttcatgggagatcctgactcagaagcactcaattaactcatgaaaacggtgagataaatttttgttgttttaagccactaagtttgaggtgatttgttacatagtaatggataactaatatagcagggaatcaaatgattttcacatcacaggcaattctgatttattaatcaaaccacatatttaaacagaaaaactttgtcctactccaatggaaacactttttaataaaaaaaaattagagctgtagaaataaggaagctttgactatcagggaaagcaaatggaggctgatggccagggtatgctccctgtcaaaagctggcctcctcaccaaatcacctcaacattgctgaacttsttcccattttctttattatattagcagagaatgcacaaattagagatttaattgagctaacaaccatctccttaaaaatatgaaatttctctgagggtgtttaaatgactagttatc

SEQ ID NO: 497189 - DNA, 411 bp, Homo sapiens
gtatttaagtaagatgttacatataaagcatggagtatagtgcttggcacattatttttatcagcagcagcatctttttgtaatgtgacagcattttcccccttcattccttcctctcttctcacycattttcctgctgaataagagtagggatcatgtggagtctcagggagataagaaataataaaataatacatccaagctatgccatgagaaattaagaaaaaaaatctgcttgttccatctacatgatagaatcagaaaagcttaaaggcttccactgggcacacagcaataacaagttctcagtgatgtagacttaggagtcatgctcatacctgcaggccgcttaaggaccatcttttggattgtgctgaagacatgggagaaaatgctttcatccacacataa

SEQ ID NO: 497190 - DNA, 547 bp, Homo sapiens
ctgccaatggcaacaagaggaaagtgttaaggagagatgtccccaagggcagaggggagatggggaattacagtttgagattaaaattgaaattggcaaattatayatatacagaaactttggcaaatgaaaacaaaaagatgccatttttactctaaggaaaacaaggtagtaaatgcaatcgtatgctatctagaagaggtgggaatagtattacatgactgtaataatgcaagcccttgaatgttgagtgaaaacatcaggaggttggtgataagggagaatgtgtatagagataaaggggtgttgttagagaggataatcctcatgttccatatgtggaagacaggtaatacctgaaatggaaaactcaaggacgatgagtaagaacagatgtattatgaaagcttatattaggttggtggaaacgtaatatggcttgccattacttttaatggcaaaaaccacaactacttattttgcatcaacgtaatggtagaacaaacagtcaaaagtttcaaggaaattgcatctatgaagcagaatt

SEQ ID NO: 497191 - DNA, 547 bp, Homo sapiens
ctgccaatggcaacaagaggaaagtgttaaggagagatgtccccaagggcagaggggagatggggaattacagtttgagattaaaattgaaattggcaaattatacatatacagaaactttggcaaatgaaaacaaaaaratgccatttttactctaaggaaaacaaggtagtaaatgcaatcgtatgctatctagaagaggtgggaatagtattacatgactgtaataatgcaagcccttgaatgttgagtgaaaacatcaggaggttggtgataagggagaatgtgtatagagataaaggggtgttgttagagaggataatcctcatgttccatatgtggaagacaggtaatacctgaaatggaaaactcaaggacgatgagtaagaacagatgtattatgaaagcttatattaggttggtggaaacgtaatatggcttgccattacttttaatggcaaaaaccacaactacttattttgcatcaacgtaatggtagaacaaacagtcaaaagtttcaaggaaattgcatctatgaagcagaatt

SEQ ID NO: 497192 - DNA, 547 bp, Homo sapiens
ctgccaatggcaacaagaggaaagtgttaaggagagatgtccccaagggcagaggggagatggggaattacagtttgagattaaaattgaaattggcaaattatacatatacagaaactttggcaaatgaaaacaaaaagatgccattttwactctaaggaaaacaaggtagtaaatgcaatcgtatgctatctagaagaggtgggaatagtattacatgactgtaataatgcaagcccttgaatgttgagtgaaaacatcaggaggttggtgataagggagaatgtgtatagagataaaggggtgttgttagagaggataatcctcatgttccatatgtggaagacaggtaatacctgaaatggaaaactcaaggacgatgagtaagaacagatgtattatgaaagcttatattaggttggtggaaacgtaatatggcttgccattacttttaatggcaaaaaccacaactacttattttgcatcaacgtaatggtagaacaaacagtcaaaagtttcaaggaaattgcatctatgaagcagaatt

SEQ ID NO: 497193 - DNA, 547 bp, Homo sapiens
ctgccaatggcaacaagaggaaagtgttaaggagagatgtccccaagggcagaggggagatggggaattacagtttgagattaaaattgaaattggcaaattatacatatacagaaactttggcaaatgaaaacaaaaagatgccatttttactctaaggaaaacaaggtagtaaatgcaatcgtatgctatctagaagaggtgggaatagtattacatgactgtaataatgcaagcccttgaatgttgagtgaaaacatcaggaggttggtgataagggagaatgtgtatagagataaaggggtgttgttagagaggataatcctcatgttccatatgtggaagacaggtaatacctgaaatggaaaactcaaggacgatgagtaagaacagatgtattatgaaagcttatattaggttggtggaaacgtaatatggcttgccattacttttaatggcaaaaaccacaactacttattttgcatcaacgtartggtagaacaaacagtcaaaagtttcaaggaaattgcatctatgaagcagaatt

SEQ ID NO: 497194 - DNA, 471 bp, Homo sapiens
ccttagtccctgacacaaggcagggcctggccaatggagctttctattagtggaccgttcatctgtgtacccatttccacagagtcaagccttggtggcactttgccctctttgttgtagaccttcacttaatgagtatgcatggtccctaccgttggttctgaaccacattgttacactataatattatgtttatttagctattgcctgtggtaaggaaaaaggacagttttaataataaaaaaggggtttgaaagacaacatattggcygggcgtggtggctcacgcctgtaatcccagcactttgggaggccgaggcgggaggatcacagggtcaggagatcgagaccatcgtggctaacatggtgaaatcccgtctctactaaaaatacaaaaaaaaaaattagccaggcgtggtggcaggcgcctgcagcccagctacttgggaggctgagacaggagaatggcgt

SEQ ID NO: 497195 - DNA, 538 bp, Homo sapiens
ggacacttcccatgccaggcatcgccactggatttcctccctaccgctcctctaaggagactttcttgggcaaaggtgtactctsgccgtttagaaaagaatccttaccaggtacttgctaatggtgtcaggtttcattttttaaaggaaagcctggcatccctcttgcttcatagaagtcggctatgaagcaatggtgcagagttacttccctttttcatgtagaccagagatcaacaggagataagttgaggtggccgtccaggagatacaggtgaaaggggatctcagtctttttatgtgaaagttagttaatacagtcaaggactcggatccattccaattgggcaattggacatggggacaacttcagtgggcaaacttgtctggtacttcctaggtctgtagaggtgaagacatcaagcttctggaaaaaaaaaacaccttggatcaggtccaaaggtttggggcgggaggggctcctttccagaaagcctcttgcttggtaggtatccatatatcaaacatgtgacttatc

SEQ ID NO: 497196 - DNA, 373 bp, Homo sapiens
atttgtgatgctgctaattgtttaagagaaaagaggttgcgtagttcagtcgggcttcagaggagatagttaaaaatataasacaggagattgaatgaagttagctacagagacagagaaggagaatatacagaggtaacaatgataaagagagcaaggactttatgagtcagagagaataggcagattcaggcccagaaatagaaggtatggctggggtatgggaggagaagcagagggagcagggcctgggagctcaagtggaggaagcgtttttaggagggaggacacatagatttaaatgctactattaagaggtcaaatagaatgctgaaaactgatggccagttttatcaaaacacaggctatcgca

SEQ ID NO: 497197 - DNA, 373 bp, Homo sapiens
atttgtgatgctgctaattgtttaagagaaaagaggttgcgtagttcagtcgggcttcagaggagatagttaaaaatataacacaggagattgaatgaagttagctacagagacagagaaggagaatatacagaggtaacaatgataaagagagcaaggactttatgagtcagagagaataggcagattcaggmccagaaatagaaggtatggctggggtatgggaggagaagcagagggagcagggcctgggagctcaagtggaggaagcgtttttaggagggaggacacatagatttaaatgctactattaagaggtcaaatagaatgctgaaaactgatggccagttttatcaaaacacaggctatcgca

SEQ ID NO: 497198 - DNA, 373 bp, Homo sapiens
atttgtgatgctgctaattgtttaagagaaaagaggttgcgtagttcagtcgggcttcagaggagatagttaaaaatataacacaggagattgaatgaagttagctacagagacagagaaggagaatatacagaggtaacaatgataaagagagcaaggactttatgagtcagagagaataggcagattcaggcccagaaatagaaggtatggctggggtatgggaggagaagcagagggagcagggcctgggagctcaagtggaggaagcgtttttaggagggaggasacatagatttaaatgctactattaagaggtcaaatagaatgctgaaaactgatggccagttttatcaaaacacaggctatcgca

SEQ ID NO: 497199 - DNA, 605 bp, Homo sapiens
tgcgatagcctgtgttttgataaaactggccatcagttttcagtttctatttgacctcttaatagtagcatttaaatctatgtctcctccctcctaaaaacgcttcctccacttgagctcccaggccctgctccctctgcttctcctcccataccccagccataccttctatttctggtcctgaatctgcctattctctctgactcataaagtccttgctctctttatcattgttacctctgtatattctccttctctgtctctgtagctaacttcrttcaatctcctgtcttatatttttaactatctcctctgaagcccgactgaactacgcaacctcttttctcttaaacaattagcagcatcacaaatttaaaatatccccaaatgaatcactgatctcctctccctccactgccaccaccctgagtcaagccaaaaatatctcttacccaggcaactgcagtaaccacctacctagtctccctatgtcttcttcctgctctgttccagtctattccacaccatacccctaaagatcctcttaccgagtcagactattccacatctctgatagtaggagggaagacaaaatccatcagagc

SEQ ID NO: 497200 - DNA, 596 bp, Homo sapiens
tgggtttagatcacaacatacttagtggtagcctaaattttatttggtatttattgttttcttcttttatttttacttcagagtataacagaaaaatattyttatgggataagttaaaatacaaaaacaagacaaaggaagcaaaaacacaattaaaacattccaatgtagacacatagatgcataagataatactgcattataagtaaattgtaaaatggtgtattgaagacaaaaaataagcaaggcattctttaaaaaagagaatttattgattgaagagttgcccgtggcaagaagaggaagttagatgctataatcccaaactgttgctttccttactgctgttttcacatgatgggagaagttcaacagtagttagtagaaaataaatgagtaaaacagtaaaggcctaaaagcctgaagtttcttgctatctaaatgtgaagtacataaacagcttgatattcttggaatctttgccttcttgggaaaatcgttgtctatcacttgccattgaaattaactttaaaagcccaatccacccggggcagctccccacgttgataatggaagggaattgaaaaaggtatgct

SEQ ID NO: 497201 - DNA, 594 bp, Homo sapiens
ccagtagtgattgaatgtggggaagagagaaaggtagggaatttccttcccatgctttatttgggccatgtttctggaagtgaccccacttcttcataagagcagctctagttcctattagacagctcctcccctacagcttcagttgtcattagattccagggtttcaagactagagtggtaatggcttccaactgttgcttgtgttcaggggcctcaaaaccccttaccctcctagccctacctacacctctatatgttccttgaatctttcaagtcttttgaatcttctgggttgtattctgtctcctgctgggattctgactgatatagctagggaaaaaagacagaaccctagtctcaaaggatctaagrtaataaatggttacagagtgattaatatgtgttattttaaaccttatagcaacctgatgaggtggaaactattactagctccattagacaagtgagaaaagtgggacacagaaatctagcaattaggggagcaagaattaaattccaaacatttggactttagagccttcgcctttatcactacactgtaagacgtgtctctaagattatattctaata

SEQ ID NO: 497202 - DNA, 594 bp, Homo sapiens
ccagtagtgattgaatgtggggaagagagaaaggtagggaatttccttcccatgctttatttgggccatgtttctggaagtgaccccacttcttcataagagcagctctagttcctattagacagctcctcccctacagcttcagttgtcattagattccagggtttcaagactagagtggtaatggcttccaactgttgcttgtgttcaggggcctcaaaaccccttaccctcctagccctacctacacctctatatgttccttgaatctttcaagtcttttgaatcttctgggttgtattctgtctcctgctgggattctgactgatatagctagggaaaaaagacagaaccctagtctcaaaggatctaagataataaatggttacagagtgattaatatgtgttattttaaaccttatagcaacctgatgaggtrgaaactattactagctccattagacaagtgagaaaagtgggacacagaaatctagcaattaggggagcaagaattaaattccaaacatttggactttagagccttcgcctttatcactacactgtaagacgtgtctctaagattatattctaata

SEQ ID NO: 497203 - DNA, 596 bp, Homo sapiens
gattttgattgaaactgaaatgcatgcatagattaattagtggataattgccatgtttataatattgagatcttccttctaagaaaatgacctaactcttcatttatttaggtcttttgtctttttattatagtttggatgctattataaatggtgtggggtagttgtttattgcttgttcatagaattgcaagagatctttatatattgttcttgtctccaccaaatctrcaaaattactttattataacaaattactgcaagcagagtggtttgagagaacagaagcttattatctcacagttttcataaatcagcagtccaggtacaggttagctgggtacttgctcagggtctgaccaggctgaaatcaaggtattggtgagggccgtgatctcaactgaggcctgctgcctctgcccagctcagtggttgttagtgagattcatttatgtgtggttagaagactgatatcccattgtcttcctagttgtagccttgggaccactttcacctccagaggtttagttactccaggccagcaggacactcctttaagacccaatctgataagattaagttcacaggatggtgtg

SEQ ID NO: 497204 - DNA, 596 bp, Homo sapiens
gattttgattgaaactgaaatgcatgcatagattaattagtggataattgccatgtttataatattgagatcttccttctaagaaaatgacctaactcttcatttatttaggtcttttgtctttttattatagtttggatgctattataaatggtgtggggtagttgtttattgcttgttcatagaattgcaagagatctttatatattgttcttgtctccaccaaatctgcaaaattactttattataacaaattactgcaarcagagtggtttgagagaacagaagcttattatctcacagttttcataaatcagcagtccaggtacaggttagctgggtacttgctcagggtctgaccaggctgaaatcaaggtattggtgagggccgtgatctcaactgaggcctgctgcctctgcccagctcagtggttgttagtgagattcatttatgtgtggttagaagactgatatcccattgtcttcctagttgtagccttgggaccactttcacctccagaggtttagttactccaggccagcaggacactcctttaagacccaatctgataagattaagttcacaggatggtgtg

SEQ ID NO: 497205 - DNA, 635 bp, Homo sapiens
ttagaaggcgcaagcaaaattaaaggtgaacaaccatcaacttttttattctagacatcacaaagttgttaaaactaattggaaaaactgggagtcactatcattgcaagatactttaatacacctccctcaaatcaaatggtcaagaataaatatcagagacattttagtgattataaggtgaactatttcatcatgmcaagcgccaactttctttttcaaatatcatattagaatattttgaaaagaggggacatattttatatgccctaagatattgtttctttgattttatacacattcatatgtatacacagaaaaatacttaggatgacatcaattcaatgctgtcttagtttgattttcatgtaggggttgggtagattgtaatggtcttcactgtattttttaattttttaggtttttaatatgtccacaaaatacttccatagttagcaaggttatccatctaatatccactcatccaaaaagtacttattgaacccttaattaagtgtctcagttggtgttagtaagtgatgactgaccctgagagaaaatattaataagcaaagggaaaaaagcactttcctttattgtaagtaagggattcataaacttgacacttaagaaca

SEQ ID NO: 497206 - DNA, 635 bp, Homo sapiens
ttagaaggcgcaagcaaaattaaaggtgaacaaccatcaacttttttattctagacatcacaaagttgttaaaactaattggaaaaactgggagtcactatcattgcaagatactttaatacacctccctcaaatcaaatggtcaagaataaatatcagagacattttagtgattataaggtgaactatttcatcatgccaagcgccaactttctttttcaaatatcrtattagaatattttgaaaagaggggacatattttatatgccctaagatattgtttctttgattttatacacattcatatgtatacacagaaaaatacttaggatgacatcaattcaatgctgtcttagtttgattttcatgtaggggttgggtagattgtaatggtcttcactgtattttttaattttttaggtttttaatatgtccacaaaatacttccatagttagcaaggttatccatctaatatccactcatccaaaaagtacttattgaacccttaattaagtgtctcagttggtgttagtaagtgatgactgaccctgagagaaaatattaataagcaaagggaaaaaagcactttcctttattgtaagtaagggattcataaacttgacacttaagaaca

SEQ ID NO: 497207 - DNA, 635 bp, Homo sapiens
ttagaaggcgcaagcaaaattaaaggtgaacaaccatcaacttttttattctagacatcacaaagttgttaaaactaattggaaaaactgggagtcactatcattgcaagatactttaatacacctccctcaaatcaaatggtcaagaataaatatcagagacattttagtgattataaggtgaactatttcatcatgccaagcgccaactttctttttcaaatatcatattagaatattttgaaaagaggggacatattttatatgccctaagatattgtttctttgattttatacacattcatatgtatacacagaaaaatacttaggatgacatcaattcaatgctgtcttagtttgattttcatgtaggggttgggtagattgtaatggtcttcactgtattttttaattttttaggtttttaatatgtccacaaaatacttccatagttagcaaggttatccatctaatatccactcawccaaaaagtacttattgaacccttaattaagtgtctcagttggtgttagtaagtgatgactgaccctgagagaaaatattaataagcaaagggaaaaaagcactttcctttattgtaagtaagggattcataaacttgacacttaagaaca

SEQ ID NO: 497208 - DNA, 626 bp, Homo sapiens
tgggtgtccatcatgagtctccaggaagacccaatgggctgccatgttctgcaggatcacagccagggccaaagtcagccagaagggcctgccagtggggtggggaggtgstcgctgttagcggacctctaaggagtccctgagccctccatgtcttgtttcactcaccacgaggactccagggaacggaagagcaggaggttcctgccatggagcacaggcatgagcaccaggaaggccagggccgtggttcccaggaagaagatgatctgctgcaccaggagccctgccaggggcgggagtggcagggggacagaaaacaggttccatgaaaactggccatccccgctgcccccagaaccaagggctttgggattgggcaggcctggttttagatctctgctctgccactgcctagctatgctgccttgaacaaatcactttacttcattgagcctcagtttcttcctctgtaaaatggggataatagtccctacctcagaggctgttgtaaggatccaatgagataatgtctgtggaaactcttaaaatcacaaaatactttgcaaatgttatttccctccagtttctcctgagtttgagttactgggggataaggctacata

SEQ ID NO: 497209 - DNA, 440 bp, Homo sapiens
tgcggagcagctacacctccacctgcaacgctggcagcccacgctctgaccacatgttactcctcagaagccgggggcccatccgtcmcagcctggggtccccaagtaagcagaaggcgcatgcctcctgagtcctcagcaccgggctttgtcccaaggagatggagaaggcccccgcctaggcttcaggagccctgcgttctcttggctgcactctgccctgctggatggcctcaggcaaatccttccccatgtgtcaagtggggacacttctcagtcccctccacagcgctgttgggagcgcccaggaggcagagtaagtaggtggctgcaggaggcatcagaccacagaaggggaagccaagatggttccctggttcaggagctcattgtcagaggagggaaggagaaaggagacggccccaaaagacagggagtgg

SEQ ID NO: 497210 - DNA, 440 bp, Homo sapiens
tgcggagcagctacacctccacctgcaacgctggcagcccacgctctgaccacatgttactcctcagaagccgggggcccatccgtcacagcctggggtccccaagtaagcagaaggcgcatgcctcctgagtcctcagcaccgggctttgtcccaaggagatggagaaggcccccgcctaggcttcaggagccctgcgttctcttggctgcactctgccctgctggatggcctcaggcaaatcyttccccatgtgtcaagtggggacacttctcagtcccctccacagcgctgttgggagcgcccaggaggcagagtaagtaggtggctgcaggaggcatcagaccacagaaggggaagccaagatggttccctggttcaggagctcattgtcagaggagggaaggagaaaggagacggccccaaaagacagggagtgg

SEQ ID NO: 497211 - DNA, 429 bp, Homo sapiens
atagccaaaagtaaaagacaatacaaaggaatacatctaacyaaggaggtgaataatgtcttcaaaaagaactacaaaagactgctgaaagaaatctaagatgacacaaacaaatggtaaggcattccatgcttatggtttgaaagaatcattattgttaaaatggccatactgccccacacaatttacagatacaatgctattcctattaaactaccaacatcattttacacagaattagaaaaaaataaaagattctaaaatttatagagaaccaaaaaacaggaaagggttttaaacaatttttcacagttagctatgaagaatcaaaaactgtcatttttcttcttgggggttttattttaaaataggacaatatcttatggaactaagtatcctatagaaggtcagataacagtgaacagaaaa

SEQ ID NO: 497212 - DNA, 530 bp, Homo sapiens
agttttgttcttcactctgtcctgtcctgcatgcttcctcttttttggagctgccaagccaattgtgataagagcagatctttggtcctttaaggatttacgtaaaagccaagctcatttcagaggaaaaccctgacatatgtttgtgagtcttacattctcatttggaagacataaagtccaacttaaactacctagaaccacatattttgcttaagtcatgcttggtattaagttaaacattaactwtttctttttctccatggccaaagtggaaaaattctgggcagaatatcatttctgaaggtagaaaacaggtccacttccacctctaccacacctttccaatgtcacaccaatcatgatatgctccagtctataaaacctttagcagaagattttattaaatgactaacaggctatattaattaattcagagaaatgacattgtacatttttaaaaatacactcatttttgtggtcctgaactagtagtaatgatactttttgtcccctcagttcagaaagct

SEQ ID NO: 497213 - DNA, 530 bp, Homo sapiens
agttttgttcttcactctgtcctgtcctgcatgcttcctcttttttggagctgccaagccaattgtgataagagcagatctttggtcctttaaggatttacgtaaaagccaagctcatttcagaggaaaaccctgacatatgtttgtgagtcttacattctcatttggaagacataaagtccaacttaaactacctagaaccacatattttgcttaagtcatgcttggtattaagttaaacattaactttttctttttctccatggccaaagtggaaaaattctgggcagaatatcattwctgaaggtagaaaacaggtccacttccacctctaccacacctttccaatgtcacaccaatcatgatatgctccagtctataaaacctttagcagaagattttattaaatgactaacaggctatattaattaattcagagaaatgacattgtacatttttaaaaatacactcatttttgtggtcctgaactagtagtaatgatactttttgtcccctcagttcagaaagct

SEQ ID NO: 497214 - DNA, 606 bp, Homo sapiens
aagataacagagtcatgattgggccataagaggagatgttgctgtcagagagaccagttgaagaaacgagatgctgaagccttgtattgagcaagacaataatgatggagaacaataaataaatcagaaaaatttcataaatggaaccagtaagaatagggagctaattggaaattgatggtaaaggaaagaaaaatattgatgttatttttgacttttctggtttgggtgattggacaggttatattkcctttgtaattacatgtgtaattaatagaaaaaattaattacacgtgtaattatttaatggctgtcttcttcactaagctgaaccccacaagagcagagtgtctttcttgtgtgtgtgtgtgtgtgtatatatatacacacacaaatatacatataatatatacatatatatacaaatatacatataatatatgtacatatatatatatatatatgtatgtatatattccctagcacctgacccagtgtctggctatattaatgttctcaactaatagttgttgatcaaccaactagtttcatttgtttactaaattttgtattaatgaccaggcactgttctagatgaactttaat

SEQ ID NO: 497215 - DNA, 606 bp, Homo sapiens
aagataacagagtcatgattgggccataagaggagatgttgctgtcagagagaccagttgaagaaacgagatgctgaagccttgtattgagcaagacaataatgatggagaacaataaataaatcagaaaaatttcataaatggaaccagtaagaatagggagctaattggaaattgatggtaaaggaaagaaaaatattgatgttatttttgacttttctggtttgggtgattggacaggttatattgcctttgtaattacatgtgtaattaatagaaaaaattaattacacgtgtaattatttaatggctgtcttcttcactaagctgaaccccacaagagcagagtgtctttcttgtgtgtgtgtgtgtgtgtatatatatayacacacaaatatacatataatatatacatatatatacaaatatacatataatatatgtacatatatatatatatatatgtatgtatatattccctagcacctgacccagtgtctggctatattaatgttctcaactaatagttgttgatcaaccaactagtttcatttgtttactaaattttgtattaatgaccaggcactgttctagatgaactttaat

SEQ ID NO: 497216 - DNA, 606 bp, Homo sapiens
aagataacagagtcatgattgggccataagaggagatgttgctgtcagagagaccagttgaagaaacgagatgctgaagccttgtattgagcaagacaataatgatggagaacaataaataaatcagaaaaatttcataaatggaaccagtaagaatagggagctaattggaaattgatggtaaaggaaagaaaaatattgatgttatttttgacttttctggtttgggtgattggacaggttatattgcctttgtaattacatgtgtaattaatagaaaaaattaattacacgtgtaattatttaatggctgtcttcttcactaagctgaaccccacaagagcagagtgtctttcttgtgtgtgtgtgtgtgtgtatatatatacacacacaaatatacatataatatatacatatatatacaaatatacatataatatatgtacatatatatatatatatatrtatgtatatattccctagcacctgacccagtgtctggctatattaatgttctcaactaatagttgttgatcaaccaactagtttcatttgtttactaaattttgtattaatgaccaggcactgttctagatgaactttaat

SEQ ID NO: 497217 - DNA, 606 bp, Homo sapiens
aagataacagagtcatgattgggccataagaggagatgttgctgtcagagagaccagttgaagaaacgagatgctgaagccttgtattgagcaagacaataatgatggagaacaataaataaatcagaaaaatttcataaatggaaccagtaagaatagggagctaattggaaattgatggtaaaggaaagaaaaatattgatgttatttttgacttttctggtttgggtgattggacaggttatattgcctttgtaattacatgtgtaattaatagaaaaaattaattacacgtgtaattatttaatggctgtcttcttcactaagctgaaccccacaagagcagagtgtctttcttgtgtgtgtgtgtgtgtgtatatatatacacacacaaatatacatataatatatacatatatatacaaatatacatataatatatgtacatatatatatatatatatgtatrtatatattccctagcacctgacccagtgtctggctatattaatgttctcaactaatagttgttgatcaaccaactagtttcatttgtttactaaattttgtattaatgaccaggcactgttctagatgaactttaat

SEQ ID NO: 497218 - DNA, 442 bp, Homo sapiens
ctggagtgcagcagccatggctcactgcagcctcaacctcctgggctcaagtgatcctcctkcctcaacctcccgagtagctgggactacaggcatgcaccatgatgcctgctaatttttgtatttttttgtagagattgttgcagggggggtcttataatgttgcccaggcttgtctccaactcctgggctcaagcatctgcccacctcggcctccaaaagtgagccaccacgcccagtaaaacacttaaaatgtcactttaggtcctgtgggaagagcagcgtggaggtgggctgaggttagaaggtgcagagcgtggaagaagattgtgagctgagtattggacatctgttcttgaatagtccctgggcctgccataggaaaggaagttctccagggtaagtgacttggacttttccttttcctctaataacatttttt

SEQ ID NO: 497219 - DNA, 598 bp, Homo sapiens
aataccccagttctattcaagaagtagaatttcaccagggtaactatagtgaatggtaattttgtgtacctgatagaaatcttccagttatgtgcatgtatgtggtgtgtgtgtgtgtgtgtgtgtgtgtgtgtgtgtacatgtgtgtttgtatctgtatgtgttgatgtgtctggtgttttatctttttactggacaaaaaggagcacacaaaactcactgttcattttagatatgtagaatatttattacaaaaatttttttatatccccctccctgttttcatactccttgaaacatcactttgaagctcttttcaacaagagagggagaatattccgctatcccttgaatctgggtttgctttggccaacasaatgcagcaagagtgatggtgtgccagtttggactctaagcatcaagaagttttgcatgcttctactctcttttggaattctaccactgccaagtgaataagcctaggctagtttgttaggatatgaaagtctttatggaagccaagtgtcacagccaaaaaaaattctaaactagcctaccccagatgaccaccaaacacataagaaaacctacccaagat

SEQ ID NO: 497220 - DNA, 593 bp, Homo sapiens
tagtctacactggagacatgcatctgccttggcaggtggcgcttgaaggacgtgtgcctggtagagggcaggagggggcagagggagtgtggtcagggctcaggggaagggggatgaaggcaaacacgagcctggaggccctggctcatcttatcccttgttgagcccccttttccttcctcttcttgaccccacttttgctctgcayacactttgtgtgcaaggttgtggtgagcattacatgtcttaatatatgtaaagtagttggaatggtgcctgatatatagtaagctcaataaactttagccattgttatcataatcactttttcctgcttttctgttacctgctttctaggtttacttcctagtagacatgactctggtttccttattaaatcatgagattccttaagagaaggaccatcccttcttatcctcaatgtggcacccacttcatcaccatcatcaccatcaccatttgttaagcatttgctatacggcaggcagcagagtggtaaaagcatgggctttggagttagcctgcataggttaattttggctctgtcactttctagctgagatcttgggaaa

SEQ ID NO: 497221 - DNA, 593 bp, Homo sapiens
tagtctacactggagacatgcatctgccttggcaggtggcgcttgaaggacgtgtgcctggtagagggcaggagggggcagagggagtgtggtcagggctcaggggaagggggatgaaggcaaacacgagcctggaggccctggctcatcttatcccttgttgagcccccttttccttcctcttcttgaccccacttttgctctgcacacactttgtgtgcaaggttgtggtgagcattacatgtcttaatatatgtaaagtagttggaatggtgcctgatatatagtaagctcrataaactttagccattgttatcataatcactttttcctgcttttctgttacctgctttctaggtttacttcctagtagacatgactctggtttccttattaaatcatgagattccttaagagaaggaccatcccttcttatcctcaatgtggcacccacttcatcaccatcatcaccatcaccatttgttaagcatttgctatacggcaggcagcagagtggtaaaagcatgggctttggagttagcctgcataggttaattttggctctgtcactttctagctgagatcttgggaaa

SEQ ID NO: 497222 - DNA, 502 bp, Homo sapiens
gcagggcagggattcgaaccccaggttctgtgcccaactccatgcatcgctccttggaactgtttatactaaaaytcctgtagcagactcatggttcttcccttctggaatcatgaatcaggagttcttcgttgatgattagtcgtgggtctagatgaaggccaccaaaatgcctaaaacatgaggccaagggaaggttcttggttttggtgaagagaaggtggagtcaaaactgatacagtcttagaaggcataacctctaaattatgatgtaatagtaggtgggaactaggagggaaggcatagatgccccaggaactgggtcagccatttgggaggacttcctgagttccgggcgggggtggaacactggaaaagaggcattgattgttaagctgaatgtggtcttgctgggaagctgggactggataagttggctgatcacttggggcctcttgcttcctagtggcatgtgatgggagttgctttgctctgatcctta

SEQ ID NO: 497223 - DNA, 502 bp, Homo sapiens
gcagggcagggattcgaaccccaggttctgtgcccaactccatgcatcgctccttggaactgtttatactaaaactcctgtagcagactcatggttcttcccttctggaatcatgaatcaggagttcttcgttgatgattagtcgtgggtctagatgaaggccaccaaaatgcctaaaacatgaggccaagggaaggttcttggttttggtgaagagaaggtggagtcaaaactgatacagtcttagaaggcataacctctaaattatgatgtaatagtaggtgggaactaggagggaaggcatagatgccccaggaactgggtcagccatttgggrggacttcctgagttccgggcgggggtggaacactggaaaagaggcattgattgttaagctgaatgtggtcttgctgggaagctgggactggataagttggctgatcacttggggcctcttgcttcctagtggcatgtgatgggagttgctttgctctgatcctta

SEQ ID NO: 497224 - DNA, 613 bp, Homo sapiens
agggcagggattcgaaccccaggttctgtgcccaactccatgcatcgctccttggaactgtttatactaaaactcctgtagcagactcatggttcttcccttctggaatcatgaatcaggagttcttcgttgatgattagtcgtgggtctagatgaaggccaccaaaatgcctaaaacatgaggccaagggaaggttcttggttttggtgaagagaaggtggagtcaaaactgatacagtcttagaaggcataacctctaaattatgatgtaatagtaggtgggaactaggagggaaggcatagatgccccaggaactgggtcagccatttgggaggacttcctgagttccgggcgggggtggaacactggaaaagaggcattgattgttaagctgaatgtggtcttgctgggaagctgggactggrtaagttggctgatcacttggggcctcttgcttcctagtggcatgtgatgggagttgctttgctctgatccttaaatatcccgcaccaagggaatgaattttgagatctgacaccttcaactctcccaagaagcctgtagagatcacagaccatctcctcacccttcctcaagacctaaggaagcaa

SEQ ID NO: 497225 - DNA, 594 bp, Homo sapiens
cttgagcaactgggtggatggatgggccaggttggggaaaattagaggagaatgtaaacagaaaagggcaactttgagcctctgagaagttttagatttccagccacatggccatgtcattttggatatatgagtctggagtctagaagagatgtctgcggaggggccataaactcaggagccatgagtggggagatggatattaacattatggctgagtgaggagaggaaaagcttgacaaasttcactgtttagaggcagggatgggagaagaggctggcacaggaaacctgaaagaggcagtcagagaggtgggagaagaaccggaaggaagtggagttgtcaagagcagggcagtcaactctgtgaaaggctggaaagagcttctctatggagcaccttgccatggcaagacccagagattctggagtgtggggagcaggaggtggggaaagatcttaatcttcagggtgactgtccccaaagagatgatgaagctaaagccactgtcacgcagtgcaggcctgtgcctttggctgagaccaaagccctgcctatttggcatccccctcagggcacttgtttgcaagaaa

SEQ ID NO: 497226 - DNA, 605 bp, Homo sapiens
gggccagacaggtcacattgattaacacccccaagactgcacagaatgggtgagaggggattccccgagtagaaatcctgctccattacaatgagaagaggaaattgaagcagctagccaaaaaactacaacggccgtctatgtgcttcaacacaacaatgagctccagggaacttggatcaggatctccaccctcttacccctaatacccagtgttacgctttatggcctgggcacatcctgcctttgtttgctgctgggattgggaaacctgacttgggctttctaatgcttaactgtaagggttcccagtcatcttctgttcaccctctgtggcctctcttattgtaccgactaccatctaaagctaatgatccccaactccgttccagacccatagtttgggtttcccagtgggcagagcaatttcccaggttcaactttcccttycttcctgctgccactgccttaattcaggtttgcgtcattctcacttggtctttcacaccagcctctggaccctgtctccatcttcattttctttcctatccaatccaccctctacatagcaccaggtaatctcttaaaaacaaaaagatcacatt

SEQ ID NO: 497227 - DNA, 460 bp, Homo sapiens
ttctgccgcatggtgaagaaggaaggagcgctgatctgctgtctgaaggcctgaattccagttctctgccatctcctcccttgtggactacgaaccagtcacttaatctcctcatctactagatggatgattaggatccacccattgtgcctctcagtatttttgtaagaattacatgagayaaattccttctggacaatttgcagagacttgccccatggaagaatacaggttaacctctgaatagtgtacctgctaaattttcctctacattctgaaaaaaggaagaaaggggacaggaaccatcatttaacacttgccatggatcagtcacagtaccttcaccatttaacccaactcatgtaatccttgccttgtacactgtgaagcaggccctatatgtcccgttttacaaatgaggaagctgaagttcagagagctaaagtatatcacctaaagc

SEQ ID NO: 497228 - DNA, 499 bp, Homo sapiens
gcagggacagaacatgaaggagcacctagaaccagaaagaaaacccaaaaggaaagacggagaatgtgcagggggagagacagagggtccagcttcagccaccctggccacctgccagccttctccagggctcctctctgctgcccccaaaaggctttgcactttgtttgaataaaagaggtcactgctttgtagaaggagaggggagaggacagccycttgagccacccctgcacccacatgcatgggaacagcactggcctggggctctttcccagggtgagtccatccctcctcgagcctttggttgactcacatctctgtagtgacacattggaccatgtgctaggaacagtccaacttccagagagaaaaaaacagctctggtggtgtgtcatgacaacatgataagcatttcccttcttgagaagttggggacagggctagctttgtgacttgaggcacctgcttgaaaatgcctcctccacattgtcagagc

SEQ ID NO: 497229 - DNA, 621 bp, Homo sapiens
ggaaaattgtgggggttgagattgagccagtgctattgccttgaagttttagcctacatatttttttagtttgacttttatatttgtggcagttaaaaacaaacctgttcacatttcctcacaaattagaaacaatggcttctatggatagagtatggtattagaagtaaagttcttaagcaattattgtgcactcatattgcatcytaggctgaatgctatttgttagaaacggaatgtaaccaggcagtttaagccctacaggaagacagaagtagaaccatggaattataattcactttcttaagtataaaagcggacacaggtatagtactttctggattcagacatccgaagatagtaaacataggtgaagctaggattctaatgtgagtggtgggtggggggttctaaaatttctacacagaagaacgtgggagcagtgatttggctggaagttgtatgttcttgaagctaagtttgcgttgcaacagcattttacttagatttaatgcaagtttcatctggctctggggaggcacaggctaagagctgttaatggtgtatgcccattctgtcagttaacatagtgattaccaatgtttcctaatactgcttcca

SEQ ID NO: 497230 - DNA, 614 bp, Homo sapiens
gtattttggaaggtttatgaatatctacgtagctttctcacatttttccaatggatgtttgctatggactgaatgtttgtgtctctccacaatgtgtatgttgaaatcctaagtccccaatgtgttggtatttggatrtggggtctttgagaggtaattaggactaggtgaggtcataaggatggacccctgatgatgggaatcaatgcccttataaaaagaagaagaggccaggcgtggaggctcatgcctgtaatcccagcactttgggaggccgagccaggtggatcacctgaggtcaggagttcaagaccagcctggccaacatggtgaaaccctgtctctactaaaaatacaaaattagccaggcatggtggcacatgcctgtaatcccagctactcggaaggctaaggcaggagaattgcttgaacccaggaggcagaggttgcagtgagctgagattcacgccattgcactccagcctgggcaacaagagcgaaactccacctcaaaaaaaaaaaaaaaagaaaaaagaaaaaaaaaagaagaagaagagacactagatctctctttctgtatgtaccaaggaaaagcaatgtgaggatataaccag

SEQ ID NO: 497231 - DNA, 669 bp, Homo sapiens
tcgtttatctatcctaattatctaatggtgcctcattagctcattttttctggtcagtttaaatagataaacactttcctttgtatctgctgattaatttacttggtatgatattatattaaagaagaattgaaaatgattattctcccatcatttaaaaaagtatgtttgatagtttcaaattcatgagagtaaaaacttggaaaactgaagaatgcaacacatttatcaaattcctggacgtttgttgacttcctactctgcttctaaaattgtaatgattttcaggtgatttaagtgcaatttstagtcatttagtgtatatgtgtgtttctgtgtatatgcacatactatttattatttgttatttgtattataccttgcatgtataatatttattaatatcttacttacatttattaatataaataacccttaaaatcaaatgtaccctcaacatcaaaaagtgaaggcattagaagagagtaatagtgaaagaaaatcagatgtatcctggatattatcattggcatataatatatatattattatcaccatattgtgtgtatatatatgaaagtatttattagttttcttaatgcagtacagctatttaacaaccccagattgctaaggttgttactgattaatttttcccagatttaccat

SEQ ID NO: 497232 - DNA, 614 bp, Homo sapiens
ggcttccatggagcaaatgatctaacacagagcaaggtgcaagcaggaagccacagtaccctttattacccactctctaaagctgcacaccattagtagtgagtcactagatccaggccacacccaatgggaatgaagttagactccacctcttgaatggctaaatgacgtcgtatcaaagaaatatggacacaccttaaaatcaccatctttcttaagaaagaaaatatctctggtcacttcaataacactataatgtgatttatgaatggcttttaaaagtaaaacaatgagtatctcctttgaggcctgggattttttttttctcgtattcaccctatgtccatagctcaactcaagcatagaacctggcagatagtagctggtactgaacaactatagcattaattaattaattaatgtcttcaaatgctgggatatgttttctaaacacttggagttttactaccaacatttgctcctcttgctctgcttctaataatgttaaacaggggaaratggaattaagggtatttattcctttaattaaagattgatttaaaaagttacaagcatcataatttatctcttaattactgtccaaatgtatgtga

SEQ ID NO: 497233 - DNA, 614 bp, Homo sapiens
ggcttccatggagcaaatgatctaacacagagcaaggtgcaagcaggaagccacagtaccctttattacccactctctaaagctgcacaccattagtagtgagtcactagatccaggccacacccaatgggaatgaagttagactccacctcttgaatggctaaatgacgtcgtatcaaagaaatatggacacaccttaaaatcaccatctttcttaagaaagaaaatatctctggtcacttcaataacactataatgtgatttatgaatggcttttaaaagtaaaacaatgagtatctcctttgaggcctgggattttttttttctcgtattcaccctatgtccatagctcaactcaagcatagaacctggcagatagtagctggtactgaacaactatagcattaattaattaattaatgtcttcaaatgctgggatatgttttctaaacacttggagttttactaccaacatttgctcctcttgctctgcttctaataatgttaaacaggggaagatggaattragggtatttattcctttaattaaagattgatttaaaaagttacaagcatcataatttatctcttaattactgtccaaatgtatgtga

SEQ ID NO: 497234 - DNA, 607 bp, Homo sapiens
tgttgccatattacaagaagttaccctagaactaggcatttctcctgaaattttcatttttatagtcagggttaacttgactatattctgcactagagtgattttaggctgataaggtcctttatgagcagaggatggatcttatttataatttttacccgtaatatctaatatagcacctgaaacaagtttaccactcagtaagtatttcttgaatttgttagtataaattcctaatgtacattgtgctcttgtcctgtgactagtttgaatgtcccatttttttgttgtctacatttataactatttactgtatatctactttggtataatatgtgtacacatacatatgtcaaacagaagatatttagaaagagaaagggggggaaagtgagcattgaggaaatgttttgcccatgcggtaatggttaaaaaacagcaatggattttcttgaaygcggttatattttatggtatttcagcatatagccttttctctattcactcacctaaaaaaaaacccaaggctctatcaacttgattgaggaaaggattgtgggaatcactaaaaagataaaaagtcaataaatagttccaactgccaatc

SEQ ID NO: 497235 - DNA, 516 bp, Homo sapiens
tgccttctcttaagtttggatgtagttagagttagttccttctattgagttttctatccttgaaagcagattacactttcctgtatctttgaatatccagtaagttttggaaactagatagtttagtttagatgatatgttttagatattctgggttctgctttgttcttytggagatttttattgttcttgctcttatatgcagttaccttgcttggacccaaacatcatactctgtccatcctacagagtgcagcagttgatatctctgctccttccttacatctttcaactgctactttttttttttttaaactagctccctgggttttcccctgcaaatgtagtttgtgcttagccaaaattttggactggattgtggtttctttgcttctgtggattttctttcacatctgcatctgattggctagctttagactctatcaactaatacttaagccagtaagtcttcacttttttactttccaagatggccattgttggggaattaatgca

SEQ ID NO: 497236 - DNA, 406 bp, Homo sapiens
acagttgcatatgaattaactcattgaggcttttatatctacctcaaagacaaaaacataaaatgatatttgcatattttttagcctttatttctgcaagcaaaagactggaaataacccaaatgaccatcaacagaagtctggatgaaaaactttggtgaatccacaagatggaatacatgtaattaactataaaaagcagtagagaggaactctacatagtaatatggctttctaggctgtattataaaataaaagaaggaaagcggagaatagtatactagtatactatattatatatgtgtgtgtgtgtgtgtgtgtgtrtatatatatatatatatatatatatatactgtattataatagtataatagaatagtattggctgtatgtcaactccaaagta

SEQ ID NO: 497237 - DNA, 640 bp, Homo sapiens
cagaagtctggggaccatcctcacttgagaccagttgactacaaattcgacggtctccgcatctgctcttaagtttgataattcactggactcacagaactctgtgaaagctattgtcctcacagtaaggtttgctacagatgaaggatataaattagaattagagacagccgcagaaagaggcgcatgccctcccggcatctgtgagggggcaccacagggtacggccagccaaggaagtgggctcccgcccctgtgacctggctccctcacacactgcctgtgtggctaactttcattcttcctccccttctggaggtctgggctaaataccttttgttgccagtttctccaaaagttgaaaataatattgtgtgcctgaaagtccctatcgtaagtcactttgccaaagctccaaacaaagacacttctatcatgcaggacatcctagtggccaacatgtcacytcccagtagctgatgataaaggccagacctcctttaggtagggtgagttcttcactacaccctgaataagaatttcagagaatcagagaatccatgtttcctaaaagcttgctgagtgactctgataagccaggtttggaagccatcgatgtaactaattcctgcatttacag

SEQ ID NO: 497238 - DNA, 448 bp, Homo sapiens
gttattcagtacctaagtgcggtgacacctagtgcaatccagcatgctgtttcacactcatcctcttacctcctggagaacttagcatgacactgtgaacgtagaaggtgtcgaacagacatttatgaagggaaacagcaagcccttgccagaagcatttagaggatgtgggagaatctgtgacatgccaagcagaggactgtcactcactacacctcatgctgcacacctctaaggactgggcagaaaatgcccagcagaatggcaatagggacacacatgctgcaggaacatgcctagaaccgatagagcagaacaacgtctggaaagagtgcrtgtatgaaactttcgtgtatatcagctaggctctgatgtttaataaaacctcagtggtttaaaataataagcatttgctatttttcatgaatgtacaagccagttgggcagt

SEQ ID NO: 497239 - DNA, 635 bp, Homo sapiens
gagatcaagtgaaacaccatatgcaagattcccgtgagcctttgatgcatgttagctctgtgacaggaaacatagccccccggctcactgatcttaccttccatagggaatacagatgctcagacagtcactttcagtgcagagacaaaggtgataggagaggaagaagtcctggaggctagagaccacatgtcagggtccccagtcagaactgggggagaggaaaggcttctcagagggaatattatttgtattaaagccaattaaagtctgttccttttcctgcgaagatctcaagggtttatttccctccacaggacctgttttgcttccccttcctccattcccttcacctactctctgcccttcacctctttcagaattcttggggaaacaggatgtaccccggcaacccaatcatgtctatgcatcccacaaacactggtgggtggggaagcaccacaagagaggttagttgagttacacccacgtgctataagctgagkaacagatgattgaaggggaaaaggattaaatgttttcaggaacattcagaatttcacattttacaagatgatgtttaattagttatctctagtagtagcctggataggtctcatgattttttccaaaag

SEQ ID NO: 497240 - DNA, 403 bp, Homo sapiens
gatacagttgtaagcatgatactattgcttctctttactgagctgtagtacaagagagacccagataagttgagaggagattacagagcactctcacaggcttggtacccagggctgtctaccacttgctagttaactgacyttaattaggtgactttccatttctcaacctcagtttcctttgcctgcccaagtcatgccacctttacctgtcctggcatcactgtttcacccctggacttcccaagtctgttcaatctccacccacaacttttcctgttataatgccaggtgttttttcacaacagaggaatagggggtgtgccgagcacagtgaaaagtattacagactttgaggacggagagtctcaggggtgaatgtcaaatctaagaaggaaacaaa

SEQ ID NO: 497241 - DNA, 403 bp, Homo sapiens
gatacagttgtaagcatgatactattgcttctctttactgagctgtagtacaagagagacccagataagttgagaggagattacagagcactctcacaggcttggtacccagggctgtctaccacttgctagttaactgactttaattaggtgactttccatttctcaacctcagtttcctttgcctgcccaagtcatgccacctttacctgtcctggcatcactgtttcacccctggacttcccaagtctgttcaatctccaccsacaacttttcctgttataatgccaggtgttttttcacaacagaggaatagggggtgtgccgagcacagtgaaaagtattacagactttgaggacggagagtctcaggggtgaatgtcaaatctaagaaggaaacaaa

SEQ ID NO: 497242 - DNA, 576 bp, Homo sapiens
gtaaatgataaaacttggacttaaataccatgctgaatttaactctagctctgttcccaattgtgttgatcttgtgtagatttctttctgtggatcaataacagtcattctcaacttgagtgtaccttagaatcaccttggagyttcacaaaaattcgtgatggccagacaacactccaaactaatttaatcagaatagcaagctgtgttcccagacatcagtattttgtaaaggtcccaggagattctaatgcacaaccaagtttcagaattagtggtctataaaagaagacttagactgccagttctaacagtctatgagtttatgtttactaaacacaaatattaatattattagacagggtctccctatgttgcttagggctatagagcagtggctattaacaggtacaatcatagtttactgcagcttcaaactcttagcctcaagcaatcctctcacctaagctgcctgaatagctgggactataaacacaactataaattcacaagcaatattttaatgatgatgagaaggaaggggtaaattactatttaagtctaccatttcctgca

SEQ ID NO: 497243 - DNA, 576 bp, Homo sapiens
gtaaatgataaaacttggacttaaataccatgctgaatttaactctagctctgttcccaattgtgttgatcttgtgtagatttctttctgtggatcaataacagtcattctcaacttgagtgtaccttagaatcaccttggagtttcacaaaaattcgtgatggccagacaacactccaaactaatttaatcagaatagcaagctgtgttcccagacatcagtattttgtaaaggtcccaggagattctaatgcacaaccaagtttcagaattastggtctataaaagaagacttagactgccagttctaacagtctatgagtttatgtttactaaacacaaatattaatattattagacagggtctccctatgttgcttagggctatagagcagtggctattaacaggtacaatcatagtttactgcagcttcaaactcttagcctcaagcaatcctctcacctaagctgcctgaatagctgggactataaacacaactataaattcacaagcaatattttaatgatgatgagaaggaaggggtaaattactatttaagtctaccatttcctgca

SEQ ID NO: 497244 - DNA, 517 bp, Homo sapiens
aaatgatctaatccaggggtgttcaatcttttggcttctctgggccaccttggaaaaagaagaattgtcttgggccacacatcaaatacagtaacactaatgatagctgataagcttaaaaaaattgcagaagagatctcataatgttttaacaaagtttatgaatttgtgttcagccacattcaaagccatcctgggctgcatgcagcccatgggccatgggttggacaagcttgatctagtcctttgtgaaatttttatttttatttttggctatctctccacaacaaatatataagctccatgaggacaggtgttgttttctatgttgttcactgtcgtgtccccaatactattaagaacaatgtctgacactagaagccattcagtatttgttaaatattgcattaatgaacaagcatgagttamctttcaagagtccttgcccagttgaacctatcctgtctaagcaattttttctcttgatacttaaattagcattacagaaagaatcttt

SEQ ID NO: 497245 - DNA, 645 bp, Homo sapiens
gcagaactgaggatttgtatgtgtagggatgaaaggaaggaagatatcaaagaagactcctgggttgctagctggaaaaactcagtagatagtggaattattgcctgtgatgtggaagactggggagaactggacttgaggaaaggaaatcaagagtttaggattaggcatatatagtttgagatggctaggaaacatatgaaaagcaaatggctatatgatttggaagctcccaacacaacagaagctggactggagtctgatctacatgtggatgggcagtcctgtaattacatcaacatttcccctaatgaccaggtaggacaccttctgcacatttacagattcactcctgtttcgatgcagctctctgagaccaaattaacaaaaatgtgtaaggagaggacatcgacattgttgaaaactgagaraaatccccttcctaaaagggcccctgcttttaggtcttttgctataaggtctcttcctctcatagtcatggataacaagagatttggtcatctcaattgagcctttggcctttcaaggcgtctagttaatgtcaatgatgtatttatcctcctgttgatgtctacagtcagtagagtaatactgaatcagagataaaggactatataatcccac

SEQ ID NO: 497246 - DNA, 466 bp, Homo sapiens
  misc_feature (1)...(466): n = A,T,C or G
gccaaaatgggaggcccagcgagatgaaaaaaattgcccaaacttatcaggagtaaagttgtggtttgaacctggaaatcagtctttggccantaagccattgaagtaataatatctctggaagtagggagcagctcctctcttacttccttggtttccaaggcagcatgtctttctggtgggttctctgagcccaacactctttcccatttctttttttttttttttttcgcacttgagccttcttgtccttcarttctcagcctaaagtcgcacctgtaaagaggcagtttctgacctctcagtactctctttttctatcagagcagtcttcatgattttcaatagtatctttgcttgtgtggttatttgatttacgtttgtgtccctcttggggctagaagctttgggaaactcaggatacatattggttttgttcaccactatacacctagcccctgcacag

SEQ ID NO: 497247 - DNA, 466 bp, Homo sapiens
  misc_feature (1)...(466): n = A,T,C or G
gccaaaatgggaggcccagcgagatgaaaaaaattgcccaaacttatcaggagtaaagttgtggtttgaacctggaaatcagtctttggccantaagccattgaagtaataatatctctggaagtagggagcagctcctctcttacttccttggtttccaaggcagcatgtctttctggtgggttctctgagcccaacactctttcccatttctttttttttttttttttcgcacttgagccttcttgtccttcaattctcagcctaaagtcgcacctgtaaagaggcagtttctgacctctcagtactctctttttctatcagagcagtcttcatgattttcaatagtatctttgcttgtgtggttatttgatttaygtttgtgtccctcttggggctagaagctttgggaaactcaggatacatattggttttgttcaccactatacacctagcccctgcacag

SEQ ID NO: 497248 - DNA, 278 bp, Homo sapiens
ctaaagggtaagtgttctgctctccctatcccgttccagttrttcacaggctcactgcggcctccagagaaaatcctgacgtcacggcctgttgtccctgctgtccccacagtccctgtctgccaccctccccccaccacgcccacactgcaggctgccatcagcacactgggtcccaaatacaccacgtgtgcttcctcacacccctggaccacactgctctccagcccggcacaccttctacactgtctggtgagttcctttttaaataaaagctt

SEQ ID NO: 497249 - DNA, 278 bp, Homo sapiens
ctaaagggtaagtgttctgctctccctatcccgttccagttattcacaggctcactgcggcctccagagaaaatcctgacgtcacggcctgttgtccctgctgtccccacagtccctgtctgccaccctccccccaccacgcccacactgcaggctgccatcagcacacygggtcccaaatacaccacgtgtgcttcctcacacccctggaccacactgctctccagcccggcacaccttctacactgtctggtgagttcctttttaaataaaagctt

SEQ ID NO: 497250 - DNA, 561 bp, Homo sapiens
ttggtctggcttttctttctgctctaacagagcaccacggagttcagtgcctcacaatttccaggttcttcttcccccactgcccagagatgcttccccaacaggttaccacttctaggtgtggggaaggtgtggcatccacmattgagcactgttttctttttttctatcccttcagtgcctctttcagcaatataatgttaaaaccaggtattatgagtgctcacctgattgttttgtttttatgaaggatcttttcttttttttctttttttttctttttttttttttcctgcgtagatagttgttaactttgtgtctttgcgagggaacaattggtggagttttttatttctccatcctgctcttcatcctgtagatgtctattggttgcatttggtcaaatatcactttcaagtcccaaatatatctgtttgtttcctgcctcaatgatctaatactgtcagtggggtgttaaagtctccctctattatttttggacatttaagtttattcctaggtatctgagaacttccattctgaatctgagtgctcctatgt

SEQ ID NO: 497251 - DNA, 607 bp, Homo sapiens
atgctagctaggggccctgagctaacagttcattttggttaatcattttgagtttagccaggtccaaataattgctctcactggctctaagttcatgctttctgccatttctgctcatgcctgtaatcccagcactttgggaggccgaggtgggtggatcacttgaggtcaggaattcgagaccagtctgaccaacctggcaaaaccccatctctactaaaaatacaaaaaattagccaggcctggtggtttgcgcttgtaatccaagctactcaggaggctgaggcaggagaatcacttgaacatgggaggcagaggttgcagtgagccaagattgggccactgcactacagtctggaygacagagccagactccatctgaaaaaaaaaaaaaaagaaaaagacattaaaggggcaatttggtcagtgagttgcctctggctcgtttttgagttacctacagacagtcagttggtcagaaagagagaagaggaaggcagttaggaggcaatgatgacatctcttctttctagtgccatttcagagtcaagcccaggatcttgagtgctctgagcacactgcaaatagacctcccctcatcacgcgc

SEQ ID NO: 497252 - DNA, 607 bp, Homo sapiens
atgctagctaggggccctgagctaacagttcattttggttaatcattttgagtttagccaggtccaaataattgctctcactggctctaagttcatgctttctgccatttctgctcatgcctgtaatcccagcactttgggaggccgaggtgggtggatcacttgaggtcaggaattcgagaccagtctgaccaacctggcaaaaccccatctctactaaaaatacaaaaaattagccaggcctggtggtttgcgcttgtaatccaagctactcaggaggctgaggcaggagaatcacttgaacatgggaggcagaggttgcagtgagccaagattgggccactgcactacagtctggatgacagagccagactccatctgaaaaaaaaaraaaaagaaaaagacattaaaggggcaatttggtcagtgagttgcctctggctcgtttttgagttacctacagacagtcagttggtcagaaagagagaagaggaaggcagttaggaggcaatgatgacatctcttctttctagtgccatttcagagtcaagcccaggatcttgagtgctctgagcacactgcaaatagacctcccctcatcacgcgc

SEQ ID NO: 497253 - DNA, 607 bp, Homo sapiens
atgctagctaggggccctgagctaacagttcattttggttaatcattttgagtttagccaggtccaaataattgctctcactggctctaagttcatgctttctgccatttctgctcatgcctgtaatcccagcactttgggaggccgaggtgggtggatcacttgaggtcaggaattcgagaccagtctgaccaacctggcaaaaccccatctctactaaaaatacaaaaaattagccaggcctggtggtttgcgcttgtaatccaagctactcaggaggctgaggcaggagaatcacttgaacatgggaggcagaggttgcagtgagccaagattgggccactgcactacagtctggatgacagagccagactccatctgaaaaaaaaaaaaaaagaaaaagacattaaaggggcaatttggtcagtgagttgcctctgkctcgtttttgagttacctacagacagtcagttggtcagaaagagagaagaggaaggcagttaggaggcaatgatgacatctcttctttctagtgccatttcagagtcaagcccaggatcttgagtgctctgagcacactgcaaatagacctcccctcatcacgcgc

SEQ ID NO: 497254 - DNA, 607 bp, Homo sapiens
atgctagctaggggccctgagctaacagttcattttggttaatcattttgagtttagccaggtccaaataattgctctcactggctctaagttcatgctttctgccatttctgctcatgcctgtaatcccagcactttgggaggccgaggtgggtggatcacttgaggtcaggaattcgagaccagtctgaccaacctggcaaaaccccatctctactaaaaatacaaaaaattagccaggcctggtggtttgcgcttgtaatccaagctactcaggaggctgaggcaggagaatcacttgaacatgggaggcagaggttgcagtgagccaagattgggccactgcactacagtctggatgacagagccagactccatctgaaaaaaaaaaaaaaagaaaaagacattaaaggggcaatttggtcagtgagttgcctctggctcgtttttgagttacctacagacagtcagttggtcagaaagagagaagargaaggcagttaggaggcaatgatgacatctcttctttctagtgccatttcagagtcaagcccaggatcttgagtgctctgagcacactgcaaatagacctcccctcatcacgcgc

SEQ ID NO: 497255 - DNA, 527 bp, Homo sapiens
atgaggctctattctagatcccgagaaccttgggaagggaaaacgcataaaaggtatttggaaacaacactgtaatagtgcaaaaatgtgaggtggaaacataaaactatgagaggaaccatctgatgctatggaccaagcaggactgacaaagaagaaaatagagaagacaaattaatrtcaggaataaataagggcagattgtgggtaactatatacctataaacactacaacttagataaaatgcaccaattcctcaaaaaatcacaaactagcaacactcaaccaagaagtaagagataactagaaattttaattattacagagattgaattcatgatttaaaatctcccgaaaaagaaatattctaagccattatccttcctgagtacagatgtaaaagtccttctaaaatattagtgaatcagatctagtaatatactaaaagtacagaatgatcaagtggagtttttccttggaatgcaaagctagttcaatactcagaatctatcaatgcaatccacca

SEQ ID NO: 497256 - DNA, 324 bp, Homo sapiens
ggacaagggggcagccctgcctctgtgtcctcctaaacaggggatcatgcggctttacyttccccaaaccctccagcaaagagtatattcaatccaaaggcgagtacatgaatgaggaatcatttggctagaacgccatcccttccatttttgccttttgtgggggactgctgatatgtctggaattggtgcacgacaaacacaccaggccacgatgtgtaaaacccacaacatttgtgtttcaaaatgtgagacctttgagtttaaaaacagactttaaagagcttgagaacctggcaattaatcagtactctctgctcagaa

SEQ ID NO: 497257 - DNA, 524 bp, Homo sapiens
ctgccatgttttttcagggacaagggggcagccctgcctctgtgtcctcctaaacaggggatcatgcggctttactttccccaaaccctccagcaaagagtatattcaatccaaaggcgagtacatgaatgaggaatcatttggctagaacgccatcccttccatttttrccttttgtgggggactgctgatatgtctggaattggtgcacgacaaacacaccaggccacgatgtgtaaaacccacaacatttgtgtttcaaaatgtgagacctttgagtttaaaaacagactttaaagagcttgagaacctggcaattaatcagtactctctgctcagaatgaaagcacaggacgggttggtgtgtctcgacacacagatggatatggctggatctaattactttttctctatgatgctcaaacacccatttgtttgatatttctccccccctattttgctatttattgcttggcatttggtaggcataacccagtattgcagggggtttggaaatcattttt

SEQ ID NO: 497258 - DNA, 590 bp, Homo sapiens
ccatgttttttcagggacaagggggcagccctgcctctgtgtcctcctaaacaggggatcatgcggctttactttccccaaaccctccagcaaagagtatattcaatccaaaggcgagtacatgaatgaggaatcatttggctagaacgccatcccttccatttttgccttttgtgggggactgctgatatgtctggaattggtgcacgacaaacacaccaggccacgatgtgtaaaacccacaacatttgtgtttcaaaatgtgagacctttgagtttaaaaacagactttaaagagcttgagaacctggcaattaatcagtactctctgctcagaatgaaagcacaggacgggttggtgtgtctcgacacacagatggatatggctggatctaattactttttctctatgrtgctcaaacacccatttgtttgatatttctccccccctattttgctatttattgcttggcatttggtaggcataacccagtattgcagggggtttggaaatcatttttaaaaaattggtgccgctgttgtatgcagaacaaaatctgctgcggttttgaccacaatgagatcgagtt

SEQ ID NO: 497259 - DNA, 565 bp, Homo sapiens
cagagaagataggcagagagttaaagaggggtccagtcgagacccacaataaccagccaggaaggagctggaacaccactgtgacaacatagctccaaaccaagatcctaataattacgttagtaactgctacttttgtaatgatctagatgctgtgccaagcacatgatgtacataaatctcacccaattgccccaacaaccctggcaaatagcattaagaactcctccctgtacaggaagaaacagaccccaaaacttgcccaagattacccaattggtaaaaaaaatagctcacttgcctcttgaagcaaccctcaacgcctcctgtgccctatcagagctgatctakggcttgggaagatctgatcctgaaagagaagaatagaactgtggctggggtgaggatggcatgggttaagggccagaccactctggtgctcttttccacaccttcttaaggatgatggaagagacaaacagaactgacttaaagtacagttggttttcattattcacagtagcaatgtttcataaagtcaccatcaacagtgaatcagtgaaca

SEQ ID NO: 497260 - DNA, 599 bp, Homo sapiens
aattttagcacgtgtataaaatcgtgcaaactgccataaacaggaaacaaacaattccatcaaccacaaaaactttctcatgctatcaccttggagtcatgtatatacgtgtatgtatacatatgtgtgtgtgtatctatacatacatatatatttatataatataatatttatattttttattatgtgtcagcaaagcaagttgacacataaaattagccatcrcaagcatataaatatttgtataaatatatatatgtatttatatgtacactatagataaagatagatatagatagatagatagatatagagagagatttattgcaaggaattggctcacatgattgtggaggctaaccagtcccaagatatacagcgtgaatcaatgaccttgagacccaggagagatgaagataaagcccagttcaagtttgaaggcccgagaaccagaactgatcatgaagttcttgtccaaaggcctgcatgctcaagactcaggaaaagcctaggtttcagtttgagttcaaaggcaggaaaagataatgtctccagttcaagcagtaaggcaggaggaagcctctcatactcagaggagg

SEQ ID NO: 497261 - DNA, 599 bp, Homo sapiens
aattttagcacgtgtataaaatcgtgcaaactgccataaacaggaaacaaacaattccatcaaccacaaaaactttctcatgctatcaccttggagtcatgtatatacgtgtatgtatacatatgtgtgtgtgtatctatacatacatatatatttatataatataatatttatattttttattatgtgtcagcaaagcaagttgacacataaaattagccatcacaagcatataaatatttrtataaatatatatatgtatttatatgtacactatagataaagatagatatagatagatagatagatatagagagagatttattgcaaggaattggctcacatgattgtggaggctaaccagtcccaagatatacagcgtgaatcaatgaccttgagacccaggagagatgaagataaagcccagttcaagtttgaaggcccgagaaccagaactgatcatgaagttcttgtccaaaggcctgcatgctcaagactcaggaaaagcctaggtttcagtttgagttcaaaggcaggaaaagataatgtctccagttcaagcagtaaggcaggaggaagcctctcatactcagaggagg

SEQ ID NO: 497262 - DNA, 619 bp, Homo sapiens
aatcctcagggcaactattgagactattatctccttttgatgaatgaagacactgagtcttagaaaggttaagaagcttgatcaaagaagtaataaagctgaaatagaagccaagcagtttgacttccgagcctgtgcccttagttactaccctctaccccagcattgacacaaacacaaccacagcttttattagttgtccttataatgacttagcctcatgcgataagactgtctgtcccagatagagccacaagttacttaacatatctcagtgtcagcagccacaacctgctaggtaactacaactccaaagtgccctgcctcctgaatgagatggaaaatcagtggaatagggaatgggggttctgcttggaaataacctgtaaccagaccagttaaggtggaaaggggtggctgtgaaaaatgaaaacaataaaacaaaacaaaatgccaaaaagcagggtgatatagagagggtttaaagggtattgctcccctttcactcctagcctgggattcaatwtgtggccaaaagctgatggtaagtgtgtgtgtattgcagccatagtcagcagagcaaatggggactctcaactactggtcctacttcccctaa

SEQ ID NO: 497263 - DNA, 593 bp, Homo sapiens
aatttctagagggatagttgagttctgttgtggttcaaaggagaaataaatcctcttgcaactttggctattttatttcacttcacttttggcctcagaggacgagagagaagctgagaacattagccacatctgtccatgaagatttctccaatatcaatttgctcccacacctgatgtactgaatactcagaaaaatgctcaggctataaaaccatgtctaaggcacagacagtttaagatcaggctttgaatgaaggcctcagtttatcttacacattactgaagcccattctatagaagactaatagtttccacaggtgtcttgggtggagaakggaaaaaagtcaatggactgagatactattggtctcaggaatcatttgcccaatctaccctaggccaagctttgaaggacaggccatctgaattcactgagtgactgaatcccagcacaggaaatgttgatattcttattgattctttaatggccattttatatccaaccatccagccatccatctatgcatttatccatcatttatagtaatgtccctaaggctgctttcttgctaaaaataaggaatattgac

SEQ ID NO: 497264 - DNA, 593 bp, Homo sapiens
aatttctagagggatagttgagttctgttgtggttcaaaggagaaataaatcctcttgcaactttggctattttatttcacttcacttttggcctcagaggacgagagagaagctgagaacattagccacatctgtccatgaagatttctccaatatcaatttgctcccacacctgatgtactgaatactcagaaaaatgctcaggctataaaaccatgtctaaggcacagacagtttaagatcaggctttgaatgaaggcctcagtttatcttacacattactgaagcccattctatagaagactaatagtttccacaggtgtcttgggtggagaagggaaaaaagtcaatggactgagatactattggtctcaggaatcatttgcccaatctaccctaggccaagctttgaaggacaggccatctgaattcactgagtgactgaatcccagcacaggaaatgttgatattcttattgattctttaatggccattttatatccaaccatccrgccatccatctatgcatttatccatcatttatagtaatgtccctaaggctgctttcttgctaaaaataaggaatattgac

SEQ ID NO: 497265 - DNA, 521 bp, Homo sapiens
ccagttactatacatttcctgctttgctgggggcacatgtagatgcgtctcacactagatgaattaatgaaagatgaaatggcccaccaaaactgttgtgcatattcaagagcctttggtctttgatgctgtttcgtctctagagcatcrtcaaaaagcctcaagagatggagctgttggggtggtcagaattatttctcacagcgacaaatcactgctaaattctttagaaaaccagattataatatgtaattaatgaagtccacttaaaggtatcttccttatctctttcaattcccctgtgttagactgttaaacctgtgggtgagaataatgctactgatataaatgcacacacgtaaatataaaaatgtgtttatccatatgtgcataaaagtgttaagtatgtgtgtattcataagtacctatattgatcaatataaaaacacaccccaaggctctgctttcattatatgtatggcacatggtggggaagagctgtgtattgtaccctatattgc

SEQ ID NO: 497266 - DNA, 612 bp, Homo sapiens
aggttattgtgcattttacttctctagatttaagctccaatgggctatgsagaacaggaaggcagctacaactacaagcagccgtaccagggagcttcatcttcatgtcggagggttttgttttttttttttgagatggagtctctgttgcccaaagtggagtgcagtggctcaatctctactcactgcaacctctgcctctcaggttcaagtgattctcataccttagcctcccgagtagctgggactacaggtgtgcaccaccatgcccagctaatttttgtatttttagtagagacagggtgtcaccatgttagccaggctggtctaggactcctgacctcaggtgatccacccgcctcagcctcccaaagtgctgggattacgggcatgagccaccatgcccagcccatgtctgagagttttatctttatatttcttaggacaacctaatgttaactgcaacagtgatattttatttagggttcctctgccctccttagggtcaatctctgtagcacccataccgtgtttaggatacatcccaaacagataatattatgtgtgtcagagtaggccctcaccctgagcctctccctgtgcccagtgcac

SEQ ID NO: 497267 - DNA, 614 bp, Homo sapiens
cgaaaagaaaagctgtggaaaccgaaatgagactccatcggacccagtcataattgacaggtagggggaaaaagtgatttttcaatcatttttggttccttttcttcatgaacctcaactctgagtactgatccatggagctttgctgtcaagttggtttcatgttatttcaagtcactaagstcatccaacaaaggcctcctcatgctggcctttcttggaagaagccagaatcttcctttggaacacgtgtctctaaatctgtggtggagtcttttccaggtgcaccagcttcagcctaataagtagtatgtgtggtgcaggatataagcgatggcacctctcctttcgggcagggtatggtctcaatcagttttctagaagaagcaatgtgccccaagttaagtggcacccactttattattctcggtgattgctgcttggctggaagattatcaattcagattacggtttaggggattatggcaagctctctgctgtgttcagggagattcctttctaccatggaggattgcattctgtgttctatgttatattcagaatgggaaagattctttgggacaagacactaattcactgaaatgtgatttagg

SEQ ID NO: 497268 - DNA, 528 bp, Homo sapiens
gagtacattgggggtgtgtgatggccacacracatcacagatgatgctaataggatcatttggttaaggtcacatttgcaagtttctctcctgtcaagttactctttcctccttttcttcagaattaagtcactaattccagcccatcctcaaaatcatgaagggttaagctctacttcctagaggtgatgtcgtccacatgtgttatttggaattcttctgtaagggagacgtgccccttctttcccatgtacttatgtattgaatcatttatttatatcagtacaggcttatgtagaaaagaactattttaaaccattggcacgatcctatccacatgtaaacagatgctgatttactaagtggttaagaactaagcattaactgaaatgcttcttaaggtgacagcaggaccagtctggctgtcccagcaggttccaggcctcagcagggccaccctctgcactctgctcctggggtcttggggctgagttctcagtggctgccttcactgcacatcctggccca

SEQ ID NO: 497269 - DNA, 528 bp, Homo sapiens
tatagttggatgcctcaagtacctctagtctcttgctttcttgaaycctctcaaatcaaaattttgtcctaagcaattcaacacatattagatttatcaaaacttgtcacaggtaccaaaatccccgggtacctcagaatgtgtgttggattaatgattctttacccccgacataatatcaaatacttcagaattttcttctcatctttatattattgtcattcacttatttgccttattccactataaactcattgaggacaagaattagacctcacccagctatctgtatctactaagatatttagttaagtatcgttttgcacactactattgtaatcgctatcaatatagctaatatttattgaattcttaggataagctaagcactattcttagtactttcaataattgattcagataatcttcataataaccctagaaagtagatgtactattatccacacttcattatatcaggtgaagaagatggagcatgaaaaaaataagtaattttccagaggtcac

SEQ ID NO: 497270 - DNA, 684 bp, Homo sapiens
atttctttctctgaactggatcagtcactcatcattaaattatatgattctatctcccatcttaagtagaacaaacatctgaacaccacattttttctccattacccttatttttctgcttcccattgttgcaaaattccttgataaaatggtttatagttggatgcctcaagtacctctagtctcttgctttcttgaaccctctcaaatcaaaattttgtcctaagcaattcaacacatattagatttatcaaaacttgtcacaggtaccaaaatccccgggtacctcagaatgtgtgttggattaatgattctttacccccgacataatatcaaatacttcagaattttcttctcatctttatattattgtcattcacttatttgccttattccactataaactcattgaggacaagaattagacctcacccagctatctgtatctactaagatatttagytaagtatcgttttgcacactactattgtaatcgctatcaatatagctaatatttattgaattcttaggataagctaagcactattcttagtactttcaataattgattcagataatcttcataataaccctagaaagtagatgtactattatccacacttcattatatcaggtgaagaagatggagcatgaaaaaaataagtaattttccagaggtcacac

SEQ ID NO: 497271 - DNA, 684 bp, Homo sapiens
atttctttctctgaactggatcagtcactcatcattaaattatatgattctatctcccatcttaagtagaacaaacatctgaacaccacattttttctccattacccttatttttctgcttcccattgttgcaaaattccttgataaaatggtttatagttggatgcctcaagtacctctagtctcttgctttcttgaaccctctcaaatcaaaattttgtcctaagcaattcaacacatattagatttatcaaaacttgtcacaggtaccaaaatccccgggtacctcagaatgtgtgttggattaatgattctttacccccgacataatatcaaatacttcagaattttcttctcatctttatattattgtcattcacttatttgccttattccactataaactcattgaggacaagaattagacctcacccagctatctgtatctactaagatatttagttaagtatcgttttgcacactactattgtaatcgctatcaatatagctaatatttattgaattcttaggataagctaagcactattctyagtactttcaataattgattcagataatcttcataataaccctagaaagtagatgtactattatccacacttcattatatcaggtgaagaagatggagcatgaaaaaaataagtaattttccagaggtcacac

SEQ ID NO: 497272 - DNA, 627 bp, Homo sapiens
aaaatctgacccaggcgatctaactcctaagcctgcattgagaataaattatgtactgaaattatcaatcaaatacacttaataggctaagggcatgccattgctatacttyaaagaatatctgtaaaattcaatgtaattggagtggagcttcttttctttcttttttattttttttcaagatggagtcttgctctgttgcccaggctggagtgcagtggtgcaacctcggctcactgcagcctccgcctcctgggttcaagcaattctcctgcctcagcctcccgagtagctgggattacaggcatgtaccaccacaccaagctaatttttgtattcttagtagagacggggtttcaccatgttggccaggctgttcttgaactcttgacctcgtgattcccccaccttggcctcccaaagtgctgggattacaggcatgagccaccgcacctggcccggtttattttcataataaaattaagtttaacaatattggtttcaaatttcagaatatttttcttcttttattttatttatattttctaaatataatagaatatactttaatactgtagataatagaaaaagaataaaatatttgatttggagtgaaaaaggagaaca

SEQ ID NO: 497273 - DNA, 594 bp, Homo sapiens
gggctatattagtttatatcaatgcatggttactggcagaatttgagatgaatgagagaaaaaataaacatttggaaaatttgatttcaaatataatgcctataagtcctggaaatgtcctattaattctattacaatcttagttttcagaagagtgtactatagtattagttatatttctctctaatgatttgtaaagttaagtaaccaatatctatttttgtcatgattcagataatgcccttgagattgatatgtatacttactcccatcttgctgatggaacttgagaccaatttaagtattcttccaggacttaaataaattaatggcaggaccaggaagattgcagaataattgtctcctacwgcagaccaagccccaagtcttacacacacccctgaggtcataatgctacctttgttgtcactgccacgtcttgcaaatgtttccaccatcacatgcatggagatggcttgatgccatgaggtgagtgcaaaccagatgcaaatagcaagttaacctaggtcatagtttggtttgttaggagctgagaattccttgccaatccaaaatgcagaacttatggttcag

SEQ ID NO: 497274 - DNA, 413 bp, Homo sapiens
tgccttaaattcaaacaagtgcctggcaagcaggacagaccaccagttgggctggggagaggggaaaccaaccaggttctataaaacgcactttgaggctgggcttggtggctcagcctgtaatcccagcactctrggaggccaaggtgggcacatcacgagatcaggagattgagaccatcctggctacagtgagccgagactgtgctactgcactccagcctgggtgacagagggaaactacgtctcaaaaaaaaaaaagcactttgattttctctgcacacatagaaagtggtattattatccagtgcatttggggaaatggaaagatctgattgcagccagagaccaccttggagcttgcaccactctaggccccacctggccatacagaagccccagaagatcaaagc

SEQ ID NO: 497275 - DNA, 413 bp, Homo sapiens
tgccttaaattcaaacaagtgcctggcaagcaggacagaccaccagttgggctggggagaggggaaaccaaccaggttctataaaacgcactttgaggctgggcttggtggctcagcctgtaatcccagcactctaggaggccraggtgggcacatcacgagatcaggagattgagaccatcctggctacagtgagccgagactgtgctactgcactccagcctgggtgacagagggaaactacgtctcaaaaaaaaaaaagcactttgattttctctgcacacatagaaagtggtattattatccagtgcatttggggaaatggaaagatctgattgcagccagagaccaccttggagcttgcaccactctaggccccacctggccatacagaagccccagaagatcaaagc

SEQ ID NO: 497276 - DNA, 531 bp, Homo sapiens
gccaccgcctccagcacacccggtctcccccggcagtggtcagccaggaatgcccctgagggccaagccctgaagatctgtgacctcctgcaccctgactcaagtckactcgtgtaggcactagttttctgtagctttctcaccatccagtgctctcccctggaatgcaaactgaaccagagaaggaagcctggggagcttctgcctaagatcttaaatgaagaattaatatttctctaacagcagccagttggagggagtgtagctaacttagaatgagtgaaagaacaaccataaaatcaaacctcagattacagttcatccgtcacttttggaaacaaaaaacaaaaaacactgcttacattaaaaaacttttggccaggcgcggtgactcatgcctgtaatcccagcactttgggaggctgaggcgggcagatcacgaggtcaggagatcgagaccatcctggctaacccagtgaaaaccagtctctactaaaaataccgaagattagggcgggcgcctgtagtccc

SEQ ID NO: 497277 - DNA, 644 bp, Homo sapiens
ctgtaactatttaatatatcccttctgaattaagggcaataagtcttttatgtaatacaataatttacatatttctaaagtacgcttccttttatacaggaaatgattgctccatgttaataaaatacacggtcttcaaagactttctctgctatcgaatgatattgaggtaggctggtgcaagctcctcaagtccttcttggttatgcagacaaaaaaatttracataaaatcctggcttacaaactgtctattaaattaagtgcaacaaatgtttattttatatcttctttgcattagggcattgtgctaagcacacgctcatgaatacagcattccacccttgcatggatgtgatctaagaggtaaaagttttacctaagagagactctgtatatatttagacagagttttagtaaaatattgtatatgagatcgagaccatcctggctaacatgatgaaaccccgtctctactaaaaacacaaaaaactagccgggcgtggtggcaggtgcctgtagtcccagctactcgggaggctgaggggggagaatggcgtgaacccaggaggcagagcttgcagtgagccgaaattgcgccagtgcactccagcctgggcgacagagcgagactccgtctcaaaa

SEQ ID NO: 497278 - DNA, 644 bp, Homo sapiens
ctgtaactatttaatatatcccttctgaattaagggcaataagtcttttatgtaatacaataatttacatatttctaaagtacgcttccttttatacaggaaatgattgctccatgttaataaaatacacggtcttcaaagactttctctgctatcgaatgatattgaggtaggctggtgcaagctcctcaagtccttcttggttatgcagacaaaaaaatttaacataaaatcctggcttacaaactgtctattaaattaagtgcaacaaatgtttattttatatcttctttgcattagggcattgtgctaagcacacgctcatgaatacagcattccacccttgcatggatgtgatctaagaggtaaaagttttacctaagagagactctgtatatatttagacagagttttagtaaaatattgtatatgagatcgagaccatcctggctaacatgatgaaaccccgtctctactaaaaacacaaaaaaytagccgggcgtggtggcaggtgcctgtagtcccagctactcgggaggctgaggggggagaatggcgtgaacccaggaggcagagcttgcagtgagccgaaattgcgccagtgcactccagcctgggcgacagagcgagactccgtctcaaaa

SEQ ID NO: 497279 - DNA, 598 bp, Homo sapiens
gaactgctgcactctgtgggctctgtgtaaagccatccagaaatgcaccactgattctcgcaacgttcagtttttttttccaagcagactgtaatcaactatattagcatgacaacaaattctttatgttgtgagattctactgatcctcaaaactgccactgaattagaattatttccagatgctctgttcaatgaaagagtcttaaaaataatgcaaaacgatggtgatcccaggctacactggcaacaggttaaatacgcaatcgtagcccttctcccatccattctgcatctcccctccrcttgcctgcagcttttcctggtcactcacggccctccctcggctccccacagcctcatactcacaactggcattttccttccacactttctcaattgtcccttaacactcctgtgaggggacaaccctaaagcctgggatcccaggagctgcacgcagggctcgctccttgctccttggtgtagagttcatggccaagcttcctccagtctctgtaggtgtgatgtttccccatcaacagtcccatcacttcaggtgactttatttcatgttgctctagaccaggcatttttgc

SEQ ID NO: 497280 - DNA, 598 bp, Homo sapiens
gaactgctgcactctgtgggctctgtgtaaagccatccagaaatgcaccactgattctcgcaacgttcagtttttttttccaagcagactgtaatcaactatattagcatgacaacaaattctttatgttgtgagattctactgatcctcaaaactgccactgaattagaattatttccagatgctctgttcaatgaaagagtcttaaaaataatgcaaaacgatggtgatcccaggctacactggcaacaggttaaatacgcaatcgtagcccttctcccatccattctgcatctcccctccgcttgcctgcagcttttcctggtcactcacggccctccctcggctccccacagcctcatactcacaactggcattttccttccacactttctcaattgtcccttaacactcctgtgaggggacaaccctaaagcctgggaycccaggagctgcacgcagggctcgctccttgctccttggtgtagagttcatggccaagcttcctccagtctctgtaggtgtgatgtttccccatcaacagtcccatcacttcaggtgactttatttcatgttgctctagaccaggcatttttgc

SEQ ID NO: 497281 - DNA, 581 bp, Homo sapiens
tgtacacataccccaaaaaagatgtttactgaagttctaatagctaaaaatttcttaatagctaaaaattgaaaaaaagtcctaaatatccaaaaaatatgtaatacttagccggacaatggaatactatgcagagattagaaagtagtagtaaaggtgtctctcctataatactgtatgtgcagtcttaaacaccatgcattctgggagaaaaaaaaacactaaaataccacttattatgtgaaaacttcaaaatcaaacactaaaaataccagtgactatataaaaaatagagtttgcagaccactcaatttatgcaaaaacctatgcagtttgggacctcaacactataaacgaaaacaaataataactagaacctacatagataggcaataacttagactgcccaagcagtcatgactgaagaattcttcagtagctattaaaaatgtaaaacaaaaaacaattaagtgggaatgttggttggcttatggatgctgagacagtgaaagtgagcaccagsatttaagagccctcaatgccagaactgtaaactttgaggaagatacccttagagatac

SEQ ID NO: 497282 - DNA, 329 bp, Homo sapiens
agtgccccagcagtagtgttggaattaggctctctcctcttgcaggactgtagtgggaagagwgttgctaaagcagaggtttctcaaggatggtgagacttgcagccaagaacatctttgcaacctggaactggtctgtgtgtgtcattgctgggtgtcccagcctactcccttggtcagttgacagagtactccatcagctccaagaaacaggagggaggtgaaccccattcctcaggagacctaaactttggtggggaccagccctaagggaaggaggaatacagcttgccaaacccaccccttggataaaaggaaacacgatcatg

SEQ ID NO: 497283 - DNA, 329 bp, Homo sapiens
agtgccccagcagtagtgttggaattaggctctctcctcttgcaggactgtagtgggaagagagttsctaaagcagaggtttctcaaggatggtgagacttgcagccaagaacatctttgcaacctggaactggtctgtgtgtgtcattgctgggtgtcccagcctactcccttggtcagttgacagagtactccatcagctccaagaaacaggagggaggtgaaccccattcctcaggagacctaaactttggtggggaccagccctaagggaaggaggaatacagcttgccaaacccaccccttggataaaaggaaacacgatcatg

SEQ ID NO: 497284 - DNA, 219 bp, Homo sapiens
tctttgcaacctggaactggtctgtgtgtgtcattgctggktgtcccagcctactcccttggtcagttgacagagtactccatcagctccaagaaacaggagggaggtgaaccccattcctcaggagacctaaactttggtggggaccagccctaagggaaggaggaatacagcttgccaaacccaccccttggataaaaggaaacacgatcatgacat

SEQ ID NO: 497285 - DNA, 219 bp, Homo sapiens
tctttgcaacctggaactggtctgtgtgtgtcattgctgggtgtcccagcctactcccttggtcagttgacagagtactccatcagctccaagaaacaggagggaggtgaacccyattcctcaggagacctaaactttggtggggaccagccctaagggaaggaggaatacagcttgccaaacccaccccttggataaaaggaaacacgatcatgacat

SEQ ID NO: 497286 - DNA, 583 bp, Homo sapiens
atgaaagtaagaggtgagcctgcaaggcggtggaggcgggggatctcagagggcgagcaagcgatggcggtcgggggatgtgtcggctgaggtatcaaaaataggggacccagttttcagccccaacacaccccctaatcctcagccgcagccagcctctgggtggggttgcgcctgtcaaagcttccgaatggagagaagcccaaggctacggaaggcatcagctccaactccaggaagggaataaggctctgtgcatacgaatggggctttgaaaggcgttgccgcggcttccaaagcgatgcgctgtgcctcgcctcgcctcgccccgccccgcccagagcgagactccgtctgaaaataagtacacaaataaatcataagataattcatcaataaatgaaagamagaaagaaagaaggaaagaaagaaagaaagaaagaaagaaagaaaggatcagtagagcgatggtggtcgtgaatcattccccggagtccaggcgcagtggctcacgcccgtcacgccggcactttgagacgccgggcaggagggttgcaaagaaatgatgagaccccgtctgtgg

SEQ ID NO: 497287 - DNA, 583 bp, Homo sapiens
atgaaagtaagaggtgagcctgcaaggcggtggaggcgggggatctcagagggcgagcaagcgatggcggtcgggggatgtgtcggctgaggtatcaaaaataggggacccagttttcagccccaacacaccccctaatcctcagccgcagccagcctctgggtggggttgcgcctgtcaaagcttccgaatggagagaagcccaaggctacggaaggcatcagctccaactccaggaagggaataaggctctgtgcatacgaatggggctttgaaaggcgttgccgcggcttccaaagcgatgcgctgtgcctcgcctcgcctcgccccgccccgcccagagcgagactccgtctgaaaataagtacacaaataaatcataagataattcatcaataaatgaaagacagaaagaaagaargaaagaaagaaagaaagaaagaaagaaagaaaggatcagtagagcgatggtggtcgtgaatcattccccggagtccaggcgcagtggctcacgcccgtcacgccggcactttgagacgccgggcaggagggttgcaaagaaatgatgagaccccgtctgtgg

SEQ ID NO: 497288 - DNA, 624 bp, Homo sapiens
aaaattaaattactttcccaaagtatttcttaattttcatgcagatgccactaaaaattctaagacagaaaaagttgttagctgcactttaaatatgagaaaatctctgtgtggaaaggggaagggaagagggtgaaattacttttactttaaaattaaacataggggtatttgtttygcaggatacacatctggagaataagtacctaaggggaaaacagtttcatagttcaaattttgaacatttttagtgtcaaacttttggatcaatgtaatctactaaggaatataaaaatggaattaaaaatgaaatgtgaaaatctggcacctccacaagaaaagaatcaatcctgtgcccatctcaagcttgtttcagagaatgagacttcccaacaattttatagatgcagtgagatctttcgtaacagtacctctctgatgtccttccaatttcatacccccttcccttctccagagcagcatattctagaaatctctaagatgctgctttgtttttctgtatcctcttaagtttaataactgaggcctgagaattaagtggacaaaagacaaattaacagggaaaaaagtgaatccatttgcatacaggagccaacaaaagaa

SEQ ID NO: 497289 - DNA, 526 bp, Homo sapiens
tactgtatccctgggtctcactggtggagcacattcagtgatcctgccactcctgcaaaggtcataaatttctggttttctgacattttcctgacaatagtggattttttcctttttcctttctctggctgcagtgggtctttgcctgtgttctggggttgacagttcttgttgccttttgcccaacagcctaaggcttttgttccacaggggagaaggatctgggtggagctttatgccttctgtatcaccatgtttcccatttgacttctaagttcccagtgatgtcaactgaaaataaccattaattggtataaactccccttgtgtctgagtctcccaggggttccatattctcacactttcccacacttggcctttagcaagttattaaaacttttagtttaaatcttacttgtaaggctcataaggcctgacktggtgaagaaagtagaatgatttccttaatctaggcaaagttctgtccatatcaagcctttctctgatttctagaagcctacctttc

SEQ ID NO: 497290 - DNA, 586 bp, Homo sapiens
tcaaggaatgcattgccaaactggggccaaaagcctaaaaagagggcatttcaataaaggaaggtctatgttctgaaaggaataayaggatactttgttaagtgaatggtggtcagaaaaccccttcctggagaagacgattcctgaaccaaagctgtaaggccgagtagacaaatggcattggtgaattaaggttatgtcctaaataagcacgttttcccccaggaaaattctagacacttttgttcctagcatcaggttaagaatgctatttcttcagagtcaataataaatgagtactttttttaaaaaattcaagttgatgtatgaaaacgttatcttacttggagttttaatatgcaaatacagaacttttaacattagtggtgacattgccttaggagagtctgaagaaaaactaaggctgcaatcataaggcaagcagattataaccctgtggaggctggcaaccaaggagcaagagatctgagaatgttctttctaaatccaacatcttacacaagtcttgtggcttaaagttatctagtgaagattagcaaagtggatccaataatgagcttttgtt

SEQ ID NO: 497291 - DNA, 580 bp, Homo sapiens
ttttccaactcagtgtattttataatgatatccrtcatgactgtctgtcagcttatggcagcttaaaaaattgcctcaaggccagtaatgagaagaaatctttcccacttcctgtagattgttttgtgtgcttcacagttttctgcaccaaataataaaaaataacattgctttcaaaactgttctttagtttgcctctttatcttttcctttttaatcctttatagtttatttccctttgctttactgtgtttattctactgcgttttgttcataattaacaagacatagaaggcaagaatatattctccaaatggaaagtttttttaaaagccttaatttagctatcctttaatcccacaaaaaggaaactatctgaagtttatagtaagagagtccacactttaataactgttctttgaaacagagaaatcaatacttgctagcgatgagggtggacacttcatgagctgagttctcatgaacctgcaagctaactttaatatgaaaagaaacctgtaagtttctcagtgcaattatattagcacctggaagtgccgataagtcttggaaaggtcaa

SEQ ID NO: 497292 - DNA, 515 bp, Homo sapiens
agtaagactgtaatatggcaggaaggttgcctctgtgctattttgttttgttttgttttgttttgttttggttctgaggtaaaatttaatgaggggaaaaaatgcaggggagtgacaaaatatatgactgatatttttctttacagtgttcctttttccttccactccatcctgtaagtggctgctcacagagagaaagagagaaaatttaatgacctatggcaacagatgcctgctttcctakgcaattctcagttgataaagtgatagcaaacctgaggagtaaatagcatttttatttaactaatctataattgagggcacttataacagctttgaaggaaaggcaatcctctttggacaaggatgatatatgggtggatgaaaattgttttataattttttaaaatagatggaccacgtaatatctggggcacatgcaaagaaccttaacagagttcattcttgtgtctcttatggtattcaatattcttatatttaaactgattaatata

SEQ ID NO: 497293 - DNA, 515 bp, Homo sapiens
agtaagactgtaatatggcaggaaggttgcctctgtgctattttgttttgttttgttttgttttgttttggttctgaggtaaaatttaatgaggggaaaaaatgcaggggagtgacaaaatatatgactgatatttttctttacagtgttcctttttccttccactccatcctgtaagtggctgctcacagagagaaagagagaaaatttaatgacctatggcaacagatgcctgctttcctatgcaattctcagttgataaagtgatagcaaacctgaggagtaaatagcatttttatttaactaatctakaattgagggcacttataacagctttgaaggaaaggcaatcctctttggacaaggatgatatatgggtggatgaaaattgttttataattttttaaaatagatggaccacgtaatatctggggcacatgcaaagaaccttaacagagttcattcttgtgtctcttatggtattcaatattcttatatttaaactgattaatata

SEQ ID NO: 497294 - DNA, 671 bp, Homo sapiens
ggttacaggttggcatttgccttatttgaacacactttgaacactcagcagtgtatgagtggttgaagtatggctgctgagattggccaagacttagctattgttataggcacgtactcctaaattagsttttcaattttatctgcctgttaagttaggttatggtttgtccacaaatattcaaatacagaagtacagagtccttctcaggctatatttaattcgctttaactccccaaaagatcatactatgacatatgaatgcctacaccacaatacacaacatgatctggaagtcaaagaaatcagcaaagattgtaactttttgccctctggcatacagatacaaagccaggaatattaacctgccctgtgagcaaatattattgtcatgattattatattattgtcaataatcattatatatattaagaattataactgatatcaatgaaaatatggtataagacattgtgtttaccttccaaaaacccctccacccacttttattgctttgcagctttatgattttggtgggaatgaccccagccctatctagaaggttgagtaatgatgtgtctacattcagggaaattccatcaatcttacaagagtatttcaaacatagcaacccaggcataagctaatcagcataggacatttcattggct

SEQ ID NO: 497295 - DNA, 671 bp, Homo sapiens
ggttacaggttggcatttgccttatttgaacacactttgaacactcagcagtgtatgagtggttgaagtatggctgctgagattggccaagacttagctattgttataggcacgtactcctaaattaggttttcaattttatctgcctgttaagttaggttatggtttgtccacaaatattcaaatacagaagtacagagtccttctcaggctatatttaattcgctttaactccccaaaagatcatactatgacatatgaatgcctacaccacaatacacaacatgatctggaagtcaaagaaatcagcraagattgtaactttttgccctctggcatacagatacaaagccaggaatattaacctgccctgtgagcaaatattattgtcatgattattatattattgtcaataatcattatatatattaagaattataactgatatcaatgaaaatatggtataagacattgtgtttaccttccaaaaacccctccacccacttttattgctttgcagctttatgattttggtgggaatgaccccagccctatctagaaggttgagtaatgatgtgtctacattcagggaaattccatcaatcttacaagagtatttcaaacatagcaacccaggcataagctaatcagcataggacatttcattggct

SEQ ID NO: 497296 - DNA, 671 bp, Homo sapiens
ggttacaggttggcatttgccttatttgaacacactttgaacactcagcagtgtatgagtggttgaagtatggctgctgagattggccaagacttagctattgttataggcacgtactcctaaattaggttttcaattttatctgcctgttaagttaggttatggtttgtccacaaatattcaaatacagaagtacagagtccttctcaggctatatttaattcgctttaactccccaaaagatcatactatgacatatgaatgcctacaccacaatacacaacatgatctggaagtcaaagaaatcagcaaagattgtaactttttgccctctggcatacagatacaaagccaggaatattaacctgccctgtgagcaaatattattgtcatgattattatattattgtcaataatcattatatatattaagaattataactgatatcaatgaaaatatggtataagacattgtgtttaccttccaaaaacccctccacmcacttttattgctttgcagctttatgattttggtgggaatgaccccagccctatctagaaggttgagtaatgatgtgtctacattcagggaaattccatcaatcttacaagagtatttcaaacatagcaacccaggcataagctaatcagcataggacatttcattggct

SEQ ID NO: 497297 - DNA, 621 bp, Homo sapiens
ttacagcagtcacagaattggttaaytggcaaaagttaacattcagtatattcaaactacctcttcacttcctatctacccttctgcctctgttttctcagccaacattgttcctggattctcctcctttcaccatctatggtattcatagaggcaagaggcagagaaattctaggcagacaggggtcggtccctggaaaaactccaccttcaagatgaaaagcctgaaatccacagcccaaagtgacaacttccatccctatgtgcccgttctctcccaattggttctttctgaataatgtctttttaccaactgaatgctgccttttccaaaactacctacggctctccctgttttccatcctgagcctataaagaccccagattcagctggtagagatgagaagtggccggatgtcagggagagacaagacttcagaagagagaggaagagaggcagcttgacttcaggggagagtgaccttcccttttcatcccctttccagctcccctatccactgagagaaactttcatcaccaataaaattctatgcattcaccatccttcaattcatccatgtgacctcattcctcttgggcaccagacaagaattcaggatg

SEQ ID NO: 497298 - DNA, 621 bp, Homo sapiens
ttacagcagtcacagaattggttaattggcaaaagttaacattcagtatattcaaactacctcttcacttcctatctacccttctgcctctgttttctcagccaacrttgttcctggattctcctcctttcaccatctatggtattcatagaggcaagaggcagagaaattctaggcagacaggggtcggtccctggaaaaactccaccttcaagatgaaaagcctgaaatccacagcccaaagtgacaacttccatccctatgtgcccgttctctcccaattggttctttctgaataatgtctttttaccaactgaatgctgccttttccaaaactacctacggctctccctgttttccatcctgagcctataaagaccccagattcagctggtagagatgagaagtggccggatgtcagggagagacaagacttcagaagagagaggaagagaggcagcttgacttcaggggagagtgaccttcccttttcatcccctttccagctcccctatccactgagagaaactttcatcaccaataaaattctatgcattcaccatccttcaattcatccatgtgacctcattcctcttgggcaccagacaagaattcaggatg

SEQ ID NO: 497299 - DNA, 616 bp, Homo sapiens
tttcaattgagcaatgtgttttatttgtgttatctacagcatgctaaagttagaatttttctaatttcaaaaccagcctttttctactctttttacgccaatcattttttaagtgtgtcatgttggaaaattttgatgaaagatagaaaaagatagtgtcctatttctggccttaatagatacatctcaatggaattccaattttgcaataaacttttgtcatagtagaatgtaaagaagtcattaaaaacatactgttaataactttaatgcagcacctaagaatgtaccttctttgtgactatgagcttcagggacagtgtgstggaaaggagaacaagctctgtagtgagcctacctgaacttttatctgaccctgccatgacctacctctgtaacctttaacttctctggacctctctttcctcatctgacagtcataagactgttgggagcattagttgagctagtatgtgttaccagtcaggatatgttagagaatgctgagaagcaatccaacatctctatggcttagcacaacaaaggtttgcttctcatttacacaaagtcatctgtgggttgggaaaggactcctcagcaactgacctccatgcag

SEQ ID NO: 497300 - DNA, 600 bp, Homo sapiens
tataataatgacagtaactacactcttatgtgacatgacctgtaattgagcattctaggtaaatgcatattttgactagctgaaagtgtcatttgtataaacaaaggattacaaatgcacacagaaatagaatatcagagatcctcagcctggcttgtgcaaggagtgttaagtcatacctgattttcacacagggtaaaaaaatgaggtgcttatttctaaccaagaaacagatgcctaacttgttcttttaaatagaaatgaccacamacattttaatcaactgtaaatgatatacttgtatactgtgcaacttaaaaccttctaaagtgaatgtatgtcacttgagccatgcagtatagaaatcaatcatatacattgtctgattatttaactgaaaatccccagataagagcattcgtaggacaacagagaagccatgagactctaaggacacatgaaacacctcgagtccactcaccccaaaagtgaggttatgacttgagtggcagttggaggaattccaagaaaggctaagctttagtgggaaaacagagagacccacaaagggaggtacctgttgtgggggacaccagaacc

SEQ ID NO: 497301 - DNA, 621 bp, Homo sapiens
gcacccagctcatccatctgcctgcccccagtcttgttgggagcatccagtcacacagacccctgcctctcctggcgactctgtgtggagggatacgtgctagcatatgtgtacatacttcctaatagcaggaaataatggcttgaaaaattcaaaagtcacagagagggttaygtaggggcttctatactccaatagactaggctgaccaaagggtagaggattccacacatggtttcaggccttcttttcctttatcactctgcatcatttctatgaattctttaaaaccctttttagtagaattctctgcttcttgtttctctgcaatccatattacctgcctcagattgatggtgtctgtgagatttgggtccctcgcaaggtctcaatctaagtcctggatataatttcaagactttgcttcagcctaatcttgtgacacgtggccttctacaaacttcttcagtatatgcatgcacatgtacctgatgtggatcctaaattcaaacccacttggtgagcatccccctttctgtctcactattctacagacctcctgtcttgagaattctgaccctgctcatcccagccatgggctatcagtcaccacttataaat

SEQ ID NO: 497302 - DNA, 621 bp, Homo sapiens
gcacccagctcatccatctgcctgcccccagtcttgttgggagcatccagtcacacagacccctgcctctcctggcgactctgtgtggagggatacgtgctagcatatgtgtacatacttcctaatagcaggaaataatggcttgaaaaattcaaaagtcacagagagggttatgtaggggctyctatactccaatagactaggctgaccaaagggtagaggattccacacatggtttcaggccttcttttcctttatcactctgcatcatttctatgaattctttaaaaccctttttagtagaattctctgcttcttgtttctctgcaatccatattacctgcctcagattgatggtgtctgtgagatttgggtccctcgcaaggtctcaatctaagtcctggatataatttcaagactttgcttcagcctaatcttgtgacacgtggccttctacaaacttcttcagtatatgcatgcacatgtacctgatgtggatcctaaattcaaacccacttggtgagcatccccctttctgtctcactattctacagacctcctgtcttgagaattctgaccctgctcatcccagccatgggctatcagtcaccacttataaat

SEQ ID NO: 497303 - DNA, 621 bp, Homo sapiens
gcacccagctcatccatctgcctgcccccagtcttgttgggagcatccagtcacacagacccctgcctctcctggcgactctgtgtggagggatacgtgctagcatatgtgtacatacttcctaatagcaggaaataatggcttgaaaaattcaaaagtcacagagagggttatgtaggggcttctatactccaatagactaggctgaccaaagggtagaggattccacacatggtttcaggccttcttttcctttatcactctgcatcatttctatgaattctttaaaaccctttttagtagaattctctgcttcttgtttctctgcaatccatattacctgcctcagattgatggtgtctgtgagatttgggtccctcgcaaggtctcaatctaagtcctggatataatttcaagactttgcttcagccyaatcttgtgacacgtggccttctacaaacttcttcagtatatgcatgcacatgtacctgatgtggatcctaaattcaaacccacttggtgagcatccccctttctgtctcactattctacagacctcctgtcttgagaattctgaccctgctcatcccagccatgggctatcagtcaccacttataaat

SEQ ID NO: 497304 - DNA, 515 bp, Homo sapiens
tggaatgaccatgatgtctggaggtggctccatgaacggtgcttcattcctctgttctattgcttaatttgctagaaaattactaattatccttgaagacctaattccattcattcattcacttgttcattccacaaatatttgagagaaattattataggctgtagaccattctatacactattggggatacaatggttaaaaattgtgtatacacacacacacatatatatgtactatatatatatatatgcaatcatgtgtatcatgtatatatatatttgcaatcatgtktatattccctaggaaactttccccaccactccctccacctctaggctgatgacaccatgcattatgtccacagcacagaatttattcatttacttttccaataacatgctgacaaccctatatgtatatatccagtccattcctctccacaccatccttttcaagtctaagtgagatcatgttacttttctacccagagccctacaaaagttccctagttt

SEQ ID NO: 497305 - DNA, 583 bp, Homo sapiens
catttgaaccacaggccctacatttttattttatactaagccttacacattatacataatataattggctgactgggccaaatataataaggcttatctctatatctgttcaataggaagcataattttgatcatctttccaggcatgaaggtctgaaatggctctccattgcctaccaatgtcaaatagtagtaaatgtcaaaccttttagcctgccatttaatattttccatgatagggttccaatctatgtttccatatttagtttacatgatttcactcttgcatttatttaatgaagatgtgtttattgagacttaccatatgtcaggtactctaggtcccccactaagtgggaacaaaagaggtttgaccttgtcmtatgtcacccccgttagaggtaaactatataacttgccatttcccaaacactccttgctttttgttgtccttgcttttgccagttatgcacgtgtactgctggtttgttctcaggtttattcacacccttatcctactttgctctgtgttagcagaagctaaattttccaagtttgcttgtgctttttggtaggtttggtc

SEQ ID NO: 497306 - DNA, 583 bp, Homo sapiens
catttgaaccacaggccctacatttttattttatactaagccttacacattatacataatataattggctgactgggccaaatataataaggcttatctctatatctgttcaataggaagcataattttgatcatctttccaggcatgaaggtctgaaatggctctccattgcctaccaatgtcaaatagtagtaaatgtcaaaccttttagcctgccatttaatattttccatgatagggttccaatctatgtttccatatttagtttacatgatttcactcttgcatttatttaatgaagatgtgtttattgagacttaccatatgtcaggtactctaggtcccccactaagtgggaacaaaagaggtttgaccttgtcatatgtcacccccgttagaggtaaactatakaacttgccatttcccaaacactccttgctttttgttgtccttgcttttgccagttatgcacgtgtactgctggtttgttctcaggtttattcacacccttatcctactttgctctgtgttagcagaagctaaattttccaagtttgcttgtgctttttggtaggtttggtc

SEQ ID NO: 497307 - DNA, 430 bp, Homo sapiens
acagaaacagaaaaccaaataccacatgttctcacttataacggcaagctaaacactgagtacttayggacataaagatgggaacagtagacattggtggctactagaagagggaagggagagaggggcaagggcttaaaaagtacctatcaggtactatgctatcagtacctgtgtgatagaatcatttatatctcaaaccttagcgtcacacaatacacccatgtaacaaatatgcacatgtgccctctcaatctaagataaaagttgaaagtattttaaaaaagaaaaaaaaatgacattatcagagactctgattaaataggaatagcattaagttttccttttatagaattaaatcaaaataattcaacagaatttttatgacagttctcattatacacacacagagagagagagagaataagag

SEQ ID NO: 497308 - DNA, 581 bp, Homo sapiens
cctgactcaaactgtctaatcagaggtaagccaacgattggctggagaagtgacaggaagtttttcccttttctctggtcttgaacctaaaggatttaagcccggatcaggtaacagccacacagagagagcctaggagttgaaaatccacataaaagctgagccacgagatggaaaagaaacatcccttggagcctccgggtcctgctaatttgaagagttgttcttggacttttcagtcacttgaggaaataaatttccccgtttcttaaaccagattctaagttttggtaactgaaagagctgtatctgatatgtacagtctataggttgactgttcagtctagtacaaagatgctcaaatatttakaatatatgtagataatgtgttaaataaaatatgaattgatataaattttttaagtgtttctattaggattttctcaacaatatatagtacaagaataactagaaaattttagcagtcccttcaaattctaaaactctatgatgtttaagagcttttgcattacataaatcaaggtataaacctgcatataaaatggtacagaggacatttg

SEQ ID NO: 497309 - DNA, 640 bp, Homo sapiens
atcttcattcttcactttgcaaggctattacctagggaattgtattcctctcctcagagaaaactcatagattggacactggacttaggagttgtagtaaaggaataatcatccctattttatataaattggtgttatatttcttaaagtactgtatctaataatattagcaygtgagtcagaaatattaaaacagaatgtatatatcactgaagtgtctacaaaaattttcatgtgttatatttatatattatttcatcttcacaacaaacctgtgaaatattataatgctcacttaacttgtagcccattagttggccatctcaattattgacagcctgatcaagtatctggagagaattaaaaaattaatcagctcaaatcaatgtctggaaaggccatatattaaaatttgtctgctctactattaagagagtcattcagttttgctctgtacctaaccctatgctcacttgaggcataactctaagaaaatgaatcataactgagtagaaaatcaactagaagtggtatggggaaaggagcaacgtgttattgatggacacattgagaggcagtggtctgatatttgaaacactaacacatttttattgtaaagaagacttggaagctcaaaatg

SEQ ID NO: 497310 - DNA, 640 bp, Homo sapiens
atcttcattcttcactttgcaaggctattacctagggaattgtattcctctcctcagagaaaactcatagattggacactggacttaggagttgtagtaaaggaataatcatccctattttatataaattggtgttatatttcttaaagtactgtatctaataatattagcatgtgagtcagaaatattaaaacagaatgtatatatcactgaagtgtctacaaaaattttcatgtgttatatttatatattatttcatcttcacaacaaacctgtgaaatattataatgctcacttaacttgtagcccattagttggccatctcaattattgacagcctgatcaagtatctggagagaattaaaaaattaatcagctcaaatcaatrtctggaaaggccatatattaaaatttgtctgctctactattaagagagtcattcagttttgctctgtacctaaccctatgctcacttgaggcataactctaagaaaatgaatcataactgagtagaaaatcaactagaagtggtatggggaaaggagcaacgtgttattgatggacacattgagaggcagtggtctgatatttgaaacactaacacatttttattgtaaagaagacttggaagctcaaaatg

SEQ ID NO: 497311 - DNA, 247 bp, Homo sapiens
actttttgtattcaagctgagagaacacaaaggcattagtaggtaattttattatcaacactggatacactttakaatcatctggaaagctttcaaaaatatattatgcccagctcctacccaatactacttcatcaggtagggatgggtgagcaagcatgggtatttgaaaagctgatgcttctactgtgcacgtagagttgagaaccctcttcctggaagtaaagagaggtaggcattatcctga

SEQ ID NO: 497312 - DNA, 247 bp, Homo sapiens
actttttgtattcaagctgagagaacacaaaggcattagtaggtaattttattatcaacactggatacactttataatcatctggaaagctttcaaaaatatattatgcccagctcctacccaatactacttcatcaggtagggatgggtgagcaagcatgggtatttgaaaagctgatgcttctactgtgcasgtagagttgagaaccctcttcctggaagtaaagagaggtaggcattatcctga

SEQ ID NO: 497313 - DNA, 538 bp, Homo sapiens
ctgggcaacaagagcaaaactctgtctcaagtaaataaataaataaataaataaataaataaataaaataaataaaataaataaataaataaataaaataaagttagagagatgagtagcctttgtaggatcattttaaaagttaagcattacaaaaattcattgaatagggcaagtatcagagggttttaagcagaaagatgtaataatggaagatcactttgatgctacctggagaatgaatcacaggggcaagagcagaagcaataatacaattttatatattatagcagtggcataggttgagatgatagtgacatgggccaaggttatgatgataaacatgacaagatgggcagattttggatatattttggggggatagctagaaggatttggtgatgaattggcgatgggggtggtaatgagacaaagaaaagaatcmcgagtgactcagaattttgacttggactatggcatagatgttgctgctgcttactaatatagggtagactaaaagtaaaagtttggtgtgcag

SEQ ID NO: 497314 - DNA, 570 bp, Homo sapiens
cacctggcacgtgggagcagttcacagggtcaatgtataatgtgcagagcttccaggtgtgtgagagccagtcactgagagctttgggcttcttcctcggtccccaagaactgaagccattgctcctcttcctcagtcagcaccagtgcttcctgggggctatatcctcaggcctgctggtaagcaaaagcctcctcaatttctctggtaccatgatgccactgaaacaagcataccaccccatttgaggactttaggagtcttttatttttaataatatagggaatggattcattttgtttatgcatcaaatatttttcttctgctccatacaaaacactacactaagtgtagaagacagtatagatttagcagccaactggaaaagagaaactgtacacaatttgcaatgtccrtaagagcaacaaagcaaataaaatgctctgaagagcaatttgtcttgggactaacaaaacaaaaatttacctgtgaagttctaataaagaggacaccaagcaatgtcataaatgaggaattgatcagttctcagattttgctgtgatcactgga

SEQ ID NO: 497315 - DNA, 593 bp, Homo sapiens
tgaatgcaacatccctctgagacaaggactcatgggcattattaayatgcaagagaaaattttaaggaacacagagatgcagaagatctttaagatcttctgaaagtctgatgtatttttgctatttcaactgtattctcaactatagatgtgatttatttgatatgctactttgtgctgggcccagtatcaagtcttcacatgatatctcatttaatcctcacactaatcctatttcacagaagaggaagcagaaacccagagaaattatgaaattttccccaggacttgcaagtgctatgagttagagccagagtgcaagtcccggtgcctgcaacctcaaaaccaagcatattcatgagctgcaagagaatcaatagatgtttcaacaaaagcaaggccagacaagacttcctcttccttttacctgcatttcaggcctccaacatctctcagagtcaatggcattaacttcaaaagtgtttcctattctactccctcggaagctgatgtcacacggagacttactcctgattttaattaggctatttagatcttataagcttctatcaatgttaaaataaaaagtcctg

SEQ ID NO: 497316 - DNA, 593 bp, Homo sapiens
tgaatgcaacatccctctgagacaaggactcatgggcattattaacatgcaagagaaaattttaaggawcacagagatgcagaagatctttaagatcttctgaaagtctgatgtatttttgctatttcaactgtattctcaactatagatgtgatttatttgatatgctactttgtgctgggcccagtatcaagtcttcacatgatatctcatttaatcctcacactaatcctatttcacagaagaggaagcagaaacccagagaaattatgaaattttccccaggacttgcaagtgctatgagttagagccagagtgcaagtcccggtgcctgcaacctcaaaaccaagcatattcatgagctgcaagagaatcaatagatgtttcaacaaaagcaaggccagacaagacttcctcttccttttacctgcatttcaggcctccaacatctctcagagtcaatggcattaacttcaaaagtgtttcctattctactccctcggaagctgatgtcacacggagacttactcctgattttaattaggctatttagatcttataagcttctatcaatgttaaaataaaaagtcctg

SEQ ID NO: 497317 - DNA, 593 bp, Homo sapiens
tgaatgcaacatccctctgagacaaggactcatgggcattattaacatgcaagagaaaattttaaggaacacagagatgcagaagatctttaagatcttctgaaagtctgatgtatttttgctatttcaactgtattctcaactatagatgtgatttatttgatatgctactttgtgctgggcccagtatcaagtcttcacrtgatatctcatttaatcctcacactaatcctatttcacagaagaggaagcagaaacccagagaaattatgaaattttccccaggacttgcaagtgctatgagttagagccagagtgcaagtcccggtgcctgcaacctcaaaaccaagcatattcatgagctgcaagagaatcaatagatgtttcaacaaaagcaaggccagacaagacttcctcttccttttacctgcatttcaggcctccaacatctctcagagtcaatggcattaacttcaaaagtgtttcctattctactccctcggaagctgatgtcacacggagacttactcctgattttaattaggctatttagatcttataagcttctatcaatgttaaaataaaaagtcctg

SEQ ID NO: 497318 - DNA, 593 bp, Homo sapiens
tgaatgcaacatccctctgagacaaggactcatgggcattattaacatgcaagagaaaattttaaggaacacagagatgcagaagatctttaagatcttctgaaagtctgatgtatttttgctatttcaactgtattctcaactatagatgtgatttatttgatatgctactttgtgctgggcccagtatcaagtcttcacatgatatctcatttaatcctcacactaatcctatttcacagaagaggaagcagaaacccagagaaattatgaaattttccccaggacttgcaagtgctatgagttagagccagagtgcaagtcccggtgcctgcaacctcaaaaccaagcatattcatgagctgcaagagaatcaatagatgtttcaacaaaagcaaggccagacmagacttcctcttccttttacctgcatttcaggcctccaacatctctcagagtcaatggcattaacttcaaaagtgtttcctattctactccctcggaagctgatgtcacacggagacttactcctgattttaattaggctatttagatcttataagcttctatcaatgttaaaataaaaagtcctg

SEQ ID NO: 497319 - DNA, 499 bp, Homo sapiens
taggacaacattagatgtgccccagaaaatttgatctgtcatcgagaaagagcaatttatattgggaggaactggtggaagctaataactacttttgaatttttccaatctggtctaaattagccctagtacttccaaggtctagctacctaatgagaacaattatttctggatttcaattcaattaaattgaagaagtattttactcatttttatttgaaattttttcattataaaagtaatatagccccattatagagaatatgaaaaatatattggaaaaaaagactgccataatcccctgccctaatgagattggtatattaatcttggtgtaactgaatagtatttaaggagcatccacagtggtagatgcagtgtggtggaacaaacaatcacagcaacaaaagcataaagtaagaggtttgcaggctggctggggaggtcctacatgkgcatgtcactcaaacattaggttggtgcaaaagtaattgtggtt

SEQ ID NO: 497320 - DNA, 499 bp, Homo sapiens
taggacaacattagatgtgccccagaaaatttgatctgtcatcgagaaagagcaatttatattgggaggaactggtggaagctaataactacttttgaatttttccaatctggtctaaattagccctagtacttccaaggtctagctacctaatgagaacaattatttctggatttcaattcaattaaattgaagaagtattttactcatttttatttgaaattttttcattataaaagtaatatagccccattatagagaatatgaaaaatatattggaaaaaaagactgccataatcccctgccctaatgagattggtatattaatcttggtgtaactgaatagtatttaaggagcatccacagtggtagatgcagtgtggtggaacaaacaatcacagcaacaaaagcataaagtaagaggtttgcaggctggctggggaggtcctacatgtgcatgtcwctcaaacattaggttggtgcaaaagtaattgtggtt

SEQ ID NO: 497321 - DNA, 621 bp, Homo sapiens
gttgcaacaactggtctcacatcatagtcgacagttccacagttctgcccatgaattcatttgaaattcctaggtgtatcacatcctatctgggtgatttattgatatctgttttgtcagagaagactagaacattctgtgcatctactatgattttattgaatgctccaacctgtccatttcaagggcatgcatcttccttggtaaagggcaaggcaaagcattaatgcattgtcgcttctatcttttctttcattcctttgtgcattccatgaatgccctcagttttttgtttttgtttttgacattctttggagtttcttacaaggtgccctttaatagatcatagaatttcagaagtaaaagaaatgttgaaaygtagtttggtccaaacaccccattctaaagatgaaaaaagctgaagttgaaagaagttctgtgacttgatctgacacattgaatggcttctgtttccattttggttgtgtgtgcttatttttttgatatttctgttaatttgaaattttgaataacttggctttccttttggaccttaaaatgttgtccttttgtaagtctctgtggtgctacaaagaggctatctcatcaacgctgttgcct

SEQ ID NO: 497322 - DNA, 486 bp, Homo sapiens
tctacctgcatctcctttgatagtgatctgtctttgctcttggtctgcttttaagtagtttctttgtcattagttttctgtagatgtgagtttctttcctttctttttaatcttgagatgatttgttgtatttcttgaatcagtcgattggtatctttcatcagttgggcaatagtctcaagaattaccttctacaacattgcctccatcacattctccatctcctctatttctggaagtccarttacatgtgtgttagaccttatcattctatcctccatgtatcttaattattttttcatatttaccatctccctgtctctttatgctgccttctgtactttttttctcactgagattttggcctgaaaattattcattcctgtgttggctcctcagtgcttttaagaatatttttaaattatattttgtgtaacatttctggtggttttcattggtatgattgttttaaatatttagtcaagc

SEQ ID NO: 497323 - DNA, 598 bp, Homo sapiens
tcacaaaagactctgcaaaaaccacaaccttgcacaaaggacatcgcaaccttacacaaaaaaatactcctgctaggacatctgcccaccaactacctgtccaacctaggtctggtgtcactcttgttattaatccttgtagccaaagataatatctcaaaactattatgtaatcttcctcatttttcctttaaaattctttgtcttcctttatctccctgaaagtgcacatagttttccatagcacgcatctccccattgcaatgcctattcccaaatataattttcttttagaaagtctccctctctgttgtttagattggcacatccatgtggcaggaaatatggctgcctacagctcctgagaactttgcctcttaaaatgtgcagtcctaggaagaaacagaacctcttaattttattctgaaatatctcagagaaggaagcaaattggtcaagttaggatcagcctccttccctagacccatcaactaaagccagagagtatggatcagcttgaatgctgttcccaccactggaccaagagttgaagytgtatacagacatggaaattccttcagaaaaaacagacaaagaa

SEQ ID NO: 497324 - DNA, 630 bp, Homo sapiens
cccaaaactgatgggattctgagtcacccaataaaagggttagagcaaaattcccaaatgcattcaatgcaacctcccaaattgaaagagccacaccaaatacagtgcctcccagtaacaggagatgtaagaaacaatacattgttctttaccttggaggcactgttcctcacawgccctatacctttcggtcacttcactgatgcattgggtgccagaagttgttaccaactcaccaccacaaacaaagttcttcccactgtttggacagtgaatgaagcagttccaccataacatcttgaggttctgcttcctatggtcacttctggaaccaagtatattagcctcgattttccccagaagtcagagcctgagaccaggtcttgcatgcggggaatttattttgggaaatgatcatagggaacaagaatggagaactgggaagagcaacctaagaaaggaagaaaaagtaactcttaaattattgagctcaccaccacagtaggtaactagggctaatcctacttgggatactatattcatttcctgggggtgctgtaatgaatcaccacaaacttagtggcttaaaacaataaaaactttttctcccacaattctggaggctagaca

SEQ ID NO: 497325 - DNA, 630 bp, Homo sapiens
cccaaaactgatgggattctgagtcacccaataaaagggttagagcaaaattcccaaatgcattcaatgcaacctcccaaattgaaagagccacaccaaatacagtgcctcccagtaacaggagatgtaagaaacaatacattgttctttaccttggaggcactgttcctcacatgccctatacctttcggtcacttcactgatgcattgggtgccagaagttgttaccaactcaccaccacaaacaragttcttcccactgtttggacagtgaatgaagcagttccaccataacatcttgaggttctgcttcctatggtcacttctggaaccaagtatattagcctcgattttccccagaagtcagagcctgagaccaggtcttgcatgcggggaatttattttgggaaatgatcatagggaacaagaatggagaactgggaagagcaacctaagaaaggaagaaaaagtaactcttaaattattgagctcaccaccacagtaggtaactagggctaatcctacttgggatactatattcatttcctgggggtgctgtaatgaatcaccacaaacttagtggcttaaaacaataaaaactttttctcccacaattctggaggctagaca

SEQ ID NO: 497326 - DNA, 630 bp, Homo sapiens
cccaaaactgatgggattctgagtcacccaataaaagggttagagcaaaattcccaaatgcattcaatgcaacctcccaaattgaaagagccacaccaaatacagtgcctcccagtaacaggagatgtaagaaacaatacattgttctttaccttggaggcactgttcctcacatgccctatacctttcggtcacttcactgatgcattgggtgccagaagttgttaccaactcaccaccacaaacaaagttcttcccactgtttggacagtgaatgaagcagttccaccataacatcttgaggttctgcttcctatggtcacttctggaaccaagtatattagcctcgattttccccagaagtcagagcctgagaccaggtcttgcatgcggggaatttattttgggaaatgatcatagggaacaagaatggagaactgggaagagcaacctaagaaaggaagaaaaastaactcttaaattattgagctcaccaccacagtaggtaactagggctaatcctacttgggatactatattcatttcctgggggtgctgtaatgaatcaccacaaacttagtggcttaaaacaataaaaactttttctcccacaattctggaggctagaca

SEQ ID NO: 497327 - DNA, 630 bp, Homo sapiens
cccaaaactgatgggattctgagtcacccaataaaagggttagagcaaaattcccaaatgcattcaatgcaacctcccaaattgaaagagccacaccaaatacagtgcctcccagtaacaggagatgtaagaaacaatacattgttctttaccttggaggcactgttcctcacatgccctatacctttcggtcacttcactgatgcattgggtgccagaagttgttaccaactcaccaccacaaacaaagttcttcccactgtttggacagtgaatgaagcagttccaccataacatcttgaggttctgcttcctatggtcacttctggaaccaagtatattagcctcgattttccccagaagtcagagcctgagaccaggtcttgcatgcggggaatttattttgggaaatgatcatagggaacaagaatggagaactgggaagagcaacctaagaaaggaagaaaaagtaactcttaaattattgagctcaccaccacagtaggtaactagggctaatcctacttgggatactatattcatttcctgggggtgctgtaaygaatcaccacaaacttagtggcttaaaacaataaaaactttttctcccacaattctggaggctagaca

SEQ ID NO: 497328 - DNA, 578 bp, Homo sapiens
gatcctctaatgacctggcttgagggtgttgccttgaaactttatgccctgtgccaaatactcctcattttctctcactagaaagcccagcacacctcaaaaggccaattggaaaggcaaactctgaaggaaaagacttacccatcacaggaggtgtgagattctgctaatttataaaagcaaaaatctggggaatacatgtggagagaaattctgagaatgctagaccaaggaaggaagaacatagccttagatgaggctgaatgtattgatatggaggcattatcaaagttctagactcaatgtgttcacttgggcagttgggagtagtattaatcatctgctttgttggctgctgaaatctasacttatgaggactggtgtaaacaataatgctagttggcatacacgtaacccctactaagtgccaagcacttttcaaagtgctgtcatacatcaaattatctaatcataataataaacctatgagacaggtagtatcatcctcatttataaaagggaaaactgaggcatatataggttaaacaactttccacatgcagcttgtaagtggtaca

SEQ ID NO: 497329 - DNA, 518 bp, Homo sapiens
gtgtgaattcaagaaaggctgtgctcactgagaagagacaccaagccaggcgttcagggagcatgagctccaggcactggaacatccgctggagaagctgaccatttgtcaccaggacgaagacttctgacttaagttctcaccggatggaagcaaccttacctgaaagggaggtggatgacaagggtcccattttgtaaaatttgagttatggaaggatccccaagggagggcctggacaggacagcacttggaacttaaggagttcgcagggaaggtagagtattactaagtcttattattacctcccctccttcctagagagaggtcccaggttgagtcacctggaattcaggtgccttttatactcagcttccatctgaccaggaactgaattacagattagatgtctagatcttccaaatcctgtttctatttaattaaggctgtcttccyatacatacaacaatttatacttggagcatggccaggcatttatataagaccccgtgatagga

SEQ ID NO: 497330 - DNA, 610 bp, Homo sapiens
cccaggactatctgattccaaagtgtgctcttagctacgacctagtactgctgtgcaggagcctcttgggacacagctgaaagtcacctccttttctgactctgctgaaagggtttttatcaagaccccctgagcagcttgtgctccctgaacctgaagcctgatcaatgactctacagtccccttgcctccatgggctgggcctaagaagatcaggctccctcttggggccttcaagctctgtttccagctcaccacctgcacagtgcyggtcctgcctgcccagcagggagggaaacacctgctaggtttttttgtccccaacctccacatgctcaactagattaggttcccatgaaatatgtatgctttctcctaaggccttggaaagtctgcatctgtccagatcagctggcctgattggcaagccaggctgaggagagccaccgtcttattccactgctttgccctttatcaagggggaagggagaggaatcctggctgcagcatctttgggattcaagggcagctcaggactagaaaggctgtccaaggacaggttctgaaggtggcagcatggaaactggattattctcaagaaaactttcag

SEQ ID NO: 497331 - DNA, 507 bp, Homo sapiens
aaaaaaaaagaaagaaaaaaaagaatcccgtttccgtcttggggcccctcagygttgcaaactcagataccctcgggcgggaatgccccagagtacagaacccacagtgggctggggaccgggggcagatcccagcgccctaccctgggcgcagtgccttccagttggacataagagaaatggggctgacccagccagtgcctgggccagcccagtcagccacgcagatgaagttttccacgcagacgttcagactctgtctgcaagaaaagctgactccagaaagttccgatttccaatctgaattttctagaatttttcagcgttcagagccttccattagtgaggagagacacccccttcctgcccacctggaggggctggaggaccgtccgtgtgacggaagggagcaccacgcccctacacagccctgtccctcaccccaggcccaggcctcctcaccgcaggcggccgctcctaggaggaccagaactgccaggcgctccc

SEQ ID NO: 497332 - DNA, 498 bp, Homo sapiens
ggtttggtgtttaatatagccttatggtggaggcctctcagacacctgccgccattaggttacacgtggccctggggctggaaggctggattcaggccttgtkgtcgggggcagctctcctgcgggcagttttttgttttgttttgtttttgaggtggagtctcactgtgtcacccaggctggagtgcagtggcgcgatctcggctcactgcgacttccacctcccggattcaagcgattctcctacctcagcctcccaagtagctgggactacaggcgcgagccaccatgcccggctgatttctgtatttttagtacagatggggtttcaccttgttggccaggctggtctcgaactcctgacctctgatgatccgcccacctccgcctcccaaggtgttaagatgacaggcgtgagccaccgcgccggccccggttgcagttttgtggagggaggaggtgcaactaggtggaaggacagagagaaagttgcaatgc

SEQ ID NO: 497333 - DNA, 498 bp, Homo sapiens
ggtttggtgtttaatatagccttatggtggaggcctctcagacacctgccgccattaggttacacgtggccctggggctggaaggctggattcaggccttgtggtcgggggcagctctcctgcsggcagttttttgttttgttttgtttttgaggtggagtctcactgtgtcacccaggctggagtgcagtggcgcgatctcggctcactgcgacttccacctcccggattcaagcgattctcctacctcagcctcccaagtagctgggactacaggcgcgagccaccatgcccggctgatttctgtatttttagtacagatggggtttcaccttgttggccaggctggtctcgaactcctgacctctgatgatccgcccacctccgcctcccaaggtgttaagatgacaggcgtgagccaccgcgccggccccggttgcagttttgtggagggaggaggtgcaactaggtggaaggacagagagaaagttgcaatgc

SEQ ID NO: 497334 - DNA, 498 bp, Homo sapiens
ggtttggtgtttaatatagccttatggtggaggcctctcagacacctgccgccattaggttacacgtggccctggggctggaaggctggattcaggccttgtggtcgggggcagctctcctgcgggcagttttttgttttgttttgtttttgaggtggagtctcactgtgtcacccaggctggagtgcagtggcgcgatctcggctcactgcgacttccacctcccggattcaagcgattctcctacctcagcctcccaagtagctgggactacaggcgcgmgccaccatgcccggctgatttctgtatttttagtacagatggggtttcaccttgttggccaggctggtctcgaactcctgacctctgatgatccgcccacctccgcctcccaaggtgttaagatgacaggcgtgagccaccgcgccggccccggttgcagttttgtggagggaggaggtgcaactaggtggaaggacagagagaaagttgcaatgc

SEQ ID NO: 497335 - DNA, 631 bp, Homo sapiens
aagcacaacattccgggcatggctgaggacctaaatagcagagttgatgtatgtttggagcccctccatgagtcttgcttaaactacagttgtaggtaagtgtggggaggcgaagatattgtgtgttgtaagggaaaatgagaaggctttttctcagaatcgtttttcagctctgaggctgatccttggtgtaamctgaggggtgttcccttctgtctaactccctcctttcccatcattttgcttcatttattttcgccttctgtgtttagtttttacactatctctttgccttccacctttattcctctaagggtggggcaattgcattttgcatgactggatgagggcaggggaagaagatcagcccatccctgggcaaccacatagcacagaagcaaggagccgtgtctctagagtcagacaccagtgagttgaatttggcttagcacatttttagctctgagatcctgggcaagtggctgtattagtctgttctcacactgctaagaaagacatagctgaaactgggtatttcataaagcaaagaggtttaattgactcacagttccacatgtctgtggaggcctcaatatcatggcagaaggtgaatgaggagcaaagtcacatc

SEQ ID NO: 497336 - DNA, 483 bp, Homo sapiens
ttcaggtgaagccctacttcctgtcctgcagaaggccagcttctcaccacgccctcacaaggcagagagaatgagcaatctttctggtgtttcttcttataaggacattgatcccctcacgagggctctgtcctcaggacctcctctaaacccgacagccttttaaaggccccaactccaaataccattgcactgggcttgaggccttcaacacacaaatttggggggaacagaaacattcagtccattacagagagataaacggtcaataaatacatggagagaagggaaagmttttccctgttgcagaaatcaagtaacattattctgatgaatgctgaagcaatggtggagttagaagttcaccatgtatcaagcattaaatttcagtccaaaagattcatctatggatttgaaaatgatttaattttcaaattcactcttgtgactcttcacaggatatttatttattttttgtttggg

SEQ ID NO: 497337 - DNA, 637 bp, Homo sapiens
agctcttacagacatatggtataccttcattgttgatgacacacttagaaagcagaggttagtgggatggacattcctagtgactatagttgatatcaaggttaaaacagayattccacctcttctactgtcccttctcaacttccattgttcccactaccaccttttaaatatgttcttcaaccagtttatcatcaaagtaatggatcaatacgatgttctttggtatgcctagatagtccaattatcttatgaggatattatgagaaagggcagaaaagatgacagagccctgggtgaaaaccacaaatgtatgttattgtctcttccacatgaatgaaatctgtctctgaacctctttcctgattaggccagtaaacaatgtattaaacaaattagtttcccatataatgtctaatatatccgaggcaatgctcatctgttcctgcaaatataccacatctggaattgtggctgtgattggtcctacaatttgactgacctggcgtggtcactggtcactttccatgtccatctatttttcctgggggccataatggaggatgaaatggaagcacaacagggttctgcaattgctgctctctgcttggaataatcttcttccaggtcttcctct

SEQ ID NO: 497338 - DNA, 592 bp, Homo sapiens
cagtctccttacagactctcatgtaaataagatgtaggtttcaccacatttgtgaatggaaaatcaattcataggtgcttctctcaggagctggatcctgagaaggaatctgggcttaggcgagaagcgtgctaggattgattagtgatgtcttcctcaggtaggtgccagggccctttgcttgtcatgtctgtctctgccattctaggttataaacccaagtccaaagccctcaggaggttctaaagccttttatatcccattctgcrcaccatgttccaatcaccaatgatacatataacacatttaggaaacactgacttagaggatttgtttctggaaaactttgcatacccagttaaaatggctctgttgaaatcctatgtagattattcataaatgtcatttgacagtgccactgagggtgtccatgtatgaggtgtcgtgactgaattgaaccccagagcagcagcgttgcctactcaccgcatatttttactataacctgacaaatagcctgagacaaaattatccgccctaaataccagcaagtaactctcagaatgcaacaggcttgttttaaccaccatca

SEQ ID NO: 497339 - DNA, 284 bp, Homo sapiens
agattataacagttatttccctgttaataaaatttgtttgtaactctttcagaatatattttaagccagcgagccggtgactttgtgtgccatgtggttaaacaagagagtaaaagcttactgccatgaaagtaaatatcccyggccggcactacttcagtaatttacctagcctaaggtcattctaaagcagtttaaatgcatcattatccacaatcctctaaaacactaaaatacttaaataaattacaatggagtaggatgagcctgaagagaggaaaaaa

SEQ ID NO: 497340 - DNA, 584 bp, Homo sapiens
acatggggaacaggtgcatcaggtgattcaaattttcttctactttgcactgtctgcaagtcactatgaaagccctccagatactggttttaggattttaaataaattacagtgagtaggtgaatttgctaatttggaatttgcaaataaagtggatcaactacaatatcagcagtcaaactatactgacatgatgggaaatatcagaaaattactcacaaatgaataaaaatttttaaaattttagaacctcatatctgtcataaaataaatgggaaaggcaatatgacagttatctatccctgatttgaaaagtgaaataaagcaaactcaaagtatactgaaacctaatttacagtgaatgaccatgtaaactcccgtagaaatattatataagaaaattttatctaccattgagtagctgtgatgatgagtatgttcacaatttattggacatgaattacayaatggaacactctgcctgtattaattattaagaactgttgtcacaaagaaacctcaaatgctagtggtttaatgaatacaagtgattttttttccttattaacataacatttcaaagc

SEQ ID NO: 497341 - DNA, 574 bp, Homo sapiens
gcccctcctggtgccattaatttatatgcttcctattaccccaagtgcaattctcaatgttatatttgttcttggggaatcatttttcctaaacagaaatcaagtgctttctccagttttacattgtcacagctccgtatccagcacccacaagtgaaaagtgctctggtcatatctgctgttccaccttcgtaatctgtcacatcaacgaactgtctgataatattagcctacttcatctaaagctcttccaaacctcacatctgaaaayaaaacttaaaacaaaaatgcacaatttaaaaaggaagatgagattgaatgtcaccaagagttttacaatctacacagaaatttggcagacatcaaaactaccagggtttcccaagaaaataatgatggtgcctctatcagtgaacacgaaagtgacaatgatgggcatctcacttatctagaaaaaaaatacaccttagatataaatggtaaaatggtagcaaagttaaccataggatgaagatgaaggtaaaggaaactttttaaaaaacataataatgaccctgagtttcatcctccaaat

SEQ ID NO: 497342 - DNA, 574 bp, Homo sapiens
gcccctcctggtgccattaatttatatgcttcctattaccccaagtgcaattctcaatgttatatttgttcttggggaatcatttttcctaaacagaaatcaagtgctttctccagttttacattgtcacagctccgtatccagcacccacaagtgaaaagtgctctggtcatatctgctgttccaccttcgtaatctgtcacatcaacgaactgtctgataatattagcctacttcatctaaagctcttccaaacctcacatctgaaaataaaacttaaaacaaaaatgcacaatttaaaaaggaagatgagattgaatgtcaccaagagttttacaatctacacagaaatttggcagacatcaaaactaccagggtttcccaagaaaataatgatggtgcctctatcagtgaacacgaaagtgacaatgatgggcatctcacttatcyagaaaaaaaatacaccttagatataaatggtaaaatggtagcaaagttaaccataggatgaagatgaaggtaaaggaaactttttaaaaaacataataatgaccctgagtttcatcctccaaat

SEQ ID NO: 497343 - DNA, 507 bp, Homo sapiens
ttctgcctgcaagtggctattcaactacaccttgccatttaacagtgtcttacacttttatttcattagtagtattatttttagagacagggcctcattctgttgcccaagctggagtgcagtggtgcaatcatggctcactgaagctttgaactcctggcctcaagcaatcctcttgcttcaacctcccaaagtgcttggattataggcatgaaccaccacaacyggcccagctttcactcataatatgggtctagtccagcagaattttactgagcacccttgattgcagacacatagaaaagtatcccaggacattcttgttgacagttctactgtggattaattgaaaatttgtatttatatgtgaaattacagatttaacatatgatagtcactttcctgtttactggtgttctaatgctgatttttaagttaattttaaatttccaactattaacgactgaaagttcaattgcagattagtattaaaaccaaggattatat

SEQ ID NO: 497344 - DNA, 507 bp, Homo sapiens
ttctgcctgcaagtggctattcaactacaccttgccatttaacagtgtcttacacttttatttcattagtagtattatttttagagacagggcctcattctgttgcccaagctggagtgcagtggtgcaatcatggctcactgaagctttgaactcctggcctcaagcaatcctcttgcttcaacctcccaaagtgcttggattataggcatgaaccaccacaactggcccagctttcactcataatatgggtctagtccagcagaattttactgagcacccttgattgcagacacatagaaaagtatcccaggacattcttgttgacagttctactgtggattaattgaaaatttgtatttatatgtgaaattacagatttaacatatgatagtcactttcctgtttactggtgttctaatgctgatttttaagttaattttaaatttccaactattaacgactraaagttcaattgcagattagtattaaaaccaaggattatat

SEQ ID NO: 497345 - DNA, 636 bp, Homo sapiens
  misc_feature (1)...(636): n = A,T,C or G
nnnnnnnnnnnnnnnnnnnnnnnnnnnnnnnnnnnnnnnnnnnnntcatcaagttactcaactatggtctccagccgcattattcttgatttttccaattctacctgactgttggatgcaaccaaaacaacaacgttaaaactcaagttagatgaaataataaagtattcagccctaaagacattctttgagaattgtctttggcaactagactgatttaatgacacaatttaaaagatygttttttccctgagggcagaatacatgttcagaaattaacaccatgtagtaagaacagaactaaaaatatgaggggaaaggtcatcaaaatagcattcgttgttcattgcatattctgggaagagctacattctctgttgaaatctaatttgcttctgacaggtgggaccacatgagaccttggttcaagttacaaaaacttctgaaacaagtgccgtattattttctgtatgggctactcaagaatttaaaaagtgaaagaagttaaacatgattcaaacacttttaaaaactactttaaaatgcaaaaatatcaagaggcattgatggatctagaaacaaaaaataaaaataaaaatgcaaaaatgtatccaaaaagggaaacatattcatgat

SEQ ID NO: 497346 - DNA, 381 bp, Homo sapiens
acccctccctcacaccttaacttcccctcaggggccttctgcccgctttgtggtacccctagcgggcccgagagggccctgagttggaaccggcgatccatggtaaccggagcccaacccagggactgatgggaaggcacttttktccgtgggggacccaggccccggttctccggggcgctttttttttttttcctgccacgggtgcctcacctcccctccctcaaagcttaccttcccctcagtggcttttgtccgctttggtgtacccctagccggcccgagacgctgcatgtgttctaagcagggacgccaggttccccgcggtgcagcacaggggctgatgggaaggaactttcgtccgtgggggacccaggaacg

SEQ ID NO: 497347 - DNA, 381 bp, Homo sapiens
acccctccctcacaccttaacttcccctcaggggccttctgcccgctttgtggtacccctagcgggcccgagagggccctgagttggaaccggcgatccatggtaaccggagcccaacccagggactgatgggaaggcacttttgtccgtgggggacccaggccccggttctccggggcgctttttttttttttcctgccacgggtgcctcacctcccctccctcaaagcttaccttcccctcagtggcttttgtccgctttggtgtacccctagccggcccgagacgctgcatgtgttctaagcagggacgccaggttccccgcggtgcagcacaggggctgatgggaaggaactttcrtccgtgggggacccaggaacg

SEQ ID NO: 497348 - DNA, 520 bp, Homo sapiens
tgacacattaacttataagcagtaagcaagcaccatccatgccgggaaattcyctcagcatcccatttaccaactgggattccctgcacctcctcacacacagccaatgattcaaaatgcactaacttagattgcctattttcacaaacgccagctcccttggaccactgaatggccaaggggaagaactaggggagttcccatctgaagatatggaaagtccccgagctcccagtctggtctctgcaccaaaaaatggcatgcttttgctttcggatcctgttcgtgaagccaaaaatgttctgcgcaggaaatgctcaaggagagaaggaaacacacacacacacacacacacacacacacacacacacacacaatacctttaagggtaaacaaactgtatcccacataaatggcaatgcagatataataagcaaatgatataataagcaagttgcaatgggacggagagaagggaaaagagatatatatatttacactcatcagactatggaggatt

SEQ ID NO: 497349 - DNA, 520 bp, Homo sapiens
tgacacattaacttataagcagtaagcaagcaccatccatgccgggaaattccctcagcatcccatttaccaactgggattccctgcacctcctcacacacagccaatgattcaaaatgcactaacttagattgcctattttcacaaacgccagctcccttggaccactgaatggccaaggggaagaactaggggagttcccatctgaagatatggaaagtccccgagctcccagtctggtcyctgcaccaaaaaatggcatgcttttgctttcggatcctgttcgtgaagccaaaaatgttctgcgcaggaaatgctcaaggagagaaggaaacacacacacacacacacacacacacacacacacacacacacaatacctttaagggtaaacaaactgtatcccacataaatggcaatgcagatataataagcaaatgatataataagcaagttgcaatgggacggagagaagggaaaagagatatatatatttacactcatcagactatggaggatt

SEQ ID NO: 497350 - DNA, 600 bp, Homo sapiens
ttgtagcagctgattcctatcttgacacattaacttataagcagtaagcaagcaccatccatgccgggaaattccctcagcatcccatttaccaactgggattccctgcacctcctcacacacagccaatgattcaaaatgcactaacttagattgcctattttcacaaacgccagctcccttggaccactgaatggccaaggggaagaactaggggagttcccatctgaagatatggaaagtccccgagctcccagtctggtctctgcaccaaaaaatggcatgcttttgctttcggatcctgttcgtgaagccaaaaatgttctgcgcaggaaatgctcaaggagagaaggaaacrcacacacacacacacacacacacacacacacacacacacaatacctttaagggtaaacaaactgtatcccacataaatggcaatgcagatataataagcaaatgatataataagcaagttgcaatgggacggagagaagggaaaagagatatatatatttacactcatcagactatggaggattcaccaccagactgcgaagcaacagactgggctccagagttggccacttgtccgtgaac

SEQ ID NO: 497351 - DNA, 499 bp, Homo sapiens
aggagcttctccaatctgttgtcaaaatgtgtcttctttggactactgtatgtattttcttgttaataaggtttacctctctttcctcttaggagcctttagtctcttctctttgtcactgttgcaggcactacagtctctttgttgtaagaaacatttatctttattctcagtcgacccaagctgtcatttaaactctatctctattctggtcaacactaaatgttaaaggtataaatcaataagtcagaagtttgcatacacgtttcactctgttttctttcccgagggagaatcatggaatggacagaattttatctaactgcactgttctgtaatgcagaaatgtaaccaaattttctttcttctaaatgtggttatggttggcttttttctcatgaggggtgctacaaactcamctggctttgctcacccaattgcagttaagttcatacatccattgagagaaacaggatctcaggttcttcttcaactatca

SEQ ID NO: 497352 - DNA, 575 bp, Homo sapiens
tgcaaaccccaatccttatctcttctacagtggcatagataaaatcttcattcagtcttctaaacagtgtgcctttctatatagcaaaatatagtattttattaarctttattatagtatctgtgaaacagttattgaacaatctactctacttcattattactggaagccagaacctcagttgtgttcactttctggattttatataagtgaaattgtacaacatgtatacttttactctactttcttctatgcaactttatatttatgatattaattcatcctattgcagatagctatagtttgtttaaaaaatattttttatattgtggcaaagtatacataaaattaaccattttagctattttaagtgtgcagctcagaaaaattaactacactcacattgttttgcaactattattcccattcatagggaccttctttcaacttccaaaaccaaaatttaatgcacattaaataacagctccctgttactccccctccagctcctaggaaccactcttctacttggatttctagaatttaactactctaagtatctcataagtggaatg

SEQ ID NO: 497353 - DNA, 575 bp, Homo sapiens
tgcaaaccccaatccttatctcttctacagtggcatagataaaatcttcattcagtcttctaaacagtgtgcctttctatatagcaaaatatagtattttattaagctttattatagtatmtgtgaaacagttattgaacaatctactctacttcattattactggaagccagaacctcagttgtgttcactttctggattttatataagtgaaattgtacaacatgtatacttttactctactttcttctatgcaactttatatttatgatattaattcatcctattgcagatagctatagtttgtttaaaaaatattttttatattgtggcaaagtatacataaaattaaccattttagctattttaagtgtgcagctcagaaaaattaactacactcacattgttttgcaactattattcccattcatagggaccttctttcaacttccaaaaccaaaatttaatgcacattaaataacagctccctgttactccccctccagctcctaggaaccactcttctacttggatttctagaatttaactactctaagtatctcataagtggaatg

SEQ ID NO: 497354 - DNA, 635 bp, Homo sapiens
gctgtagttactcgcggtggaacttcacaccatgcagggccagagaatttgatccgcttacagaaagtcccaaatggagagaggaccatcagagtgcttgttctcttctcaataaatgatctaatccaatgcaagcaacagctctgatggctcccaaagaacttcagcgcatttactgaagccttccaggctctaactttgaccaccattcaacttcaccatccataaatggacccaatgactgctgaccacgtagctgcagaaaacttttgcttattggcaaaaaatagaaaagacttaaaacttttgctgctttcaccatttcaatgcagaattcctttgcagcacaaatgtcaccataaggtggakccttgggaatccagtataaactatctcagaaaatctcagtgtgtccccaacaggcagcagagggcctcaatagacttcaacaacatctggactccatggccactgtagtccgacaaaaccaaggagcctgggatcttctcccagccgggtaaagaggaacatgtttatatctaaaagaagaatgctgtttttgagatcaatcagtctggtttagtcgaagaaaatattaataatatcatcacccaggcagacaaaattgaatctct

SEQ ID NO: 497355 - DNA, 507 bp, Homo sapiens
tgtagttactcgcggtggaacttcacaccatgcagggccagagaatttgatccgcttacagaaagtcccaaatggagagaggaccatcagagtgcttgttctcttctcaataaatgatctaatccaatgcaagcaacagctctgatggctcccaaagaacttcagcgcatttactgaagccttccaggctctaactttgaccaccattcaacttcaccatccataaatggacccaatgactgctgaccacgtagctgcagaaaacttttgcttattggcaaaaaatagaaaagacttaaaacttttgctgctttcaccatttcaatgcagaattcctttgcagcacaaatgtcaccataaggtggagccttgggaatccagtataaactatctcagaaaatctcagtgtgtccccaacaggcagcagagggcctcaatagacttcaacaacatctggactccatsgccactgtagtccgacaaaaccaaggagcctgggatcttctc

SEQ ID NO: 497356 - DNA, 553 bp, Homo sapiens
tggactgctatctccttgttggccaacctacaacatgatattttcctcaaaacccaagggccatattactgtcatcaggctgtaggccattttattcaataaaaaactgagtcactaaccacctagtactgtgagattttgtgaagagtttccctgtcatagacgtgagaaggcacatggatatgattctaaatataaagagaaagcactagaaagttgaatggctgtattaggtctttgtcatactgcaatgatgaagtacttgagactgggtaattgataaagaaaagaagtttaattgactcacagttccacataattgggggggcacctcagaaaccttccaattacagtggctgacaagtgaagtgagtgagagcatgggatgtaccagatgcttatgaaactatcagatctcatgagaactcactatcacaaaaacagcgtgaggagaacccatccccataatccagtcatctcccctcaggtttctcccttaacacctgggrgttataatacacagagaagtttgggtggaacacacagctaaact

SEQ ID NO: 497357 - DNA, 635 bp, Homo sapiens
ggttgtgtgaagacatagtgagatgtgtctacaagccagagaggcctcaccaggagccgaccatgcaagcacgctggtcccagattttcagcctccagagctgtgagaaaataaatttccgttgttcaagccacacagtgtgtggtgttttttaatggcaactcttgactaatagagccattaaactggacgatccagactataaggattaactgcttttctgacttactagaggcattttgagtcagccattaaagtagcatrggagacacttactatttagtagccactcatgcttttctgtggggcatgtaactagggtgaagctaacccagcccttagctttcgggggtggatcgttcggccaaatcctggcccctcagtgaattcttggccattagattggtgcaaggatgggcccctggccccatctaggcccactatatacctgggactcaatatgagttgttggggaagaagcctgtttcccctcagggcttgaggttctgagaatgtgaagctggagccgtggcagccctgttggtatcatgaggacatttcttgtttgagatgggatcaacccataggaagaggaacagagagctggagggaaagaaactgggtcctgaggacaa

SEQ ID NO: 497358 - DNA, 635 bp, Homo sapiens
ggttgtgtgaagacatagtgagatgtgtctacaagccagagaggcctcaccaggagccgaccatgcaagcacgctggtcccagattttcagcctccagagctgtgagaaaataaatttccgttgttcaagccacacagtgtgtggtgttttttaatggcaactcttgactaatagagccattaaactggacgatccagactataaggattaactgcttttctgacttactagaggcattttgagtcagccattaaagtagcatgggagacacttactatttagtagccactcatgcttttctgtggggcatgtaactagggtgaagctaacccagcccttagctttcgggggtggatcgttcggcsaaatcctggcccctcagtgaattcttggccattagattggtgcaaggatgggcccctggccccatctaggcccactatatacctgggactcaatatgagttgttggggaagaagcctgtttcccctcagggcttgaggttctgagaatgtgaagctggagccgtggcagccctgttggtatcatgaggacatttcttgtttgagatgggatcaacccataggaagaggaacagagagctggagggaaagaaactgggtcctgaggacaa

SEQ ID NO: 497359 - DNA, 635 bp, Homo sapiens
ggttgtgtgaagacatagtgagatgtgtctacaagccagagaggcctcaccaggagccgaccatgcaagcacgctggtcccagattttcagcctccagagctgtgagaaaataaatttccgttgttcaagccacacagtgtgtggtgttttttaatggcaactcttgactaatagagccattaaactggacgatccagactataaggattaactgcttttctgacttactagaggcattttgagtcagccattaaagtagcatgggagacacttactatttagtagccactcatgcttttctgtggggcatgtaactagggtgaagctaacccagcccttagctttcgggggtggatcgttcggccaaatcctggcccctcagtgaattcttggccattagattggtgcaaggatgggcccctggccccatctaggcccactakatacctgggactcaatatgagttgttggggaagaagcctgtttcccctcagggcttgaggttctgagaatgtgaagctggagccgtggcagccctgttggtatcatgaggacatttcttgtttgagatgggatcaacccataggaagaggaacagagagctggagggaaagaaactgggtcctgaggacaa

SEQ ID NO: 497360 - DNA, 416 bp, Homo sapiens
gattggccctgcttacaatgggcttctctctcagatgtatcttgcaaggagagagagtcaccttgggcaagctgactcccacccacccaggccccttcctgacagtccttctaggctgttcccaaaggcatggctggctgtccctaggatacatggggccctgggcatatatttcctgcaggactcctgtctatatagacaatttgattaaaaaatttataacaagattcatgagcccacatggggaatagcaagatgtatcaaggaagatttaggggacggggaggagaagcacgaacacatttgctcactgtctgctcagtgcwtgcagagaccctcgttactgctcaggctcaggagctatctcttcctgttctttatggtcgagtgtgctgtcccagctaatttcatattta

SEQ ID NO: 497361 - DNA, 598 bp, Homo sapiens
cttcgctctgggcttcagggccgacatcctccatctccctctgctctgcctgtacgcggccttctcctctgcctggctcatcttgctctgccttcctctgataaagagaaatgtgattgcatttagggcctgtcttattccatgcacgctgctatatccaaataccataaacggagcggcttaaaagcatcggaagcttatttctcacagttctggaaactgtgcatatggttgtggtgagggtctgctccctggttcaagaaagcgtcttgttgcatcctcacatgctgaaagggkgagggagctctctggggtccctctgatcggggcacaaatcccattcgtgtggatggaatctggtgacataatcacctcccaaagccccactttctaatatatcaccttgggggagtagctttcaacatcggaatttggggggaatataaacattctgtctatccctgggcccacccagtaaaatccagcagtcactccatctcaggatccttggactcaccgcatctacaaagttcttttttgccatggaaggtaacatttatgggttccagggattgggacccggacgtgtcttcggggg

SEQ ID NO: 497362 - DNA, 598 bp, Homo sapiens
cttcgctctgggcttcagggccgacatcctccatctccctctgctctgcctgtacgcggccttctcctctgcctggctcatcttgctctgccttcctctgataaagagaaatgtgattgcatttagggcctgtcttattccatgcacgctgctatatccaaataccataaacggagcggcttaaaagcatcggaagcttatttctcacagttctggaaactgtgcatatggttgtggtgagggtctgctccctggttcaagaaagcgtcttgttgcatcctcacatgctgaaagggggagggagctctctggggtccctctgatcggggcacaaatcccattcgtgtggatggaatctggtgacataatcacctcccaaagccccacttyctaatatatcaccttgggggagtagctttcaacatcggaatttggggggaatataaacattctgtctatccctgggcccacccagtaaaatccagcagtcactccatctcaggatccttggactcaccgcatctacaaagttcttttttgccatggaaggtaacatttatgggttccagggattgggacccggacgtgtcttcggggg

SEQ ID NO: 497363 - DNA, 164 bp, Homo sapiens
atctcctctcatatcacaaaataactgaagttgagaaaggaatttcatagttaaaaaacttttttgactcttccagcagctatttgtgygtctgctgcacctcttcttagccgttggtcttcagcttctcaactgtgcttttgaaccctggagagttcccattc

SEQ ID NO: 497364 - DNA, 606 bp, Homo sapiens
caaaacaaaacagaaactcatctgtggtaggcagactaatgtccctcccaccgagatgttcatgcctgagtccttagaacctgcaaatatgttacctccatggcaaaggggactttgcaggtgtgattaagggtactgatcttgagattgggagattattctggattatctagatgggcccaacctaatcacaagaaaacattggaaaagggaggaaaagagtggatcagacsgatgcgatgtgatgatttgacccactgttgctgtctttgaagatggtggcaaggccttggagctaaggaatacagtctctagaagctggaataaacaaggcaatgcaatccccttagagcctccaaaagggagcacaggtctcagaactgttaagataataaatttgtactgtttgaagtcattaacatttgtggccatttgtcatggcagtagtagaaaactaatacaccatcccatacaaaacacttaaatgaaaaaaaaaatacatacatctgtagagtaggcacatctgtaggttcttaatgcctgtcatccttatctggaaacttgggtgtttaatgcattttggcaagagtgatgccagtgaggatg

SEQ ID NO: 497365 - DNA, 503 bp, Homo sapiens
tggggctgcctaagcttcctgagtgtatttaggtccaagtcattaagtgacatcatttgaaagctaaaaagatcagattacagcatcatgttgataccctttctcccttaccaccccacccccccaagtacaaaggatcttatttttaaaaactctccttaatgatagctacataccgaaatgttgttgaagctgtctgttcaaaacatcagcaatatacttaaatgtataataagcacattatgcatttagcctggggttagaattgtcagccagaggcttccaggagaccacgtgggcaccctccakccaggtcctcctatgctgggctgttctctagcccgcatttgaataatttgggtttaggaattacaatgaagctttgcatctatattatgttcttgctaggatgttttggggaaggctgtaatttagtgcttctgcccccaaagatggggagcagagtcctgctttgtcaaaagggtggcaggaaaagcaggaac

SEQ ID NO: 497366 - DNA, 489 bp, Homo sapiens
ctgcactcagtttgtctcctcatctgtaagttggcgaatgatcattgtgctgggaataaatcatttttataaagcgccgggcacatagtaagcaccggcagtagctataatgagcagcttgccccaggtcacccagaaagtggcagcactgagactggggctgggtctcctgcctccggagcccacattttttccactgaatcacatttacctctatacaaatgcccatggtccgtgtgatacaaaatacttgagaaatacttctatggtgattcaagaaaagaattattctgggccctttgtactgtgtttcaagtgctctgtaatcaaagaattcatccctccagtcatttctgaaagcttcccctctttttcaggagcttaaaaaggatgcagtcccaamacatagaaggatttactccagatccaagcaatgagtcaggcacagaaagcctgatgccctcacctggaactctccctcctccctgg

SEQ ID NO: 497367 - DNA, 583 bp, Homo sapiens
ctcccaggctcaagtgatcctcccacctcaggctcccaaaaagctkggactacaggcatgcaccacattggctaatatttttttaaattatttgtacagacagagtctcactatgttgtccaggctgctctcaaactcctgggctcaagcaatcctcccacctcggcctcccaaagtgctgggattacaagcatgacccactgtgcctggcttcctagttctctataggagtctctaggttgttctgcctgagagattctgatagttcagctagtttcaaccagaatgctgaacccattattttgagcatgaatctgctctcctgttatattactaagaagaaaaacaaggtattccattaaatctgtgggcacatcctcaaaagcacatagttttgccgagatcttacacctgacaatggaagtgcttgcacgatgcaggtagtaaaacggaaaataggaatcaggaagctgatcaggaaccagctcagggctttgaaaaggagaaggccagtgagcgcccaccatttgcaggttgacagagtcaattttttttttaaacctgggctcaaagagagattagg

SEQ ID NO: 497368 - DNA, 641 bp, Homo sapiens
cctaaaaatcttcagtgactggggatctgatttcttcactggtcagtgggccacacccaaccagtgaatctagcttctaactaatctgtgatcaatctctgcatcttgaattaaagasagacaaaaggtaaggcccaacctaagctgcatatcactgccaccctggaattagagcagggcttagtctatgcagtgctcaaaaattagttaccatggaatgaaaatgatttttccagtcccagttccagtaagcaatttggaatgtctgaatgtccattaaatcacttatccattactcccacctgcttggtaaacaagcctcagacatcaccttagacactatcccacggtccatcttggggccaatggacagtagggttgccctgcattagaaatctctttttttggctgctacctaaaatacaaacaatcacatctgccctcctggtaagatatcaggaggagcaagcccaatgccgggatatgaaagggaagaaaaatcatttctgagaaatctgtacactcacctgcatggaaaaggtgagagaggtcccatggaaatgtttttccaccactgtcccgactctctgggtcgtctgaaacaaatcggccacttcatcaggacgcaggtcatggaagcg

SEQ ID NO: 497369 - DNA, 549 bp, Homo sapiens
tgttacaaaaaaaaaaaaaaaaagcatcctaaattaggctttcggtgtgtttaatagactaagttaggttaggctgcagttccttaggtagggactcaaattacggagacagcctcaggctaaatttaatttttttaacactatgcatttttgtgagtctccgcctaaacatgactcctgctgagaggcccamccttcccctacctcaaaggccccattaggtaccctcctgttatgcagaccagaagctccctacttccttactttagcagagcattgatgccccgtgttataattacttctcctttgctgtcccctctagaataggaaccctctgaggacacaaactgtggcctttcccttgattatcttccatgtagcccaggacctgaaacagtggacaagctcaatgactgttgattgaatgcatgaattaatggaggcctctttagagtaatcccctgggccttacaccacattctcttctctgagtctgatttctggaatatcacttgctaaggggcgtatttattgagcactcccagctct

SEQ ID NO: 497370 - DNA, 441 bp, Homo sapiens
gctgttgttgtagtcatggagtttatagtacatgtgcttggtagaaaaaattataagtgttcttccttccatgtggagttcctttctctttccttttcttcctctgagttttaaagagcatgctcaaatgccacctcctttgtgtactcttcaractctttcaggcttttctgattcattatacatatgtccatgacagctttttaccacaaagtataagtaattacaggttttctcttccactagtctggaactctgggctatttattacttatttttcccctgattatttcttttccctaaccctaggttcctaggttagaagacatattttctaaatgttgaatggatggatgaatggatggatgggtggggtggatgggtgatggatgggtgaatggatgggtggatggatgaatagatggatgagtgggtgggtgg

SEQ ID NO: 497371 - DNA, 595 bp, Homo sapiens
gacatagcctgagcttcaacttcctactccgtaaaatgggcatgtcacacagtgtacaaagttgctggggggttaaattaaatatgagcagagtgcctacacagctacaaacatgaaacgccttacaagagccaggaagaaactgacaaacacaggacaaaaagcagtggaaggaattgcaggaatcaagatctacatgtcccttttaaaagtcaattcctggctggggacggtggctcacgcctgttatctcaacactctgggaggccaaggcgggcaaatcacctgaggtcgggagtttgagaccagtctgaccaacatggagaaaccccttctctactaaaaaaaaaaaattagtcaggcatggtggtgcatgcctgtaattccagctactcgggaggctgaggcatgagaaacgcttgaacccaggaggcggaggttgcagtgagccgagaccgtgccattgcactccagcctgggaaacaagaacaaaactccgtctcaaaaaaaaaaaaaaaaaaaaaargagtcaattcctattacaaagatcaaagtagtaatccagatttttatataaaatctgtccattttcaag

SEQ ID NO: 497372 - DNA, 551 bp, Homo sapiens
gttttaccaaaggcacaaccatgcaggtctattctggctcacgggtcagaagaaggggagtctgtttggaggcacctccaggcaggctttaaacagaaccagggacaattagatttgggagagacaggggctggtggggaggaaagaaaccaaggatatcactgagataaaaaatcctggaagaagaaaacatcctggtggagaagagaaaacctaacacatggtagctaaacttccatttctaaggacagtgcaggragtttggtgggtccttaatgaggattcatttcttggcaccaagtgaccataggttgctttatttgcatattttctgtaaattggaggaaatttaaactctcttacatttctgggtcctcttctttggaaataatattaattcgtatccatggactgcatcggagagattgtgatgctcttgaggatgagcaggacacttgggctctagcagaaattaagcagaacttaactacatgatgctatagcaaaatatatttttaatacatttactttttctgattataacattaaag

SEQ ID NO: 497373 - DNA, 640 bp, Homo sapiens
ctaaaagtgggataaagtggtaataacgaaagtatctgttttatagagttgaagataggaaaataagatgagttaacaacagtgtttggttcatggcaaacattcatgttaggtatgattattatacatataatctctttgataaatattaacagataatcttccagaaaacttgttttcatttttaacrtatgtgtgccatcaaatattttagtagtaactgaaaatattgttaaccacaacattaggctttgtgggtgacatttggggtcagagacagggccttgaccaaaaggactgaagatgttagcaagagaccttccaaaaagtaagtgaaaggggtgaggaatgtagtggaaaggaatggtgaggcaactgttaccactggatctaatggaagtgtgaccagggctcatgctccaatagtgtgtgtatgagtttgtgtttgcgtatatgtgtgatgttttagggatagagggaaaggggtgccaggctcttgtgatgcctaacatgttccaggggttgagaggccccagcaaagaaggttccgggctgcatacccaggagcagtcacagattcttgaggacagaatatagggccaataggtcactggtacactgagtaaggaggcaggccagc

SEQ ID NO: 497374 - DNA, 671 bp, Homo sapiens
tatcacaatggcatttaggaagtgctgactgatacagaaaaggagactactattcatacagataatgcttcttctttcaaatagctaatgtaaaaattaaatgttttctgtaaagtgcttacataatgcctgacaagtgkcacctgtttggcacttattaggcaatgctattcctatactttgagctccctggtgagaacatgtctttttcctctttctattcactgtggcattttagcatctagtatgcaaacttacagataataggcccccaacaaactgaattacaccaaactttgattgattttgaataaggctgaagggaaagctaaaaacaagattgccatttttatgtattaaattggtcaagatttttggcaagtgctgaaagctgaccagagggcagttacaagggcattcttgtacaaaattgatagaatcattcataaagtggcacagactttctggaaagcagttctgcccatttaccatcaagagtcttaaaaatgttcataatttttgatgcagtaatgcaattattatttctaggagtctatcttaaggaaataatctgaaatgaaaattctgtagatatttttatacaaaagggtaaatcataagcatgtatcagaacaaactcaactatctgacaccaggggagtagttaagta

SEQ ID NO: 497375 - DNA, 671 bp, Homo sapiens
tatcacaatggcatttaggaagtgctgactgatacagaaaaggagactactattcatacagataatgcttcttctttcaaatagctaatgtaaaaattaaatgttttctgtaaagtgcttacataatgcctgacaagtggcacctgtttggyacttattaggcaatgctattcctatactttgagctccctggtgagaacatgtctttttcctctttctattcactgtggcattttagcatctagtatgcaaacttacagataataggcccccaacaaactgaattacaccaaactttgattgattttgaataaggctgaagggaaagctaaaaacaagattgccatttttatgtattaaattggtcaagatttttggcaagtgctgaaagctgaccagagggcagttacaagggcattcttgtacaaaattgatagaatcattcataaagtggcacagactttctggaaagcagttctgcccatttaccatcaagagtcttaaaaatgttcataatttttgatgcagtaatgcaattattatttctaggagtctatcttaaggaaataatctgaaatgaaaattctgtagatatttttatacaaaagggtaaatcataagcatgtatcagaacaaactcaactatctgacaccaggggagtagttaagta

SEQ ID NO: 497376 - DNA, 671 bp, Homo sapiens
tatcacaatggcatttaggaagtgctgactgatacagaaaaggagactactattcatacagataatgcttcttctttcaaatagctaatgtaaaaattaaatgttttctgtaaagtgcttacataatgcctgacaagtggcacctgtttggcacttattaggcaatgctattcctatactttgagctccctggtgagaacatgtctttttcctctttctattcactgtggcattttagcatctagtatgcaaacttacagataataggcccccaacaaactgaattacaccaaactttgattgattttgaataaggctgaagggaaagctaaaaacaagattgccatttttatgtattaaattggtcaagatttttggcaagtgctgaaagctgaccagagggcagttacaagggcattcttgtacaaaattgatagaatcattcataaagtggcacagactttctggaaagcagttctgcccatttaccatcaagagtcttaaaaatgttcataatttttkatgcagtaatgcaattattatttctaggagtctatcttaaggaaataatctgaaatgaaaattctgtagatatttttatacaaaagggtaaatcataagcatgtatcagaacaaactcaactatctgacaccaggggagtagttaagta

SEQ ID NO: 497377 - DNA, 508 bp, Homo sapiens
gacagctggcagtggtttgactgtgtggttgcctgttagttctgggtgggaaggggtcccctctaccattcacagaggcaagaagcctacaaacatcagctttttactaaaccccggtggtcagggtgtccatgatgactaagtttttgtcttaacttgtgtgggccacggttcccagatatttgtgcagacttgattctatacgtgtrtgtgtgtgtgtgtgtgtgtgtgtgtgtgtgtttgggtgagattaacaaattggtggattttgataaaacaggttactctgcataatgtgggtagcctcatccaatgagttgaaggcctgcagagatcaaaaggctgaccacccctagaagacaagaaggaattctgccagtcgacagcatttggacgtgaactgcaacattaggtcttccttgggtctccagcctgccagcccaccctacagattttggacttgccagactccataattgcttgagccaataccttaaaataagtttct

SEQ ID NO: 497378 - DNA, 557 bp, Homo sapiens
cccataaaatgtaggagttgaaatgcataagctagacctacaggcgtcatcaggggcttgagcttgaaactatcatgttgggtgaaaaaaataaactggagaaagatacagtatgatactctgtatgcctagtttcaaaatgtttgaagcaactttgttgcttgtggttaatggattcaaccacaacttctatgaatgagtacaacttctaygaaaaacagtatggagatttctcaaagaactaaaaatagaactaccattggatccagcagtcccactactgggtatctgcccaaaggaaaagcaatcattatatcagaaagatacctacactggtatgtttattgcagcactattcacaacagcaacttaggattcaacctaactacccatgaatgaatgattggattctcaaaatgtggtatacataaatatatacaatggaatactactcagccattaaaaagaatgaaatcatgctttatgtagcaacatggatggaactggaggacattatcctaagtgaaaaaagccaggcacagacagtcaaatatcac

SEQ ID NO: 497379 - DNA, 557 bp, Homo sapiens
cccataaaatgtaggagttgaaatgcataagctagacctacaggcgtcatcaggggcttgagcttgaaactatcatgttgggtgaaaaaaataaactggagaaagatacagtatgatactctgtatgcctagtttcaaaatgtttgaagcaactttgttgcttgtggttaatggattcaaccacaacttctatgaatgagtacaacttctacgaaaaacagtatggagatttctcaaagaactaaaaatagaactaccattggatccagcagtcccactactgggtatctgcccaaaggaaaagcaatcattatatcagaaagatacctacactggtatgtttattgcagcactattcacaacagcaacttaggattcaacctaactacccatgaatgaatgattggattctcaaaatgtggtatacataaatatatacaatggaatactactcagccattaaaaagaatgaaatcatgctttatgtagcaacatggatggaactggaggacattatcctaagtgaaamaagccaggcacagacagtcaaatatcac

SEQ ID NO: 497380 - DNA, 441 bp, Homo sapiens
ggcttacaaactcaaatgcctccagggcccctgcttagacaggagtgaagcacattgattgggctatgatgaacgggaatatgatgctcagtttgtgaggccagggccactcccacatggtgacagcaggtgagagtagctctggcccccatagacartagtgggtgtgggcagaataattcctaagccttattgatttacataaaccgggaaataaggatatttaaatatgaaatggcagctttcaagtgtggacagcaaaataaaaaattgttaaatgctgtgtgggacaaatagtctaggttatgacctcaggaccatttttcatttctgcctttgaccactgaactttgatggaaaggatgagatactagaagtggctcagtttgggcacacagtcacctgaggccaaagcagcaagatccacacagacattgaagt

SEQ ID NO: 497381 - DNA, 402 bp, Homo sapiens
gagtgaagcacattgattgggctatgatgaacgggaatatgatgctcagtttgtgaggccagggccactcccacatggtgacagcaggtgagagtagctctggcccccatagacagtagtgggtgtgggcagaataattcctaagccttattgatttacataaaccrggaaataaggatatttaaatatgaaatggcagctttcaagtgtggacagcaaaataaaaaattgttaaatgctgtgtgggacaaatagtctaggttatgacctcaggaccatttttcatttctgcctttgaccactgaactttgatggaaaggatgagatactagaagtggctcagtttgggcacacagtcacctgaggccaaagcagcaagatccacacagacattgaagttcc

SEQ ID NO: 497382 - DNA, 591 bp, Homo sapiens
tgtctcccaggcagcactaggggaggagatcaggctcccagctcccccagcatgacacagagctggcgggaatttcaacaggactttctgaamggtgagggacaacaggggccccatgtcactgtggaggctggcactcttatatattcatgggtcaaacccactgtagtctctgaagtctggcacatgctgttgtacctgagtgtcacagtcacaggctaaataagcccttttcttttacaaccttcccttcagtgagggctgagggaaattcacatcttcttgctttcccctccttcccttgatttccccaggacagccagctcttcttggcttttactgccccggagaagatgcttagacatacaggcctgcatgtgtgcaccgccccccacacagtcacacattcacacacgcatgcatgtgctcacacgctcatgctcattagcgcacacatgcacactcacattcacacatgcacctcccacacattcacacactcatgaacacacatgcacgttcattcacatgtgtgcccacacgtgcacaaatacatatgctcgctaacacacactgtaatgcatacatgca

SEQ ID NO: 497383 - DNA, 367 bp, Homo sapiens
atagggtcccccctggccaggtgctgaattattccagaccaggacattgctgggcttgggcccatcaaccaacatacaagtcagcatttcccaactttaaacatatatgccctttccaaataaasataaaaatccagagatttttctccactccttctctcagaggagagaacatgatcccttaaagatcctgttctttattctccaagccaaaagaacaacaaatagattcactttgccttctgtggctcatttaacaaaaaaaaaaaaaagaaataagtgatttcccaatttcataatagaaatgactgaatatgcattttaatgctaaacccatttcagaattctgatgtatacatatcccacc

SEQ ID NO: 497384 - DNA, 653 bp, Homo sapiens
tgtgggtgggtcctgctcactttgcatccctgcagcctcctctgccacctccctcctccacctctaagaaccccaggttacatggggagcacccartcactctggatgatcctcctggcttactatcagccgactggccacctgcctccacctgtagccgcacctccgcctccctctccctgcaaacttacgtatgcacaagctccacggattaggatgaggccctctctaggagaggggacattattctgtctacagggttttagttcagacagggacagaatctgatttctgatgtataaagatccctctgtgctgaatggggaaatgggtcacagcctgggaagagcgaagccgggagcccaagaaaaggctgtggcgctgtccaggtgatctgcacaggtggcctggactgagtggtggccatggagagaagatacatggttgcttttagacacaggcagatacagggttgcttttagaatcagatcatcttctagcttcccaggcttttatgttgaagctgtaatttgaagagttgtgtgctgtcctcttggtgcattttatcagcttccagtgagtggaggctgatgccttaacgctgcggttctcaaagtggggttcctgggccagcaacatcagaactgccctga

SEQ ID NO: 497385 - DNA, 475 bp, Homo sapiens
acgtttagagaatggattgagttctcaggcttggtactaaggtcaggattcaggccttccagctcttgagcaatttgggggaaacagagtaactgccaagatgggagtagtatcaagataattaaaatgttaaggctctttctccttacaaataaaactctccctcttcagactgagrtatcacatgcaatcctttctgtttaaagtcggggtctagccaccatgcctaattttttattattatgacagttattataataataattattattattgtagagatggagtcctactgtgttgccgaggccgaactcctggcctcaagtgatcctcccacttctgcctcccaaagcactgggattacaggtgtgagccaccacgcccagcctaatacgcaacgcttttaaagaaaggtggatggaaagaagggatgagagtagccccattttctatctctccccaacaggaatctatt

SEQ ID NO: 497386 - DNA, 475 bp, Homo sapiens
acgtttagagaatggattgagttctcaggcttggtactaaggtcaggattcaggccttccagctcttgagcaatttgggggaaacagagtaactgccaagatgggagtagtatcaagataattaaaatgttaaggctctttctccttacaaataaaactctccctcttcagactgaggtatcacatgcaatcctttctgtttaaagtcggggtctagccaccatgcctaattttttattattatgacagttattataataataattattattattgtagagatggagtcytactgtgttgccgaggccgaactcctggcctcaagtgatcctcccacttctgcctcccaaagcactgggattacaggtgtgagccaccacgcccagcctaatacgcaacgcttttaaagaaaggtggatggaaagaagggatgagagtagccccattttctatctctccccaacaggaatctatt

SEQ ID NO: 497387 - DNA, 605 bp, Homo sapiens
gtaacaaatcatccccaaacttggttgggttaaaacaatagccatcgatttagctcataattctgggttctgctgggatcacacatctgtcccaactaccaggttagttgggtctcgttggtcaagaatggccttcactgggaagacctccctggtaatttctcatatttcatactttcacccatgcttgttcacatggtaacgtggaaggttccaagagaaagacagaagtgtgcagaaacctcctgaggtctgagctcagaaatgacttccacaatgccacttctaactcatcctactggccaacacaatcagaaggcctgctgcatgcaagaggtagaaaaataagactctaccttttgatggtaagagctgaaaaatgtcaagcctagcagcagcgaggaaaacagccaccatttctgcaatctaccgtagcaagcaacgttgagaacagcagttccacrtgcaaacttctcctgatgcctaaggctcaggatgtattttaccacccctttttgctctttgttaattggacaaacacaaatattatttgcttgagttgaccagtgaataagtggtcaggagttattttaagagacaggtct

SEQ ID NO: 497388 - DNA, 458 bp, Homo sapiens
tgaaaagatataaaaaagaggtgcatggtgttttgggaggggcactggacctagtgtggaagtcagggaggcttcctattaatagaagaggtgaggtggatctgggaaccgaatggaaattaattaggctgaaggagtggccatgtgtgagaccctggagatatgaaggagcaagatgtatttaaacttcgataataaatttaaaactctggaacaaggatgtactaagatataattaagatataaccctacttgcacccttattacgagtcaggcacttgctgaacactttgtaggcatcatctcaatgaacgctcatgcacytgggaggcagggagtagagcaaggtgagccctgttgccaagtggaccagaacatctagaaccacacagccaggcatgagtttcagctacatcacttacaaccaggagatcttgggcaacattacttaccttccc

SEQ ID NO: 497389 - DNA, 485 bp, Homo sapiens
gggcgtctgtgttgggggctgggggttccctccttcaaagcactggaggtcagctcccactgccagcatgtggtctgtgttcagggagacgtgccagggacctccaagggcttccagctcttagaggcaaaggagatcaagttacagagggcttttttttttaagttcatctgggagggcagccatgggagcccagggggttggaggtctgtctgtcttctgctctaatcttgtctgtgctggtttatccagaggagtcaggaagttcagagaaaggagggtgtctgccgatttcatcccgcttgcatatcaaggcctgcggttcagcacagcgtgttcctaggatgtgcctgttctgttcggttcaagctgcaagtctcccctcctctcccactgatttagaggccacttaggaagtagccttgggtggttgtctctggctctggggactgctgtcttggtgctstttgttgtctttccacagc

SEQ ID NO: 497390 - DNA, 609 bp, Homo sapiens
gcaaatccctgggaaggatggcaggatccacaggctctggcacacgaacctaacctattctctgtctcctaaagagttgaatttgcatcaataaaacgcgtcgactccatgtatacccacctgcagaaacataatattaaaaccatgttattttattgtcttctcagttaggaggaaataaatgactctctgagcagcaatagctccccagaagggatgttttacacccagatactagagttaaaacagaaagcaagaagtagggggctctgcatgttaagtaggttcagcaaccgtaattagtgattttctagggttgaacaggacacttcctgctttcatgggaaaatcagtttgctgctgaccaacccgtacttctagagcactgagtaaccagcctctaattcggttgtaatgaaccgtgtattaatgttgcagccttctgcccgctctggagacctcacgccatgcctggccttgcagtgagtcttgygcttgtcagttatgggggcaggactttcttgcaaagctgcttttgttttcccactaaaaatgtgcttatttctaccttaaatagagatgaatcccacaacttgcccaagataaata

SEQ ID NO: 497391 - DNA, 430 bp, Homo sapiens
gagtgggcatgcaatgaatttgaatgcctgggtgttccaatgaggatggattattatgtgaaggtgctgtaacaaataatccaaactttcagaggcatacaacagcaaacattcacttctcattcccttttttttgtgtccactgcaggttggcaggggtctgtgcccattaacgtcacttagggactcagttgatggagcagctactaactagaccaaagccagtcattgcacctgcccactccaaatactgggttcggtgaggagtgtgcattaaatrgccattattaactgactgcaggacgaattctccagtctcaaggttcttctggaatgacagaatgcactgaatatgcttgtgattgctttatgctgagaagcaggaaagagtttaatgtcagtgaaattttcaagtaaatatagtttggat

SEQ ID NO: 497392 - DNA, 547 bp, Homo sapiens
gctgggtgggcgaggagggcagaagtaggccaagtagacgaggccagagagccagtgcaggctatggcaagggattttgctcatagggagaggggagccattggacctgatgaacctggagtgagatgacctgaaagatatttaaaaatgatcactggtgctgctgtgtggagtgagggtggaggcttgataaaaggtggctgcaggcctggtgcgtggctcatgcctgtaatcccagcactttgggaggcggaggcaggcagatcgcttgagcccaagagtttgagaccagcctgggcaacaaagtgagaccccatctctacaaaaaatacaaaaattagccggacgtaagtggtgtgtgcctgtagttccagccacttgagaggctgaggcaggaggattgcttcagcctgggaggttgaggctgtagtgagccactacactccagcctggacgacagagcgagaccctatctctaaaaaatattraaaagccagtggagaaagtgcctacgatcacctccagcacaaggcataacgtggcaagt

SEQ ID NO: 497393 - DNA, 589 bp, Homo sapiens
gtgagggcattttatgcaaaggaagatacgacaggagacagagtctggaattgccggactgggaaactcagagaatgacattcaccttcatctcttaaatcacagcattgcacctaagggatggggagtgagctgaccctccctctgcagttcacatttctgttaaacagtatctctgactacgcaggatctcatgggacacagcttgcttatactgggatgcccgtcatggcaactattcctgggaatgcgcagccccgtgtagaatactttccgagatttctctgttcctgcaagttgccacatcgtgttgcagcccttgcagctttctcgttttgtgtttcaccccagtcttggaagaacgtattaatcgagggcaacgtgcggcagaatagggcactgaaatgggaacmagctactcagtcaagcaccgccagaacctgttatctgtggaattcacattggattcagccttgttttgtggtagagttgtgctgtgtttttaaattcacatttctctctgtctcttctaaagacacccagtttttacggattcagcactttccaagcctggctgggcccattttga

SEQ ID NO: 497394 - DNA, 609 bp, Homo sapiens
  misc_feature (1)...(609): n = A,T,C or G
attagggagacacgaaagcacgttccactaatatccatcaaagaggggttcagtttcaaagcgcagaagaaatacaatagcgttgaagcaaactacrtgaaaaagatcttatgcgcctgagaagcgaaagagaagcagggactggtgacttggattttcttttttaagctaatctttatttgggacaaaatatgtaagtccaaggaaaacgagtgtctcctgggcactctcttatttacatggggcgtcttgaactaaacattttgaaatgtttataaatgtttgtttttcctcttccatattttctctggttggcaccaaagctgcagggcttggcatgtcctcacgctcgggtcttcccctctgtggcgacagttactgatgagcattaatctggaggacacacagagacaagatgaagtgcagactggagcccggggattaggtcctttggcgaataaaatgtaaacaggggatgtctgagaggtgaggagtggaggggctcattaaaggcctggacttgggatcagggtggctctttgtggtcgtcctcaagccagcgaatgggttcagatgctggtgagcactaatcaggcccntggctcagct

SEQ ID NO: 497395 - DNA, 309 bp, Homo sapiens
aggaaattgaagagaaatgggttattactttgsaggcaaatagagcaaagaaaaaaataaggaaacaggaaaggcagagagagataagtgcaaaaagaggcaggagagggaaatgaggaattgaagagttgtggtccatgcaggtttctcagtttcttctcttcctccctattggcaggcaattactggaaggctcaggaatgattgctaagcagacgatatggagatccctcagggaactgcagatttctcccatggccagcccatcaaggagcaatgagagaatagcagcagcagcagcaatagcag

SEQ ID NO: 497396 - DNA, 621 bp, Homo sapiens
cccttactcttgaggtattaacaagcccactactcagtaggatgctgataattagaggactcagtaatcaacattttcaaatagcacttttctgtgtaacaactgaatagtgttgaatctactccacaattgttagaaataggacacatattacttagcattttcagctttatttttcagaatgtaggacatattttaataatacaaaaaatgttctaatatagaaaatgccataatatcactatcttggttaatccccacagtagcctcaccaccaacagggaacattctttgcatatcataaaagactactggagatttatccattttctacctctgtggccacataccttacttactatacctgtstcaaatcctacactccaacctaaccagatcaccaacagtccctggaagtcacaattttgtctttatcttttctttttctctaaccagaatacttatacccaacttcttcatccagtgggtatactcatcattcaagacccagataaattctttcctcctcacatacgccttctctgatcttctgaaagttgtggccgcaccttctatgtagaagacagacagtgaaagaaagatttcagaaaagagctgcaa

SEQ ID NO: 497397 - DNA, 621 bp, Homo sapiens
cccttactcttgaggtattaacaagcccactactcagtaggatgctgataattagaggactcagtaatcaacattttcaaatagcacttttctgtgtaacaactgaatagtgttgaatctactccacaattgttagaaataggacacatattacttagcattttcagctttatttttcagaatgtaggacatattttaataatacaaaaaatgttctaatatagaaaatgccataatatcactatcttggttaatccccacagtagcctcaccaccaacagggaacattctttgcatatcataaaagactactggagatttatccattttctacctctgtggccacataccttacttactatacctgtgtcaaatcctacactccaacctaaccagatcaccaacagtccctggaagtcacaattttgtctttatcttttctttttctctaaccagaatacttatacccaacttcttcatccagtgggtatactcatcattcaagacccagmtaaattctttcctcctcacatacgccttctctgatcttctgaaagttgtggccgcaccttctatgtagaagacagacagtgaaagaaagatttcagaaaagagctgcaa

SEQ ID NO: 497398 - DNA, 556 bp, Homo sapiens
ttcccaagaagacgccataattatttgctcaaaactattgctaaaagccaaaactagttttytatccagcctggtggtttagctacctcctggcatactgccttttcattcagactgacaataattattcatcactcagcaaatattgaccttcacataataaaatcattgttatcatttgaccctactaacttctagtccttgttcttacagatattctattttaatgtatttgtagtattagcatagatagttttaatctacattctcattcaacattatactacactatcaattagaattaggagtgattcatacaaggtagaatttttttcttttaaatgagagaagtctggaggtatgcaatttagaatgttacggtggttcacagtcatcaaagactgaggctcttctttttctccttcaccatcctagagcttagcttccagcccaaagatgccttatgactcaaagatggccactgaagttgcggttttcacatgtgtgaagttggaagcaagaaggaaggaggaaagggcaaaaggagtatatgtct

SEQ ID NO: 497399 - DNA, 580 bp, Homo sapiens
aggcagattctgctgactccaggaagccggctgaatgaaggtaatggctttcagcaggacaaagagttgtttgtaatggttgctccaaggaccagggaaattctggcatgggtggggtctgcactaagtgttccagaatgaaagggacagatctactcaatgaggaaattgttccacccagaatgccaggagagccctcaagtggtaaggagcagaccaagatgcagacttggccacgcttacccccaaataataatgtttgtgtttttcttaatgttcatataagggaatggaaatcyaaatatgtgtaggaaagtgtttcccacctgttccctgttgcctggcatcactgtctgagtttttctcttccatcactactgtccctgttgtctttatgcttttatttttagagctagcccttaagaagttagattgttaaatcggagggtgtatcttattgtaagtcagggtgccaggttgctttccccaaggggaataacatttcagcaatgtgggcttgctttcttctacctccttgccagcaagcaataggtgtcacctgtcactgctgacattgccg

SEQ ID NO: 497400 - DNA, 640 bp, Homo sapiens
ctccccaagcctgaatgcagtggtgtgatctcagctcactgcaacttctgcctcctgggttcaagcagttctccctgcttcagcctcctgagtggctggaactacaggtgtgtgccaccatgcctggctaatttttgtatttttagagacagggtttcaccatattggccaggctggtcttgaactcctaacctcaggtgattcacctgtctcagccttccaaaagtgctgggattacaggcgtgagccaccatgcccagccacattcaggctttaatgtctgtctctctctsaataatgttgagcaccttttcacgattggctatttggatatctccttttataaagtgcttgttcaaatttatttattttctccatttaaaataaatctagttgtatttttctaattgacagtgttttacttttattcaaatgagttgttagatgtgtatcttttcccagtctgtgactcgtcttttcattgtttcagtgttgagaagtgtttgtgagtatcaattaatttttctgtgattagattttttgggtatttttcctgggtttagaattctagcttggcagttattaacactttaaagacatcattccgttgtcctctgacttccattgtttctgttggtca

SEQ ID NO: 497401 - DNA, 640 bp, Homo sapiens
ctccccaagcctgaatgcagtggtgtgatctcagctcactgcaacttctgcctcctgggttcaagcagttctccctgcttcagcctcctgagtggctggaactacaggtgtgtgccaccatgcctggctaatttttgtatttttagagacagggtttcaccatattggccaggctggtcttgaactcctaacctcaggtgattcacctgtctcagccttccaaaagtgctgggattacaggcgtgagccaccatgcccagccacattcaggctttaatgtctgtctctctctgaataatgttgagcaccttttcacgattggctatttggatatctccttttataaagtgcttgttcaaatttatttattttctccatttaaaataaatctagttgtatttttctaattgacagtgttttacttttattcaaatgagttgttagatgtgtatcttttcccagtctgtgactcgtcttttcattgtttcagtrttgagaagtgtttgtgagtatcaattaatttttctgtgattagattttttgggtatttttcctgggtttagaattctagcttggcagttattaacactttaaagacatcattccgttgtcctctgacttccattgtttctgttggtca

SEQ ID NO: 497402 - DNA, 640 bp, Homo sapiens
ctccccaagcctgaatgcagtggtgtgatctcagctcactgcaacttctgcctcctgggttcaagcagttctccctgcttcagcctcctgagtggctggaactacaggtgtgtgccaccatgcctggctaatttttgtatttttagagacagggtttcaccatattggccaggctggtcttgaactcctaacctcaggtgattcacctgtctcagccttccaaaagtgctgggattacaggcgtgagccaccatgcccagccacattcaggctttaatgtctgtctctctctgaataatgttgagcaccttttcacgattggctatttggatatctccttttataaagtgcttgttcaaatttatttattttctccatttaaaataaatctagttgtatttttctaattgacagtgttttacttttattcaaatgagttgttagatgtgtatcttttcccagtctgtgactcgtcttttcattgtttcagtgttgagaagtgtttgtgagtatcarttaatttttctgtgattagattttttgggtatttttcctgggtttagaattctagcttggcagttattaacactttaaagacatcattccgttgtcctctgacttccattgtttctgttggtca

SEQ ID NO: 497403 - DNA, 545 bp, Homo sapiens
atgataatagtcccatgaaacaaggagcccaagactaacatttagaagcctgggggtctggtccttgatttcaggcttactaattatgtggccttcaccaaatcccttcagctctctaaactacccctttctcacccataacatgcaggtamtatttactcaaggcccttgtgagaatcgtggaagatagtggatgtggaaactccttactgaaatggacaattctacatcaattattgtgtgagctcaaagatgctatgctgacaagagcacatcatgcttaccaagtctcatcgatccctacagccgctgtctctcctgctcacagacatctgctccctgtgctgagcccctctggacttttgggctctgctaccccttcaactgccagcatgacatgagctttggatgtgggcttcaggctgttgagcagtgatgtcctgagtcagagctataagcccaagcatcacctgtcctcatggcgcctctcaccaagtgttctagagaagtcttggggagacctcaaccttctcctcagaccttgt

SEQ ID NO: 497404 - DNA, 545 bp, Homo sapiens
atgataatagtcccatgaaacaaggagcccaagactaacatttagaagcctgggggtctggtccttgatttcaggcttactaattatgtggccttcaccaaatcccttcagctctctaaactacccctttctcacccataacatgcaggtactatttactcaaggcccttgtgagaatcgtggaagatagtggatgtggaaactccttactgaaatggacaattctacatcaattattgtgtgagctcaaagatgctatgctgacaagagcacatcatgcttaccaagtctcatcgatccctacagccgctgtctctcctgctcacagacatctgctccctgtgctgagcccctctggacttttgggctctgctaccccttcaaytgccagcatgacatgagctttggatgtgggcttcaggctgttgagcagtgatgtcctgagtcagagctataagcccaagcatcacctgtcctcatggcgcctctcaccaagtgttctagagaagtcttggggagacctcaaccttctcctcagaccttgt

SEQ ID NO: 497405 - DNA, 595 bp, Homo sapiens
tggcaccacactgacactatggattttaaactttttaaagcagggtttttttttttctttctttcattmttttatcataggattacagagtgaatatctttcttcgtcagaaatggaatgatccccgcctcgcgtacagtgaatatcctgacgactctttagacctcgacccctccatgttggactccatttggaaacctgatttgttctttgccaatgaaaagggtgccaactttcatgaagtcactacagacaacaaattgctaagaattttcaaaaatggaaatgttctttattcaataaggtgagtcgtggacttaaattgccgatttcagtgaaatagaatatcatggtgtattgttggttggtttgtttggtgaaagttttgacatttttgaacaagtgctatcattgttgcacttcagttcctctaatagactgtttcccaaatatgtctgatcaataataacagacccaagttccagattcaggaactatataagtaattcttggaaatccactttttaaacaaatgtccctggtgattcttaatatcagccaggttgtcaggaatcttaaaggcaaagtgaaaggc

SEQ ID NO: 497406 - DNA, 599 bp, Homo sapiens
tgcagtggtgtatggatcaagagagggggtcctgttctgtactcataaacccaggcacagagctgtcacttctaagatacattatttgtgttttttttcaatttgaacacctattgtatgtaatatctcaactttagaaattacaaaatgtttcaaaaatgcactaaatatctataagaattgttgaaatccaccaagatgcaagggttataaggaaacctaaaatatcatgcaaatagtaccaaataagcttcactatatctttaccatgaatcatcctggcaggtacttctttaatcaagtgaccaagctaaacatcacccatgaaacaggtctacatcatgtgctattggaatgatgcaatgagaagggcacagtatcctttctgcagcatttttgttaaaaaggactaataccaatctaattatgrgaaaacatcagacaaacccaaactgagggacattcaacaaaataactggctggtatatctcaaaaagtgttaaggatatgaaagacagaaaaaaatgaaaaaagaaaaaaaagactatggggctgtcacagattagaagagactaagttaaaagctaaatgcaatgtgg

SEQ ID NO: 497407 - DNA, 543 bp, Homo sapiens
tgtgtctcagagcgcttcaagagacagggtaawagctttgaggattcttacaacccataggacatctttaatctgacacagtcggccttctagtgacattgtttacattcttccaatatgcaaaacataaacaccccttcctaaagaccccagcttttttgtcccactatagcattgttttgaagtctggaattgtgtcaactaaattagatgcgagtgcaaatgaggttcccaaaaggtggatcttatgattcctctcgatcaaaagacctgtgaatttaagaacaggttttctatcccacacaaagtcagcctacagaggcgatacagaataggaaaactgcaatagggataaggtgttcccattcaatagggaaagggtgatgggaagtacattgtagtcactggttcatagcaattctggagcctgggaaagcatatccttccagttacattattaaggcccagtcctgctcccagaaaatgtggatcttgactttaccgtgttggctcttgtttctgccttctgagtcatctttcctt

SEQ ID NO: 497408 - DNA, 599 bp, Homo sapiens
tcataaggagaccacacagagtaatcgactgaactgtgaacactttaaagattcagatttgtgttttatatactttactgtttgtagcacagtgctttgcatcgaacaaattacataagaactcaaaaatcatttttgcaatatataccatatatttgattacattatggtataagaaaggatacttttacataataaataaatgcactttaattttattagtagtaaacttttctccatttataaaaggcttataaaagtttgtgtattgtactttaaaaacagtttatcacctcttacatattcctcctccatcccagaccaatgtatatttcatgtatagytctcaatacatttatcaaattatatttgtgcatttattaattttaagtgccatgtcaaaagaaccataattttgtgtttaattcacatttatggtaaaatatatttttaatttccagtattaaagaatagaaaaaaataatgggacatttgactataaaatatataactgttttcagagaaagcagataattttagtagattttctgctaccagatgaaatacttcacatctttctaaaggtatttaccaaagat

SEQ ID NO: 497409 - DNA, 599 bp, Homo sapiens
tcataaggagaccacacagagtaatcgactgaactgtgaacactttaaagattcagatttgtgttttatatactttactgtttgtagcacagtgctttgcatcgaacaaattacataagaactcaaaaatcatttttgcaatatataccatatatttgattacattatggtataagaaaggatacttttacataataaataaatgcactttaattttattagtagtaaacttttctccatttataaaaggcttataaaagtttgtgtattgtactttaaaaacagtttatcacctcttacatattcctcctccatcccagaccaatgtatatttcatgtatagctctcaatacatttatcaaattatatttgtgcatttattaattttaagtgccatgtcaaaagaaccataattttgtgtttaattcacatttatggtaaaatatatttttaatttccagtattaaagaatagaaaaarataatgggacatttgactataaaatatataactgttttcagagaaagcagataattttagtagattttctgctaccagatgaaatacttcacatctttctaaaggtatttaccaaagat

SEQ ID NO: 497410 - DNA, 547 bp, Homo sapiens
ttctttaaaatgatgataactttcaatataaactggaaaaatattaaacaaggatacattatgcaaatattggtcaacagcttcattatgaaacgcatgttttgcatgcaatcactgacttttctttttgggaattataataactttgtaccaagtgcatacttttgctcaaagatacgtttaaatgataacactatccctagtggtacaaggttggaaagccatattaactaatttatcaaatgcactatccagaagagctggctcttcacttttttttttaaataagaagccagtgttcacatgagaatgtttttaaaatcagatattagcttccaacataaattaagcattaatatgtgccagtctccgaaaggaccatgtatatgaattcttgacttactgaacaayaatcttttgatagtactttctttgaactttgttggaactatttatcttttctcaataaattatttatagaatatggaaactcatacccaatggatgtctatcaatacctttacaaattacaagtggttttccaaag

SEQ ID NO: 497411 - DNA, 546 bp, Homo sapiens
ttttaacttgtcaactcagacatggcagccagaagaattttctgtcaaacatcagcttttgcattgcattacgatttttatttttcattcttggaatttcaatacacaacacaagtggggctttaaataatatatttagctgcatgatgatgaactggaaaatatgttatctgaatatcaaaacattcagcaagtgtgatatacataggtggacattatcaacttcaagaaattgttttataataaagatgcccagtattttaaatcactttcagactttctattttcacaaatggcttcttcattgtgatatatatatatatatayacacacacacacacacacacacacacacacttattttaaaaggcacaaacaagagcaagagagttagtgctaattaataaactaaatctagatatctacgcctgagctgtttcccatgttgcatctccttattttgaactgcctcccatatttcttcaccataagatgtgtaggcacacaaaagtgtaacatgtccaaagactgaactcattagctttt

SEQ ID NO: 497412 - DNA, 523 bp, Homo sapiens
ctgttagcattttccaagaaattgggagagactacacaaggaactcttccagccaaatgccattttcaatgactagtctttgttttgttgtgcaatgcaaggcaaattgcttagtataaaggatttttcttactgcttgtgaagaactaaagttcagctccaattctcttccaaaaatttatctctgacatcctgaattccttttctatagggctctgagtatacttgaacatagtcctcttcctgttagtaatatgaatgtcttgcccaccagatcatagatcttctagaagctagtttttcattttactcctattctgctgctacataatctaytcaaatttgataggccttcagtcagtggagtgaactgaattaaaactagctaatctggcccgattttgttgattatgcaaccacagtagtaataactgtgattattgatgtgtgtttattaaaaactatggtgtatatagaacttccaaagcagtcagcaactcatatttgtttatgcctagcccag

SEQ ID NO: 497413 - DNA, 501 bp, Homo sapiens
tgagaatgtgcatatcaggcagctcaaattttttagtgctctgcacatgtcggcaaatgaccatgaaagcactgcaagtattggctttagggttgcaaaaaagttttattgagtaggcaaatttgcaaatacagaatctgggaataatgaagaatgactctaccacatattttgaaagagaatgattttgaaacgtgtttgtatataagaccactctatggaggctctgaattctggaaagtaattatataattttagagttggatgagatcttaggrgccagctagtccaaactcccatagcatgtagaaatttcctataaaatatttctgaagaatttacatcaaatttcggttttaatgtttacgatatttaccgtgattgggaccttacaaatttcacaggcatattactactttggctgttttaatataacatataggttgcttctactttctctctctctctctctctctctctctctctctccctgccccaggg

SEQ ID NO: 497414 - DNA, 630 bp, Homo sapiens
ttgtggtaaaacaatatcttacatgattaaattgttgattgctgataataatgacaaagttagaagttttgatttagctggccattgttttttatttaatttttttattaattatgtaaactatttcaaattctggttgtagaagagggaaagcaacgaagcgtttgctggttaacacatacataacacaaatawctttttctcattctacacatctgttcgagtattattttccactattctcttatggccacacctaagctgactcagcattctttgttcattcaatattcacaaagtactttttttgttttaagcacttagaagatgtaaatgcaaaataagataaggcccttgttctcaagacacttcccttttaaataagtcatttagaaaagtaaataagcaattctactgtaaagtcatactgccatgctagggataaaacacagggtgcttctgaggcatgtatgtgagatgcctaactgagattctgggtagggataaatgaaatacattttcttggtagaccaatatctgagctggtgatttgaaggagtgatctttcagccagacaaagtttgaagaagtgggcaccctacttaaaggccccgaagcaggagaagaatt

SEQ ID NO: 497415 - DNA, 630 bp, Homo sapiens
ttgtggtaaaacaatatcttacatgattaaattgttgattgctgataataatgacaaagttagaagttttgatttagctggccattgttttttatttaatttttttattaattatgtaaactatttcaaattctggttgtagaagagggaaagcaacgaagcgtttgctggttaacacatacataacacaaatatctttttctcattctacacatctgttcgagtattattttccactattctcttatggccacacctaagctgactcagcattctttgttcattcaatattcacaaagtactttttttgttttaagcacttagaagatgtaaatgcaaaataagataargcccttgttctcaagacacttcccttttaaataagtcatttagaaaagtaaataagcaattctactgtaaagtcatactgccatgctagggataaaacacagggtgcttctgaggcatgtatgtgagatgcctaactgagattctgggtagggataaatgaaatacattttcttggtagaccaatatctgagctggtgatttgaaggagtgatctttcagccagacaaagtttgaagaagtgggcaccctacttaaaggccccgaagcaggagaagaatt

SEQ ID NO: 497416 - DNA, 514 bp, Homo sapiens
caaattctggttgtagaagagggaaagcaacgaagcgtttgctggttaacacatacataacacaaatatctttttctcattctacacatctgttcgagtattattttccactattctcttatggccacacctaagctgactcagcattctttgttcattcaatattcacaaagtactttttttgttttaagcacttagaagatgtaaatgcaaaataagataaggcccttgttctcaagayacttcccttttaaataagtcatttagaaaagtaaataagcaattctactgtaaagtcatactgccatgctagggataaaacacagggtgcttctgaggcatgtatgtgagatgcctaactgagattctgggtagggataaatgaaatacattttcttggtagaccaatatctgagctggtgatttgaaggagtgatctttcagccagacaaagtttgaagaagtgggcaccctacttaaaggccccgaagcaggagaagaatttcaggtagtc

SEQ ID NO: 497417 - DNA, 446 bp, Homo sapiens
atactagtttgaggacttagtgcttcatttggaaggaaatggagatcaattttgagcaatgaagagatgagcagatttgtgcttaggttaatccagcarcatatatctgaatgaattataataggaaaagaagggtgaacattcattaggtgaaaagagcagtccagaagaatataaagtaatgccaggtagattcattcctacacttcaagtgtagtataatgatggcataacccaggattcacagtgagaatgggaagaagggaactgaagtaagaaacatgtagaggcactaataatataaatcaatatttattattgaaaaagtaaaaaagagccaaaaccatttccaacaagcctcagcaattgggatgaccagagaaaatggaaataaagatataggttggtttagaggatgcagttatgagtttgaattttggtccaac

SEQ ID NO: 497418 - DNA, 610 bp, Homo sapiens
atatatgcttacaatccaaaatagagaaacaaggctagcaaaaagaactccaagttattatccaggcagtacaatttcaacctgaaaggagctcaggaaataagcagtatagaagccaccattttaatcatcattcattgaaggcctagaatgtggcaggccaattataagttatcactaagagaacagtgttgtgaagcagggaaaatactccaattacaagttcagaatttgagattcagaatggttaacgtccagttcaaaaatcacactctagtagatagattctaaaacagctacgagtgccaggctctttccttcatgttgctaatcttaggtgaatctccccattccaatccccaccctccacaaatacaaagatatatgttttatcttcatatgatatgaattcaagtactattttaagtgtgtacaaatgtgattatcttccaaatagagataccatagttgactaatccttgatttctgaaatacaatttattttctggggcagtttatttatkttatttgcctcttaatactagatgaaatgggactaaattgaacagcagttgaatcctacttatgttgcctggtggtttcaatgaaa

SEQ ID NO: 497419 - DNA, 533 bp, Homo sapiens
ggagagcccaacactggcctgtgcctttcctcattttactttcagatatattctttgaggtaagtaatactagttttccagtyttatagacagaaaagggaagcttagggaatttaaactcagttgcccaagattatgtagccaattaatgtaggagtcagaattcaaaatccaagttgatctgattctagagcttattcccttaaccattatcctatgttgtatatgttataatcataagttataaaaagttctgctcgagcataaatatggttacagcatatatgcaagtatttcacattattctctgttcaaaaataaatggatattatatctttatccacgtaacaaaacatataaatgaaattataaaattatttatgagatgttactatgatatcgatttacagtcagagggaaaggcagtaattatagtttttctttttttttttactgtttacttatatgtagtcgtcactgaaaatacgttaattaatttatccattaaaaaactaaattcttgaagtaaagca

SEQ ID NO: 497420 - DNA, 533 bp, Homo sapiens
ggagagcccaacactggcctgtgcctttcctcattttactttcagatatattctttgaggtaagtaatactagttttccagttttatagacagaaaagggaagcttagggaatttaaactcagttgcccaagattatgtagccaattaatgtaggagtcagaattcaaaatccaagttgatctgattctagagcttattcccttaaccattatcctatgttgtatatgttataatcataagttataaaaagttctgctcgagcataaatatggttacagcatatatgcaagtatttcacattattctctgttcaaaaataaatggatattatatctttatccacgtaacaaaacatataaatgaaattataaaattatttatgagatgttactatgatatygatttacagtcagagggaaaggcagtaattatagtttttctttttttttttactgtttacttatatgtagtcgtcactgaaaatacgttaattaatttatccattaaaaaactaaattcttgaagtaaagca

SEQ ID NO: 497421 - DNA, 261 bp, Homo sapiens
ccaccttgccccgaggtcatgagaatcagcagagcctggcacacagcaggtgctccataaatggaaccatcgtgatcatcagcctggtgtaagtgggagggtgctcagagaaagraagattgacgctaagtagttgtttggtttgtgtcagttttattgaagtatctatacatatttaaaagtacttatgtcataagtgtagagcaagacaaaacttcacagagtgaacacacgtgtgtcaccagcatccagatcaagaaa

SEQ ID NO: 497422 - DNA, 549 bp, Homo sapiens
ctgctgtatttgtgggaatgtacactgttaataattcaatctaaatgttcgtctgcaacaggagcatgagttctgtgtgctgtgggacccagaacagtgcgttcatgtttgtctgtaaagaggacatggatgatgcgttaaaccccatcaacctcacagagagtttcaaaatcagtttataatrcttggacaggaactctcctattcattcaagctctggccatgagtccctctgtccgagggtgtggctggagcacacgcagggtggtggcccatgttcgggccaggcctcctctcccgcatgaggcatgaatggaactgccaccttggtcctcaccaaactgggacctgaggagggagcctcccgtgatggcgcagcctcttgctgagtgccttgctgtccgtggctgcctgcttgctacttcagttaactttatcttggtggtgggtgcaacctgccgtcatgtgtttcccaggagtgtagcctgtgttgagaaagaaaagtttgctctgggggcttcaacatgatggtgcccgtaaatcctttgg

SEQ ID NO: 497423 - DNA, 604 bp, Homo sapiens
ttttggcagcaaatttgattgaacaagtgcattgtgtggtagtctcccaggcacttggaattttgttggcactaatagactctgtcctcagaggccttaacttcacatttccacatttataggaaaccagaaatagttcaaagttacctcgagtgaactggatactaaatagaaggaggctacagagaaatgctgtgctgccttaccaccttcctttcctttcctttcatttcccactcacacgagcatagtatggttaggattctgcagcatcacagacacgagttcactttgttgaatgattactacacgacaagwactaggtaagtattttgatatcaatttcttcgggtactctgacaacaacactatgaggaagatatttttatctcattttatggatgaaaaaatagggattaattcctctgcccagaatctcacagtgagcacattgtggaacctgttgatttcagaacctatattttaaaagactgtgttaaaccaccccttgagtgcaagcttaagcacatttcttacagtgtgttctgcagaatgtttgttcttggagatatctgaggaaaaaagttgtgtggtcaaataaatc

SEQ ID NO: 497424 - DNA, 482 bp, Homo sapiens
aaagcagcgaataaagcattgttttccggatccctcctactmctcagcaaagtctttgtgtagagatctgataagcccttagggtgccctgactgcagccaacaatagaatttgtttagccatcttgctattcctttcttcacgtgcaaaacttgttggaggccagggagagattctctgtccatttcctcttgctgggtgaagtgtcccacaaggcagagtgcacaagcatgcgtgacctcttggaggagactagaaaggaggcataagctacgatgatgtcactgacattaattgttgggctcttgtttttaaaggaacatggcaacccgtgtgtgtctcatcccagaaagagaagactttaaccactgtgatgcctgagaatccagtgagtaagtcacagtggtggatcttgtttaccgtggagtagctcctgggggctggtcctaggcttaggaaagtgtgggatgttcccaccatcc

SEQ ID NO: 497425 - DNA, 482 bp, Homo sapiens
aaagcagcgaataaagcattgttttccggatccctcctactcctcagcaaagtctttgtgtagagatctgataagcccttagggtgccctgactgcagccaacaatagaatttgtttagccatcttgctattcctttcttcacgtgcaaaacttgttggaggccagggagagattctctgtccatttcctcttgctgggtgaagtgtcccacaaggcagagtgcacaagcatgygtgacctcttggaggagactagaaaggaggcataagctacgatgatgtcactgacattaattgttgggctcttgtttttaaaggaacatggcaacccgtgtgtgtctcatcccagaaagagaagactttaaccactgtgatgcctgagaatccagtgagtaagtcacagtggtggatcttgtttaccgtggagtagctcctgggggctggtcctaggcttaggaaagtgtgggatgttcccaccatcc

SEQ ID NO: 497426 - DNA, 518 bp, Homo sapiens
agtgcttgtgtgcctgtggccccatctactttgtgtgggagcaatatgggtatgcttatttagggcaccacccactctgtataggaattgttggaacacagggtctgagtgttcttcctgggtagggcgatgtatggtaggccctgagagctaaraccagggaactggtgcccaaccttccctggggtgttgaaaaatatttcacaggtgcaaagtggtgggggaggagtgtacctgtggtgagagtctggggaagacagaataggagataaaaatggggaacttggcaaggctgagctttggtgggcttcctgcggtcaaatgagatttggaaagaatgagagaagcctagatgactttttaaaaagaggtaaaaaatatttcattgaaccaataaaaaacagcaaatgtctttcattgacctaatgatttattttgtttattgtattttaactcaaaagtatttcagaaagttagcaagattattaattagaccacagattctattccctggcctt

SEQ ID NO: 497427 - DNA, 518 bp, Homo sapiens
agtgcttgtgtgcctgtggccccatctactttgtgtgggagcaatatgggtatgcttatttagggcaccacccactctgtataggaattgttggaacacagggtctgagtgttcttcctgggtagggcgatgtatggtaggccctgagagctaaaaccagggaactggtgcccaaccttccctggggtgttgaaraatatttcacaggtgcaaagtggtgggggaggagtgtacctgtggtgagagtctggggaagacagaataggagataaaaatggggaacttggcaaggctgagctttggtgggcttcctgcggtcaaatgagatttggaaagaatgagagaagcctagatgactttttaaaaagaggtaaaaaatatttcattgaaccaataaaaaacagcaaatgtctttcattgacctaatgatttattttgtttattgtattttaactcaaaagtatttcagaaagttagcaagattattaattagaccacagattctattccctggcctt

SEQ ID NO: 497428 - DNA, 518 bp, Homo sapiens
agtgcttgtgtgcctgtggccccatctactttgtgtgggagcaatatgggtatgcttatttagggcaccacccactctgtataggaattgttggaacacagggtctgagtgttcttcctgggtagggcgatgtatggtaggccctgagagctaaaaccagggaactggtgcccaaccttccctggggtgttgaaaaatatttcacaggtgcaragtggtgggggaggagtgtacctgtggtgagagtctggggaagacagaataggagataaaaatggggaacttggcaaggctgagctttggtgggcttcctgcggtcaaatgagatttggaaagaatgagagaagcctagatgactttttaaaaagaggtaaaaaatatttcattgaaccaataaaaaacagcaaatgtctttcattgacctaatgatttattttgtttattgtattttaactcaaaagtatttcagaaagttagcaagattattaattagaccacagattctattccctggcctt

SEQ ID NO: 497429 - DNA, 608 bp, Homo sapiens
cgtccacatagacgtgttttgaggattccttaggttaacactggtgagagtgcctgggtggtactgggccctgatgacgttggcttccttctgccattccaagcactgtgactggtcagcatacagatgtttcttgatgccaggacgggaggcctggagggtgggcactgcctcattgggacctcccggcgcctggtactgttgagtggctataagaagcaatggatgaggtgaggaagggggaatgtatgaggcgccttcaagctagaccagtggagtctactaactattgaaaaggagtrgggaagagggttggggccagaagggcaagagccaaagaacttgggttctcagtgaaggagcgggcatagaaggccagggcctgcagtggacctggggtctctccccagcactccagccctgaggctgtgtggcaaaagggggaaggtctgggcccttgctacctcctggaaacttggttgagcttcgtggtgagtctcttgggtgctctttcattggcctttcgtagtaggggtttcagacagcatgtataagaggactctccatgtgtgccttcagtgtgcatggaaaggggcttgggcttcctg

SEQ ID NO: 497430 - DNA, 584 bp, Homo sapiens
gtctgatatgccatttgggagaagaggctcagggaaggcaagaggcatcagagtcctaaatttgagggcacctgcagatcgggatggggaggctcctcctctcatttggagaggtgctcagggactctgcataaaccttgagcttgactctcagattttgtgggcttagcccattaccaatgctgttgcctgcaatctggggcccttaattataatttttagcagctagaggcagggaaaggaagttgctttgtgactcatgaagtcacataggcaggggagcagaagaaccacaaataagagactccacttggcaaaaaccaaattgcttcaaggctattcttggaaacttaaagcatcacatcttgtttcttyccagaaaatgcagaaagcctcatatttctggctagttggttttatttctattgcatatcaaacctcaaaagggcaacagctgggtggtggttaacaaggaaaactttaataagagctagttaccaggatcctctgataaaaaaaaaaaatcctgactacgttcttttggggtgaggggaaggatagccaccaaaggttttgcactccag

SEQ ID NO: 497431 - DNA, 597 bp, Homo sapiens
caggaggggaggaatcttggctatttcaaaatgtcattccttgcatttatgcaaccaaggaatccaygaagtcaaatcatacgtaacaattcaaaagatcttcagaaagatctttttaaaattttttcttttttaaaaaatatattttttcttttgagacaatctcactttgtcgccccgcctagctagttttgcatgtagctatcaatacttacgtattcatgtttttaaaagtaatatcgtattgtaaacagaatttgtaacctggtttttatgcttaccattttatcttcaaaagatcttggctcactgcaatttctgcctcctgggttcaagcgattctctgtctcagcctcccaagtagctgggattacatgtgtgcaccaccacacctggctaattttttgtattagtagagaccaggtttcactatgttggccaggctggtctcaaattcttggcctcaaatgatcctcctgtcttggcctcccacagtgctgggattacaggcatgagccactgcacccagcacataaagatcttttgattctaacacattttaatgttttctgtttgtgtgtttttttgatattttat

SEQ ID NO: 497432 - DNA, 597 bp, Homo sapiens
caggaggggaggaatcttggctatttcaaaatgtcattccttgcatttatgcaaccaaggaatccacgaagtcaaatcatacgtaacaattcaaaagatcttcagaaagatctttttaaaattttttcttttttaaaaaatatattttttcttttgagacaatctcactttgtcgccccgcctagctagttttkcatgtagctatcaatacttacgtattcatgtttttaaaagtaatatcgtattgtaaacagaatttgtaacctggtttttatgcttaccattttatcttcaaaagatcttggctcactgcaatttctgcctcctgggttcaagcgattctctgtctcagcctcccaagtagctgggattacatgtgtgcaccaccacacctggctaattttttgtattagtagagaccaggtttcactatgttggccaggctggtctcaaattcttggcctcaaatgatcctcctgtcttggcctcccacagtgctgggattacaggcatgagccactgcacccagcacataaagatcttttgattctaacacattttaatgttttctgtttgtgtgtttttttgatattttat

SEQ ID NO: 497433 - DNA, 359 bp, Homo sapiens
aaaaataaaaaaataaaattagccaggtatcttggggcatgcctgtagtcccagctacttgggaggctgaggtgggaggattgcttgagcctgggagatcaaggctgcagtgagctgtgagcatgttatkgcactccagcctgagtgacagattgagaccctgtctcaaaaaaaaaaaaaaaaaagaaagaaagaaaaagaaaatgttgatcagcaaaaggaagaagttacagatcactcataatccccctgccccaaaattcatgttttgttacacgtctttattggttacctattgctgcataacaaattattcccaaaatgtaacagcttaaaataacacatttattatctcaaaa

SEQ ID NO: 497434 - DNA, 542 bp, Homo sapiens
ccccctcatacacacaaaccatcatcaccagggcaaccacaggacagcagacggctacctagcaacacagcctccccctccagcaccttccattaccctaaggcagctccgtgggtggaacaattcgatttcactcggggaaggagagggcacccatggagaccctactgtcaaagcttactgaggttgccttgttttagaatctgcttaggtctacactgtctccaaatgtactatgcacttcttaagaagcgaaacttaaaatgtgcacccaccattgaaagtcctgagtaaatacataatgccagattagggattgccacatttctgagtaggcactgtgttcttttgaggaggagggaactgggtggagttggggcttcagagtgcccctgggaatgtctagagytaaaagtaaaaacctccttatcttagactcttagagattcatcatagtatatcctttaaattttgcagttctatccacagagagctagcagtcactcagtttttattggaattgttttttctttcaagaacag

SEQ ID NO: 497435 - DNA, 493 bp, Homo sapiens
ataaataaaaattattcagtgccttgtccttttcttcaggtcccatgtcgtgtatgcccggtgtcatgtaaaggcatgtttatggatacagaactttatcctgaatgaaagtgattttgtactaatgtaaaccccaggcactatacggtcttctgccctaagttttgggggtgagtggcaaaggggaaatgaggcttctaagcacaaaccagcacaaagttatataaccttgatcamagcttgggagggaaaaacgtcatcatccccatcaggctgtctctgatgattcctggatgaatcactgttggaaaaaataagagtaaatgttctcaagcagcagacatgtaatcagtgggaaaattcttccctttagggctttctcattcagtaaatattcctttgctgtgagtttccccaagaggcggtgccgtggtgagttgcgggggggcagcgggaggcagcccaagtccattagcaagattgcacttggagc

SEQ ID NO: 497436 - DNA, 494 bp, Homo sapiens
actatagatgctctcttcttactcccaacttatccatctgcactgcaactacccctcaggatccacatcaaatgctgctgctgccgccacctctgctccctcctccaggaaactttccaggccctccctatcccacagaagaacactccccacacccaccgctgyctcctttatgcggatggacattatacatgaactacctcgtgggttttcttctctgatagagctgaactgtggcgaaaatctcctgttacttaattttttttttttttttacacacataagccttgctttcccaagcccactgtaaatactttatgaggagaagttgagccttatgcatcttgtcatccccacagcacagagcctagggcacatagtaggtgttcaataaatgcttcttaattgcccagggtaaataagtcacctccccaatcaggtcacttcctcaattataggtacctggactggccactcccaagaggctgcatttt

SEQ ID NO: 497437 - DNA, 462 bp, Homo sapiens
cgtgcatctatgtgtgcgtgtgaaggtaagtcctatgcatctatgtatgtgtgggatgagtaccacacayatatgtatgtatgtgtgggtaagtcacttttaagaaagcccaagatacaagataaccaacacgcccaagcaagaccttctaggtcatctggttggggcaaacctggaatccagaagaagcctgaaatttcacacagtgcttcctcctactcctccttcacaacagtaatgtgtggcaactccaggcatgtggccgggaagctctcccgacatggaccccatggtccccaaggctccaactgcatgagcctcacaggacattccctgaagaaaaaggctgagtgaatcctctccctgagggtctggaaagaggttggaaatccccttgtgtgtttctctattctgttttcctttcatttagtcatcagacaaatgatgtagcctccttcttac

SEQ ID NO: 497438 - DNA, 441 bp, Homo sapiens
atgggggctgttttcccccttgccattctagtgatagtgagttctcatgagatctaatggtttaaaagcgtgtggtagattcccttgctctctstcctgccaccatgtgaagaaggtccttgcttcctcttcgccttccgccatgattgttagtgtcatgaggcttcccagtcatgcttcctgttaagcctgtggaactgtgagtcagttaaacctcttttctttataaattaccccgtctcaggcagttctttacagcagtgtgaaaatggagtaatacagtgggggaggctaacttggactgggaaggtcggaaaagtcctcttggaggaggtggtgtttaaacctggctggctggctgcatgagacttgaaagtgaagcgatggggaaaggctggagggtgggagaggggttggcctgtccatgcaccatccaggcac

SEQ ID NO: 497439 - DNA, 441 bp, Homo sapiens
atgggggctgttttcccccttgccattctagtgatagtgagttctcatgagatctaatggtttaaaagcgtgtggtagattcccttgctctctctcctgccaccatgtgaagaaggtccttgcttcctcttcgccttccgccatgattgttagtgtcatgaggcttcccagtcatgcttcctgttaagcctgtggaactgtgagtcagttaaacctcttttctttataaattaccccgtctcaggcagttctttacagcagtgtgaaaatggagtaatacagtgggggaggctaacttggactgggaaggtmggaaaagtcctcttggaggaggtggtgtttaaacctggctggctggctgcatgagacttgaaagtgaagcgatggggaaaggctggagggtgggagaggggttggcctgtccatgcaccatccaggcac

SEQ ID NO: 497440 - DNA, 441 bp, Homo sapiens
atgggggctgttttcccccttgccattctagtgatagtgagttctcatgagatctaatggtttaaaagcgtgtggtagattcccttgctctctctcctgccaccatgtgaagaaggtccttgcttcctcttcgccttccgccatgattgttagtgtcatgaggcttcccagtcatgcttcctgttaagcctgtggaactgtgagtcagttaaacctcttttctttataaattaccccgtctcaggcagttctttacagcagtgtgaaaatggagtaatacagtgggggaggctaacttggactgggaaggtcrgaaaagtcctcttggaggaggtggtgtttaaacctggctggctggctgcatgagacttgaaagtgaagcgatggggaaaggctggagggtgggagaggggttggcctgtccatgcaccatccaggcac

SEQ ID NO: 497441 - DNA, 509 bp, Homo sapiens
cggccctggctgagcatgttacatttctgatctcatttcaycctcagagaggccataagggatgtgggtggaataggaacagaattaacaggcacagaattaagtcactggagcagctgaggaactctgagagattctgtggctcagctggggcaatgaattgtgtattgctttttgagcctcctttgctaattagaccagggcctacccccgcaagcagaccacaggtgtctgggttcccaccatgatgtggggctcctgcctcagcccttgctcccagcttctgcccctaaccgttgcaactggtgcccaggccgctgcagatggcagcaggccatgaccttcacctgaagctggacctggcaggtctgcctccaggaaacctcttccccaagggacaggaactggcttcaaacctcacccagagctcaagttgctttgcccttttcactgatgacaaccgtggggacccccatagctgggccctattcatattttgcacatcctgg

SEQ ID NO: 497442 - DNA, 509 bp, Homo sapiens
cggccctggctgagcatgttacatttctgatctcatttcaccctcagagaggccataagggatgtgggtggaataggaacagaattaacaggcacagaattaagtcactggagcagctgaggaactctgagagattctgtggctcagctggggcaatgaattgtgtattgctttttgagcctcctttgctaattagaccagggcctacccccgcaagcagaccacaggtgtctgggttcccaccatgatgtggggctcctgcctcagcccttgctcccagcttctgcccctaaccgttgcaactggtgcccaggccgctgcagatggcagcaggycatgaccttcacctgaagctggacctggcaggtctgcctccaggaaacctcttccccaagggacaggaactggcttcaaacctcacccagagctcaagttgctttgcccttttcactgatgacaaccgtggggacccccatagctgggccctattcatattttgcacatcctgg

SEQ ID NO: 497443 - DNA, 636 bp, Homo sapiens
gtgtgtggtgtgtgtatgtgtgtatatggtgtgtgkggggtatgtatgaatgtgtgtatggtttgtggtgtgtgtagtatgtgtgtgtatgtgtgtatttgtgtatatatgtatttgtatatatgtatgtgtgatgtgtgtatgtatgtgtgtatggtgtgtggcgtgtgtgtatgtgtgtggtgtatatgtatttgtgtatctatgtgtgtatgtgtgtgtggtgtgtgtatgtgtgtatatgtgtgactaactgtatgtgtatgtatggtgtatgtgtgcataagtgtgtgtgtgtgtgtgtgtgtgtatttgctgtagagaccaggtctcactatgtcgcccaatttggtttcgaactcctggccctgagcattcctcccagcttagcctcccaaagtgctggggttacaggcgtgaaccatcccacctggcctagttttttcataaaaagacaaaaaagtctttatttagaaatatatttataaagtgaactcagtaaacctggattaacaacttcctatgaggacagctaaaaaggaaagttttttcttctccatatgacattgctgtgaattggatttactcaagctcacatataatgcccaacacacacactcatgcaaaccccacaca

SEQ ID NO: 497444 - DNA, 478 bp, Homo sapiens
tatagagcaatatttttctctattacatcytttttttcccttttgactcaactcactcaatctcactgaactttatttccttgatctgaaaattaagactgtgttgctgataatggcacagaaatttgtcagcttgactcttcagttcaaatgtaaaaagggtcaataggaagcaggaagtagatctggttgcagaccattatgcgatatttttcctgccacatcagaaaagaactggatgagcaagagaaaagagaggagccaagaaagtgtgaaaaagaccacggttatattctggttctcctcacaccataggccacttcacctctacctgggccattaaagtgacatccttgctaccaacaacctcagctcattaggatgagggggcagaaaaggaaggctctccattttcaattctttggactataaatgtggtaggggatcagctttaactacagtccctcccagcagggag

SEQ ID NO: 497445 - DNA, 619 bp, Homo sapiens
ctgggtaaccctggctggactcacctggcatcactcccagggttgcagtcatcagattttgaggggagatgggctgtctaagatggcyccactaatagatttgagggctcacctgggatggctgggatggccagggagcctgggcctttctccccacgtggttcattgtcctaaggtttttcagagtctggtgctctcaacgttccaaagggcaaaatagaagctataaggaaggccttttgaggtctcatctcaaaagttgcacagtgtcacttcctgcacattctattagtcaaagcaagatgcaagatcagcccagattcaaggagagtgggattagagactccagcccttgagggtaaagcagtgatgtcacattgaaaatgggcctataatgtgcatataaagatggaagaatttatggccacatttaataatctgtcacaatcagcaaactaaaaggatattactttgatgaactgatagtaatctaatcataactatatgggaagaaaatcagaaaatttaatttttttaaaaggaaaattttattatgtgaaaatacatttcagggtttgataaacgctttaaggtattgtgagattctggacaaatcatt

SEQ ID NO: 497446 - DNA, 583 bp, Homo sapiens
tctaaaatatagaattgtttggaagactaaatgactactgcatagaaatcacttaaagtctggcacataataagtattcatactcaatattattcgatttttattttatttagtcttctcataaaccaatgcgagtaaaaatatgactttcattaccagatgaagaaaatcagggttagaatataatacaataattgttacatagtataaagttgtgaaatgggttttagaatgtaaacaatttcacactttggattaaactcttaaacttgaagtgaaaacattattttaagggcttaggttttacatgcattatatttaaaatacatgtacaattacctagcctctaggaaaaatatgtgaaacctgagcatagattttgagatatgacccaatattgattatgtttttaacattattattttagtaatataaccttaaaattagagacggaattrtctatcaaaaatagagactacttttcagtcacatttgattgtcttaaatactcagatgcttgagttcaggccaatgaaatgcaagtgcaactttcagattgcattcctaaataaaatggatataa

SEQ ID NO: 497447 - DNA, 656 bp, Homo sapiens
atcgacttgccttcttcctgccgacaagctgcttatgcaaagcagcccccagtattcgtatggagggtgggggtagggagactctcatgcgtttactttgaaaagtctcctcctgacaatcaaaaacattctcaggaaacatgccttgctgtggatgatccccacaccccctgccctcctgtcttcagaaaaacaaatgagtggtttttctacagaaaggtgtagaggtaactgagggaagcctgtgatgggagaggaaattccccgtttttcatgtcccccttataaccgagggcctccttctccgaggtgytctactgagcttcatccttccacattctttccccttgactgactctcaaaggatccatttcaacgcggaagaaaaaactccagcatcttggatgatggtcgctgattctgacactcagatatgttgtcggttaaacagatagctttggctcagtgatatcggacaattgacctcttggtgcacagactcccagcagcctcgctcccaaagggggtcttaggggaagccaggtccacagatcaggagcccctaggggacctgagatgggtctagggtttcagtttcatctgtgatcttttcggtgaggtgtgttcagtcagcgacttcctaggaggaagccttc

SEQ ID NO: 497448 - DNA, 608 bp, Homo sapiens
cagcccccagtattcgtatggagggtgggggtagggagactctcatgcgtttactttgaaaagtctcctcctgacaatcaaaaacattctcaggaaacatgccttgctgtggatgatccccacaccccctgccctcctgtcttcagaaaaacaaatgagtggtttttctacagaaaggtgtagaggtaactgagggaagcctgtgatgggagaggaaattccccgtttttcatgtcccccttataaccgagggcctccttctccgaggtgctctactgagcttcatccttccacattctttccccttgactgactctcaaaggatccatttcaacgcggaagaaaaaactccagcatcttggatgatggtcgctgattctgacactcagatatgttgtcggttaaacagatagctttggctcrgtgatatcggacaattgacctcttggtgcacagactcccagcagcctcgctcccaaagggggtcttaggggaagccaggtccacagatcaggagcccctaggggacctgagatgggtctagggtttcagtttcatctgtgatcttttcggtgaggtgtgttcagtcagcgacttcctaggaggaa

SEQ ID NO: 497449 - DNA, 595 bp, Homo sapiens
tctgtgtgctcatacaagtgacctttctacctctggaatacctgaaaaccaggcggacaaagacactaaagcccacaagagtcagtatctcccgccgcttaacgccttgggcgttctaaattccttccacctccaccaccaccacttctcctgggcctgggaaccctccggggggtgtgggtccatcccacatatctcagagacctttgggcagccgtcctggaagagggacaggctggaggaaggtctcaaagctcagtcagtgtggggagagagaaagggagagagacatagggasagggagacagtagagagagacagaaagagggagatggagacagacagaaagagggagacagagagagacagaaggagacagagacaagggcaaagagacacaggagggagacacagagagagacacacagagagagggagacagaagggcagagagagacagagaggggaagatggagtcagagagggagaggcagaaagaaacagagagagaaacaaggacaaagagacacaagagaaagacacagagagagagacgtgggacacggggagacagagagagacagagggggagaca

SEQ ID NO: 497450 - DNA, 605 bp, Homo sapiens
agctctgataagcctccggcacaccggctgctggctggtatcagaccggcatgtcccttgggtcaggycactgacgacttgtgtttgaacagggagcccgggccatagccatgggtctcatgggaatgtcactgagtctcagaaagaccccatgaaaggagaggctttgttcccattccagggtggccaggacagggacactgtgtgtaaggacttcctgatcttattctcgcaccagaggaaacggagctttagggctcagagacagaacatgtttgtccaggtgtggctcagacatagacaatgggatggggtcccccttcaggaggtgcagcccaggaagcttggcagggccacagcctcatctctggggttggccagggactcctggaccagacatcggctggcgcctgccaccaccgccctgactgctgcccggccctgacaagggtgtggggaaggcggtgaggggtcccagctctcgctgctttggtctcccagcctccggagcagccggaaggggctgagtgggggtgggtaggacgagggcggggttctgaccaaggagaggtacgtcagcctcagagaaacagggttccctacca

SEQ ID NO: 497451 - DNA, 520 bp, Homo sapiens
ctgagcccaaacccaggccctgcctcacagggtgcacggtctactgcaaggatttacacaataaataccatacattacagagcatgctgggaaagcaatgcataccacagagcaaaagaaaatgggctgggtgcggtggctcacgcctgtaatcccagcactttgggaggccgaggtgggcggatcacgaggtcaggagttcgagaccagcctgaccaacatggtgaagccccgtctctactggaaatacaaaaattagccaggcgtggtgctgcatgcctgtaattccagctactcaggaggctgaggcaggagaactgcttgaactcgggaggcagaggttgcagtgagccaagattgagccactgcactccagcctgggcgacagagtgagactccatctcaaaataaataaatacataaataaataaataaataaaaatggcaagggggtggggtgcactgggcagggggtrccctgtagcatcagatgggatggatggggacagccacatccaga

SEQ ID NO: 497452 - DNA, 584 bp, Homo sapiens
cctggtaggcctcatgctggcggggtccatcctcgggacacctgcacaccctcacggcgtgttcagcctcagggctttctctgacacctggggagcccctgcgcctgcacgggagcttagtccccaaatgcaggggaataagctcctgcacagccacactcaaacacaggactaagcccatggataaacgctccagtgcccatgctgcttcaggggcaaccctggaggccttctgcatgtttcttgagagacccggcagaagcaagccccccagctcatggcggcagcctcaataacacactcttccatcagctcctcctccttcccctcctcacgctccagatacttccatgatacctcccgggatcaccgcccagctcagccacctgcacccaaacccctgccatggtctcttcttgatgggaggycatggcgccatcccactgatgctcttgttgatgcagagtgggcagtgggtaggagggggaaggtggggaagcccagaggccggtcaggggctcccctggttgtgcaggaagaaatgggatggcctggatcacggtagtggaggtggagtggaggtt

SEQ ID NO: 497453 - DNA, 584 bp, Homo sapiens
cctggtaggcctcatgctggcggggtccatcctcgggacacctgcacaccctcacggcgtgttcagcctcagggctttctctgacacctggggagcccctgcgcctgcacgggagcttagtccccaaatgcaggggaataagctcctgcacagccacactcaaacacaggactaagcccatggataaacgctccagtgcccatgctgcttcaggggcaaccctggaggccttctgcatgtttcttgagagacccggcagaagcaagccccccagctcatggcggcagcctcaataacacactcttccatcagctcctcctccttcccctcctcacgctccagatacttccatgatacctcccgggatcaccgcccagctcagccacctgcacccaaacccctgccatggtctcttcttgatgggaggccatggcgccatcccactgatgctcttgttgatgcagagtgggcagtgggtaggagggggaaggtggggaagcccagaggccggtcaggggctcccctggtygtgcaggaagaaatgggatggcctggatcacggtagtggaggtggagtggaggtt

SEQ ID NO: 497454 - DNA, 584 bp, Homo sapiens
cctggtaggcctcatgctggcggggtccatcctcgggacacctgcacaccctcacggcgtgttcagcctcagggctttctctgacacctggggagcccctgcgcctgcacgggagcttagtccccaaatgcaggggaataagctcctgcacagccacactcaaacacaggactaagcccatggataaacgctccagtgcccatgctgcttcaggggcaaccctggaggccttctgcatgtttcttgagagacccggcagaagcaagccccccagctcatggcggcagcctcaataacacactcttccatcagctcctcctccttcccctcctcacgctccagatacttccatgatacctcccgggatcaccgcccagctcagccacctgcacccaaacccctgccatggtctcttcttgatgggaggccatggcgccatcccactgatgctcttgttgatgcagagtgggcagtgggtaggagggggaaggtggggaagcccagaggccggtcaggggctcccctggttgtgcaggaagaaatgggrtggcctggatcacggtagtggaggtggagtggaggtt

SEQ ID NO: 497455 - DNA, 673 bp, Homo sapiens
agtacagagtatcatggaagcatggatgaggagcacaaaactcaggagttaggggaggcttcctggagaaagcgagacctgaaggatgaaaggagtcagccaggtgcaaggtggcaggtggagggcatcagaagaggattccaggcaacagttgcaaaggcctagagaccagaaagagcctctggggtagcrtagccatccagctcttttcctgggtgcccatgagccctttctcccactagctctggacccaggtgggtcctggctgtgcatgatcccacttggcctgcccctacccctccaagctgggcagttaggaaaggtggcgcatttcacttgtgctgtgtgaccttgggcaagtcagtaaccccctctgggccttggcttcccattagttgaataaagcagttggaaagttcctgaaggccctgtagctcagtagatgaccttgcccagatgagacgtcttttgggaattcctttgccctattctaatcctgcctcaacagcaaagtaaggcaagcttggccacggagggagagggaaagcccgtgggctgggggaggcaggggagacagcctgcttctcaccttccatcccgaacccaccactaatgaggcctgtctgtggagtaattagccacaatcacagtggggtgcattaggcagacacag

SEQ ID NO: 497456 - DNA, 673 bp, Homo sapiens
agtacagagtatcatggaagcatggatgaggagcacaaaactcaggagttaggggaggcttcctggagaaagcgagacctgaaggatgaaaggagtcagccaggtgcaaggtggcaggtggagggcatcagaagaggattccaggcaacagttgcaaaggcctagagaccagaaagagcctctggggtagcatagccatccagctcttttcctgggtgcccatgagccctttctcccactagctctggacccaggtgggtcctggctgtgcatgatcccacttggcctgcccctacccctccaagctgggcagttaggaaaggtggcgcatttcacttgtgctgtgtgaccttgggcaagtcagtaaccccctctgggccttggcttcccattagttgaataaagcagttggaaagttcctgaaggccctgtagctcagtagatgaccttgcccagatgagacgtcttttgggaattcctttgccctattctaatcctgcctcaacagcaaagtaaggcaagcttggycacggagggagagggaaagcccgtgggctgggggaggcaggggagacagcctgcttctcaccttccatcccgaacccaccactaatgaggcctgtctgtggagtaattagccacaatcacagtggggtgcattaggcagacacag

SEQ ID NO: 497457 - DNA, 340 bp, Homo sapiens
cttcaggctgatgagtgatggctgccatcggccttagagaatgtggggcagcccaaagtatggcctcacactttgccgtcgttcaagttccaaactccttattctatagatgaagaagctgatgtggaaggaggggaaggcactgggccgaggagttaagaaagagcagcctgacatgtctcatgcacctcctgtgagctgcacgccagccaccgtgtctggaggaagctgatgtggaaggaggggaargcactgggccgaggagttaagaaagagcagcctgacatggctcatgcacctcctgtgagctgtgcaccagccaccatgtctgtacaccatc

SEQ ID NO: 497458 - DNA, 605 bp, Homo sapiens
atcaacacttttttaatacttaaaaagaaaaattggccagccgtggtggctcacacctgtaatcccagcactttgggaggctgaggcaggcagatcacctgaggtcaggagttcaagaccagcctaaccaacatggagaaacmctgtctctactaaaaatacaaaattagctgggcatggtggcccatgcctgtaatcccagctactcggggggctgaggctggagaatctcttgaacccaggaggcaaaggttgtggtgagccgagatcaagccattgcactctagcctaggcaacaagagcaaaactccgtctccaaaaaaaaaaaaaaaatttaggccaggcacagtggctctcacctgcagtcccagctactcagaaggctgaggtgggaggattgcttgagccagggaggttgaggctacagtgagctgtgattgcagccccacactccagcctgggcagcagagtgggacccagtctctaaaaacctaaaaaatatattttaaataaatttttttaaaatgtaaattaaacttagatgtaggtcaaagtttctgtgaggcgggccaaattagctctgaagatctactgtatgacatggt

SEQ ID NO: 497459 - DNA, 667 bp, Homo sapiens
accacttgggaaatgatttggcaatatttgctgaagctaagcacatgcctgcatatgatccagcaattccagccataggtatttgcccaagagaaatgaaagcaagtgactgccaaatgacatgcacaaaaatcttcctcaaagctttatttgtaataacccaaaactgaaaacaactctaatgcccatctattgtagaataaataaacaaatcatggtacattcattcaatgaaatactatgcagcaatgacaaagaagaaattacggatacatgcaaccrtatgtttggatctcacagtgggaatgctgaaggaaagaaggcagacagaagtgagcgtgtgctaaatgggtccatgcatatgaagctcaaggttagatgaaattaaccctggggatccaagcctcaatagaggttacctctgggcaggttactgactggaaaaggcacaatcaaactcctgggctgttgcaattgttctatatcttgatctatgagccttttacatggctgtatacacgtgtgaaagtccgtcaagtgtgtatatatatatgtatgtattttgaatgtgagcagtttatactaagaaatacccccaataaagtggggttttttttttctatccctccaggtggaggcagagactggagtggagagggtgagggaa

SEQ ID NO: 497460 - DNA, 667 bp, Homo sapiens
accacttgggaaatgatttggcaatatttgctgaagctaagcacatgcctgcatatgatccagcaattccagccataggtatttgcccaagagaaatgaaagcaagtgactgccaaatgacatgcacaaaaatcttcctcaaagctttatttgtaataacccaaaactgaaaacaactctaatgcccatctattgtagaataaataaacaaatcatggtacattcattcaatgaaatactatgcagcaatgacaaagaagaaattacggatacatgcaaccgtatgtttggatctcacagtgggaatgctgaaggaaagaaggcagacagaagtgagcgtgtgctaaatgggtccatgcatatgaagctcaaggttagatgaaattaaccctggggatccaagcctcaatagwggttacctctgggcaggttactgactggaaaaggcacaatcaaactcctgggctgttgcaattgttctatatcttgatctatgagccttttacatggctgtatacacgtgtgaaagtccgtcaagtgtgtatatatatatgtatgtattttgaatgtgagcagtttatactaagaaatacccccaataaagtggggttttttttttctatccctccaggtggaggcagagactggagtggagagggtgagggaa

SEQ ID NO: 497461 - DNA, 522 bp, Homo sapiens
cagcagggtctgaatcataggccttcaggctgcctgggtctgaccttgctgtctttattcatccctccaggaattccgtgtattattttgatttgtctgaatcacatgattgctcagaagcagacagcaccagcaagccagcactcaaccctaagagcagccttcagtgagcagtctgctgaaattctaaaacagagtaaggcatcgcatagcatgctgtttaccagcatcaactaatttattttattgcctaaatcttaagttcttcagtattcacgcaaaagatgttgtatgattacaaagattccaaaagaaaattgacgggagtgggtgatgaaggagggagagatttgaaaaaaaaaaaaaaaaaaaaaaaaaaggacctctagaagtarggaaaatgttttttttacatgaacttcaaaaaaaatttaatttatataattttatcatataattattataattattattcagccttttattccattatcataataacttactattacttataaaaat

SEQ ID NO: 497462 - DNA, 522 bp, Homo sapiens
cagcagggtctgaatcataggccttcaggctgcctgggtctgaccttgctgtctttattcatccctccaggaattccgtgtattattttgatttgtctgaatcacatgattgctcagaagcagacagcaccagcaagccagcactcaaccctaagagcagccttcagtgagcagtctgctgaaattctaaaacagagtaaggcatcgcatagcatgctgtttaccagcatcaactaatttattttattgcctaaatcttaagttcttcagtattcacgcaaaagatgttgtatgattacaaagattccaaaagaaaattgacgggagtgggtgatgaaggagggagagatttgaaaaaaaaaaaaaaaaaaaaaaaaaaggacctctagaagtagggaaaatgtttttyttacatgaacttcaaaaaaaatttaatttatataattttatcatataattattataattattattcagccttttattccattatcataataacttactattacttataaaaat

SEQ ID NO: 497463 - DNA, 522 bp, Homo sapiens
cagcagggtctgaatcataggccttcaggctgcctgggtctgaccttgctgtctttattcatccctccaggaattccgtgtattattttgatttgtctgaatcacatgattgctcagaagcagacagcaccagcaagccagcactcaaccctaagagcagccttcagtgagcagtctgctgaaattctaaaacagagtaaggcatcgcatagcatgctgtttaccagcatcaactaatttattttattgcctaaatcttaagttcttcagtattcacgcaaaagatgttgtatgattacaaagattccaaaagaaaattgacgggagtgggtgatgaaggagggagagatttgaaaaaaaaaaaaaaaaaaaaaaaaaaggacctctagaagtagggaaaatgttttttttacatgaacttcaraaaaaatttaatttatataattttatcatataattattataattattattcagccttttattccattatcataataacttactattacttataaaaat

SEQ ID NO: 497464 - DNA, 656 bp, Homo sapiens
ttttccccttaaatgagtaagtatgagaatgcataaggtttatcaaacgtgctttctattttctgtatctattacattgaccatattttttcctcttaattgattgtatgttattcttaggatcaattaatcttggccatggggtgagggggaaatatatatatataaataatgtatgtatatatatataatrtacatatgtatacacacacacaacattttatttagaatgtttaaatctgtatttatgagaaatactggtctttttttaatagctttgttacaaaagtataataacctcataaaatgaattgagtgcttttcctcactatttttctttttcttttttttttttattatactttaagttctagggtacatgtgcacaatatgcaggtttgttacgtatgtatacatgtgccatgttggtgtgctgcacccattaactcgtcatttacattaggtatatctcctaatcctatccctccccgctcccctcaccccacaacaggccccggtgtgtgatgttccccttcctgtgtccacgtgttctcattgttcaatttccacctatgagtgagaacaccctcactattttttgaaaggtagagattatctgtttgttgaaggtttgttaaattattctataaaaatca

SEQ ID NO: 497465 - DNA, 643 bp, Homo sapiens
ctgggcaaacttctggctcctaacaggcaattacattggctctaaaaagaagttgcaaataggccatgtggtcaaatgaaggagtgtgacctgggacagatgatcatcacaggagcaatgttcaagccccacattccagggatatccaagcccagttaagtcacaagagccatttctgattggctgcactgccagggcagggtggaagacaaaagtatccagaagagtctcctgagagtatgagggtgaactaaaggaaaccctcaaaccagccagatttcttctcaaatcaacaggcatatgtccagagcccattcgtctcacaccatttcccctcaagcctcaatccaattcatgggtccctcagaatctcatcactcccacttcaaggctgtgccctcacagttaaagcttttgtctttgactaaatgaatctctatcaactaaaagaattagtctagaagtyttaaaggtcacagttcaattctctctgatcaatccaggtcatttaagtcttttgaggaaatctcttcaccctcatgtgggcagtttggtacaaagattctttatttaagcagaccttatatccaaatataaataattaaagctcagattatttcttcttcacgtcttcccatgttac

SEQ ID NO: 497466 - DNA, 481 bp, Homo sapiens
tatatatgggacatgtactagcagacataagatttaactgggaaagctttttattacacatgtaaaatttttggacaccaaatcatatttgggcttttggtcatttgtaaatgaccaaatacattttattttaattcaaatggctatgtttcatgtcaggtatgtaacactaaagatgtcattaaattttcatataaaatgattgattaaatacctaaataaaattatgttttgcttacataagattacattattgaaacaatgacatactttttttttccctaaaatggctagaactaagctttagcatctgtagttctagagcactgcagtggatgttggtagtgtccctcttagatctcatttcccaggcagatgyacccagctccagacctgcaggtgttaaaagctaatggttcccacctgtaccctccttgaaaggactgtccttagctgacaggagccacttctccatctccca

SEQ ID NO: 497467 - DNA, 553 bp, Homo sapiens
tttaaaattttcttctttatttcttcattcacccrttggtcattgaagagcatgttgtttgatttccatgtgtttgtgtattttccaaagttcctcttgatattgatttcttgttttattatattatgatctgaaaacatacttgatatgatttatgcttttgactgcattattttctgttgtttctcctactttcatactcagatgtgggaagtttttcatatttactaagttgtatgcaacaacatttaattgtgattgctatgtatttttgtggggataattaataggtgtgagtgtgtgtttacataaaaataatgtcatctttccatagctaaagcttgagattttattttttcaaagatgaaagaaaaaaatatatcagtccccagtttgttctcctcctctcaaatcatatcattatgatacaataatatcataaaaacttcaagaattggcattgacggaaaaaataaaacaaatctatattttttcataaatatctagtgcaaacttatgaggaaagatattcactatttttttactttaattt

SEQ ID NO: 497468 - DNA, 613 bp, Homo sapiens
ttaagaagtttacactttttaatagcaaaaacatgaaatctacctaaatgcctgtcaatggaagactggatatagaaaatgtggtacatattcaccatggaatagtatgcagccataagaaagaatgagatcatgtcctttacggcaacacgaatggaggtggaggccatcatcctaagcaaactaccacaggaactaccacaggaaccacagaaaaccaaatatcacgtgttcttacttataagtgggagttaagcaatgagaacacacaaatactaggaggggatcaacagacactggggcctacttgagggtggagtataggaggagggagaagataaacaaaatacctattgggtactatgcttaytacgtgagtgatgaaattttctgtacaccaaacccctgtgacgtgcagtttatctatataacaaacctgtacatgtaaccctgaacctaaaataaaagttaaaaaataaagttcatgcttttaaagtgctcaatgctttaatacaggatcttataatagcacaaaatggctttctcagaatttaaaagtctgcattacaaaatcaatctaattctgatcactcaatacacacaaaaataacta

SEQ ID NO: 497469 - DNA, 500 bp, Homo sapiens
atgtaagttttaagacattggtgaggatagtgggaggactgtagggagttgtggacacaactaaaccaaacttaatagagtagaagaagcactaagcagagttgagagagctggctgagggtcctaaccaccaacttactctctttataactttacattttagtcataactytatggccttgaattccctaagcaattgactcaaaattcactttcctctccttaaaagaaaatgtctttgaataagaattaagtcttctggcaacccacttccctctctctggcattatgtattctgagcaaccattaataggaaagtaagttagggcaattattataagcctaagtttttctccctaaaatattattttcactttgtcattctgctgcttaaaacttccagtattctcactgaccttaagatgaaatccaggaggcttaggtgtccttataaggatcgtcacaatacagcttcaactatccagtccacatcctctctt

SEQ ID NO: 497470 - DNA, 645 bp, Homo sapiens
ttttagtgcacccatcaactaaatatttggtgtcacaattgccacaatattaaacatgtgcaaactccttcattatatagttatatcacagttcaaaaatttccctgcctttcacagcagccatactctgcaatgaaatttcaattggtgccaatggttctatatactaaatatgtttcttttaaagtaagcatttccattgatccaaaacaaaataaaaagcatctaaactcataatttcctgttagtttttatatctaaaaattgaatcctattatttaaattaatctgatccaacaatttatatatcacttttgtcctcatctctatcagtaaggtgaaattctacacatttagaatgaagagtgttcttggarataacgccaagagatagctgacagatttccacaacagcaatcgacaggaaaatatcaattactttctgaagctgacaaatctaatagtccctgctatgttgagaaatgtcttataaatgttggagaaggaagagcttaaaccttgggaagtcactgaaagtacaaccttataatcatcacattttgagaagagaaatgtcatgggatttcagggacattattaatgctgtgggcagacttactattggttcacaaatattcattagcc

SEQ ID NO: 497471 - DNA, 535 bp, Homo sapiens
ttaaatcactgaggtagcctgatcaatctagcaaaaataattatggatgagacacataaaatataggaaaacgcaaatggcaatacagtgcagtgacagcaagatttttaaaatatctaggctttccaagagtgagcactaaatttggccatgcccaactgctacctgttccttccccagtcttctccaccaaattaagtagcagtgacattcttccrctgagcaagaagaaggattgagccattcttgactcttctctttatcacacatccaactctattagcaattcttttaaatatatctgaaatccaaccagttttaattttctatctaccaccaattattcctctcctagattattccacccttagcacctggtagtctatacttaacacaggaactagaataacaccattaacatatatcccaggttaagttacacatttattcaaaattctgcgaaagtttgtcattttttaaagaataacctcaaatatttctcatgacttaaaagagcctgtgtaatcttccctcc

SEQ ID NO: 497472 - DNA, 635 bp, Homo sapiens
acacctggaatgggatggttttcctcttgaatgtgtggtgctaggccccatggcaggcagtggagagggagatacacagcccaccaagctcagagccctgccgcaggcttcttctctgacacctctacctgctctaggttcttcttggcactgaagtcagaagcagatggggtccctcccagggctgctctctcccacattgactgacagctccctagaaggggactcaggcagtgggggcagttttttgggcagaagcactggagttaggctggccagttcatcacatacccccacatgacatgacacaaggcaggggcagtgggacaaagccatcacctttttttctatggcatgacaaagggttttgtaaagttcaggctgatgtggttgagcagctccagtgggaatggcttgggaagccggggctggtgggctcgggtttgagtgataggctatgggcctacaaggagtgggtgggcactaagtrcgtgccctggttgtctgtccacagacccagaacaagtggcatcccaggagcctgtggggggctggcagagacttactggttgcagtaaaagccccatgtggatgcagtgatgctgcctcactggcccttggctgtaattacaaac

SEQ ID NO: 497473 - DNA, 635 bp, Homo sapiens
acacctggaatgggatggttttcctcttgaatgtgtggtgctaggccccatggcaggcagtggagagggagatacacagcccaccaagctcagagccctgccgcaggcttcttctctgacacctctacctgctctaggttcttcttggcactgaagtcagaagcagatggggtccctcccagggctgctctctcccacattgactgacagctccctagaaggggactcaggcagtgggggcagttttttgggcagaagcactggagttaggctggccagttcatcacatacccccacatgacatgacacaaggcaggggcagtgggacaaagccatcacctttttttctatggcatgacaaagggttttgtaaagttcaggctgatgtggttgagcagctccagtgggaatggcttgggaagccggggctggtgggctcgggtttgagtgataggctatgggcctacaaggagtgggtgggcactaagtgmgtgccctggttgtctgtccacagacccagaacaagtggcatcccaggagcctgtggggggctggcagagacttactggttgcagtaaaagccccatgtggatgcagtgatgctgcctcactggcccttggctgtaattacaaac

SEQ ID NO: 497474 - DNA, 460 bp, Homo sapiens
gttttaagtaaaaaagaaaataccttaaatttcaaaggggtctttatttttggggaaacaaaaagccacttttgaccaactgtcccccatatacacacaccctggtcccccaaccacccgtcaagagggccatgtcaaggctcctaagagaggagactgtgtggtctcggcagtgcgggacgcaggctctggaaccgcagggtcgcgattggtctcatgccagccctcctggacccgtagccagaaggacagggcaggcgccgaggggccggggtgttccgcgggctggtccttgccgagaggaggctggggcacgggcttcctgctcggggaagtttgtttccgctgcccaggagggctctgcagccgccagggagggaacrcagcggggaggaggccccgagccagacgatccaggagccctgggtggcgcgggctaggtggcgggggtcggagaata

SEQ ID NO: 497475 - DNA, 584 bp, Homo sapiens
atcatttccaaaacttctactacatgaagcaataaaattgaaacatgggaaattatagtattaaacatgaaaacttttttcaccaaattactattgatatctaatattgacaggactttaaattagaatcctactactcctacgactctttaggggaaaagagagaacaagtacaagaaagccattaggagagaaatttcaattttgcaagtgcaagaaagaaacattaagctataatttaaaaaagttattgaatacctccagaaaccttgaagcaaatttaattaatgcagccaatctactttcctttgtagattatatttaaaagatcagtaatctgaggatcagctttcagtttatataattcagtgatataatattttaaatattaaatacatttttattttcaatggtattaattttttwaaaaagtcttaaatgtatgtctgtaacatgaggttcactattaattatcctgggttatagattatggtataaataaatcatcacatcactaagaaccatgcctggtcatgtgaaaagttaatacaatttattttgatagaatcaaaaaacagatagat

SEQ ID NO: 497476 - DNA, 606 bp, Homo sapiens
tatggaaacttacgcaatattctaattttgatttcatttaaatccaaaattagcacagtttcccccaacttgtgtttttcttcttttttaaatcattctacttttaaatgcagagggttttttttatatttataaaaagtacgatcttaagataaaaaaaaatactctttggacaaagcagtcttcaaagaccctacctactatcatctagaaatgtacaaggaacatcctaaggattagggcaggacatatgtgacagtttacgtgtaacctaaaggattatccattcaggatttacagttttgtctcttggcatctctccataggcaactgttttgtgtctagctgggtattatacactgatctattcaataacaggagccacgtgttactcatatctttggccccaacatctggcagcattggcatattatggatatttatgttcttagagaatgaatgaaatccaatgtagatatttgtaactgtggggaaatagctaaatrcaggggtcagacatagccattctactgctagttaaatctgggaggtagaaaaaaaaaatgtagctattcaaaagcagagactggaatgtgcaataaaaat

SEQ ID NO: 497477 - DNA, 588 bp, Homo sapiens
ctactggttgagagatgataggacttattcatggaatttacactctggtggtttgataaatatataacatgttgaaarggagtttcgtggaaaagtaaacgttattcatcagggttttagtttctcttatatttgctttcagctgagaatattgtaagttgtttgtttgatttttatttattttttcatttatttggcttttttctagatgctttacctaatctaatccaaataagaacagcacttaacaactctaaatatggcatagggggaaatatgtatatccttttctttatattatcttttgtttcacatgctgagggctgtggaaggcaaaatgtggtgaggtgctattttatagcatggttaatgcttatcagtaattttttccctctgaccttctgcctcagacaattaattttcttgaactgctcacacactggcagaacatggaggggggataatgttagtactagtgaatataatcttggaagaaaagctgtgcaattattcaaagacctaatcttatctcttgtttcatttttatatcacaagtctacatttaaaagtattagatatcctgttctg

SEQ ID NO: 497478 - DNA, 507 bp, Homo sapiens
agaaaaaagtgtctaaatattaacaaatgaaattcaaagaaataaaagtacagtctatggagtaataaaatatttctatagcagaaacaatacatggccagtcatggtggctcatgcctgtaatctcagcactttgggaggccaaggtgggygagtcacttggggtcaggagtttgagatcagcctggctaacagggtgaaaccccacctcttctaaaaatacaaaaattagccggtgtagtggtgtatgcctgtaatcccagctactcaggaggctgaggcaggagaattgcttgaacctggtagacaaaggttgcagtgagcagaaatcacatcactcactgcactccagcctgggtgacagagtgagtgaaactctgtctcaaaaaaataaataaaaattaaaaaaaaataagtgcctaatatatgctcaagaagcaaagtgagcccttctgttattaagcaaatggataagtacaagagagtgagtttcactgttcagataat

SEQ ID NO: 497479 - DNA, 507 bp, Homo sapiens
agaaaaaagtgtctaaatattaacaaatgaaattcaaagaaataaaagtacagtctatggagtaataaaatatttctatagcagaaacaatacatggccagtcatggtggctcatgcctgtaatctcagcactttgggaggccaaggtgggcgagtcacttggggtcaggagtttgagatcagcctggctaacakggtgaaaccccacctcttctaaaaatacaaaaattagccggtgtagtggtgtatgcctgtaatcccagctactcaggaggctgaggcaggagaattgcttgaacctggtagacaaaggttgcagtgagcagaaatcacatcactcactgcactccagcctgggtgacagagtgagtgaaactctgtctcaaaaaaataaataaaaattaaaaaaaaataagtgcctaatatatgctcaagaagcaaagtgagcccttctgttattaagcaaatggataagtacaagagagtgagtttcactgttcagataat

SEQ ID NO: 497480 - DNA, 507 bp, Homo sapiens
agaaaaaagtgtctaaatattaacaaatgaaattcaaagaaataaaagtacagtctatggagtaataaaatatttctatagcagaaacaatacatggccagtcatggtggctcatgcctgtaatctcagcactttgggaggccaaggtgggcgagtcacttggggtcaggagtttgagatcagcctggctaacagggtgaaaccccacctcttctaaaaatacaaaaattagccggtgtagtggtgtatgcctgtaatcccagctactcaggaggctgaggcaggagaattgcttgaacctggtagacaaaggttgcagtgagcagaaatcacatcactcactgcactccagcctgggtgacagagtgagtgaaactctgtctyaaaaaaataaataaaaattaaaaaaaaataagtgcctaatatatgctcaagaagcaaagtgagcccttctgttattaagcaaatggataagtacaagagagtgagtttcactgttcagataat

SEQ ID NO: 497481 - DNA, 584 bp, Homo sapiens
ttcattaatggtggtttgagtacttagagaagacaactatgtactgtacttagtgctgggcaaattgcctggatatacttcatatattgctgttactttaatgaatagtgttatggcaattagaagactgatggcttagaacatttargtagatgtatttgaaggtccttgaactaagtgacattgctcagtgcgcactgcaaagtaacttatctcttttgaaaagtatgatttgaaagcagaatcacctaagatatttagcataattatagtgcatttaaaataacctggattgtatatatcaaattacagatgaaagtgcaatacaagtgtaacaattaatcgctagatctttcactgaaaagtggttgtaaacacaatatttaagtaaatagaataccattaaatcttttaaaatgatatgttatttgtcatgcttctctttatttgtattatcttaagtaggacattctcacaaaagtcaggtataaatattataataattatatgaatacctaatataattgtactgatgattattcatttatctaagaaaattaatgtttcaatccctgagacaggca

SEQ ID NO: 497482 - DNA, 521 bp, Homo sapiens
cttttgaaataaagatagctaattttcagtttggagtttttacgctattataataaatgtccttatgacatgtttccagaaattctatttcactgtttgtatttcatgtttatatgagtgattttatatatcaatatgggtgggagagtgagaagtgaatgaaaaaaaaaggtctggtcttgatatctggattgaaatggcacagaacaggaayaaaatattgtgtcaagaaacatgatgattgaaaaatgtagaagtgatatgagaaagcttcctccctccaaaaatatctttaaaagagtaatttttgaaaaggtagaagatggtggtttggattagtgttaactgttatatttctcaaaattttagaatggaaaaacaggttgcttaagaaaatatgaaagattttagttccccaaagaaatcattatgttagataaattagaggtattaatacattacatggccttaaggcagtttttgtaaatgtggcaaaaattgtattcctgggcctacctatt

SEQ ID NO: 497483 - DNA, 637 bp, Homo sapiens
tgtaagcaatttcttgaaagagcttttattaatcaaagagctacagtgctgaagagtccttaagtaagatttggcttaagttactatatcatgaagccttttccagacactagataaaaacttcaaagaatggttggaagaagtttctggcttttgttgaaggactcttctggaatggtagccaraagcaaatgtggcaaactcatgacatgaaaagctaggtactaatgaaagagatgctcaggataacaaatagtagcctggggaacacatcagataacaaatagtaaaccaggggaacacatcagaatcacctaaaataatcttagattttgccctgctataggtttcttgaccttagcactatttgtattttgggatggataatacttcattttgggaaaggaacaggacactaaacatgcacagggcattgtttggcagcatccctggctttcattcaacagataccaatatgacaactaacaatgtttccagatattgcaaagtgtaccttggggtacacaatttcccccacttgataaacaatcgtagatcaactaagtcaaattatcaagtactagggctaccttgctccctagcttggccttctgaatcccacatattgaatggttag

SEQ ID NO: 497484 - DNA, 637 bp, Homo sapiens
tgtaagcaatttcttgaaagagcttttattaatcaaagagctacagtgctgaagagtccttaagtaagatttggcttaagttactatatcatgaagccttttccagacactagataaaaacttcaaagaatggttggaagaagtttctggcttttgttgaaggactcttctggaatggtagccagaagcaaatgtggcaaactcatgacatgaaaagctaggtactaatgaaagagatgctcaggataacaaatagtagcctggggaacacatcagataacaaatagtaaaccaggggaacacatcagaatcacctaaaataatcttagattttgccctgctataggtttcttgaccttagcactatttgtattttgggatggataatacttcattttgggaaaggaacaggacactaaacatgcacagggcattgtttggcagcatccctggctttcattcaacagataccaatatgacaactaacaatgtttccagatattgcaaagtgtaccttggggtacacaatttcccccacttgataaacaatcrtagatcaactaagtcaaattatcaagtactagggctaccttgctccctagcttggccttctgaatcccacatattgaatggttag

SEQ ID NO: 497485 - DNA, 630 bp, Homo sapiens
ggggtcagagagaacacggccactcatgctcagattttctcttactcctcagaataattactcttaagtatatttcctcaactctataagatcttcaaatatctttctttgcttaccactccacgcttttgctattgataagagtaagactatcactctgggtagggcaaaattaaccagaatataccccaacggtagtagtaaaagttctaaagtgacctccatgacccttacctccttgtgttccttggatggacccctccccttgattgtaggcagcacctgtgacttatttctggcaaaatgaatatggcaagtgtaacagcgtgtcacctccatgattatgttatgtaggattctaacacttgtcctgtttgaactgtctctctctcccatgctggcttttaaaaaacaagctgtcatgttgtgggctgtctatggagaggactacacagtgagtaactgaaagtgatgtctgcttaacatctatcaaaaatctgaggtcctcatcctgcagcctgcaaggaattgaatcctgccaatgacttcatgaatttggaagcasatcctttggtcacgataagactttagtcctggctaacatcttgattgcagctttacacgagaccc

SEQ ID NO: 497486 - DNA, 656 bp, Homo sapiens
aaataaaaaaatgtaaagatactgtaaccactctaagataaaagtgtggtatattaataggtattctagtttagattgagaaagcctctctggggaaaggcaattatattctttccttccttccttccttccttccttggcatgggctctcccaaggctaatcttgtgataaaagcctatgcatgaatagtttattaaggagcaggtatgagagacatggtaagagaaagagagccagtacaagtttacattatcaaatttgccactgctctacgagacggaaactgcctttgcaaaaatgataactaaggaaattatgacagtgaaaaagatgaaacctaaccaactccatcttgcttctaacctttaatstgtccttgttcattcctgggtgtaggccaaactaacctagggaagaaatttagtgtatggtttgactctgaaacaaaattgataatggccctttccggaaaagaccctcttctttcctggggaccagtctgcctttgcaggactaacaaattagctacaagatgagaaattatggtttaggggttatgcagcctctggctgcaagagtctgaacctcccaaattgctcctgtggataatatcactattgtaaaacttcagatcagtgcttgagatattttgcag

SEQ ID NO: 497487 - DNA, 493 bp, Homo sapiens
tttttttcttcacagtactggggacaatgacattaaatattgatattcataatcaataacttgttagctccctaatatttgtccctaatatttggaaggacaaaaacatakgctattttcttttcagactgtcagtcatacacatgtatccagaggatgctgaaaagcatttccgtctcttctttgagtgatttatgagtcacacccaatcctcctttctgggtccttcattttttccttcctccctagggtgccttggccctgcatccccatcatcaccatctatggggtttcctttcttcctctcaacctctggctctgacaatccatcatttggttacatcggagtttccctcagtatttaagggcacgtggtagcgggtggtgaactggagggttgggcgtgcttaagaccccaaaagcaggatacacaaaagcatttgctcccagtccagccagagaggaacatctgaaagaccaaaaaattgctctt

SEQ ID NO: 497488 - DNA, 406 bp, Homo sapiens
ttatcttgttaatggatgaataatttttctgcactaagtctgataatggttgaagattttggtgtgtgtgtgtgtgtgtgtgtgcatatatatacatatgtatgtatggggtcttcaaaagttcattgaaaatgtatattataaacaaactatgcatggatttcaaagatttttgcatgcagataaactcatactaacttgtcatactgaacaagatctagtttgaggcactaagaggaataagacatgaatttgaaaagagctcttatcaaagcaacatgaatgctgctaaaattgaagcaaaaaaacrtcaaatttatggtgaaactggaagaatggtgaaattatttatgccttacaaaaagtttatggggacagcatctcccccaatcatcagtttactaat

SEQ ID NO: 497489 - DNA, 522 bp, Homo sapiens
gaggactgaatcataagcttatttaatacatttttttctctagaagcaagcatcattgaaaccaagttatgaggagactgcaggatgagcatagaataaagcaagcgaagttagatatatcatttaaatgtttaatgagatcagaatgaacagttgaatcagaatgatttgggaagagactcttggacaggaaccagatgtagggttaacactgggggaaataagttcattatgtcagaagygggagactcctgttccttcaataaacatttattaagcatcaacccgaccaaatgttgtggatatataaaaatggaatggatatggagctgtcttcatggaacttagtctaacatggcaaattaaacaagtctgcaaatatttataatataaaatacatacaggtatgtggcatgagatcaacacagatacaattttgtggcgaggtgatgtggaaggaggattaattatatccaatcatggagagcagaggtagtttcttataaaagatggcttttcagg

SEQ ID NO: 497490 - DNA, 522 bp, Homo sapiens
gaggactgaatcataagcttatttaatacatttttttctctagaagcaagcatcattgaaaccaagttatgaggagactgcaggatgagcatagaataaagcaagcgaagttagatatatcatttaaatgtttaatgagatcagaatgaacagttgaatcagaatgatttgggaagagactcttggacaggaaccagatgtagggttaacactgggggaaataagttcattatgtcagaagtgggagactcctgttccttcaataaacatttattaagcatcaacccgaccaaatgttgtggatatayaaaaatggaatggatatggagctgtcttcatggaacttagtctaacatggcaaattaaacaagtctgcaaatatttataatataaaatacatacaggtatgtggcatgagatcaacacagatacaattttgtggcgaggtgatgtggaaggaggattaattatatccaatcatggagagcagaggtagtttcttataaaagatggcttttcagg

SEQ ID NO: 497491 - DNA, 497 bp, Homo sapiens
ttaaatgagtaaggagctgcaaactgcatggagtccttccctcagatggtggcattttaaagaagcagacagtgggaagatgaaagcttggagtagggaggtactcatacacccacctgaggagcaaacacattgaaactagttcatacactaaaaatccatattatgggtcaggagatgggatacatgtctttctgtgaatttttttttaraagatagaatctccttatgttgcccaggctagacactaactcctgggcaccaactcctgatcatcacctcaacctcccaagttagctgagactacaggtttgcagtattgtacttctgtcatttgcaacaatatgaatggagctgaaggtcattatattaagtaaaagaagccaaacacagaaagacaaatatcacatattctcagaagccaaacacagaaagacaaatatcacatgttctcagaagccaaacacagaaaggcaaatatcacatgttttcattca

SEQ ID NO: 497492 - DNA, 497 bp, Homo sapiens
ttaaatgagtaaggagctgcaaactgcatggagtccttccctcagatggtggcattttaaagaagcagacagtgggaagatgaaagcttggagtagggaggtactcatacacccacctgaggagcaaacacattgaaactagttcatacactaaaaatccatattatgggtcaggagatgggatacatgtctttctgtgaatttttttttagaagatagaatctccttatgttgcccaggctagacactaactcctgggcaccaactcctgatcatcacctcaacctcccaagttagctgagactacaggtttgcagtaytgtacttctgtcatttgcaacaatatgaatggagctgaaggtcattatattaagtaaaagaagccaaacacagaaagacaaatatcacatattctcagaagccaaacacagaaagacaaatatcacatgttctcagaagccaaacacagaaaggcaaatatcacatgttttcattca

SEQ ID NO: 497493 - DNA, 578 bp, Homo sapiens
tcagatacatacaaatgtttcaaatgcataattaaaaaaagactgatcaacatgagactattaggaaaaaagcatgtagaaatgataatataattgttaaatacgtttatgtataactcaatatctagtgaaaatagatgatataggaaaagaaattatgtgcaataagatgaaatatataaaataggcatgaatgaatatgaatgatataatgagatagtctctcggcttggctacattttgtaaaactatagtgacaaataatcccaatatctcagtgccttgaaacaaccaaatgtgatttactgcctactctacaagtctattctgagccctctgaggctatgttccctgttgtctttactctgggacccaaggctcaagctaccacaacttggagcatcgttgttcaccctggtaaaagaaaaagggtttcaggaaggctcacaatggctaagaaatgctccaggctgaaagtatatgcaccattgtagcctacagttcattagctagtaatagcacatggccccaggcaamccaaagaggccagaaagggcaaccctgctagtgaccagagc

SEQ ID NO: 497494 - DNA, 628 bp, Homo sapiens
ggtgagaaaatgttgctgtttagttaagacattgctacctgaaataaatgggggattatgttcattgagaagaaaaggaaaaatagaaattatggagcagcaaatggtctcagctatgattgtaagccatcatcccaaactctgtttatcagaaatgataaaacgtatcttgtaagtttaagaaggcttcccaaattcatgctgatatcctgttgatcactgagccacatgacagtaattgatctgccacaggtagagcaaattgtgaaatgcagatgaaagacwattgaactggatcacctaaaggatgggttactaggccctcctctgctatcgagtagcagcataccagaagagacagtcatctctctgcctggacccatcttccttgtccgtgaaagaaacaacttgactagtccacgaatggccagtattaactgcatgttgcgcaagaatcacaattgttcccagcatttttattgctgagctcacagtcagaatcattctcaacacagggttccagatatccactgataaattctagcatcaaaagagtttatagctgctggtcatttatcacacgttaagcagtgttcttagaagtttacacagattgacattcaatttt

SEQ ID NO: 497495 - DNA, 574 bp, Homo sapiens
ctacttgttgccacacaccctgatgtggtcagatgtgtttttctgtttgcgtgattgttttggcacaatggagctgaacttggagggacactctgctgtggctgttgtcttcagcctcaccgtgttgcctatcctgggcatcttcagcatggaactgacatgcttttctctgtgctgggctgaccttcaccgagggctgcccctgccttcctcctatcagaagaaggtgaaggggagaaagacactctgccctactggccaagccccatgcccagtgcctgatattcacagccaacactactccccaattgaagcattgttgttacttaacttttaatctgtctatattcattgtggaataggtcaatttcggatttcatatagattcaacgagtggccatttgccttttcctcttaaatgaagaaagaattttaataagtaggaatattttattgggagcaagggcaaacctaactaacttgtgtcatatacagaaactacagagagacaagacacctgcctcccaccargggtcctgtgtttccccagtcactcctgagctaaaaaggaagc

SEQ ID NO: 497496 - DNA, 593 bp, Homo sapiens
cacccattttactgccagcggtcgtggttctgtaaccctaaacacaattctggacatacaatcccacaaacaaagctgtggccacctcccaacacccaaactgttgagtgttttctgtgatcatcatggtgtacatgcaaagagtgtttacctgacataggaacatgattttaatatgatgttgagaatgaaaaggataagattaaatatasacacagatacagacacagttatagctacagataggatgctcacccccatccctagtgaaacttgtgcacaggaggaaagcaataccactctttccagacctggaggtagccccgcatttcattcagagggagaacatctaagccccctgtgatggttaattttctatgtcaacctgactggataaggggtacgtgggtagctggtaaagtgttattcctgggtgtgtttgccagggtgtttccagatgagattggcatgtgagttagtgggctgagtggggaggattcaccctcaatttgggcaggcaccattcaatcagttgggggcccggatgggaaaaaaaaggcagaaagctgctgacatctcaccctctctcttcc

SEQ ID NO: 497497 - DNA, 578 bp, Homo sapiens
tactacagcacagctacctgtgtgtgagctaatcattcagcaagagctgcccaaatatgtttcaaaactaagcctcttctccatgatagatggtgcaaaacttcaaaactttaattactgcaataattaaaaatgcaatagccccatttaccattgcatagattatcaaagattttaatgcctcacctttttatggtatagccacaagtgcaattaatcaaattaattaaatttaaattttatttctttaaatttaatttaaagaaaattaaacaattttcttttgtttgtgaaataygttttcttgtgaaaaaagaaaaagattattgtgagtaaatactctcccagataagacttcagaaagaacagaaatttttccacagactcccttattgaactaggagtaaataaaaacaattgtactgctttagatagaaataatacaaatacaattttgggggtggatgtttgtataagtgtgcagatgatatttattcagagtcaatagaaagcaaaaatgattctgtggtcgagttggctgtcctgcccgtgctccatgcaatgctgttcaacagcag

SEQ ID NO: 497498 - DNA, 578 bp, Homo sapiens
tactacagcacagctacctgtgtgtgagctaatcattcagcaagagctgcccaaatatgtttcaaaactaagcctcttctccatgatagatggtgcaaaacttcaaaactttaattactgcaataattaaaaatgcaatagccccatttaccattgcatagattatcaaagattttaatgcctcacctttttatggtatagccacaagtgcaattaatcaaattaattaaatttaaattttatttctttaaatttaatttaaagaaaattaaacaattttcttttgtttgtgaaatatgttttcttgtgaaaaaagaaaaagattattgtgagtaaatactctcccagataagacttcagaaagaacagaaatttttccacagactcccttattgaactaggagtaaataaaaacaattgtactgctttagatagaaataatacaaatacaattttgggggtggatgtttgtataagtgtgcagatgatatttattcagagtcaatagaaagcaaaaatgattctgtggtcgagttggctgtcctgccygtgctccatgcaatgctgttcaacagcag

SEQ ID NO: 497499 - DNA, 614 bp, Homo sapiens
ccagtagaggctgatgttgctggactggtgaccacaatttcaggaggactgagcagccaagaggctaaaccatcagcacagagttcagagaaaaaattgaggtcctcaggatgcacacacccaaaaccccatcctagagctgtgagtgtggtcgatgccctaacaggagcaatagcaggatcgatggaacatagggtccaccccaaaccaatccatttgttgagaaaataaatgacaraggtattttctgaaatgaatcagtggtaaggaaaggtaatccctcatcctatttctgatggagagcatgcaaatctattgggagagcaagtcccctcccggagcccagactccaggaagactcagctcaatgcctcctcggctctgaggatccctcctgccacttattcttcaccatgatgtgttcatgtttttctgcctccctagactttaagggtgtgtgagcagagaccattttgcattcactgcagaagaggaagacgatgtaaagatggatgagcccagtcaccagggtaccatgggtctcaggctggcagctatgagccagagtgcttcactagctcagcaaatatttacacagttcctacaatgtgcca

SEQ ID NO: 497500 - DNA, 616 bp, Homo sapiens
ctcctcctccacacctcaacatgaatatccagggactccctaatgctcaagctcaccggggctgcagacaccagagctgagcaggccgccctggtgcatgatctgctcctcggaacccatgaaccctccacggtctcagcatccaagcagcccagcctctccccagaaggtcaaccaactggccccgttcttgacttcccagtgaccatattatgcagttgcagattgaagctctattagagcagacattggtaatgagaattcaggcctcagtgtctgtctgtaacccaacagacggtgtctgcagagatcgaagtattttgtcgtcgaagaggaaggaatgatcattcatcacaaaaagcaagacatctttggtgcaaggaaaactcgaggaaaataccgcagaccatgcaatgaggcactggttgayggtgtgttataaacccgtcttcccagagtggcatgcacacggatccctcaggacatgggtgacacacagactatgcttcagcaggtctgtctgggcccaagacacagtgtttctcatcagctcccaggggatgtcaaggctgcagatccatggatctcactttgcaggacagagacttggtaatgg

SEQ ID NO: 497501 - DNA, 584 bp, Homo sapiens
gcctcgccttcctctgctcactgagaactgaaaaaaccayagtggtcagttggtccagtggcctcacatcacagatgagcaaactgtggctcagggaatgggaaggaaggccccagggtccccacagtgaaatagaagctgagctgggtctgactggagcccctaataacctaaggtgggggcttcatcctgggaaaagagggtctattataggaggaaatgcagccactgtcactgccccagtgttagtgtgcttgttggatggggcgggggcggtggtgcctggaggtgggagtatgtgagggtgaactttgtgtttaattggggtgtacttgatcttctctgggtctttctagcctggctctaccgttaacctcttgtgtgtcattgggcaagcccctttccctctttgggcctcaatttcctcctgtaaaatgagttggagagatctttgagatcccttccagctcagacctcatgcatctcccatcagcccagcctcatctgcccacctgtttccaggctcctgccctggctaaggttgtctcacagcctgctgaggctcccatggcctctctcagaat

SEQ ID NO: 497502 - DNA, 465 bp, Homo sapiens
aggtgggaggatcgcttgagcccatgaggcccaggttacagtgagccaagatcgtgccactgcacttcagcctgggtgacagaaagagaccttctctcaaaaaaaaaaaaaaaaaaaaaaaagagaggctttgggtattagcccaggctgaatagtgtcactcacaggcatcggctcaggccaggctcctctagcccagtgtgtggccctggccaaaggccaggcgtgcggcagggctggctgaactgccagcggttggtcattgacgagatctcaatggtggaggcagacctgtttgacaaactggaggccgtggccaggtcagtatgttcagagggcagcaggtgagaactgggacctggtggtcttctgtgtgcccctaaagcaccccaygctcctctccagagctgtccggcagcagaacaagccattcggagggatccagctcatcatctgtggggactt

SEQ ID NO: 497503 - DNA, 425 bp, Homo sapiens
ccctctgtgataagttgtcgtaagagcgtgtgcaggagggtcggctttttttctttttttttttttttgagacaggacctcatatcacccaggctggagtgcagyggagcaatcacagctcactgtagccttgaccttcctgggctcagttgatcctcccatctcaacctcctgagtagctgagactacaggcgtgtgccaccatgccaagctaatttttgtatttcttctagagataggggtcttgctatgttgcccaggctggtctcaaactcctggactcaagctgtcctcccacctcagcctcccgaagtgctgggattacaggcatgggccacctcaccctgccagaagtggcatttttgaggagccaagtgaaggacaatatttcaggcagagggaatagtatgggcagaagccctgag

SEQ ID NO: 497504 - DNA, 656 bp, Homo sapiens
tttttacattttcatttgtatagcaaaatttccattaaataataacatacatagtaaatatttcccacatttcattttccagagagaactacaaagtcccagaaaaataaatttttaaaactgaagattttaaaacataatataaaataaaaagagctgattatgactttgtacacatttggtgcagkctcctgtatcacagttatttagaggggctaaaaaaaaatccttaaaagtaattttagttcactccatatcctaattaataaaagactttttaaacaaaatctgaagtagaagcaagttttcagcattcatattggtggcctgttagagtctactttggagattcttctttcttattttcatcatctgctgaccctaggtgttaggagatgttgccttcagtcctggctttcctcctaactgtttggtcttggatgacttaattgacctttcatcatctcaaatcatgttctataaatgatataaatttctataaaggctctttaaggcctctttctgtcttgaaatttaatcctatgttggtctacacctcccctccatgtcagatcagatgtaatttattacttacactaacgctattcgaattaccccaagatctcatgtcctatcctctccctcattgccactgc

SEQ ID NO: 497505 - DNA, 517 bp, Homo sapiens
gcaaggccagagcatttaagaaagcttaaaagtaagaattaatagattgaagctgatcagctagtaaatacatagaacaaaactcaacatccttccaatgaagttaccacaaattagaacctgcagcataatatctacaattttcagaaagccatcaaaatgactattccaagatatgctggacttaccagataaggactataaaatagctattgatattataaatttgttcaaagatttaagaaaaaataaaacaaaaartatgacagatagggactctgcatacaagttaacatttaaaaaattaaaattctacatctacaaagcacaatagttgaattgaaaattttacccgataggcttaacagcagtttagataggacagaagaaagattagtgggttttgggatagggtaatagaaattaaaacagagaaagaaaaatcactaaaaacaaaaaacatatgttcaatgtcatgtggtataacatacatgtgattggagtgccagaaaaagag

SEQ ID NO: 497506 - DNA, 509 bp, Homo sapiens
gttgcacaatcattaaacttaatactctagaaatatttaatagaaagatgttcactatttatktggatttaaaaatatgtcccaaaacaataacccagtgatagtgccattttccaatgtgtgagtgtagtgcgtttaagtatatatgccaatgtgatagctgactacttattatcttcttagtttatgagcattttataattttttggtaataagcatgtattaattctttaatgaaagcaaatatatatttaaagtagcctaagaagggagatcctgtgtgcaatcaacaagacataatatatctcaaaaggcacaatttcttagattagggatttgttgctgtacattgaggctttccctggtgaagctgttctgagcgctgaaccacttctgctaggctgtcaataaaaaacccctgcttggtaggcttaatatgatccacctttggacatccacacaatagctgagtgggacaagtgttcattgtttatctaagcagggagtct

SEQ ID NO: 497507 - DNA, 556 bp, Homo sapiens
ggagtttccattgtattgagctgaaagagggtaataaagaggtgagtcataattcaaatcccagaaactccaactattcttaccaagttgtagtaaatgttcttttaaaaaagcttctgcatttgtatatgcttttaggacgatctccagagaattaaatggttgtttgtttcatgttaattttattagttatgctaattttacagaggaacgggacaacagagctctggtcactttcattgtgaagtagaactctgctctttgctgttttgatgctggaaatgtacctggttatcgagcagacccaggtaaaaaagagtatcacaaaatatttggaattgctaagaaccttaaaggtcagctaatatactaactcaaccatcagtattttttacagattttttaaagtggatatttagaaacaataaggagcatcctagccacacagcaatttaatgccaaatggaagagtaaaaggaggtcatatatggggaaatttgyagattccaccttaaaaaaggtgctatatttatcatgcaataagtttatttcttat

SEQ ID NO: 497508 - DNA, 619 bp, Homo sapiens
ccaggcagacaggggtgctcagaggtttcctagcttctctctagtgctttgtcattgtgtttctcccttaatatcttctaacatgtgccagaaaatattaagaaagccatctattcatgcacaaaaatgaggagtaattctataccctttagctttaaatctgcatggtctaagccagtaagagatcacaaaggctgcctctcccctgtgagggataacaaaggtgagaataacttaaaggtgtagggcactsgaggagtgacatcagcacacactcaaaatcagtaagtctttgaagagctcttgaggtaagattctaccgttttcctgaattcccgttacataatcaccaagtagaaagccggttcccactcaaacacatctagaggtaagaaattcatttttttcctgggcagccaagttcattttcaggcagttaaggtgtttaacaggattgcctggcactgagctgaacttggcctacctacaacttactggtgctagttatgtccttcggaatcaaacaaagttgggctatctgtgtcacaatgcagcttctgtattcatttttcaatggcatcttttctggtatatcgtgtgtattagtccagttgtgtta

SEQ ID NO: 497509 - DNA, 587 bp, Homo sapiens
tgaaattagaaagattaaaaagcttctttgacaattttaaagtaattccctatttgacatgggtaaaggacagatgtgtctcagggttaagcctagagctgagtgcaatgcttacagaattgaagcaacaaataaatacacacctttgccagataatcttaaagaaagaacagtgatagggaagaattgcaacctrttacaataaaaagaaacttctgaatagacacagagaaatttgataatattgaaactaccattacctaggagccttcttgagagaataacatctttccatcctcaccttcacaggcatctgaggaaaacatccccttaggcacagaatgccttaagggcttcacatgggtcattgtctcataaggggatactttttctccttgggataataaactgttccttgttgcttccaaaggactcaaaagaagagctaaatccctatatatgcctgtatgaaaacttatgtgggagaagatgggctatataccaaggagttgcaggatttgccagttttcacttgcaagaatctgaggagaatgcatgggaatggaagggtgaaaggcaaagaagga

SEQ ID NO: 497510 - DNA, 404 bp, Homo sapiens
ttctgcctcaaagatattccacactcaggggccccttcttaacatctgccccmacatcctcaccccagtttgagtcaaaatgatgaacctagaaagagactcaaaaaaaatagaatccaaaaagagcactggttacaacacatacgagtgatctattcacatgaggcttatttgatgcaaaacaacatgaaacacgatctactttttaaagccacacattaattcacaaacagaaaagcaatatgatacaacgctgaccttagaagatgctggtttgattttttgttgtctttttaaaatttgctgatggtttcttgggtaaggaggcttgttatttggggaaagggtcttcagctttctgctgtccctgagctctggtgcagattaccagggttctgccaggc

SEQ ID NO: 497511 - DNA, 489 bp, Homo sapiens
ggtagatgcctgtagtcccagctacttggaaggctgatgcaggagaatcacttgaacggtggggcggaggttgcagtgaggcgaggtcatgccacttcactccaacctgggaaaaagagtgaaactccacctcaaaaaaaaaaaaaaaaaagaatccgtaaatatgaaaaatcaatctgcatagtcacaacatcactaaattccagaactgaatttttgagaacaaatcacttagttgccttaggtacaacatgagtgagagaatgcagcmgcaataaaatttttcccctgaccttaggacattctctcagggtcagaaacacagatctcctaaggcctttgggcttccctgtggatccagaattcccacacaaaatgtagtcagtgtacctctggacgagctatacttggggtttaaccagtgaattaactttgaagaatgcctcaacgtgagttaaaaatacattcagaacctgtatgtttttctaa

SEQ ID NO: 497512 - DNA, 489 bp, Homo sapiens
ggtagatgcctgtagtcccagctacttggaaggctgatgcaggagaatcacttgaacggtggggcggaggttgcagtgaggcgaggtcatgccacttcactccaacctgggaaaaagagtgaaactccacctcaaaaaaaaaaaaaaaaaagaatccgtaaatatgaaaaatcaatctgcatagtcacaacatcactaaattccagaactgaatttttgagaacaaatcacttagttgccttaggtacaacatgagtgagagaatgcagccgcaataaaatttttccyctgaccttaggacattctctcagggtcagaaacacagatctcctaaggcctttgggcttccctgtggatccagaattcccacacaaaatgtagtcagtgtacctctggacgagctatacttggggtttaaccagtgaattaactttgaagaatgcctcaacgtgagttaaaaatacattcagaacctgtatgtttttctaa

SEQ ID NO: 497513 - DNA, 489 bp, Homo sapiens
ggtagatgcctgtagtcccagctacttggaaggctgatgcaggagaatcacttgaacggtggggcggaggttgcagtgaggcgaggtcatgccacttcactccaacctgggaaaaagagtgaaactccacctcaaaaaaaaaaaaaaaaaagaatccgtaaatatgaaaaatcaatctgcatagtcacaacatcactaaattccagaactgaatttttgagaacaaatcacttagttgccttaggtacaacatgagtgagagaatgcagccgcaataaaatttttcccctgaccttaggacattctctcagggtcagmaacacagatctcctaaggcctttgggcttccctgtggatccagaattcccacacaaaatgtagtcagtgtacctctggacgagctatacttggggtttaaccagtgaattaactttgaagaatgcctcaacgtgagttaaaaatacattcagaacctgtatgtttttctaa

SEQ ID NO: 497514 - DNA, 654 bp, Homo sapiens
ttgtttttagaaaacaacaacaacccaaactgtgcatgtttccatgtcctatgaggtcctacatggtctagaccctgcctgtttatctcccatgaggctgcccctccacctctgggctcataacccaaatggcctcttgtctgtctgtcatggcaagctctcttcttccgcaggacctttgcacatgctcttacccctgccagaaatgatttcttctttccatttcacctggctaacaacaaatcatcatttagttaagtctcaactcagaagyctcctgctgggtcatatctctcattactgcttctcataatatttgtcccctattcactggcatgaataaattccagtagcaagatctcaaaactgcaattaaaaaaaaatgtatcatagcgggaacacttaacatgagatccaccctcttaacaaatgtttttaaaatgtacaatacagtgctgttaattcatactatatacttctcaatggtgggccaatgtctatgtcttcttccactaaatccacaaagcttaaataatgcttggcaaatagtaagtgctcaattcatattgagtaaaataaatggtgtttcccagtgtgatatcatccagtgtcatgactttaaggcccatctactagttggtgactcctaaattt

SEQ ID NO: 497515 - DNA, 413 bp, Homo sapiens
acttccaaaattggagtttcattaattggggaaaaaatgctgatgttatcccagcctcttttttttttttttttttttttttttttttwaaagaaatggttcctctttttatgacacagcctggagcacagtggtgtaatcatacatcactgcaaccctgaactccgggactccagtgatcctcctttatcagcctcccaagtagctgggattacagacatgcaccaccatgcctggctaatttttttttttattttgtagagacaaggtctcactatgctgcccaagctggtctcaaactcctggactcaagagatccttctgcctcagcctctcaaaatgctggaattacaggcatgagccactgcacctgggccaaacttttaaaagaagaattggctgggttttaaaag

SEQ ID NO: 497516 - DNA, 413 bp, Homo sapiens
acttccaaaattggagtttcattaattggggaaaaaatgctgatgttatcccagcctcttttttttttttttttttttttttttttttawaagaaatggttcctctttttatgacacagcctggagcacagtggtgtaatcatacatcactgcaaccctgaactccgggactccagtgatcctcctttatcagcctcccaagtagctgggattacagacatgcaccaccatgcctggctaatttttttttttattttgtagagacaaggtctcactatgctgcccaagctggtctcaaactcctggactcaagagatccttctgcctcagcctctcaaaatgctggaattacaggcatgagccactgcacctgggccaaacttttaaaagaagaattggctgggttttaaaag

SEQ ID NO: 497517 - DNA, 340 bp, Homo sapiens
ggtcatccataatcaaaaaatgttgagaggtcaaaagctacaatgtattcataatttatcaataaataggggtctttctcctcagacttctcaacttctttaaggtaaccctgccttaaggaaactaagttgagaatggcttcaaaagctatggtgacactagctgtacacgtgaagaagagaaaatgtaaaaccatgtactatgcaaacggatactgagctgytctttataaggcactatgtattaggtattataaaagacaaaagaaccaataggataggatttctactttcagcggaacttacagtctaatcaacacttttgattaacctcaagaag

SEQ ID NO: 497518 - DNA, 557 bp, Homo sapiens
catgctgtgcatccaattacaatagtaggcgcaccatgacaagcttcacagccattttcagataaggcccaaatatgagcgcagagtgaaattagcaaacaacaacacaaaggaagtaaagagaacagagaagaattgtgtgaggaaaaggagaagagaggcccatcagtagcgaggcaagagtttgacagacggaaggtgaggaaggcaggtgaacctgtcactgatgcactcagaaaacaggggtcgcccatcactccttcacctccatactgccgcaggtcacaatcagcattaaggggacacataggctcttacatttttcttttttttttttttttgagacaaagtctcactctttcacccaggctggagtgcagtggcatgatcttggctcactgcaacctctgcctcccaggttcaagcatcacctgcctcagcctcccaaagtgctrggattacaggtgtgagccactgcgccaagccggctcttcaagaatacatccttgtccacttcatgcacaggtgagagttctgtgactattttcttggattat

SEQ ID NO: 497519 - DNA, 649 bp, Homo sapiens
gtcacttttgtcattttttattgtgtttagtttaattttctttcyttttgccttagctaatctagctaagagtctatcaattttgtttacactttcaaataaccaatttttagttttgttgaatctttgaatggttttggggtctagttttatttagttctgctctgatctttgttatttcttttttcctattagttttattcttgtttttctagttcctttggatgtgacattaggttgttgagaaataacaaaaaaatcatacaccaataatttctgattgtgatgatgctttctttaaagatattaaaacaaattggtggacagatagagactgcagacccattaaattagctagtcagaagaaccctctttgaaaatgagatgtttgacctgagatcacaagggaaaacgagggggtagccatgtaaagatctaggaataatatttcagattatgggaatgggaatggcacaggcagagtccagtgtgaaaacccagaatgccagtgatcaagaaggaaagagtaataaaataagaatcagacaggcaaagctagacatggccccaagtgcattagaaaaccttggagggttaggctatagcatgatagggcatggttcatgttgtcataaattcattcctacag

SEQ ID NO: 497520 - DNA, 649 bp, Homo sapiens
gtcacttttgtcattttttattgtgtttagtttaattttctttccttttgccttagctaatctagctaagagtctatcaattttgtttacactttcaaataaccaatttttagttttgttgaatctttgaatggttttggggtctagttttatttagttctgctctgatctttgttatttcttttttcctattagttttattcttgtttttctagttcctttggatgtgacattaggttgttgagaaataacaaaaaaatcatacaccaataatttctgattgtgatgatgctttctttaaagatattaaaacaaattggtggacagatagagactgcagacccattaaattagctagtcagaagaaccctctttgaaaatgagatgtttgacctgagatcacaagggaaaacgagggggtagccatgtaaagatctaggaataatatttcagattrtgggaatgggaatggcacaggcagagtccagtgtgaaaacccagaatgccagtgatcaagaaggaaagagtaataaaataagaatcagacaggcaaagctagacatggccccaagtgcattagaaaaccttggagggttaggctatagcatgatagggcatggttcatgttgtcataaattcattcctacag

SEQ ID NO: 497521 - DNA, 620 bp, Homo sapiens
atttagttttaataggctaatttctaaccttcacccaattaggtccagctctcatcatctcaagtctgaattctgcaatagaatcaactctggtccaccatggttccctgaagcttgtaaaatatgactttcaacatgtgattatgctgtccaaaaacctctctgtttgtataagattaagatcaagataacacatgaacccttcaagattcttgagaatctaaacgcctccagttacttagttagtaaaactaaagtcaatgaaattcagctgttctgtttgttgttgttgttgttgtttatttgtttttttatttatttactgcaatctaaagcaagtcaagcctataataggtgttataagaagagaggcagtttttcttcctaaaccacttatgaatagaaaagcattaaatattgatcctaaatctcaattttgacttaatctatagagaagcatttaactttcctggagcttgattgtcccatttgcaaaacaggaatgaaaaagtcagcttcctagtcctgctgtgagaatcacatgagattccctaaaacaggactctaacaatcatgwataacacatagaatgtgagaaaatagtattacgaacggaaact

SEQ ID NO: 497522 - DNA, 350 bp, Homo sapiens
tttcaagtgggggggtcaaggaaggtctttctgagataggaatgttcgaggacaaatctgaatcaacaagacataaatatgaaaaattgtaaaggcaacttgacagtacaaatagcatctggcatggtgccttacacacagtaggaactcagtaattatagaatgattgatggcattccttcttttttggaacattaaaaatagagaagcttacttacccaggatatatttctattaagacagatttcaggcttcacaaattccttatgacatmattcttcttacacaataacattgggactctatctgtgtatttatttgcatgtgcataaagcatctcgtgaaggata

SEQ ID NO: 497523 - DNA, 465 bp, Homo sapiens
ttgttaacactttgctgagtattcttctgtacttgttttaaatgtctttaaacatataggcagggtttttgtgtgtgtggtgtttttgttttttttttttttttttgctgtttttcttcctttgtttttataaaaacaggatcttgcagcctggtgttttaaatttagtagtatgtcctttcaaaaggcaggtatttacgagacaaacctgcatttttaaagcactggtgaagtgtgaagaaaatgagaccgattagggaagaaaacccgagaagctcagagtttgggtgaccctggggatgtgggaaggtggtgwaaatggtaccctgagggtagcatggatggtaagtaaaagaggaaaaggtgtaggtttgcataaaagaaactgatggaatttggatgccccatagcagacccaggggaatgataccaggggaaaagatggacagttttgtgggtaaatta

SEQ ID NO: 497524 - DNA, 607 bp, Homo sapiens
ggggatgtaaggggaatccactgaaaatttctgactggaactctacagtgtgatcttatgctacaaaaagattgaaacttcgattttttaaagttagttcttgtcttgttaattcaataagaagctgaattaactaactctccagtttcaagtgtacagcttagagcagtggatctcaaccttggctgcatattagaagcatctggggagcttttaaaacttactggtgcccacactccacccccagccattttgattccatttgtctggggttcagtgcaggcacgggtatgttttgaaagctcccaaggtgattctaatgtgcagtcaccactgctagatgaatggttcctcacacagactcagccccacagcctgtgataaatacacaagcaaatttactgccgcctcctctccctccagagacccagtgtgaaaggaaagagaaaattcctagtcaaasaggataatttgttttgtgccactcctggcagagtacggcatgtgtgtgtgtgcgcaccacagaggaggggtgtgggtctttgcagcagctacaggttctcagagagcggggcccttccccttagctgcaggaaggctaggtcag

SEQ ID NO: 497525 - DNA, 639 bp, Homo sapiens
ctacatataggatcatatcatcttcaaacagagctaatgttacttctcactttccaaattgaatgtcttttaattcttttcctttaccattgctctggctgggacattcagtagcatgttgaatagaagtggcaagcgtggacatcctcaccttgctcctcataataaagcattagttttcaccattgagtatgattatagctataggtgtttcatatatggtctttattatgttaaagaagtttccatttgtagttttttgagagctttttgtcatgaaagggtaaagcttttagtctttcataattaagtatgatgtcacctgtgagcttttcatatacagctttattttttgaaactgtttcttcttttcctagtttattgaacatttttatcgtaaataccatcaaatgcttttttctgcatcaattgagatggccatatggttgttgtccatcactctgttaacacagtgtattgcactgattgactttcatatgttgaatcatccttgcatttcaggtttaagtaaataacttgataacatattttgtcaagagaacytctttccactgtattgtgattttcttaattacaactatatctaagtcctagtttacatcctatttttaatgaaac

SEQ ID NO: 497526 - DNA, 567 bp, Homo sapiens
cataataatgtaattttatttatttttattcattggtaagatactcagtgcactatttcaacatggatacctatgctcatatttctgggaattttttataytatttatttgatttattttcagtttttctattttcagttccaagaatttttattagttgaatataggatcactgtagggtctgtaacttttaaagatttttttatacttctatatttttctgttaaactctcatctataaatctcttaaaatttagccctcaacatccttaatctttgtcatatatttaatatctgaaggataattttttaatcattttattcattataaatcccattgaggttttatgatgaatgtcaacttatctgattatgccatttctaattttaaaatatttattatactttatttcttgtttttccttcgtctgtgtttctttctctctctctctcccaagtgtttacctttcatattaaattctttgctcaaatgtcaggtaattgttagccaaccaatcatatttaaaactgagacaccaagtaattgactggaatctctttgtaccg

SEQ ID NO: 497527 - DNA, 600 bp, Homo sapiens
tggaggaaggaggatattcagtttgctgagctttctctctcccttctgaaaggggacactttttctccttttgtcattggacatcagactccaggttctttagcctgtggcctctgaaatttgccccagtgacctcccagggtctctcaagcctttgacctcagaatgtggcctgtagtgtgggctcccctggttttgaggctatcagacttggactgagccacgatatcgggctttgtcatgccccakcttgcagacagtctattgtgggactttacttttgtaatagtgtgagccaattcttcctaataaactccctactcctttacttttgttatagtataagccaattcttcctaatatgcattctactggctctatccctctggagagacctgactaatagagaaagaggctctaataggctctaataaaaaaagttgacaacatgaaaataaaagacaggtaatgtaatcaaagatattaatgctctaagaaagaatcaaaagaaaatcataaaagtcaaagaggatgaagcagaatgaatactgtatttgatggtatcatcagtagactggacatggctgaagaaaaaaatca

SEQ ID NO: 497528 - DNA, 600 bp, Homo sapiens
tggaggaaggaggatattcagtttgctgagctttctctctcccttctgaaaggggacactttttctccttttgtcattggacatcagactccaggttctttagcctgtggcctctgaaatttgccccagtgacctcccagggtctctcaagcctttgacctcagaatgtggcctgtagtgtgggctcccctggttttgaggctatcagacttggactgagccacgatatcgggctttgtcatgccccagcttgcagacagtctattgtgggactttacttttgtaatagtgtgagccaattcttcctaataaactccctactcctttacttttgttatagtatragccaattcttcctaatatgcattctactggctctatccctctggagagacctgactaatagagaaagaggctctaataggctctaataaaaaaagttgacaacatgaaaataaaagacaggtaatgtaatcaaagatattaatgctctaagaaagaatcaaaagaaaatcataaaagtcaaagaggatgaagcagaatgaatactgtatttgatggtatcatcagtagactggacatggctgaagaaaaaaatca

SEQ ID NO: 497529 - DNA, 600 bp, Homo sapiens
tggaggaaggaggatattcagtttgctgagctttctctctcccttctgaaaggggacactttttctccttttgtcattggacatcagactccaggttctttagcctgtggcctctgaaatttgccccagtgacctcccagggtctctcaagcctttgacctcagaatgtggcctgtagtgtgggctcccctggttttgaggctatcagacttggactgagccacgatatcgggctttgtcatgccccagcttgcagacagtctattgtgggactttacttttgtaatagtgtgagccaattcttcctaataaactccctactcctttacttttgttatagtataagccaattcttcctaatatgcattctactggctctatccctctggagagacctgactaatagagaaagaggctctaataggctctaataaaaaaagtkgacaacatgaaaataaaagacaggtaatgtaatcaaagatattaatgctctaagaaagaatcaaaagaaaatcataaaagtcaaagaggatgaagcagaatgaatactgtatttgatggtatcatcagtagactggacatggctgaagaaaaaaatca

SEQ ID NO: 497530 - DNA, 680 bp, Homo sapiens
gggggtctcactatgctgcctaggctggtcttgaacttgkgggatcaagggatcctccccctttggcttcccaaagtgttgcaactacagtcacgagacagtcactgtgcctagctgaaatatttttttaaagggagtaggggtaaggaccctgaccatcaagactttgctgaaatcctacccctaatgcataaaacaaaaatattatagaaaaatatctaggcctttgcgccactgcactccagcctgggcgacagagcaagactccatctcaaaaaaaaaaaaagaaagaaaaatacctaggcctttataactttattgtaagtatttcaaggctctctgacctgaaaagttagattttaattctcaatgacttgctcacactaagttctgtcatgacatttgcctattctttgaataattttctgttttcgaatttcatggattataaaaagaggaaaatttttttgtctttcttacacatgtactttacctatcacatatggttcatctctcataataattaacacagtaagcactatgaaaattccttctgcctccccagataaggtgaactttaaatgttaaagtaaaccatattacttttatatttaaggaaagtgcattttgctttaaaaggtaaaggctcctttcaaataaacatagatttagtatattat

SEQ ID NO: 497531 - DNA, 627 bp, Homo sapiens
  misc_feature (1)...(627): n = A,T,C or G
ttattagaaattttgcatgataccttgaaacttcatttgctcatctatttgactgaaacatctcacctgatgtttcacgtaaaagaaaccaaaatccaaccttccaaatgctaaggcatctagctggataaattatactgcaatacttacccagagctgtaaaatctgaaccagatttgaatagagctgatgccaggagctgaaactgtttaaaaaaaaaaaaaaaaaaaaagaagcagcaaattagctggctaagtgcactgaaggaaaatagccttctataactttgaccatttatcagcaactacgtatttctgcatatgtgtgacataggtctattcaccaaatagtggcaagaaraacacattcagattacacaatataatgacttttctactaggctattatcattttctaaaatactgggccatgtcctggaattattttattttaaaaatgtgttaaagtatgtacttattaaggaacaacagcacaacaaaataaaaaagaaaactgtcatttgaatctaacacaatacaaaaattgggtgcccctgggtcccgttactgaaatttttagcatatatgcattctcatnnnnnnnnnnnnnnnnnnnnnnnnnnnnnnn

SEQ ID NO: 497532 - DNA, 627 bp, Homo sapiens
  misc_feature (1)...(627): n = A,T,C or G
ttattagaaattttgcatgataccttgaaacttcatttgctcatctatttgactgaaacatctcacctgatgtttcacgtaaaagaaaccaaaatccaaccttccaaatgctaaggcatctagctggataaattatactgcaatacttacccagagctgtaaaatctgaaccagatttgaatagagctgatgccaggagctgaaactgtttaaaaaaaaaaaaaaaaaaaaagaagcagcaaattagctggctaagtgcactgaaggaaaatagccttctataactttgaccatttatcagcaactacgtatttctgcatatgtgtgacataggtctattcaccaaatagtggcaagaaaaacacattcagattacasaatataatgacttttctactaggctattatcattttctaaaatactgggccatgtcctggaattattttattttaaaaatgtgttaaagtatgtacttattaaggaacaacagcacaacaaaataaaaaagaaaactgtcatttgaatctaacacaatacaaaaattgggtgcccctgggtcccgttactgaaatttttagcatatatgcattctcatnnnnnnnnnnnnnnnnnnnnnnnnnnnnnnn

SEQ ID NO: 497533 - DNA, 593 bp, Homo sapiens
tataataattacaaccctaactttggatatagaaacwaagacataatccctcagcatgtaaatacagatgtctagtgactcattatggcacttattattgttgctattataacaattatcttttgatggtttcacattgggtatgatccaacatcttatgggaacaattttaaaaggtggtttccaggaatagcatgaggaagaagccatggctctggttagacaagctttacccagtcatcatctcctaggtagttttccttttataaataatcttagtttcaagtagaaagaaatgtgttttctctgtcttgccatagacaacaattgcctccatctttccaaaatagatatccatttcctctgcaatgttttatattaactatctgaaattaaatgaaagttatatgtttaatgttcttgtatacaacagcaaaagagaaatgagtttcttttttagtattatttaatatgagtaaatcttgatttatgaggattgttaagagaaaaaatgcacattatatccaatagctcaaactagccttagtagactctataaatcattaattattatgcaaaatgtatttacttca

SEQ ID NO: 497534 - DNA, 616 bp, Homo sapiens
agctgtccatcagcagcccacagctcagaatgggctgatgatccatctctagggctccgtgttgtggaaagcaggctgcccttcactggatgagtaacctagccagcatttcacctctgtgcatgccacgcatagctcttccctccccagcccaggcacgggcatgccacaatcctagctccacacacagaaaagccgcccggatcatttcatgtagcttcaccgctcctccaatcacaaagcacaccctggaccttgacctatgctgcttctacttacctggggtctaaggaccagaggtttaaacttcccgagctttagaatttgcagagaatagtggggacctcatggtatgtggaagcatcaggagaccaagcgtgagaaagaacttcatacactacacgatttgctacataaactatgagcaatgtaagaaggtactacactggacttctcatttcaccaaatgggattagaagtaatgcaggaaaatcccacctgccttaattcatagaatggcaacattgtatgtgtgtttggaggtgggggcaggggggagctatgaagttggtgaattcttyataactgaaaaaactagtgtgattgtggtatttgc

SEQ ID NO: 497535 - DNA, 616 bp, Homo sapiens
agctgtccatcagcagcccacagctcagaatgggctgatgatccatctctagggctccgtgttgtggaaagcaggctgcccttcactggatgagtaacctagccagcatttcacctctgtgcatgccacgcatagctcttccctccccagcccaggcacgggcatgccacaatcctagctccacacacagaaaagccgcccggatcatttcatgtagcttcaccgctcctccaatcacaaagcacaccctggaccttgacctatgctgcttctacttacctggggtctaaggaccagaggtttaaacttcccgagctttagaatttgcagagaatagtggggacctcatggtatgtggaagcatcaggagaccaagcgtgagaaagaacttcatacactacacgatttgctacataaactatgagcaatgtaagaaggtactacactggacttctcatttcaccaaatgggattagaagtaatgcaggaaaatcccacctgccttaattcatagaatggcaacattgtatgtgtgtttggaggtgggggcaggggggagctatgaagttggtgaattcttcataastgaaaaaactagtgtgattgtggtatttgc

SEQ ID NO: 497536 - DNA, 534 bp, Homo sapiens
aactgtctggcaatggtgatgtttaaaaatgatgaccacactcagcagggctgcacaacctctgatgcaggagggctactgggcaaccatgtgacagccctgacttacttcttaatgtctaaagccaggacatttctacagagagggagaacacaggaataagttcatccattcattcatttgacaaagttctatcaagagctcaatgagttcctggttccttggaagatggtggtcactcccagaggcactggcatggtctccgccttcaagaagtgcacagtccagttgtggagaaactagagatgagcaggggaatgtgaaatgtaatgtgcaatggcagaggcatgtacrgtgtgaggcaaatggcaggcgtattgatgctattattagatcaagagtaccatggcccagagacatttcaggaggcattgttgagctgacttttgcagacagcccaggagctggtggtgagaaaggactctcttaacccaaggaaatatagcatgtgcaaagttcaagaggactgacaca

SEQ ID NO: 497537 - DNA, 570 bp, Homo sapiens
tcagtcaagagcttcataatgcatttccagaagcaggaggccccatgggagcccaggcaaaacttkcaatcccgattgagacgtctgggcaggtctggctgaaccgtggggtggactctctagaactccatttgcaccagaaacagaaagcctcctgggagactcctcctaaggttctggaaggccaggaacacaaggttcttcaagtcacagtgcagtgggttcacaagggaatgagcatccccagtacagagtggcctcggcatatcttcaccctccgcagtttcctgagggtccccgggatcacaggagggggtggtgcacccacgaggaaggcttggggctgaaagtgacagaacaacctaaccacagtggcttaaacaaataagggacttatttttcggcttagtggccaaagctgaggtctctgagaccatcttggcccctccttcaaggtctccagtagtgggaactgcgccacctatcacatctgcctctctttcataagaagagaggaaacaaaccctggagcagaagttttcaggaactctaagcaaactgtgctttctt

SEQ ID NO: 497538 - DNA, 570 bp, Homo sapiens
tcagtcaagagcttcataatgcatttccagaagcaggaggccccatgggagcccaggcaaaactttcaatcccgattgagacgtctgggcaggtctggctgaaccgtggrgtggactctctagaactccatttgcaccagaaacagaaagcctcctgggagactcctcctaaggttctggaaggccaggaacacaaggttcttcaagtcacagtgcagtgggttcacaagggaatgagcatccccagtacagagtggcctcggcatatcttcaccctccgcagtttcctgagggtccccgggatcacaggagggggtggtgcacccacgaggaaggcttggggctgaaagtgacagaacaacctaaccacagtggcttaaacaaataagggacttatttttcggcttagtggccaaagctgaggtctctgagaccatcttggcccctccttcaaggtctccagtagtgggaactgcgccacctatcacatctgcctctctttcataagaagagaggaaacaaaccctggagcagaagttttcaggaactctaagcaaactgtgctttctt

SEQ ID NO: 497539 - DNA, 642 bp, Homo sapiens
ctgcaaccctacatccatggagataagaggtaatgattcagcctggaagagtagttgaagtragactagcagaaaaccttgaatatcggtccaaggtgcttggatttttgtagacaaagtgaagctactgaaggtgggaaataacctgataaaaattgtgatttggaaatgtgaatctggcagtaaaatgaagaaagattagagaggcggcaggcaaagaggcaggttagaagcaattccttgtccaggccaggtacgtcttagtaattgatgttcatatggctagctccaaattaccacaagcactgactgctgcaagctgattcttgctgacatcaaggacagaaaggtagggatatttatctctggctataccccccacatgggacaacctgtgaataaagcaatctgttcacccatatggaccccacaagttttataaatgtgagtaaattcactcataactggcatttcatataattaaatttagcagagattaatcatcaaaattacaccaattgcagtttcccattttgggcaatgtttatcgattaagtagaaagagacatacatacacatacaacaacatcaacaagcaagaacaacatttttccagccaaaattatcttattcttctatatt

SEQ ID NO: 497540 - DNA, 390 bp, Homo sapiens
tccagaagcttggtcatcaaaggccatgtaacaatcaccttcattactggaaatctcactttgggatcctagaaccatcatgtaagaatttctagcactctacctgtagaggccctgcctgccctttggtcaatagttgcatatgaagccagtctcccaatcatcactgccaaggtgccagacatgagagaagcctttcctggataccctagaccagccacctaccaacggaataccatcaagtgacatctgtcaacactggggagaaaaacaacagctcaaccaatctctgcccagattctcacctggaaaattatgagatatataaaaatagatgttaatttaagrcattaaattttcggggagtctctagacacacaacagtaaatt

SEQ ID NO: 497541 - DNA, 517 bp, Homo sapiens
gctggctaaataattataaactgtaatcaggatgtgtaatccagatgctcaaatattattgtcaaatgtccaaatgaatgcccatcacaatttgtaagctgagatttttctttctcttaaaatgatttttactgactgtcaaactaatttgtggatggcccataatgcaagtgccacattgttttattagggacagtgaacattgtgggaagtgtttttgaaaccaagcatgcaggatagataaataatacagcaaaggaatatcagattcagaagagcaatttttcaagtgggagcaccttattaaaatctagtttttataatatttataaaatggttgaatatgttttttatacttaatgtcttcttccttttggaacaaagaattataacatggagaaaatctatttgaagacttccctgatttaattattttatagtagattccatgcakaaattttgaactcagaatgaccaagatggaaatgctgattttgccattgttagtagtgtgaca

SEQ ID NO: 497542 - DNA, 633 bp, Homo sapiens
taaaaacctgatacatctcttaaattttgagtccaaggaaactccctgggggttttggaggagatgtatactttacagatgattcattagctctaagttctcagttggatrcttattttcaagtatcttttagattattgtagtataaattgcatgaagtcagggatttctgttttgtttgctggtatatctctatgcataaagtagttctttgaatgtagtaggagttcaatcaatattaatgaacctaatgaatgcattatctctagttcttggggacatctttcccatttgcagcctctgctaacttccccacatgctggttgctgtcctcctgtggtttgtaagatgtgacatgagctcatcttcagggactgctaggtgagttggagaactgtctgagccctgagttgtgtagcaacccttcagacagatctgtgtttatctctgatttggagggctgagaaagtacatacttcactgatctgggagcagtttttaaatactatcttttgatattacagtttccttaatgtgcagcatgaattgatatcccacagactctcacaggacagccctgggtttggtcacatcaagcatgactgtcagctttcttgctactttcttggacca

SEQ ID NO: 497543 - DNA, 633 bp, Homo sapiens
taaaaacctgatacatctcttaaattttgagtccaaggaaactccctgggggttttggaggagatgtatactttacagatgattcattagctctaagttctcagttggatacttattttcaagtatcttttagattattgtagtataaattgcatgaagtcagggatktctgttttgtttgctggtatatctctatgcataaagtagttctttgaatgtagtaggagttcaatcaatattaatgaacctaatgaatgcattatctctagttcttggggacatctttcccatttgcagcctctgctaacttccccacatgctggttgctgtcctcctgtggtttgtaagatgtgacatgagctcatcttcagggactgctaggtgagttggagaactgtctgagccctgagttgtgtagcaacccttcagacagatctgtgtttatctctgatttggagggctgagaaagtacatacttcactgatctgggagcagtttttaaatactatcttttgatattacagtttccttaatgtgcagcatgaattgatatcccacagactctcacaggacagccctgggtttggtcacatcaagcatgactgtcagctttcttgctactttcttggacca

SEQ ID NO: 497544 - DNA, 633 bp, Homo sapiens
taaaaacctgatacatctcttaaattttgagtccaaggaaactccctgggggttttggaggagatgtatactttacagatgattcattagctctaagttctcagttggatacttattttcaagtatcttttagattattgtagtataaattgcatgaagtcagggatttctgttttgtttgctggtatatctctatgcataaagtagttctttgaatgtagtaggagttcaatcaatattaatgaacctaatgaatgcattatctctagttcttggggacatctttcccatttgcagcctctgctaacttccccacatgctggttgctgtcctcctgtggtttgtaagatgtgacatgagctcatcttcagggastgctaggtgagttggagaactgtctgagccctgagttgtgtagcaacccttcagacagatctgtgtttatctctgatttggagggctgagaaagtacatacttcactgatctgggagcagtttttaaatactatcttttgatattacagtttccttaatgtgcagcatgaattgatatcccacagactctcacaggacagccctgggtttggtcacatcaagcatgactgtcagctttcttgctactttcttggacca

SEQ ID NO: 497545 - DNA, 467 bp, Homo sapiens
gtgtaccatgcctttacctgagccatcggttgctctccaaatcctggctctgaatgggtttcacacatatgcctctatgtaaatcctaaattyctgttgatatttttctctcagagagtcacatccataggactcaaagcagctcttatttttttttgcctcagtatattaacaatcttataacattcctccccagagtatagaattagcttatagtcatgaaagggtgggtttcatctgtgttcatcagaatgttctatatccactgattaatttgctttttcttcagtgactcagagatgatttcctcttcagaaaacagaagaattttctgacacatttatccaggtaaaaaattaaacacacatacacacaaacactctgtcctccaaaatacatataatatttgctatttcttacaagtgaggttacttgctcaatatttgagtaaaactattgatcaagaa

SEQ ID NO: 497546 - DNA, 411 bp, Homo sapiens
ataagtgacagagagggagagagagagagacagatggaaacagaaagagagagagagagacagagacagagagactgagacagagaggatgtggaataagatgaggatgaggattaagaacatatgcagttttgtaactgactcaagagatagctgtaacatgtgccactcaataatcccaataaagtctctgcttgctgatacagtgaaaacctgctacacgctttcaagcaaagaagattctcaagactttccaaataaagagctatgggctcattctgcatgcagacaatatcatcaatggaaacacaccacagaaatagactactccccatggtttcctgccctccagctttcgtaaagtcataacagatgctcgacasccgtacacagtcctagactggtagcagc

SEQ ID NO: 497547 - DNA, 654 bp, Homo sapiens
ctgacttaaaatgattcaacttactatttttccactttgtgatggtggaaaagtggtatgcattcagtagaaacagtatttcragtacctatgcaaccattttgtttttcactttcagtacagtactggaggaattacatgagatatccaacacttataacaggctttactttatgttattttgcccagctataggctaatataagtgttctgagcacatttgaggcagcctaggctatgatgtttgttaggttaggtgtattatatgcattttcaatttgtgatatttttaacttgtgattatatgcattttcaatttatgatatttttaacttgtaatgggacacaatcccacataaatcaacgagtatctgtatggtgttcattaccctttgtgatttcaggcatccactaggggtcttggaatgcttcccttagggacaaggaaggacaattgggccataaattatatattcatttcctttttgaaggacattttgtttccagggttatttgccatcttattacaaacaaaaatgaaataaacatccttgtgtaccttggttatccttttctaggatatctgtacatgcaagatacaataatcagaagatacacattgttagattccaggggagtcagcgggcaaggggt

SEQ ID NO: 497548 - DNA, 654 bp, Homo sapiens
ctgacttaaaatgattcaacttactatttttccactttgtgatggtggaaaagtggtatgcattcagtagaaacagtatttcaagtacctatgcaaccattttgtttttcactttcagtacagtactggaggaattacatgagatatccaacacttataacaggctttaytttatgttattttgcccagctataggctaatataagtgttctgagcacatttgaggcagcctaggctatgatgtttgttaggttaggtgtattatatgcattttcaatttgtgatatttttaacttgtgattatatgcattttcaatttatgatatttttaacttgtaatgggacacaatcccacataaatcaacgagtatctgtatggtgttcattaccctttgtgatttcaggcatccactaggggtcttggaatgcttcccttagggacaaggaaggacaattgggccataaattatatattcatttcctttttgaaggacattttgtttccagggttatttgccatcttattacaaacaaaaatgaaataaacatccttgtgtaccttggttatccttttctaggatatctgtacatgcaagatacaataatcagaagatacacattgttagattccaggggagtcagcgggcaaggggt

SEQ ID NO: 497549 - DNA, 635 bp, Homo sapiens
tgtctgaagcaactaaagaaacaatgttagttggaaaatgcccatagatttcatgagataaaagcattctgtttgtggaggggccatggccaatagttggtaatggaatgaggtcaccttctcatgcatgggcacctcttagtgaaggctgcactccacagtgggggggtggggggcaggtttgcaagggagggagtaagaatgacatggaaggaagaaccagaacgaaagggattggtgaggaagaaagtagaaaagtaaattgcatgaactccgtggaaatggacatcaacgttgtgagcccattcctttgctatccccttcagcaaggcaagattcatctcctcctgccattttgcctgtgccacatggtggagcctggtgggagtttacrtataacactggaggtcttgctgtcatttaattcctagggagataagcggtgggagctggaagtggggaggaaaaaatgttaagtagagaggcaacagagcagtgtgctttgggaggaagagtagagcctgaaaacacattttcctctttgggttccgcactatctgacctagtccattctttcaataagtgtgtgcctatcacatactgggcaatgtgcaagaaagagggtggtgaggcag

SEQ ID NO: 497550 - DNA, 635 bp, Homo sapiens
tgtctgaagcaactaaagaaacaatgttagttggaaaatgcccatagatttcatgagataaaagcattctgtttgtggaggggccatggccaatagttggtaatggaatgaggtcaccttctcatgcatgggcacctcttagtgaaggctgcactccacagtgggggggtggggggcaggtttgcaagggagggagtaagaatgacatggaaggaagaaccagaacgaaagggattggtgaggaagaaagtagaaaagtaaattgcatgaactccgtggaaatggacatcaacgttgtgagcccattcctttgctatccccttcagcaaggcaagattcatctcctcctgccattttgcctgtgccacatggtggagcctggtgggagtttacatataacactggaggtcttgctgtcatttaattcctagggagataagcggtgggagctggaagtggggaggaaaaaatgttaagtagagaggcaacagagcagtgtgctttgggaggaagagtagagcctgaaaasacattttcctctttgggttccgcactatctgacctagtccattctttcaataagtgtgtgcctatcacatactgggcaatgtgcaagaaagagggtggtgaggcag

SEQ ID NO: 497551 - DNA, 557 bp, Homo sapiens
ttcaacatatatttctgcaggacacaaggcaacccatagcagatggagagcatcagcatgatgggattgctaataatgggtttaatgtatcaagctatttctcaattcagagacttcccatgtattgtctcctctgtctgcattacttttctgcccactctttgctcaagttctggtrttgtactggagccatctcacaccagctcttgaggttcaattgttaaattttcagaagccagttgccaaacacagcaattattaaaaattaaatatataaacataataaattacatttaaagcaatggtaatacattctaaaaacttatccatttctagctattttgctacatttgattattatctatctatactctttagattatttgcatctattatatttacatagcagaaatataaaatactggtattaatatgtctccataaatccatattcagtgacctcaccttgatagtttgaaattggccacagagtggatatatttataatacagaaaccagctaccagtacaaatcaggtctttttttatccttggaaa

SEQ ID NO: 497552 - DNA, 557 bp, Homo sapiens
ttcaacatatatttctgcaggacacaaggcaacccatagcagatggagagcatcagcatgatgggattgctaataatgggtttaatgtatcaagctatttctcaattcagagacttcccatgtattgtctcctctgtctgcattacttttctgcccactctttgctcaagttctggtgttgtactggagccatctcacaccagctcttgaggttcaattgytaaattttcagaagccagttgccaaacacagcaattattaaaaattaaatatataaacataataaattacatttaaagcaatggtaatacattctaaaaacttatccatttctagctattttgctacatttgattattatctatctatactctttagattatttgcatctattatatttacatagcagaaatataaaatactggtattaatatgtctccataaatccatattcagtgacctcaccttgatagtttgaaattggccacagagtggatatatttataatacagaaaccagctaccagtacaaatcaggtctttttttatccttggaaa

SEQ ID NO: 497553 - DNA, 615 bp, Homo sapiens
agcaatctattgtccataatcatgtttaaattaatagcattttaaaagcacaaagatttttttaaaatacaaataattatttaatttgccttttaaaaacttttttaaagtcctgaggactattttctttaaagtgctgagttatagaactccatatattgggctatgacagccttacctgattcttgtcaggaatctagtacccagaaaatgcaaatacaaactaagmaactcaaaaataaacaaataaattggaggtatgctacctgttgaaatatgacgtagcgcaaacacctatgccacttgcttatgaatcatataggtttttggtgtgcagttttgattgaatgacggagtttacgctggaccacaagggggaccctctgtcaataacatactccatttgtgtattaagtcaaaaatgaaatggaagagaaaagaaacatcgatgaccccaagtctctttaattgaatggaggtaaaaaaaaaaacaatgaatgagaaaagtactctgcccttttaagaatcttggattcacattcctgatgaagttatttttcctcttctcactgattcccatttcactgtattatatagcactgtgttccccaggag

SEQ ID NO: 497554 - DNA, 565 bp, Homo sapiens
gctcggcccggcctgccaggaacctcttatcaaactccaccggctgcctgcatctacaattcaagtccatggctaaccttctgttagagacagaaattctgctgcagccagcaagtttgctggtgtacagggcaccgcttcatgggcctagtaggaagcgaagctgaaaggcaacttccgaaagccagtctcctctcccaaacgccytttaatatctccccagttggatctggggcgcctgtggtttcggacccttaggagctctgagaactggtgtgtgtggtcggaagccatctgagtctccctgtgatttggactttttaagaaacttctaagttgtattactataccctttaaaaacagacggaagcagtgtaaaaaggcctctagtttttagaaaagaccgtaactactggggagggggctcacaaagaaaaagactgcagagaaaagcatcaaaatggtgttttcctaacgctccacaaaagggtcaacaagtaacaaagagcggcgaaaacctcctcctattcctatcgtcttctgcgtgtgagaagaaccctgttcc

SEQ ID NO: 497555 - DNA, 605 bp, Homo sapiens
tgggcctagtaggaagcgaagctgaaaggcaacttccgaaagccagtctcctctcccaaacgccctttaatatctccccagttggatctggggcgcctgtggtttcggacccttaggagctctgagaactggtgtgtgtggtcggaagccatctgagtctccctgtgatttggactttttaagaaacttctaagttgtattactataccctttaaaaacagacggaagcagtgtaaaaaggcctctagtttttagaaaagaccgtaactactggggagggggctcacaaagaaaaagactgcagagaaaagcatcaaaatggtgttttcctaacgctccacaaaagggtcaacaagtaacaaagagcggcgaaaacctcctcctattcctatcgtcttctgcktgtgagaagaaccctgttccccaggaactgccccaacacctcgagcaggtgcctcccctctccaatgaagcctctcccgtccgcccggcccagaaactgggcaacttactggtttcggcattttcggtttctggtgagtatcctcgatccccgaaaacacgactatccagcagcagcgaagacgctgtcccaacctggagtc

SEQ ID NO: 497556 - DNA, 596 bp, Homo sapiens
cttaagtagaggaaaagaagattgaagattggaagaaaatgacagatcatcaaatcacaaagaaatgggggaatgtggaatctgtccttgatgactgccactgaatattcacactaacatcacagtgaggtccctgttcatttgtgcaggagaacatgtacaaacatttaggcagaacatacgcagagtagagtatacagacctctccctcctgttcaggcttttagctggcattaggggtttgagaccttggaatgytgtcaaagaaaaacacactttaaaagcccgtttccaaaagggtgacaaacgggactggatgatgtgtttaacctcatgaaatattgaactcttggatgtaaatctgcccatatcactagagatgaaagagttattcctgtttttatgtctaattgtggaactggtgaaatttgcatttccctagaatcactgcccctgttgatagttgaaacacacagttttgaagaacagcaaatcatactctaagaggcagtagtcccctatgtcctgtcgttttccctgtttctgccttctatagacacccttgccaccactcagaaatgtttgagactttgtgg

SEQ ID NO: 497557 - DNA, 610 bp, Homo sapiens
ctggagttgagtcttctgtgtgtgtgctgggggcaggggtttaggttccaaaccctgatgaaaataaattacccttagaaaatcttaaaacattcataagatacactgtaagtgtttccttggtgggcagaacagtacagtaacatgtaaatgctatgttgtcatacttacagtaatgtaagatacatgataaggaatgcatgtacaaatatgackttatactattttaacttatgtaagaaagattatatagcatccctctgtatccacaggggattggttccaagacctctgaggataccaaaattctccaatgatcaagttcctgacataaaagggtacagtatttgcatataatgtacaaaatcctcctgtatatcttaaatcatctccagattacttataatatgtaatataatgtaaatacttgttatactatattctgtattggatttttattggtattttaattgtagtattattttttttattttccaaatcttttccatccaaggttggctgattccatgaatgtagaacctacaaatacagagggctaattgtacataaaagttgagtgagtcaaatgctcatatgatatgattcagtg

SEQ ID NO: 497558 - DNA, 456 bp, Homo sapiens
gggctcttgaggctgacccagaccacccagggtggaacccgccagggccacgagggtgcagtggggaggggtaggaccttcccaagcttgccctggtgtggctatgagaggcattcgagatgcattgagtgatgatttgcccagcagccgcaccctgaggttcttcatccctcatgccctaatgggccaggagagaagccactttgctgtgagctgccatggtgatagggcttgctgtagccctggtccacccaaggctggccatcaagatggcyccctgtgttgacaccctaccaaactggccttgggaccgtgggcatgagggatgccacgtgctaagccccatgcccagccctctggggtctggagcaggagccctgagctgacgcctggccctgcagcaggaccccaggccccctccttccccctctgaacggggaagatgttcctagagag

SEQ ID NO: 497559 - DNA, 626 bp, Homo sapiens
tgcaaaggagaaaaacaggcgaggctccgtgagtcggctgggtgccaggtgaggtgwcactgagagcgttatgtgggtggctgccttccctcctctcgctgggtagatagtattttaccccagttttatagatgaggaaagggaggcaaaaagaggtgaagtacaataagctatggtttataacgttgagttgctttcactttagttaaggagatgagcacattaactattgaaacacgcaagagatcatggcacagggtttgagaacatcactggcgtggtactagggcctctggaacaaggttgcacagaggcgggggcagtgtgcctgtcctgttcttgaccttgggaaggacggctcctgcttttttgcctgtagtatggagatgtagccctccaatatcagcccttcttgcactggaaagctatacatattcctgaagtcttagcttgacctgcatccataagttttgacagaccttatatcaaatttctgatatgctatagctttttcatcatttttcagttctgagaattgaaaaattctaaaaatgtcattaaagttgaattcatgacaactggggcatttatttagaaatgtggttttacatttccaaattaaattt

SEQ ID NO: 497560 - DNA, 624 bp, Homo sapiens
ctgccgccctggcctcactcagtttttaccaaacaagtgtcatgctgtggcaccagtgcatggctgtaaacacgcccagctcttctctcctgtccctcctctactgtcccgtgtccctcctttcagcccttcgctggctccygccctaggggtcagctcgacttcaaagtcaccgagccctctggttccctgtgaagtcctcagtcctggcctgtcttggatgttgccatcagcatctcaaatgaaacccaccatggaccgccctccaagattagaattggctccggggtcccacctcacccccatgtctgttcacggccctgggtgtatggcttgctgtggctgtgaagttgagggtttcatggtggcctgtggcccaggcctggccccgtcatgggcccagggcttcctcccacaccccacgcacacacagggctaatttggaaaaccaacacaggtttttgagggagggcaggaaatgaccatttttaaatcagaagtcccccatcaatttataaagaacactttaacagcagaagtaagaaagacaacattccagaataaagaacagatcttcaaactcaacctgcttttgcttcatttctctcatatctgcatcctttc

SEQ ID NO: 497561 - DNA, 468 bp, Homo sapiens
gctgccctcggggctgtgagctgagggggccgagcctcccagcgggactctgatcttgctcactctgcatggcaacacccacatttgcttactcgatacacaccacatacatgcttgataattacaggctgctgtggatttgtctcacccgcatttggaagatccaaaagcaattaccctgcagcctccctgcgctcaggaagacaggagtaatcagggctaatgacacagcacttactgtgtgatctcctgccgctatgctgtaattactatgtaattaagtggtcaccagttaccatgtaaacacggcttacacttgatgcatctatggcttaaacaaccctacaaactcattttaatttcaaagtgttgaatggaaaacagttggtcggcacagatagaggacaccaggtyggaaaactgtgagggctcctgggaaagaggaggatgccctttcaaacctcagtg

SEQ ID NO: 497562 - DNA, 569 bp, Homo sapiens
cttttataatttggtgatcccttgggaccagagaatacattccagaccacccaacagaatgtcataaggaagaccctctttttcccagagtaaaataatcttgagtcaggcagwtcgaaccttccactctgctgctgaaaactcttaggtcttcagaataatagaggaagggaggagttatttcttatgtcccaatatcttgtgaccgacaggatgatgggtactctaatgccacagctaattctgtgtcaacttgactgggctaagggacgcccagatagctcggaacatcttatttctgggtgtgtctgtgaggtgtttctgggagaggttagcatttggattggtggacagagtaaagaagacctgccctccccagcataggtgggcagcaaccatccgttgagggcccagatagaacaaaaaggcagagaagggtaaacctgcctcccgtttgagctgggacacctgtcttctcctacccttggacagcagcactcctggctctcaggccttcagatgtggactgagctgcaccactggcagtcctgggtttctagctgcaggca

SEQ ID NO: 497563 - DNA, 614 bp, Homo sapiens
ctggattttgtgtattggcagaaagctgttgatcaactggaatggatttaaatgattctggttaattttttactgtggtcgaagaaccgtgagccttttcctaggaggacaggcacttattcctcgcacaggtttcaacaagaacattacgagctgsctgcctggcccactggtacatctgtgagcaatcttaacccataattgtaatgatttccattgttctagctcctccctggatcaggcactgagcatgaccatgttttttctttatggttgttacaggagcccaacgtgcctcacatacatggtctctgcggagagaacaacctcggttcagctcctgcctcccacacttaatctacgggaacttctgtttaccatctttagggtagtggtaatactaattctttctgcaaggaccgttgcaacaattcaataagaccacggatgtgtgagggcttcttcaaggaagccagagggagggccagtgtggccaccgaggctcctgtctgtgggtggacaccagcacaggggaagcagacgtgttcctgccattgtcagatacaaggctgcagttagggggtcctgcctagtccactggcttgctctgagca

SEQ ID NO: 497564 - DNA, 586 bp, Homo sapiens
gcctctgctccctgcggtcctagggggttatgctggtcattgcctgcccttttggctccttgctttgccatttgcaaaatgaggggtccggactgagcggtccccacagcgcctctggaatgaatcccaggaaagcagggtgtggtgcggtgagggccggggctctggagggttggagctggtccatgcatgtcatgtgctgaggaagggcctggagtgggtcctggctgggatggagccccggctgtccctggaaggttgtagctcacttcctggggagcacagctcgccccagaggagagggaatgttgggtgtttggaccctcctctcctgggatggagaagcactggactgagctgagttctcaggrtgacaccaccacctctggcagccccgtggtccctgccgcttgccacttggccaggaggctgtgcttggcagaagtaggacagcagagacacagggggctctggcctagatccggtgggcagcagccacaccccatcttacaaggggggtcccatcattatcttctacagatgatgagcctggagcccaggccgggaggaacttgcctcaagcccc

SEQ ID NO: 497565 - DNA, 463 bp, Homo sapiens
tgaaaatggtgagaaggagggaaaacactccccggtggcttctttttacttcagtggaaagatgccacaagaaaggatttggaatgagccccacaggcctactttctatggctgtggctcccaaaggccctggctgtgaaatgcaccatctccattttaatggggaccatgctgttttccagctaaagggagacaactgggccaagggccccagttcccacagcaatctctctttaccccccaggagcttcaggaaggctcttarctgcctgcacaccccaaagtgttcacgctggatgtgaagtctgctggtcctgcctgagcagccgcatccaggctggccccctcagacccacattccattcctcggacgtctctggggggttcctggagcaagcatcccatgagctcagcccttcatggggtgatgcatccaaggcccagcagtcacaagccctgtgca

SEQ ID NO: 497566 - DNA, 538 bp, Homo sapiens
ctgtgaagcaaagtccagggaagttccatgaaaacgcttctctaccttggaaggtaagccctgtttgaggggcagtccctacaaagattctccccagatgctaggccagaacacaggtggcggctgggttttctgggtcacgccactccccttaagcaaagcctgagtggctcccacactggagcatctgtcagaatcacctggccagctttgttaaagcacaaatgccaggcccctccatgtccatttctgacacggcaggtctggagcagagtcagagaattcccacctgatgctggggtctgggcaccacaccgagggaccctggctctatctggggcttcaccaaatcaacaagggagttccattgggatcacrttgctcaaagtgttgtcctagcccagcagcctcggcatcacctgggagctggtcagaaatgcacattcttaggccccaacccagacccgcatcctagatccactgaattggaaggtgcattttgataagattcccaggatatctggggctatctggagcc

SEQ ID NO: 497567 - DNA, 624 bp, Homo sapiens
ctgacgccactgggccaggaatgctcccagctagctggaaagaggagtttcacttctacaagttcctgcaccctgcctggcttatcccatcactagtgcatggtgggatataaaacctgctctcttgcctgggtagacagcaaggctccatctctacaaaaacaaaaatttaaaaatagcccagcatggtggcacccacctgtagtcccaactacttggaaggctgaggcaggaggttggcttgagcccaggaagtcgaggctgcagtgagtcatgatcgtgctctccagcccaggggacagagcaagaccctgtgaaaaaaacaagcaaacaaaccaaaaaacactccctgccccaatccagggctcctctgaaaggccacctgcaccagatggctttgtgggctcagctagggctggggttgagacccatgggggtcctccttgttcctctgcccacccctgctcctccctctcctctctgtygggtgtggatcctaactgctctcccaagcacaggctgtgcctgttcatctccctctcagaggctgcttcctgagagcccacctgctttggtattttggacgtaaagaagacctttaagtggtctgatctgttaattttc

SEQ ID NO: 497568 - DNA, 610 bp, Homo sapiens
aagtagagtctctgacttcatttttccccccagaggtttaggtagatctcacagtaccacttattgaataatcaatcctcttgccactgatttgaaatatcaccttaataatacagtaacttattaaggatacttggatttgtttccaggcttcctaaactattaatcaaagctgtccttgtagtcctgggccaatccacactactgaaattttgtagctgtgggcttcaacctctgacaaagccacactcrttactcttcctttttaataagaatctttattctgctaagtgcaaccgctgaagggcacgttgcccctgctattttatgtttaatatttttataatccttcccgagctcatcgatccccactttcatctcagcccagtgcacactgggtgagtggatccctggatggcttctatggactcatggggtctgtttgttgaggacttcagcccagcgctgggcaggcaaatgctcaatgcctgtttctcagccaggcaggtggttaagactttccctcctagcttcttccaagatctgtctccccagcaggcagacctggcatcaggactaattgcagagacagatccatctctctctctcc

SEQ ID NO: 497569 - DNA, 569 bp, Homo sapiens
tcagctgctaacccagtggcaagtgctcccagaggcaggagaggacccagggagagatggaaacgaaaggcctccccacctgccatggggcggggcagaaacggtgagagaggatgtgggtactgggatttggaacttattaaatgtgtgtgaaactctagagtcagagtggcccaggtctctatctgacatgcacggctggaaaagtgtcatactcagccaggaagatcctgtattagtccattctcgcattgctataaagaaataccttacactgggtatgtcataaagaaaagaggtttggctgggcatagtggctcatgcctgtaatcccagcactttgggaggctgaggcgatgaatcacttgaggtcaggagtttgagaccagcctgggcaacttggcgaaaycctgtctctgctaaaaatacaaaaaattagctgggcatggtggctcacacctgaattcccagcaactcaggaggctgaggtggaagaatcacctgagcccaggaggtcaaggctgcagtgagctgaggttgcaccactgcactcccgcctgggcaaccca

SEQ ID NO: 497570 - DNA, 693 bp, Homo sapiens
caggagcttgtcctcatggcggaaggcaaaggggaacagatacatctcatggcgtgagcagcaacaagagggacacggggcaggygttatacacttttcaataactggatcttgtgagaagtctctcacgatcaagagaacagcaccaagggcatgtgactaaaccattcatgaaggatccagttctgtgatccaatcgcctccaccaggccccacctgcagcactgggaattgcagttcagcatgagagtttgtggggacacagatcaaacggtatcagagtccctcggaccctgccagtcgacgccctcttcgttgaccctggggccactctggcagcctcagcttccacatccactgctcattacttgtgtggcccaaggagtggaccttctgttttctcatttacagaggcgtgtagtgagagtgaaccagccgcctgtcctgtgcagaggccagcacagacccccttgtgtgccccctgggtccttagccacatcagtccccagaacccatcgccaattcccagggagccaagctgcataggctcacctgggcagcacaggcgggcctcacccaatccactcatccctcaccccccagcaaggccaccactaagcttgcaagacagaggcaccaaccatgcagaagatgctccatggggtaaaccctggaccggcgcaagcccagcag

SEQ ID NO: 497571 - DNA, 594 bp, Homo sapiens
caataactggatcttgtgagaagtctctcacgatcaagagaacagcaccaagggcatgtgactaaaccattcatgaaggatccagttctgtgatccaatcgcctccaccaggccccacctgcagcactgggaattgcagttcagcatgagagtttgtggggacacagatcaaacggtatcagagtccctcggaccctgccagtcgacgccctcttcgttgaccctggggccactctggcagcctcagcttccacatccactgctcattacttgtgtggcccaaggagtggaccttctgttttctcatttacagaggcgtgtagtgagagtgaaccagccgcctgtcctgtgcagaggccagcacagacccccttgtgtgccccctgggtccttagccacatcagtccccagaacccatcgccaattcccagggagccaagctgcataggctcacctgggcagcacaggcrggcctcacccaatccactcatccctcaccccccagcaaggccaccactaagcttgcaagacagaggcaccaaccatgcagaagatgctccatggggtaaaccctggaccggcgcaagcccagca

SEQ ID NO: 497572 - DNA, 617 bp, Homo sapiens
aaggggacaaggggacggccccatgtcgacctcctccacctgtgttgttcccatggaatcgggctgtttatgtcctcatgcattcccatgcaaacaggccagagcagatggcccctgggccgtcgtgcccacaccactgctgtgcggtgagcagggcctgcctctgctttcttgactttccctaaagctctcctgtggtccagccacckgggttcaaccctcagagcccccgtgtcatccccctccgtgtagttcaggtttcccttcctgacaggcacaaacatcttccagcctgaacatgagcaagacacggtcccactcggcgttcattttccttgaacctggccccacctccctttgcagtccggcccagattgtcctcataacctggtgtggctccacctcccgttgcagtccggcccagattgtcctcataacccggtgtggctccacctccctttgcagtccggcccagatcgtcctcggaacccggtgtggccccacctccctttgcagtctggcccagattgtcctcgaactggtgtggccccacctccctttgcagtccggcccagattgtcctcggaacccagtgcaggcctcatgcatggcaaata

SEQ ID NO: 497573 - DNA, 617 bp, Homo sapiens
aaggggacaaggggacggccccatgtcgacctcctccacctgtgttgttcccatggaatcgggctgtttatgtcctcatgcattcccatgcaaacaggccagagcagatggcccctgggccgtcgtgcccacaccactgctgtgcggtgagcagggcctgcctctgctttcttgactttccctaaagctctcctgtggtccagccaccggggttcaaccctcagagcccccgtgtcatccycctccgtgtagttcaggtttcccttcctgacaggcacaaacatcttccagcctgaacatgagcaagacacggtcccactcggcgttcattttccttgaacctggccccacctccctttgcagtccggcccagattgtcctcataacctggtgtggctccacctcccgttgcagtccggcccagattgtcctcataacccggtgtggctccacctccctttgcagtccggcccagatcgtcctcggaacccggtgtggccccacctccctttgcagtctggcccagattgtcctcgaactggtgtggccccacctccctttgcagtccggcccagattgtcctcggaacccagtgcaggcctcatgcatggcaaata

SEQ ID NO: 497574 - DNA, 592 bp, Homo sapiens
ctgtggccacctctgagggctggagggaggctcattgtgcaggatgggagcctaacatttcaggaggtatctaaacttgaggtggcaatgcttggagccaggccccaggcaggacactgtgactataggatttcacttcagcctcactgccgcccagggaatagcaatcctcatcccgtttttccagatgagagaagaactcatggagaggtggcggggctcgctcatcgagtccatggtgaagcagggattggaattgaggcacagcatggcgtacattttttgtgggtagaaggggtctctccccagcctatgtaaggacccacatccactgttcccattcaggatgtggtggcctttgaccccaagcagaagtgtaggacagggctccattctaggggcttaacttcagcttccaagagcctgccctggtgtgggtggagctggaggctggctcctccctgtagcagggggattgccttataagcccaagaatgcagccccacgctgggatggccaacagtggctgcggtctgyagagctgaaaagggctggcctaggcctggccccctgaaccccactggtgggcctc

SEQ ID NO: 497575 - DNA, 605 bp, Homo sapiens
gattacagcaggcagtgggcagagcagcaaaggctggtgggacacaggctcatgggaaggtgaagagcctaggctgactggaaccccgtgggctgaggagtgggggagatttgattgggaaaggagagcaagggcagaggaggagtttagacttcattctgggggtcacaaagttatcactgaggtgatagccctcctgaggtgggatactacgaagggcccttctcccagtgctcctgacataagctaaaattttagattataggctcaaaaacagagcagccctgggacttcaccaccttagcagcccctcctgcccaagctgccacctgagcagcaggggacaccgactaagaagcctttggtgtgtgagtgcagttgagcaaacatgcgcccgccttgtgctggccacccacccggagaccccggtcctcatcctgcgttgctcacagcggagkggggaggtgcctccggaaacaggaacttaggatgtggtgtcatcgtggtggaagccaggagcaccctgtggggacccagaggaggaaatgacctgaacaagcctcttgttcagaggtccttccccaggaagcagtggccacgctgca

SEQ ID NO: 497576 - DNA, 563 bp, Homo sapiens
ttattgcaaccaccgcctcactggccaagcgctgtgccaggtrctcctacatcctgggtaggtttcggccacgccctggccagcgaggcagggatgtcaagtccattccacgaaggaggcaagtggggcactgaggcggcacaggactgccgcttctcgccacccatggctcaggcgtctcccactctcctggagagtggtggaggcccaggatgcagagtgaggggagctgcagatttggaacgcgtcaggcccagcctggagtgcccagcacagccttgaagatggaggtgggggtggcggtcaagggaagcaacaggctgcagggctagggatgcacctaagctcaggtgtcagctgatctcagaaggtggagggaccttcgcttttcttctgctcattgcactcccccagtgcaggtggaaaggaaggaacctccattttctgaggtcttcctatgtgacaggagagtgcagagctgggagctttgatattacacctgttcccaccaactcccaagagctggtgttactgcctggtgtccatgtcagtccaagatgaag

SEQ ID NO: 497577 - DNA, 620 bp, Homo sapiens
agtccccctctgatccttcctcactcatstgttccttgccctgctcagaccccttcagtcttctgaatgaccctcctctgtttgccagacaaaggccaagccctttggcctgacagtcaaagccctccatgacctggccccaactccaggtgctcccaagccttcgccccatgttctcatgttgggcacctcggagcttctccacttgctatattccttcctgctccagccctcacacagcctgctccttctgcctgaaatgtccttctttatctgcctgaggacccctgttgatccttcagagccgaactccaatgtcatggccagcactgccccctgcccccataatgctcccacttttgtattcccacggcatcttcccacttttttgtaatgccttgtgtccttgcttctcaggccgtgtcagattcttatctgtggccccagcacagcaagcacaggccagacagcagagagcttgccaagtgagttacagaaaggggtaaggcagtcagggcatgccttaagtcacatgctaaagccagaccaactcctccctttttctagagagaccgccaacctggaagccagtagccttgcagccaggcccaggttccaca

SEQ ID NO: 497578 - DNA, 345 bp, Homo sapiens
cactcgtagctgcaactcactcaacttgtctttagcagcaatttctgcatagtcattggcatgttcacctacctggatgtccaggtgaactctctgaggacagacaaaggagataagggaaatctggtagccctgctccatcttcctgccagagactgacagctcatccccgactttccttcatctgttcatttagccaacagactgggccctcttcagtgtcttagccccatgaggctctgggcacacaagcaagtattaagcctrggctggtgctctgagtgaggcatgtacaaagagctcagtcactgtgtcctggacatccagtggaaacccagtgttctt

SEQ ID NO: 497579 - DNA, 572 bp, Homo sapiens
cccgaccggcctcgcccccagagcctcgcctccccttattccaacaccggcggggactgggtggtcgcaagcatgcgactccttacccggcagcttgagcgccctggacagcacggtcgccatggctgaggccccggtgcgcgtgcgcgcgcccgcgttctgccgggaagtgtagttccgagcggcggtgcgtggggctgggaccgggaaaggtgggacccgcttgctggggacagagctgagggaggccaagccagagtacacgctccgcaggcttttctcccaccctacctatgcaggtcacctcaccactctgagtctcacttgcctcgtcagtgaaatggggagaaaataccccgtaagcttgcagtgaaaatgattcgaaggagatatttaaggaggtgtggattgtgcaatgtgcgtgggctttgaaatcaggcagactggatttgaatcctgcctgaatcacttactagctgggccatcttgggcaagtcmcttggggcgactgagctgccgctgcttttttttaattaaagacatactacctacttcacaagcttgcaatgaga

SEQ ID NO: 497580 - DNA, 628 bp, Homo sapiens
ctgtgcctcattctccccttctcagatgctgctagggtcttaactcctaataggcatcctatgctcaccgcttattcagttttttaactgtcagggtgagcgctccctcttcctctggtttctggcagaaatcctatggttatccctgggaacgcagatcacctacatcggacttcaattcatcagcttcctcctgctactaacagacttgctactcactgggaaccctgcctgtgggctcaaactgagcgcctttgctgctgtttcctctgtcctgtcaggtgagttgctcctggagtgagagagggtggttggccctggccacttttgaagccctagctggagggcttgagtctttgccctgaaggggaggagcccaaaggctctttaaagaatggaggtaggcatctttaattttaaattgaagtaacatacaaaattgtatattggatcaccgtgtactttacaaaatgatttacctctaggttcctttatttgcaagctttctcaatatgtaaaatctaytgtttgggttacttttcagttgtgacatacacacagcttttcaagaccagtctccattggataaagtgaaagatgcacatataagatgaagaattaagccaac

SEQ ID NO: 497581 - DNA, 570 bp, Homo sapiens
ggttggggtggggttggaatccagtctcactgctggccaagccctggatgctggcctgaggtcacatcctttggggtgggggcacattttcmaattcatccactcagagggggcacatgtttctaactcacacacagtctccctgtgtgtggctgttctgagtaccattcccaacatcatctgctcagggaatttctaccccccatcaacctcgtgtaagacagagcttgagcttttgacctcctctgtgaagtctattttgctctcagtctcttagacagaattgctttttgtctaggagacagaagtttctaagtgcttactcttgagttctatacttactttgtggcagactagtgacaaaccatcagccgaccaggcccaggtctggaggccacacttcgagggctccaccttagaccagccctctgctgcacacagggtgaccttctacatgtttttatgatggaagcaagctatctctgtgaattgtaattatgtggacaagcacggagccacatggctggcagagcagtctggcatgcatcagtcaagagcagggcagttctt

SEQ ID NO: 497582 - DNA, 661 bp, Homo sapiens
cttctacatacaaataaagcccaggtggaaactacaaygaaatgttccatttgtagcatatactttaaaaagttcagccccctcaatacatgtaggtgggtcttgttttaggaagatgtgcaaatttccaaactcttaaaacagaataattaaggggtgaattgcacattaaaaagttaggttaggtgtggcatctcatgcctataatcccagcactttgggaggccgaggtgggaggattgcttgaggccaagaattcaagaccagcctgggcaacatagcaagaccctgtctcttaaaaaaaaattgccaggtgcggtggtgtgcacctgtatgtagtcctggctatttaagaggctgaggtgggaggatgcttgagcccaggagtttgaggctgcagtgagctatgattgcatcactgcactctatcctgtgtgacatagtgagagcctgtctctaaaaaatatgtaaataaaatagaaagtaattaaaaaagcataatgttctccctcagtgcattaatatcatataaaaaaacatgtgagtaaaaaattatgtcagttctacaagttgaaatatatatacaattctatggatagcttcctctgtatgtatgttgtagcatatatgctatcatctcacaattagtgggcaataatag

SEQ ID NO: 497583 - DNA, 504 bp, Homo sapiens
gatgtaaccactttgaagtcctttaaataaataagttctgatatatgttacccgacaaacttaatgtcacaggtggtgactatctggggccagtggcgcagatggtaaaggaatttatcaagacagttgtacataaaggaatgcagatttattgagaaggaatgaaaatactttgcaaggccgcagcgggcagcacagcagaaaaggagccgtctgcagagagggaggggctggagggaagttttatagggttgtgctggagggggttatgtgcagaaggaggtcccccagcaggtscttgtgcccgcgggttgtttgtgattagccatctctcagaacaatcattcattcattgatattccccacctgcccccaccccaaccagcgaccccttccttgtcgttgtttacttatcagggctccacacttaattctaaataagctacctttgatgaagagtggcagttatgatctcttaaaggcccgagccattaagacattttt

SEQ ID NO: 497584 - DNA, 584 bp, Homo sapiens
tggaaaatgctttctcccttgtaagaaaaaaaaggaaggcaggcctggtgcggtggctcatgcctgtaatcccagcactttaggaggccgaggtgggcagatgacctgaggtcaggagttcgagaccagcctggccaacatggagaaaccctgtccctaccgaaaatacaaaaaaaaaaaaaaaaagagaaaaaaaagctgggcttggtggtatgcctgtagccccagctactcaggaggctgaggcaggagaatcacttgaacctgggaggcacaggttgcagtgagccaagatcatgccactgcactccagcctgggtgacagagagagactctgtctcaaaaaataaaaaaaaaaaaaaagaaaagaaaagaaaaggcaatgtacaggtcccaagagaggaatctgacaagatgtcccagtcttctgcccatggaagtactggaatactggttcatcccttgcagcagatggggctttgtggagatgtaatctattyatgaaaacacagtgagccaaagatatttcctttcactgggtgtcaaagccaactgcaagcatcaggctaaaaattacaaaaatc

SEQ ID NO: 497585 - DNA, 639 bp, Homo sapiens
ctaaacgggcgatgatgaaataaaactcaacagcctttctctcatcttgcattgtgagatgcgaaatagagcgtgtctctctgcctctcattttaggctgaggccgtccaaagcggccatgccccatgtttccactagatggctttgacacttcaggcatcaaccctcatggcctctcagccttgcaaaggcagccacttaaagtcggtgtcctgtgtggggcaccaagctgagctgcagacacccagtaggcgcgaggcaaatgcgtcccattttaagaggcttgtatttatgagctctttgcttcctccctcccactawctttaaagaattgctctccatctcctttggcaaagttcctttgccctttgtcttatttttgtgaaaccctccaaggtatttccagtccatttgcatccaatctggcatctttacggagagcggtctcatatgctattgttgttaacgtggactagtatttatgtgttgagaacactggctgtttgtcaggaaaagtgtgccaaaacaaagagtacggccggccctggaaatgcatcagcaaaacccatttcccccgtgcactcattctgagcttccttccttcatttctgtcattactgctgagaactggactgtgcc

SEQ ID NO: 497586 - DNA, 597 bp, Homo sapiens
atttacttttatatagtatatctcaactgatggctgtttaccttcccttcatgatagctcaatttagagggagtttatttccatatattatgtattgggctgtcacctaacgcaatggttctagatagccctggcatctctcaggggagaagagagccagggaacctcagtgtctatatgatttggttcagtccccaggtgaaagctgatggaggctgcaggaagacaagctgttggggtggcaggaatgtgtcagggtgggtatgggtgactgtctcatttgcagtcaggctcgcaggagtagaaacaggagttctgttagtcttaatagtttgtrtaataagagaaaaataaacagtacccatattttctttcttgccagaacaggaaagcaggtgaaaagtgagaatttgtgcacacgttgtgtctgggagacaaagcatgagtaactgaatccaccaccaggaccttttgcttgtaactatctggtcttcctctctccattcttgttctcctccagtttattccctgcatagcagccagttggatcacatcaactttgctaattaaagtccttcagtgtcaaggcacctgcat

SEQ ID NO: 497587 - DNA, 549 bp, Homo sapiens
agatcgtgccattgcactccagcttgggtgatggagcaagactctatctcaaaaaaaaaaaaaaaaaaaawatcaagatgtgagaaagtctccagagatggctttttaggcaataggtcagaagaaggacgaggtatcctggtgtaagtcacctgagggccttgtgtagcttccctgaatgtgttgcaatacacagggaggaagccgtctttcctagatttatacccactttcagatttacacccgctccctaaggccaaggtgcctctggtcagcagtagaatgaaaaagaattattctcaccaaggaaatctctgtagaaaagttgctgtgaaactggaataggtgtgtctttctgtccttccggttctttttatagatactgcaggaacctcagtgagagcctacggttcttccgcccatttggggagagattaaagaagctgaggttggctctttcttactcattggcagttacaactttgccagcactacagcctaagcttccagagtggacacggagaaggtaagttggaattggggggccat

SEQ ID NO: 497588 - DNA, 653 bp, Homo sapiens
tggtaagggattagagtagccatgatccttagtaaataagcctttatgtcacttaattactacatcagactcagaactttctcccttgtcagtttcacattcactctcaggatagggacacgtgactcatttcatacagttcccactttcagcaacaactaatatggataaggaaacaaaacttttagagcttccttctacctattcctcagcacgactaattgaatatacaacctaaaaacaagtgacaaacaatggctggctgtttcagaccctgttgccagaagatatatatgacaaacagaggtggtatatggtaacttccaggcttctcaaaggtgctaggatccctatcctgtgyggttcttcctactggaggaccctactccatcctacaatgctctgactcgtcttttcccagatggtgatggattaccccttcctgctagactatgacttctcgaggccaaagccaggctcctcttgttcggcagtctgtgtgtaaccatcagaactctagagaaggtgcagagtggctgccgcacagttagtatcaacacacagttgctgaatgaaggaacaagtgaatagacaaaaaactcaatccctctgtgtccagtagcacaaagctttgtgggttatgggcacagcag

SEQ ID NO: 497589 - DNA, 610 bp, Homo sapiens
tacttcacaggactgtgtggaaggataaattccttcatacgttatgtgctgacaatggtgtattaacacatagaaagcaccatatgttcgctatatccttatttgtacagtctgtggccaaatcagcctggtccatattgtgtccaaacccatggccttgccattatgagtcttggtatgaagcaaactacgtaagataccaaatgactaaaaacatctctaaatctaagtagatggggaagatttttacttcagaagtcacgggcaggaaaagtgtaatcaagttttgattgcacggaaatctactcctaggctggagatgctctctacagcagatctccacccagattgcttccacatctcaygtgggcctcagaaagccactcctactaatgtaagagatgtggtttagaattctctaaaacacacctagacatgtattccaaggcctagacgacttaaaagcagtcactagggcatcctcagcatcaaactaggtccctgcatcagctcacaggctgcagtttgactccactgtagtggaggctgcaggatcaaccaaaagccttgtgtacttaggctgaaatcagaacgcattttttctttttct

SEQ ID NO: 497590 - DNA, 641 bp, Homo sapiens
tgtgtaaaagctgggatcccagaaacagcaccctaaatgagggtaagttgtggacggtttcttaaggagactattcacaaagatgtggccagcatgtagaaacaccacaagtgatagtgcagaccctcagaactgttaggctccccaacaaagacacaaggagaggacgcaattactggaatccagaaaaggaaagtcctataggagggccaccttgaaacgagctgtgacccagggtcaaggctgtagcagccatyctgcagtgaccccggcggggagggagccaggggagtgaatacctcccctcacactcttactcccctcccattcctgagctgtgctccccattgaaaggagaccagcaggcaaggaagcctgttgataccatccatacagctcagcttccccatgcagagagcaggatggacagcaggtctacaagtgtaaactgaagggggaaaggaaaacacccggccaagaggtatttgtgtaaagatgtataagtctatgaacaaaagttttcttccagggataggagggtagcataaagtcaatgttcactataatctaagaggcaatggaaaaccaggagaaaacccaaggaacccgaggactaacactgttcgttgcaaagtgtgtgg

SEQ ID NO: 497591 - DNA, 608 bp, Homo sapiens
tgtggctttaggcagatggttgtgagaatttaaatggcataagcatataaaagcatttggcgtagagtctggcacatagtagtgctcactaaatggtagtcattaaagatacaacctgggacagtggcagctagtttaacaaaccaccacactccgtagcacctctcacctgggtgcaagtgccccaggccacactgcagtagctgcacgctgagggtgtccccagatatataagaagcctctccaagggccacagaggttttttgatggcaaatggtttaaaacatcgtttttatattaagttgtataaaatatactatgttataaaatgcaaagtttgcatcattttagagctaaaacttaaggccacaaaagaatctattttcttattaataaaaaatcctatttttatrtaatgcaaataacgaagatgaagtaacctattatttaattaaacatgtctttaaaaaaaaaaaaaaaagaaataattggtccttgctaatggcccttcagggcaagcccccagactgctggggtccaagtttaccctcctgcctctaatatcaaagggactttggcagaaaagtttgagaaaccctgtcaggaac

SEQ ID NO: 497592 - DNA, 508 bp, Homo sapiens
caagtgctcaatagccacacatggctagtgactactgattggatgacacagaaatkgaacatttccattatcacagaaatttgtgttagacaacactgatctagagatcagtggcttacaaccctgccagtgaatccgaattaaccggtggaggtttaaaaaaacaagtgtctcagctccacttaagatattttgatttgtgaggtgcgaggggcatcctgctatccgtcttcaacagaatctctccatgctaccaatatgcagccaaggttcaggcaggagtgtcctgagtgtcttgaaggcaaaggccagggtctcctttttcttttcccagtatgtaatcccacacctggcacaaagtaggtattcagagcagacatggaagtaatgcatgaatctggtctgggaaagctacccgtgtgccatccagaaacactagtttctctagagtttgttctttttgcctagtgatggtatttcaagttctgattcagaggaatgatggagg

SEQ ID NO: 497593 - DNA, 508 bp, Homo sapiens
caagtgctcaatagccacacatggctagtgactactgattggatgacacagaaattgaacatttccattatcacagaaatttgtgttrgacaacactgatctagagatcagtggcttacaaccctgccagtgaatccgaattaaccggtggaggtttaaaaaaacaagtgtctcagctccacttaagatattttgatttgtgaggtgcgaggggcatcctgctatccgtcttcaacagaatctctccatgctaccaatatgcagccaaggttcaggcaggagtgtcctgagtgtcttgaaggcaaaggccagggtctcctttttcttttcccagtatgtaatcccacacctggcacaaagtaggtattcagagcagacatggaagtaatgcatgaatctggtctgggaaagctacccgtgtgccatccagaaacactagtttctctagagtttgttctttttgcctagtgatggtatttcaagttctgattcagaggaatgatggagg

SEQ ID NO: 497594 - DNA, 451 bp, Homo sapiens
aatctgtgacttggaaaacagatttgcagaggaggcgagcagcccgggcgtgcggagcgtgcggggcgggggcgggcggccgctctggcccccagctcctccgcaatccaattaaataacatttaaatgcataaccagcccgcgcggcgatgaggctggagattggagcgggctcggcggcgggccgcgcgggcggcgttttgtggagctcagcgattctggcggtaatttccccgctcgacgcggcttttacgagccagctcccggcgccgcgcccgctctgctgcgcccgccccgctcccggccgcttcccgccactccccgcctcgacacttttttctccctcgccctctctgcagccttctggtctgtccgcgtgcgtgtctctcgctctggtctctgtttctccatctcttgggktgcatgcacctcgccctaacctccctctcca

SEQ ID NO: 497595 - DNA, 493 bp, Homo sapiens
tgcctccttggcactgtcattccctcctcccatctcctgccaagggctgcagccaagaataccacagacggtttgccatggatcaagatttctctcaagaaagagctcagagaaaggctgctgtgagaaaggaagtcacttgctactccccttattcctccatcgggaggagccagatgaggtcactgcacatctgagtgggtgctatcaaagcacagctctggccagcgtggagacaaacrtgggctgtgtggcccgtgactgagtggctgaaaggaaacctgaggtggtagatgatggaactgattgaaagaaaacttctgtaggaatgctgcatgtcattcattcaacagtgctccctgaccagggcccagggctgtgcatatgagctgcaaatgggtttgttcattcgtttacatatctatttgcttatttattcaataaattctgattatgcccctaagaggcactgtgctagatgtcaaggatgaac

SEQ ID NO: 497596 - DNA, 491 bp, Homo sapiens
cctccttggcactgtcattccctcctcccatctcctgccaagggctgcagccaagaataccacagacggtttgccatggatcaagatttctctcaagaaagagctcagagaaaggctgctgtgagaaaggaagtcacttgctactccccttattcctccatcgggaggagccagatgaggtcactgcacatctgagtgggtgctatcaaagcacagctctggccagcgtggagacaaacgtgggctgtgtggcccgtgactgagtggctgaaaggaaacctgaggtggtagatgatggaactgattgaaakaaaacttctgtaggaatgctgcatgtcattcattcaacagtgctccctgaccagggcccagggctgtgcatatgagctgcaaatgggtttgttcattcgtttacatatctatttgcttatttattcaataaattctgattatgcccctaagaggcactgtgctagatgtcaaggatgaac

SEQ ID NO: 497597 - DNA, 611 bp, Homo sapiens
cactgtgcccatctggaggtagcacctgatayatgcaacctctctactttacaaagcattgataaattatttgtatcaatttgtatcatttgattgtcatgacaacttaatgaaggagcctgggtaggtgtcattatcctcatgttggtgatggaaaccatggtacagagtggctgagtgacttgcccaaggccacacagcgcatgcctggagcacccgggtaagacagacccataataccacatgagaggcttgaagatcttcctctgggtcttcttcctccacccttgtcaggccccacacccagccactggtccctggaatctagagttgagtttggggtgctcagcagagtggctcagcttccaatcctcctgcagcccgggccatgcccaccctcatgcgcctcctccccggcttgactaagaggttttatagccgtttatgagcaatttctgtccatatatcatcggagatatatagccaggcaaatattagggacccaagcggaggttttaagagtgagttttattgctgctgaaagaaggtgtgataggcagcatgcagagacccaccttccctcttgctcggcggccgggtggtggcagcag

SEQ ID NO: 497598 - DNA, 383 bp, Homo sapiens
gatgaaaatcctttaggatccactcgtgggctgctgccttgggtcctgcagggtctgsagattcctttgtttgtctgtcctctattgctcaacatccacatgtccaatttaggctgggattcccacaatacaagtgaggagccaagtcttttttttttttttttgagatggagtctcgctctgttgcccaggctggagtgcagttgtgtgatctctgctcaccgcaagctctgcctccccgggttcacgccattctcctgccacagcctcccgagtagctgggactacaggcgtctgccaggatgcccagttaattttttgtatttttattagagatggggtttcatcgtgttagccaggatggtctcgatcttctgctctcg

SEQ ID NO: 497599 - DNA, 620 bp, Homo sapiens
gtgctcaaggggaatgttgtggagattacagcggtcagagggttttattcagagtctctgggagaggaaaataagaaaggacatgagagaaggggaaggaagggctaggcagaggatgaagggggatgtgcatgtgggataaacttgacagagggtgagcaggcaaaacagctttgcctgctagggaagacccaagtgtgagcctggcaggccttgtgtctaggagggacctgggcgattgtaaacaatatactatgctctgaagattgtacccacccctccagtccccactcctatcccttcccaagatggggtctttggtctcactgtgatttctaggcctagcctgaactgtgctggggtgacaccacccaacaccaagctcagatcaaaccagctttgcttcatacccttgggggcctccctgaggctggaggggactttgaagttgatggagagaagattggtgagctgtgtgctaagcagggatctctcagcagtcaatgaggtggagaggatctccactcccttttttggggggctgagatattgayaccctagttttcaaaacctaggtttttcatccttgaatgctgcctaaggctgacttgatcaccagg

SEQ ID NO: 497600 - DNA, 408 bp, Homo sapiens
caacatcatggaacccctgagtccttcacaactcccagatcatctcatccttcctccttgctctgggaagaccatgtctgagtagttccaaccaacctctcaccttaaacccagtccctgacaaccagaagtacctccttagtctggacttgaccttccttgctgccatggtccatcagcgatgaccagggctgaagcagcacgttttttctataaacaccsctccctcccagtgatgctcacccaatcctcggtggtcaggcagggagtggggacagcttcctggcaagagctctggaaggcagctctgcctcctctgcctgaagcaagctcctatatactctgagatggtggtgttcattttaaagaagggaccatctttcctccacagcccagcttacatttgga

SEQ ID NO: 497601 - DNA, 408 bp, Homo sapiens
caacatcatggaacccctgagtccttcacaactcccagatcatctcatccttcctccttgctctgggaagaccatgtctgagtagttccaaccaacctctcaccttaaacccagtccctgacaaccagaagtacctccttagtctggacttgaccttccttgctgccatggtccatcagcgatgaccagggctgaagcagcacgttttttctataaacacccctccctcccagtgatgctcacccaatcctcggtggtcaggcagggagtggggacagcttcctgscaagagctctggaaggcagctctgcctcctctgcctgaagcaagctcctatatactctgagatggtggtgttcattttaaagaagggaccatctttcctccacagcccagcttacatttgga

SEQ ID NO: 497602 - DNA, 408 bp, Homo sapiens
caacatcatggaacccctgagtccttcacaactcccagatcatctcatccttcctccttgctctgggaagaccatgtctgagtagttccaaccaacctctcaccttaaacccagtccctgacaaccagaagtacctccttagtctggacttgaccttccttgctgccatggtccatcagcgatgaccagggctgaagcagcacgttttttctataaacacccctccctcccagtgatgctcacccaatcctcggtggtcaggcagggagtggggacagcttcctggcaagagctctggaaggcagctctgcctcctctgcctgaagcaagctcctrtatactctgagatggtggtgttcattttaaagaagggaccatctttcctccacagcccagcttacatttgga

SEQ ID NO: 497603 - DNA, 640 bp, Homo sapiens
tagagttgagtttgggttggagcgaacaggactgtctggactgaaagaagtatcctggggttatcctcaaatagaaatgaactacaagaaagtgattttcatgggctttgtaaatttgaatacatacttttttcttcatatctcttataactagggcaattactacaacaatatgatgacaacaataygatgagcttagacgtattagaactttgagatttttcagaaaaataatagctagcatttattgagggttaactacatgaaattcagttaaccctcacagccactctatgaaataatcattgttattcatattcctattttacagaaatgaaaacaggttatgctagcaagaggcagatctaggatttgaactgtacaattaatgccagaacccaaattctttgccactactatacaatgcctcaattatcagcaaccacttctttgaaattgggctgactttttcgcaaacatttattccttattgaatttcttattcaataaggaagttactgcccacttactgtctctcctattaccttctctcatactccctttctcttaagatatgaagaaaacaagctgtttgtgcttctaatcttgattttgcccttcctccaagtaactacaacga

SEQ ID NO: 497604 - DNA, 374 bp, Homo sapiens
agctccattttcattttacttttctctttcatatgacacaacttctttatttataaggctaatgtctatcaactagctagagcccgaaaacccattaaattagcatattatgcttatgttaacatttcttttcacaacctaatgatttattaatttagcactcatccttaaaggkttttagtgaacacagagtgtgttttgccttgggaacaaaaactcaatttatcactctgtcagtcttaggagatattattttgaggtacaaactacctctaatgaaatagaaagctacatgttgaaataatctataaactagagagataatatcctagtgaaaagacaggatcttttaattggcacacctgaatagacat

SEQ ID NO: 497605 - DNA, 592 bp, Homo sapiens
taacacctaaacatagcctgaactaagaagaaataaaagtctcttctcttcaaaacccatcaaccccttttctggactgttctttcacactcttgacccacctcttcattgccaaggctttcattttttcctctgcccacaccaacacccatttccttcacatcacctacatgggttgcatgtggcagcttcctgtgctccctggtttactgctgagaatttcacgtggaacaacacctgttagtcagatgttccattccttcctgtcttaactgcctctcattcaaatccagaatgaatggaattaatttcaactaacacgacctttcataatcccattaataaaaactagagggtcttctgaacttatctgcatttcccaaaggaggaaaaaagtgtgcatttactttaaactagaagttacccayattcaacccaccgaataccatcatatctgccacctgcagtcctctattagggttgtaaagtgagtattgataaatacaagaaatctactcaacaagtcttctagtgttacagaggaagtcagaaatctctgaagattttccatacagttggctgtaaatccaca

SEQ ID NO: 497606 - DNA, 592 bp, Homo sapiens
taacacctaaacatagcctgaactaagaagaaataaaagtctcttctcttcaaaacccatcaaccccttttctggactgttctttcacactcttgacccacctcttcattgccaaggctttcattttttcctctgcccacaccaacacccatttccttcacatcacctacatgggttgcatgtggcagcttcctgtgctccctggtttactgctgagaatttcacgtggaacaacacctgttagtcagatgttccattccttcctgtcttaactgcctctcattcaaatccagaatgaatggaattaatttcaactaacacgacctttcataatcccattaataaaaactagagggtcttctgaacttatctgcatttcccaaaggaggaaaaaagtgtgcatttactttaaactagaagttacccacattcaacccaccgaataccatcatatctgccacctgcagtcctctattagggttgtaaagtgagtattgataaatacaagaaatctactcaacaagtcttctagtgttacwgaggaagtcagaaatctctgaagattttccatacagttggctgtaaatccaca

SEQ ID NO: 497607 - DNA, 607 bp, Homo sapiens
aatatatgaataaagttgttgaaagaaataatactaagccagaaaaaaactaaatycaatggccttggcaacttgtatgtgattttaactgtttagcctattggaaatactccacaaaagttcagagccactactgtggggaggtgtggataatatatgtcataaatatctgatctgtgaagtacacatatttaaacaaattttataattttaagaataggactagaaataacatatatttatattcggtgaaaattccccacaggagcttattctcatacaatttgaattcaaaatacctttaaaaatttggtttaacagaacagttccaggaatactacaagcatgttcatgctggtaacatttctgtcagaaatgatcaaggagggagaagctgggttgacgaaagctcttgagagaaaacaaaacaaaaaaaatgcatgtgttattacaactctttgaagccgagatagagcagttcttatataaaacttctaagcaatcagaatatcttcgtaggtgaaaaggcattacccgcaaacgttcctactaataaatgcagtcatcatttgcaagaactagaaactggacaataaggaaattccca

SEQ ID NO: 497608 - DNA, 607 bp, Homo sapiens
aatatatgaataaagttgttgaaagaaataatactaagccagaaaaaaactaaatccaatggccttggcaacttgtatgtgattttaactgtttagcctattggaaatactccacaaaagttcagagccactactgtggggaggtgtggataatatatgtcataaatatctgatctgtgaagtacacatatttaaacaaattttataattttaagaataggactagaaataacatatatttatattcggtgaaaattccccacaggagcttattctcatacaatttgaattcaaaatacctttaaaaatttggtttaacagaacagttccaggaatactacaagcatgttcatgctggtaacatttctgtcagaaatgatcaaggagggagaagctgggttgacgaaagctcttgagagaaaacaaaacaaaaaaaatgcatgtgttattacaactctttgaagcygagatagagcagttcttatataaaacttctaagcaatcagaatatcttcgtaggtgaaaaggcattacccgcaaacgttcctactaataaatgcagtcatcatttgcaagaactagaaactggacaataaggaaattccca

SEQ ID NO: 497609 - DNA, 670 bp, Homo sapiens
cttgcgttatctgaagtggcaggaaaatagtgacaaaaaaactcaggcacttagagggtgccctggggatgtgtgtggctttttctccttccatatcttcccctgcagtgacctcagcagcggggcagaaccaggacagacagaggaaagtgtgtgtaattctcatccattctgggccctgtggaattggaacttatgcttactgcattgtcacttgaacattaaatcttaaatgtcraaatattctgcaaagcagagaaagaatttcaacatggtatcccaaaatctcttttccatacttttcttggaagctctgtcaaaataaaaaaattgctactgcttaaaaaaaaattattttcatgttcccatggaaattcacaaagagaatattgtatttgctttctaccacaagcagaaataattgtttctgatggaaatcatattagacatgaatatcatgaaaaatattatctaaacttttattttgggtaaaatattcatcctgtgcctaagagtatcgtacacccagagcaatcaggaaaattgccaacaactacccgctgtgggacttgctactttgacaaacatgctctacttccaggcaaattgtagcaccgccatcctcatataaaaccagggagacaaattaatcttagtaactatttggaga

SEQ ID NO: 497610 - DNA, 608 bp, Homo sapiens
ctgtcggccgtttggttacagaaatgcgatcctgcaagttgtcaccactatacataaagtcaggctatgatagcatatttcacttaaaaataaattatcacaatataaggcacatatgtatatggaatcagattcatgatttgaaaaatatgcttaaatcacactgaatcagcttagcagaaaaataattataaaatttgaaatatccccttttctttttgttttgtactaaatcaatgtagaaaacacactttctaccctgaaggaractgctgtcttatctgataaattatataagctccagtaaatgtatgtcatcaccctcaggaatgacaggtctctctttctcacgcttgtgggaattgagcgttgacactgtaagaacacttgactaataacctttgcctagaccttccaaactctgcgcgtaacttcttgagagatctgaataaaggccaatattttcacaggttgacagggtctggagaagtgggtcaccgagcactctgacatttttaagttcagtttacagtaactctttgcaaaacttcaggttttgctgtacttcaaatcatttgggcaaattataagaaaatgaatacaaaatg

SEQ ID NO: 497611 - DNA, 343 bp, Homo sapiens
attactacgtataactgaagtttttgcatatccgcataagaagaaatccacattacaaggaaaagtactttgatmattttagagtcaagacatgaaataagggatttctctaacccttaactcttctgccggcttacttggtacctctgatgaatatttattgctctaaatgttttagaaactatcactctttgaaagtgaacaaacaatgttttctgctgaaaattcatctttcccaatcataaggggaaaccaaatatgcaacttgaaaaaaaaaaaggaaacagaatatagtgactgagcactgagtgggattgaagaaaataaatgagcttattttggc

SEQ ID NO: 497612 - DNA, 343 bp, Homo sapiens
attactacgtataactgaagtttttgcatatccgcataagaagaaatccacattacaaggaaaagtactttgataattttagagtcaagacatgaaataagggatttctctaacccttaactcttctgcyggcttacttggtacctctgatgaatatttattgctctaaatgttttagaaactatcactctttgaaagtgaacaaacaatgttttctgctgaaaattcatctttcccaatcataaggggaaaccaaatatgcaacttgaaaaaaaaaaaggaaacagaatatagtgactgagcactgagtgggattgaagaaaataaatgagcttattttggc

SEQ ID NO: 497613 - DNA, 343 bp, Homo sapiens
attactacgtataactgaagtttttgcatatccgcataagaagaaatccacattacaaggaaaagtactttgataattttagagtcaagacatgaaataagggatttctctaacccttaactcttctgccggcttacttggtacctctgatgaatatttattgctctaaatgttttagaaactatcactctttgaaagtgaacaaacamtgttttctgctgaaaattcatctttcccaatcataaggggaaaccaaatatgcaacttgaaaaaaaaaaaggaaacagaatatagtgactgagcactgagtgggattgaagaaaataaatgagcttattttggc

SEQ ID NO: 497614 - DNA, 558 bp, Homo sapiens
tttatataggaaaacaaaacaactggttaactttttttttttttttgcttccaataagttaggttggtgtcccactgtgactcactgtatttttatgtcataattgactagtattacaaccataactgtggtcatttgctagtcaagttccaactctgcccctgctttctttaaagcctagtgtcacagagataaattgagaatattcaaggacttgtgattttttaaattgaattctcatgaccctatgtccaaaaaagatgggtatgcaaaaaatgcctcwacagctaatgatgaaccaagtacaaatacatcttaagcagtcaaggttttattacaaagaagtttgagaaaaacgctccttaaatatggtccaaaagggaagaatactcattctcttttcatatgaagaaaaaaatatcataatggttagaaagacttcctttgcccaataaagctcatgaagtttaagctccagggtccttccttcacatagtttctttctatccaaaaatctgagagtgggtaaagaaatatgtgccatgagggtttttttta

SEQ ID NO: 497615 - DNA, 559 bp, Homo sapiens
tttatataggaaaacaaaacaactggttaactttttttttttttttgcttccaataagttaggttggtgtcccactgtgactcactgtatttttatgtcataattgactagtattacaaccataactgtggtcatttgctagtcaagttccaactctgcccctgctttctttaaagcctagtgtcacagagataaattgagaatattcaaggacttgtgattttttaaattgaattctcatgaccctatgtccaaaaaagatgggtatgcaaaaaatgcctcaacagctaatgatgaaccaagtacaaatacatcttaagcagtcaaggttttattacaaagaagtttgagaaaaacgctccttaaatatggtccaaaagggaagaatactcattctcttttcayatgaagaaaaaaatatcataatggttagaaagacttcctttgcccaataaagctcatgaagtttaagctccagggtccttccttcacatagtttctttctatccaaaaatctgagagtgggtaaagaaatatgtgccatgagggttttttttaa

SEQ ID NO: 497616 - DNA, 610 bp, Homo sapiens
ctgaagatcacttaaacatccagcaccgctgtagcactagtcatagaaagaatatgaagagaattcaagattaaacagattggccaggcgcggtggctcaggcctgtaatcccagcactttgggaggccgaggcaggcggatcacctgaggtcaggagttagaaaccagcctggccaacatggtgaaacccatctctattaaaagtacaaaaaatttagccgggtgtggtggcacatgcctgtaatcccagctactcrggaggctgaggcaggagaatcgcttgaacccgggaggcagaggttgcagtgagccgagattgtgccactgcactccagcctggacgacagatcaagactctgtctggaaaaaaaaaaaaaaaagattgagcaaagcagtcaatagattaattggatttaattaagtgatgaaagaattgagtaatggaacttcacccattctaaccatgtgataaagtagaaaaggttcaaagatttagtaggggtttaaaatgagtttaagagaatgggattacaattccaatcccattggtaagacaaattttatttctaaaaattcatgtatttcccccctttatacaactgcaaatgc

SEQ ID NO: 497617 - DNA, 605 bp, Homo sapiens
catggtcatgccagggggcggcctggttggaaggctgtgtcactgtgactgcctgggacatcagaggctgcggctgccacccctggagcgaggcagcttcctcacatacttgctccatgcccaggtttcttagcacacattccgatggttgagcccagatcatgcaaccaaatcctaatttccaagggataggcctctgtttccaaacaacgccacgcaagaaaaggctcctcttagccgtgaagaggttcagacgctgagcacccgtcaaacacaacccctgcaaatactgactattatagattccagctctggggacatcgtccttttatcctcaaacagaagaagagtcatttctgctctcaaagggatgagtgcacctttcttcttaacaaggaataccaacttcctgcagtttcctgatatttaacattatctagttactttatataaattatataattttaaaatatttatattattcttaatataattatatttaatacattatactaatatgytatataatttattaatatagtagaatatattttatatattaatgatctccctagtaatcatctccaacataagattaaggataa

SEQ ID NO: 497618 - DNA, 578 bp, Homo sapiens
atcatatttaaaactcttaaccctgtacacactgagtttgcaaccagtattccctccctttgcttctttcaagggtgtttagcttataaatggcaacacagcaaaccattttacatataagaacatgcagagcaattctgacactaagtgagtctgtgtctcagtgactgattaaccctgattgatttgattgattaacccttagtaactttacataacagcatcttatcttgctgagactgagagaagtttcttgcatcatctcataatcttaagagagatggtattggcagatcacagttcaaaaccagtcttcccacagacctccaaaacctttgtctaggagaacatgggaaggtacacatacagccacatcaaatctcagtggggataaagctggcatggacactgcgggggcctgcacactgctaccccagtggggcctcccagtcrttgagggagaagtggggccggcatggggagggcagagagagcaaggaggagggggagaggtcatgctctggaagatgggtgtgtgctctcttttccggctactgttttcagtgtggtaagcaaat

SEQ ID NO: 497619 - DNA, 577 bp, Homo sapiens
agaacagccattatttggaacatttcccagatgctgtagcagtggaaaaagtgatccctggagagtcacataccagcaatcaaatgcctgacctgcacttgaccctcattactcccacatgtattactggccagaactgatctccaggtctccctctactggaggggtcagaaattgcctcccactgtgcacctaaagaccgagagcgcacagccttacaccggactgcaaatctctctcaattmtgttcagataaacatgttgtttgatgcttgtgcctatactgctttatatttaggtaattatttttcaacgtttttgggtgtgaggaccctgttataagtggaaaaaagaagaatgtgataacctcttttgataataatttgctttttatacgcatatttttgagaaggtacagataatcaaaagcctaaataaattcaatgatgttttaaactgaatttgtatttcagtgacaacagagggtatacatgcattcaaaagtagtatgtaagtattacacatgcaagacatggggtaagatgtggctcacttaaccctcacagaaacaaacaat

SEQ ID NO: 497620 - DNA, 532 bp, Homo sapiens
tagacattatagatggtgctttcttggggattttgatgattagmcattatagatggtgctttcttggggattttgataggcaacctggatgctaaagttgtccgaagctcactttccctatgtgtcaagtggaggataacattctctgattagaaaacattctctgattacaaaaatcaaataggaaagccttttaaaaatgataaatcaccaaaccaaaaggaaagatgttaagttttgcatggtaaacattcaatccaaattcagtgcatgacatcatttttaaagttcacctggtgcaagatgcttaaaatctgaaatattgaggcctatgggaatttgttacaatcagcaaaattgcactgtcactaaattgttcacattctacctgatgctagtattttcatttagttttggaaggcaaaaaaatgatcaattttactgaaatttttcagagttgccttgttcaacctcacaaatacaagtatcagtatatagcatacactgagataatttaagagatcttggtgga

SEQ ID NO: 497621 - DNA, 588 bp, Homo sapiens
agagatcttggtggactttagaattggttttatagatgtaggtttcacttacagagctattgtttttctaacactttaaaacatgtgttgatgtactgccaaatcatgaacgaaggcaaacatgtaaataaataagagaagaaaaagaaaaaagagaaaagaaatgttaacgcaggtcttaaagttgctttgcgacatttttattcaagagaataacttaagagttaaaatgtcagaaytatggttagtcatttattctctagtctacttctacgaatgccagattataggttgcatgtctgtgctgcaaatttgctgcctcttatagaatagagcttcctgagattaaacataaagaagaaaaacagtattgagatttaaatttgcctggaggaaactgcataaatgtgacttttggtctaatggaatataatagcaatgataattttggttgtagcataaactcaggcataaaagcacgaagtacacagtagctcctacgactaacgctattatattttctctctcttcttctccttctctttcttctctttaaatcccttttcagatatgaaatctactccctca

SEQ ID NO: 497622 - DNA, 631 bp, Homo sapiens
cctgcagacctctcctccctgtgaagagcctgctgctgaaacaacattattgctggctgtgactccaaaggcatttttttttttttcctgtagttgtgaggtgctgacctcactgctggaattgaaagataagaaaaatgttttaatccttatgttaattattgaaattagaactgcaaacaaatattttgggaaacttcaagttgcttccaaacgtggcactttccatttgaagcccaaagtgtaattgtgtattcaaaggctcagatcttcccgaagattcatgcattatgtatgccrtaacttccccgggacagggaggatgtcacgctctgcatcctgctgaaatggggaaataatttcagacacaatttgacttgaaaagtatcagaaattaaaaaagaaaagaaaaggaaaacttggaacccacttttttgggactagaatttttcactaaatcacaggctcttttagggttaaaaaagtacaaaattaggatgaatgttgaaatagcaaattaacaactacagaagtatattcttttatgcaaaaaaagtatttctaaaagaggttgtttttgaccaaggttgagcacgtttgctgtaaagagacagatattaatgttttcagt

SEQ ID NO: 497623 - DNA, 633 bp, Homo sapiens
ctgcctgcagacctctcctccctgtgaagagcctgctgctgaaacaacattattgctggctgtgactccaaaggcatttttttttttttcctgtagttgtgaggtgctgacctcactgctggaattgaaagataagaaaaatgttttaatccttatgttaattattgaaattagaactgcaaacaaatattttgggaaacttcaagttgcttccaaacgtggcactttccatttgaagcccaaagtgtaattgtgtattcaaaggctcagatcttcccgaagattcatgcattatgtatgccgtaacttccccgggacagggaggatgtcacgctctgcatcctgctgaaatggggaaataatttcagacacaatttgacttgaaaagtatcaraaattaaaaaagaaaagaaaaggaaaacttggaacccacttttttgggactagaatttttcactaaatcacaggctcttttagggttaaaaaagtacaaaattaggatgaatgttgaaatagcaaattaacaactacagaagtatattcttttatgcaaaaaaagtatttctaaaagaggttgtttttgaccaaggttgagcacgtttgctgtaaagagacagatattaatgttttcag

SEQ ID NO: 497624 - DNA, 600 bp, Homo sapiens
tgaggcaggatatctctacttttttttttttttaatcaagctcaggttaagaaatatgcagtaagtataacacctttgaaactgagaacatactcaaagtgatataaatcagcatggaatgtcgaccagcctgagattcttatatcacagtacgattgtaagaaataggaaaagtaacagaaataggacaaaatgtcttccatagtcattcctggccatggatttgccaaaacttaaataaggaagccatggcaactcccaccattgccaacttgtggcacatttgaatgaaggcttcttttcatattgccattatattatgtgtatagcattccagcataaagacgtatgctaaagagagctaaytgaattagagagaaccaatgggcctgggaggccatcatcctgcagcccagatgaagatgtccaggccagcagctagctgtgcctccccaagggctccttatagaagttctttttctgttagcacggtccctgttacatctgctgccacagatctgagattgttttgccaacagctctttgacctaagaaagacctaacttcaagtcaaactgaactgttagctcagttacaagt

SEQ ID NO: 497625 - DNA, 600 bp, Homo sapiens
tgaggcaggatatctctacttttttttttttttaatcaagctcaggttaagaaatatgcagtaagtataacacctttgaaactgagaacatactcaaagtgatataaatcagcatggaatgtcgaccagcctgagattcttatatcacagtacgattgtaagaaataggaaaagtaacagaaataggacaaaatgtcttccatagtcattcctggccatggatttgccaaaacttaaataaggaagccatggcaactcccaccattgccaacttgtggcacatttgaatgaaggcttcttttcatattgccattatattatgtgtatagcattccagcataaagacgtatgctaaagagagctaactgaattagagagaaccaatgggcctgggaggccatcatcctgcagcccagatgaagatgtccaggccagcagctagctgtgcctccccaagggctccttatagaagttctttttctgttagcayggtccctgttacatctgctgccacagatctgagattgttttgccaacagctctttgacctaagaaagacctaacttcaagtcaaactgaactgttagctcagttacaagt

SEQ ID NO: 497626 - DNA, 549 bp, Homo sapiens
tcatgtgtcacttctgagctgtagcatttaaatgacatgctatcttacayggcaagcagagaagaatttattgccccaaggtggacatatagtataaaagaaaaataaacatatttgtctttgtttgctttcaagatcactgagatttgggagttgtttgttaccacagcacaacctagcttaccctgactgaaaaaaaaaagtgttttgtttttgttttttttgagacagagtcttactctgtcacccaggctggagtgcagtggtgcaatcttgcctcattgcaacctccacctcttgggctcaagtgattcttgtgcctcagcctactaagtagctgggattataggcacatgccaccacgcctggctaatttttgtatttttaataaagacggggtttcaccatgttggccaggttggtctcgaactcctgacctcaagagatccacccacctcagcctcccaaagtgctgggactacaggtatgagccactgtgcctggccatgtgttgtttttacatacaaaaaaagaggaatattccaataa

SEQ ID NO: 497627 - DNA, 605 bp, Homo sapiens
ccatttctcaactatcggtagaggctgtctgaagcactctgtcgagaagtcagttagcaaatatccgggttctactttgccattkttataaaacacatccacagcttcacctgcaggctgcggttttggcttttttgaggtaggaaacaaaagttgctgcaaagcagtctaaaggaagaatccttccaaatcatcaagatcattttcctcctcatctcttaaattttctcatccacacctaattcaatggcaagtgtttttagcaactcaaatccaattgggcgttctaaagcatgcagtttcatttttatgaatgcaattcttcttttacacactcattttcattggctgatatgaaattttattaaattgcataattacaataacaagaaggggtagattcagctttgtgggatctgaagcttatacaatttggaagctctttcagaggaaaaaaaagaaaattataaacataaatttacctacaaaacatagatgcttatttagaatgagaaaatgtcacaatatgaatcacaagtttctgcttttttaaacatgaaaatactacaaatatcacaaaatccagaaggtgatcataatatttg

SEQ ID NO: 497628 - DNA, 605 bp, Homo sapiens
ccatttctcaactatcggtagaggctgtctgaagcactctgtcgagaagtcagttagcaaatatccgggttctactttgccatttttataaaacacatccacagcttcacctgcaggctgcggttttggcttttttgaggtaggaaacaaaagttgctgcaaagcagtctaaaggaagaatccttccaaatcatcaagatcattttcctcctcatctcttaaattttctcatccacacctaattcaatggcaagtgtttttagcaactcaaatccarttgggcgttctaaagcatgcagtttcatttttatgaatgcaattcttcttttacacactcattttcattggctgatatgaaattttattaaattgcataattacaataacaagaaggggtagattcagctttgtgggatctgaagcttatacaatttggaagctctttcagaggaaaaaaaagaaaattataaacataaatttacctacaaaacatagatgcttatttagaatgagaaaatgtcacaatatgaatcacaagtttctgcttttttaaacatgaaaatactacaaatatcacaaaatccagaaggtgatcataatatttg

SEQ ID NO: 497629 - DNA, 543 bp, Homo sapiens
ataatattatgtgctcatgcacaaacagctatttattagatgtccaccatgccaaacattgggctaggagccgataacaggttagtgarttagttctctattgttgcaaagcagatattcccaagacttagtggcttaaaataatagccatttattttctcacattatctctgtggactaggaactcaggagttgcttagctgagcaattctggctcaggatctttcaggaggtggcagtcaaaatatcagccagggttgcggtcctctgaaggttggatctgggggattggcttccaccatgggacactctcatggtggacaaggtgatgctagctgatggcgggaggcctcagttcctcataagtggacttctcactagggttgcttgagcgtcctcaaaatatggcatctggcttacctcagagaaaatctcttagtccattttgtgttgctataaaggaataaccgaggctgggtaatttataaacaaaagatgattttttggcacacagctttgaaggctgcacaagaagcatggtgc

SEQ ID NO: 497630 - DNA, 520 bp, Homo sapiens
caatgtgagacaagcatgaaaagctaacccgagacagatgaaatgatcagtagataactataacattactctaaagatgacttatccttaggataaaatattgctggaaaaatataaggaatggttgatatacaacactttataagctaatgtttcatgcttaatttgaaaaaataaatgagacaaaggaactaaaaacaaatttaacatctaattctatggattgagtatttaaaaatattttttttttcattttcataaacaaagaaagatcagcctgaatgacaacagcaacaggttgcacggaaacttttgagagaaaaatcataagccattgatttggtcctcttttacaacttttcatgacattatcacttctaagaccacctcatgaatcctttaaaggaatttttcataatgagcatgtccttgaaacctctgtaacaactgggtatttggacctcaaatactattcactcrttatcttgcaggccaattgaataagccactctgatcgctc

SEQ ID NO: 497631 - DNA, 546 bp, Homo sapiens
gctgctccaggaggctgaggtgggaagattgcttaagcttgagagttcaagacctgtctgggtaacatagtgagaccctgtctctacaaagaataaaaattttaaaagacacacaaatgatgttcatggtgctcactatctattggaccatcgtgacattttaacattaaggaaatgaaaggccacagataatgaacaattsacaattgattcaaggtccatatgtaagagtgtaagagtggagaagtgaagctgcccccacctgataccctaacaagcattccccatcttccccaccactgggcagccaggcttctggagcgaagcgagccactgcgattgcagcttggcaggatccagcacccaagacttggccaacctccagcaagctcacccctcctgccctctccttggatcatttattccaggagccctgctataaatatccacttagtgaaatgccttgctcctcgggcaccctcttccctgctccctggccacctgcaccctgctcaagcaatgccaacttgcaatcagtctgcaatc

SEQ ID NO: 497632 - DNA, 123 bp, Homo sapiens
gcaggagttaagctaacactggtagcccccccatcttccagttggatgacactttcattgggtagcgagcccccgcagcagtggcgccagcctrcagccgtaatggggcccatccgcggaagg

SEQ ID NO: 497633 - DNA, 383 bp, Homo sapiens
atgcaaactgagctatagctcatttaacaggggagttaagtaacttttaatagtaggtaacacttattggtcacatayaggtgctatgtacttcgctaaacatcacctcatttaatcctgacatcaaccgcatgaggtagtacccttattctccccattttacagatgagaaaactgaggcacagagaggttgcataacttgctcacatggtaagaggaagatgcaggattttgcactcaggttacttactccagaatctacttgcttaactgggaattggaatggtggtgagtcattggtcacatgggggtggtgctggttggggatctgagcagaagctcatacagatgcagctaccgcctcagcagtgtatctttccctt

SEQ ID NO: 497634 - DNA, 596 bp, Homo sapiens
caccttactttctcatacctttttccttccattgcctcccatgaactccatgaccctctttgtccctctctcctggtgccaataatgtggatcgaatttaatcaggttctcccttcacctcccctactgtgcattgagctctgtgtaaacaggcatcatgtcttgtacttttttctccttggggccaaacagttcctggcacatagtaggcttggcataaactttgaattattagatactgtaagccactcagctttctttgttttaaatcaataatcttacagttacgaagtaataagctgataaatggaacttcagcaaaattaaaaacttctgctctttttcttaagaaaatgaaaaaaaggaaaacaaggcactcacttggaggaaatatagaacttgtgtccaaatatttgaagaacttccaaaaatcaataataagaaaacaacccaataaaaaaaactgagcaaactatttgaatagaggctttaccaaagaagatgtatggacggaaaacaaayacatgaaaagatgctcatcatcattagtaactagggaaatgcaaattaaaaccataataagatactactgttta

SEQ ID NO: 497635 - DNA, 548 bp, Homo sapiens
ctgtgactacattgtagctggatttctccttcagcttctccctgctttcttccctttcccatgggtgtgggtcccgggaacacccctcattaatgttctacacactgatctccggctcagagtcaacttgccagggaatccaccctgcaacagtggctgacctcaaactcatgctcattcaataaatctgcctctagtttccttttgggccagatatgtgcagggtgctgggaacagacrtccggatgagctgtgtttcttgtgctttcctctggttggggagcctgatgccgaaaggtggtgggtactggcacagggatttgctcctggagggcctgaccagggtgtgcctgctctccctgagtgcaatcccagtgtcttagaaatggaaaatggggagtggccagccctttttctgaggctcaactccccaagtagtcagcccatctggccttgggaccttcagtgccacagagctcacgtggtcccaagtaactctgcatacgcaaagtccattctggtcttcctggagctgtcccacactggca

SEQ ID NO: 497636 - DNA, 582 bp, Homo sapiens
aaaaaaaaaaaaaaaggcggggtggtggtggggaggataaaatctaccttattagaagccataagggctgcacattccttctgaagcaacctgtgatgttcttaagcgttatgtaaatgttagttgtaggtaatatcaatacaaagaataacgctattttttgttaacatattaaatatccggccggggtggctcccgcgtgtagtcccagcactttgggtgaccgagatgggaggatgacttgagtccaagagttcgagamctgcccgggcaacatagtgaaatcccctaccaaaaaaaaaaaaaaaaatgagccgggcgtggtggcgcgctcctatagtactagctactcgggaggctgaggtgggaggatcacttgagcccgggaagtcgaggctgcagtgaactgagaccgcgccacactgcactccactgtgggtgacagagtgagaccctgtctcaaatagaaaaaaataggtaaacataaatcctttctttctgacattctccgagcgttttattactattaatagtttttttccgattctcaagaggaactgagatcccaaaaaggctcagaac

SEQ ID NO: 497637 - DNA, 607 bp, Homo sapiens
aactgagatcccaaaaaggctcagaactgcagtagtggaggcccgggactgggggataaagggttaggtggtggacgagggtgcgggtccagcaacaggccttgcgtaccatcctgggggccggggaactgacaacaacaggcgacatgcgcagcgcacccgatccgtgccacacgctgtgcctgcgcttcatacacatcccccactttcatcmtcgcgacagccctctgaggtaggtactttcgtcagcgccactttacaaatggggaaactgaggctccggggatcaacccgctatccaaggtcacatggctcgcgacccgaaaaggcacgttcgctggctcccgagactgcgttcccaacccaggcgcatcgcggcggacggcgggggcggggaggagcgggagcccggagacccggaccgatcgaggccgcgggcgcgcgggggcggcggccggactcaccttggcgctgtgcaccgcctcctgcgccccgcagagctgcagccagatgcgcgcgggcagcggctcctcagcccctagcgcgccgagcacggctaggctcacgccaaacaggccctcgatacggccgcggctctgctccagca

SEQ ID NO: 497638 - DNA, 362 bp, Homo sapiens
aggctcaggggatgccaccggccatgaggatggtccacctggctgcacctcccagaaagatctgctgaccaggaggaaatgtgcctatcaaggagcacaggagtctgagctggatctgttatgtgtctcrtggtttctccatccacctcctggaagcatggctggcaacatagtaattagagctaaccccaaatattccagttcttctctcctcccaagaaactgctaggattgcatttccactcctttgaaattagttgagtccatgtgacttgctttccatgtgacttgcttttttcaatgaaaagggagtggaataacacgggtctcttccggggagaagcttgaagagacagtgaggg

SEQ ID NO: 497639 - DNA, 362 bp, Homo sapiens
aggctcaggggatgccaccggccatgaggatggtccacctggctgcacctcccagaaagatctgctgaccaggaggaaatgtgcctatcaaggagcacaggagtctgagctggatctgttatgtgtctcgtggtttctccatccacctcctggaagcatggctggcaacatagtaattagagctaaccccaaatattccagttcttctctcctcccaagaaactgctaggattgcatttccactcctttgaaattagttgagtccatgtgacttgctttccatgtgacttgcttttktcaatgaaaagggagtggaataacacgggtctcttccggggagaagcttgaagagacagtgaggg

SEQ ID NO: 497640 - DNA, 441 bp, Homo sapiens
agcaatgcactggggcagaggcaggaagacccctcaggaaggaagcgggacaggtgatcggtcaccagatatgggaggccagccaggtgacctcttgagaccacctgaccctgtgatgccatcagcttggcatcagacgtcaggtcaggggtggggcgggctcacaggaaaccaggccttttctattccttgtctgtgttaggtagtttccaaagatggtcctcagaaattccttccttcctgcatgtgcgtacttccctttaaraatctggactggtcttgtgacttcattgactaatagaattcagtggaagtgatgttccagaacttccaagatcaatgcttaggaagatgaaagcttctacttcctttttcttggaacacttgctggtgaaacagtcttgcttggaacctggctaccatgccaagaggaagcccagc

SEQ ID NO: 497641 - DNA, 578 bp, Homo sapiens
ttcctgaactggaaacaagaatgaatgaatgaataaatgatagaataaatgggtggaggctcaagccaacggcactgatctcaaagcccagaagttctcggcggttagccctccacagaaagccttgaacaccacacagaagtgttcagcgacggacttttccttcctggagaggaggaatgagaagaaggcaaaagccaagagaaaaacaagaggcagaggaaagcagcctggagaatcttcccgtggagtgagcatgattgctttggatacttggaatctgggcacagtctgcgaagcatcgagtatggtaaaagcctttggttttgtatgctgcagacggatggaacgtcactgtccaggaagctcaggcacagaagcatgcacacaaatgcccagggagtctgcatgataagcaggccctgagcagccacgtggagtccggccttgtcctgagcttctgaytgtccccattttccataccctccaggcagcaggtgcgagcgtccaggaccgtggcgagctggccggccacatggacacacacagccatcagctcacggtgctgaaaggcccag

SEQ ID NO: 497642 - DNA, 382 bp, Homo sapiens
gccaagagaaaaacaagaggcagaggaaagcagcctggagaatcttcccgtggagtgagcatgattgctttggatacttggaatctgggcacagtctgcgaagcatcgagtatggtaaaagcctttggttttgtatgctgcagacggatggaacgtcactgtccaggaagctcaggcacagaagcatgcacacaaatgcccagggagtctgcatgataagcaggccctgagcagccacgtggagtccggccttgtcctgagcttctgactgtccccattttccataccctccaggcagcaggtgcgagcgtccaggaccgtggcgagctggccggccacatggacacacacagccatcagcycacggtgctgaaaggcccag

SEQ ID NO: 497643 - DNA, 539 bp, Homo sapiens
tgttaaaaggtgaaaggtcggcttactcaggacctggcagtgccaccccaaggaatctatgtgagtgaagtgaaacataccggacactcatcgctgcattatcccaaacagcccgacctgcaaacagccacggtgtccctgctgaccccgtgcctccagcacagcctcctcctggacttgggtaagtcaatcccccaacaggtgcaccctcccctccatttccactcagcccttatcccccagggacccactccacacctgggggccctgtgtggtgacctcctgccaggccagcctgccccagagggaggaacacagaatccatttggaaccaaaagggactcagctcagccgggaaaagtaggctctttatttccagcctcactgaccatgygctgctctgtgcccatggtgggccagccctgggcatgaggagatgagcagagctggcccccggacccctccttaccacgtctgaacggacagcacttctgtgtccaggggtgtgcgccgggctcccgggcagacaatccctgggc

SEQ ID NO: 497644 - DNA, 539 bp, Homo sapiens
tgttaaaaggtgaaaggtcggcttactcaggacctggcagtgccaccccaaggaatctatgtgagtgaagtgaaacataccggacactcatcgctgcattatcccaaacagcccgacctgcaaacagccacggtgtccctgctgaccccgtgcctccagcacagcctcctcctggacttgggtaagtcaatcccccaacaggtgcaccctcccctccatttccactcagcccttatcccccagggacccactccacacctgggggccctgtgtggtgacctcctgccaggccagcctgccccagagggaggaacacagaatccatttggaaccaaaagggactcagctcagccgggaaaagtaggctctttatttccagcctcactgaccatgcgctgctctgtgcccrtggtgggccagccctgggcatgaggagatgagcagagctggcccccggacccctccttaccacgtctgaacggacagcacttctgtgtccaggggtgtgcgccgggctcccgggcagacaatccctgggc

SEQ ID NO: 497645 - DNA, 300 bp, Homo sapiens
cctaatgaaacgtgctcctccactgagagggagcccagccccactcaagtsggtcagagctcgtccgtaggaggctgtgtgggggtcacgccaccacaggacgcagatctgccagaagcctgttttattgcacttaactaattcccaagataaaccactgggaatttccatgtaagcacttaggcctctgtttatgagaatctttgatccactgagaatgtttagaactcactgaagcatccctggccctgcccagcaccaagccttccaagatgcgtgagggcagggaaattgtcggcc

SEQ ID NO: 497646 - DNA, 300 bp, Homo sapiens
cctaatgaaacgtgctcctccactgagagggagcccagccccactcaagtgggtcagagctcrtccgtaggaggctgtgtgggggtcacgccaccacaggacgcagatctgccagaagcctgttttattgcacttaactaattcccaagataaaccactgggaatttccatgtaagcacttaggcctctgtttatgagaatctttgatccactgagaatgtttagaactcactgaagcatccctggccctgcccagcaccaagccttccaagatgcgtgagggcagggaaattgtcggcc

SEQ ID NO: 497647 - DNA, 596 bp, Homo sapiens
tgctcctccactgagagggagcccagccccactcaagtgggtcagagctcgtccgtaggaggctgtgtgggggtcacgccaccacaggacgcagatctgccagaagcctgttttattgcacttaactaattcccaagataaaccactgggaatttccatgtaagcacttaggcctctgtttatgagaatctttgatccactgagaatgtttagaactcactgaagcatccctggccctgcccagcaccaagccttccaagatgcrtgagggcagggaaattgtcggcctgtgcttggtctgtggggatccaggaccccaggaggggaccccaatagggagcctctgccccccaggtggtggggtctctgctgggactctgcaggctcctgcccgtggccaagttcatggctgtcttttccagagctgccccagagccctagacagccccatggaagggcccatcttcctccggccgtggaggaaatttgcagccatccgtgacctgcaaactgtagcttatgatggactgctccccatccaccaaagcccagccacttggtttggaagccactgccccaaatggcccctctccagt

SEQ ID NO: 497648 - DNA, 596 bp, Homo sapiens
tgctcctccactgagagggagcccagccccactcaagtgggtcagagctcgtccgtaggaggctgtgtgggggtcacgccaccacaggacgcagatctgccagaagcctgttttattgcacttaactaattcccaagataaaccactgggaatttccatgtaagcacttaggcctctgtttatgagaatctttgatccactgagaatgtttagaactcactgaagcatccctggccctgcccagcaccaagccttccaagatgcgtgagggcagggaaaytgtcggcctgtgcttggtctgtggggatccaggaccccaggaggggaccccaatagggagcctctgccccccaggtggtggggtctctgctgggactctgcaggctcctgcccgtggccaagttcatggctgtcttttccagagctgccccagagccctagacagccccatggaagggcccatcttcctccggccgtggaggaaatttgcagccatccgtgacctgcaaactgtagcttatgatggactgctccccatccaccaaagcccagccacttggtttggaagccactgccccaaatggcccctctccagt

SEQ ID NO: 497649 - DNA, 596 bp, Homo sapiens
tgctcctccactgagagggagcccagccccactcaagtgggtcagagctcgtccgtaggaggctgtgtgggggtcacgccaccacaggacgcagatctgccagaagcctgttttattgcacttaactaattcccaagataaaccactgggaatttccatgtaagcacttaggcctctgtttatgagaatctttgatccactgagaatgtttagaactcactgaagcatccctggccctgcccagcaccaagccttccaagatgcgtgagggcagggaaatwgtcggcctgtgcttggtctgtggggatccaggaccccaggaggggaccccaatagggagcctctgccccccaggtggtggggtctctgctgggactctgcaggctcctgcccgtggccaagttcatggctgtcttttccagagctgccccagagccctagacagccccatggaagggcccatcttcctccggccgtggaggaaatttgcagccatccgtgacctgcaaactgtagcttatgatggactgctccccatccaccaaagcccagccacttggtttggaagccactgccccaaatggcccctctccagt

SEQ ID NO: 497650 - DNA, 596 bp, Homo sapiens
tgctcctccactgagagggagcccagccccactcaagtgggtcagagctcgtccgtaggaggctgtgtgggggtcacgccaccacaggacgcagatctgccagaagcctgttttattgcacttaactaattcccaagataaaccactgggaatttccatgtaagcacttaggcctctgtttatgagaatctttgatccactgagaatgtttagaactcactgaagcatccctggccctgcccagcaccaagccttccaagatgcgtgagggcagggaaattgtcggcctgtgcttggtctgtggggatccaggaccccaggaggggaccccaatagggagcctctgccccccaggtggtggggtctctgctgggactctgcaggctcctgcccgtggccaagttcatggctgtcttttccagagctgccccrgagccctagacagccccatggaagggcccatcttcctccggccgtggaggaaatttgcagccatccgtgacctgcaaactgtagcttatgatggactgctccccatccaccaaagcccagccacttggtttggaagccactgccccaaatggcccctctccagt

SEQ ID NO: 497651 - DNA, 621 bp, Homo sapiens
caccaaagcccagccacttggtttggaagccactgccccaaatggcccctctccagtcactgaactgcagttcaaatgccccaccccttggctctttgagcagccagcctgccttcttgctctgggatggtttcttcaaaaccctctggagtatgtccagttcttctgttatttcaggrtgttttatttccagcacagatttccacttctgctaccaccgggatggaaaaggcctcttccctccgattcccccaatcccaagaatccaattccttcgctaatgctgagtgcagacatagtctctacaatccagaaggctgagtgaggtggaaatgtcggtgcagcctgcagctcacctggttgtcactcacagatcggcctcggaaagctccaggaagttgatttgggatgagccagccatcccgcacagatggtgggagggagaggaggccggagcttcagccagtgcagtgccgtggcccctgttctgtggttcactggggtgtgaggccttccttgggctcagagagggggcctccgagtcctcatccacagaagccctctgtgccaccagcagggaacagccagcaaacagccttcaccctgaagatccagacggaa

SEQ ID NO: 497652 - DNA, 621 bp, Homo sapiens
caccaaagcccagccacttggtttggaagccactgccccaaatggcccctctccagtcactgaactgcagttcaaatgccccaccccttggctctttgagcagccagcctgccttcttgctctgggatggtttcttcaaaaccctctggagtatgtccagttcttctgttatttcagggtgttttatttccagcacagatttccacttctgctaccaccgggatggaaaaggcctcttccctccgattcccccaatcccaagaatccaattccttcgctaatgctgagtgcagacatagtctctacaatccagaaggctgagtgaggtggaaatgtcggtgcagcctgcagctcacctggttgtcactcrcagatcggcctcggaaagctccaggaagttgatttgggatgagccagccatcccgcacagatggtgggagggagaggaggccggagcttcagccagtgcagtgccgtggcccctgttctgtggttcactggggtgtgaggccttccttgggctcagagagggggcctccgagtcctcatccacagaagccctctgtgccaccagcagggaacagccagcaaacagccttcaccctgaagatccagacggaa

SEQ ID NO: 497653 - DNA, 341 bp, Homo sapiens
gaaaaatcctatcatgatgggatcaaaagatcaccttgaatttaactgccattttccactttaagcatttgatctcatgttatttgatggactttttttaaaaagcctcatgaagtaggaatgtcactactctcatcactttggttttgaggcaaaagccagaaaaaggagaagtgatgtgtccaagtccaattactagttaggagtgarcaccggccttaaagtgcaagcttcctgggcccaccaggtggagaagcagcggccctcactggatcctaggaacccatgagaggtgctcagggagacgggaagaacacgcacagccccgcacacgtgcctct

SEQ ID NO: 497654 - DNA, 616 bp, Homo sapiens
ctggggcaagcgcccacttctgggcagccctcggggctcggattcctttaccttttctgacagcactgagcagccgcacttaacagggagtgggaaaaatcctatcatgatgggatcaaaagatcaccttgaatttaactgccattttccactttaagcatttgatctcatgttatttgatggactttttttaaaaagcctcatgaagtaggaatgtcactactctcatcactttggttttgaggcaaaagccagaaaaaggagaagtgatgtgtccaagtccaattactagttaggagtgaacaccggccttaaagtgcaagcttcctgggcccaccaggtggagaagcagcggccctcactggatcctaggaacccatgagaggtgctcagggagacgggaagaacacgcacagccccgcacacgtgcctctgctgtcctgagctccctcagcccaaggcacccgcagsccctgctctgggaggcctagtcggacttcaatcgaggcagaagtctcccccctgagcagtgcccaggacacaaggagaacagaagtgctcggcatccggctgctgaggctcatgggatccccacagcgtggcgtcacctgggagg

SEQ ID NO: 497655 - DNA, 616 bp, Homo sapiens
ctggggcaagcgcccacttctgggcagccctcggggctcggattcctttaccttttctgacagcactgagcagccgcacttaacagggagtgggaaaaatcctatcatgatgggatcaaaagatcaccttgaatttaactgccattttccactttaagcatttgatctcatgttatttgatggactttttttaaaaagcctcatgaagtaggaatgtcactactctcatcactttggttttgaggcaaaagccagaaaaaggagaagtgatgtgtccaagtccaattactagttaggagtgaacaccggccttaaagtgcaagcttcctgggcccaccaggtggagaagcagcggccctcactggatcctaggaacccatgagaggtgctcagggagacgggaagaacacgcacagccccgcacacgtgcctctgctgtcctgagctccctcagcccaaggcacccgcaggccctgctctgggaggcctagtcggacttcaatcgaggcagaagtctcccccctgagcagtgcccaggacacaaggrgaacagaagtgctcggcatccggctgctgaggctcatgggatccccacagcgtggcgtcacctgggagg

SEQ ID NO: 497656 - DNA, 515 bp, Homo sapiens
tgtctggaggatggccctgaagccagcrggcccaggggagagggtggtagcccatgccaggctcccactcccctctctggcctccagacccccatcgaggttggcagcacttcccaagcaaggagaagctcagcagggaaggtcaactcatagccacaacatgcagggaatcggggcctgccccattctgccccacgcagtgccttccaccaccccacacggactcgctgaatacagacacagccaccccaccgccatgggctctgctctatcgccctgccatgcccctgtcacctcactggaacattccctgtgctcgattaataaaaagaccaatcgcagccaatgccctgaaagcccgaatccttagcctgacataccaaggcactgtctccaaagcagagccagccggcctccagcttcacatccaaggcccctgtcatctccctggaggagcagggactcctcacctgggaacagggcccagccctgaatgccactgccccacacagcac

SEQ ID NO: 497657 - DNA, 515 bp, Homo sapiens
tgtctggaggatggccctgaagccagcgggcccaggggagagggtggtagcccatgccaggctcccactcccctctctggcctccagacccccatcgaggttggcagcacttcccaagcaaggagaagctcagcagggaaggtcaactcatagccacaacatgcagggaatcggggcctgccccattctgccccacgcagtgccttccaccaccccacacggactcgctgaatacagacacagccaccccaccgcyatgggctctgctctatcgccctgccatgcccctgtcacctcactggaacattccctgtgctcgattaataaaaagaccaatcgcagccaatgccctgaaagcccgaatccttagcctgacataccaaggcactgtctccaaagcagagccagccggcctccagcttcacatccaaggcccctgtcatctccctggaggagcagggactcctcacctgggaacagggcccagccctgaatgccactgccccacacagcac

SEQ ID NO: 497658 - DNA, 543 bp, Homo sapiens
gggcagagggcacgagctgagggggcacaggcagagggcacaggcagggaggcacaggcagagggcatgggcagagggatggacagaagagatgggcagagggcacaagatgagggggcataggcagagggcatgggcagagggatggacagagragacgggcagagggcatgagctgaaggggcacagggtgagggcacaagcagagggatgggcagagggagcacgggcagaggacacaggcagaggggatgggcagagggcacgagctaagggagcataggcagagggacgggcagagggatgggcagaggggacaggcagaggagacgggcagagggcatgagctgagggggcacgggcagagggacaggcagagggatgggcagaggggacgggcagagggcacgagctgagggggcacaggcagagggacaggcagaggggacaggcagagggcatgagctgaggggacacgggcagagggatgggcagaggggacaggcagagggcatgagctgagggggcatgggcagagggacg

SEQ ID NO: 497659 - DNA, 500 bp, Homo sapiens
aggcagagggcatgggcagagggatggacagaagagatgggcagagggcacaagatgagggggcataggcagagggcatgggcagagggatggacagaggagacgggcagagggcatgagctgaaggggcacagggtgagggcacaagcagagggatgggcagagggagcacgggcagaggacacaggcagaggggatgggcagagggcacgagctaagggagcataggcagagggacgggcagagggatgggcagaggggacaggyagaggagacgggcagagggcatgagctgagggggcacgggcagagggacaggcagagggatgggcagaggggacgggcagagggcacgagctgagggggcacaggcagagggacaggcagaggggacaggcagagggcatgagctgaggggacacgggcagagggatgggcagaggggacaggcagagggcatgagctgagggggcatgggcagagggacgggcagagggggt

SEQ ID NO: 497660 - DNA, 500 bp, Homo sapiens
aggcagagggcatgggcagagggatggacagaagagatgggcagagggcacaagatgagggggcataggcagagggcatgggcagagggatggacagaggagacgggcagagggcatgagctgaaggggcacagggtgagggcacaagcagagggatgggcagagggagcacgggcagaggacacaggcagaggggatgggcagagggcacgagctaagggagcataggcagagggacgggcagagggatgggcagaggggacaggcaraggagacgggcagagggcatgagctgagggggcacgggcagagggacaggcagagggatgggcagaggggacgggcagagggcacgagctgagggggcacaggcagagggacaggcagaggggacaggcagagggcatgagctgaggggacacgggcagagggatgggcagaggggacaggcagagggcatgagctgagggggcatgggcagagggacgggcagagggggt

SEQ ID NO: 497661 - DNA, 543 bp, Homo sapiens
gggcagagggcacgagctgagggggcacaggcagagggcacaggcagggaggcacaggcagagggcatgggcagagggatggacagaagagatgggcagagggcacaagatgagggggcataggcagagggcatgggcagagggatggacagaggagacgggcagagggcatgagctgaaggggcacagggtgagggcacaagcagagggatgggcagagggagcacgggcagaggacacaggcagaggggatgggcagagggcacgagctaagggagcataggcagagggacgggcagagggatgggcagaggggacaggcagaggagacgggcagagggcatgagctgagggggcacgggcagagggacaggcagagggatgggcagaggggacgggcagagggcacgagctgagggggcacaggcagagggacaggcagaggggacaggcagagggcatgagctgaggggacacgggcagagggatgggcagaggggacaggcagagggcatgagctgagggggcaygggcagagggacg

SEQ ID NO: 497662 - DNA, 636 bp, Homo sapiens
ctgtagccaccaagctgctaaagatccctgcagcctctctcaggaaataacagtgctgaaacacacttagctgagctctctgtggtgagatagtatttttaaagtaaacactggataagagwtcagagttgtttttcaaacatgagtcaaaatcatgtcaaagtgtcactgagaccctccaggagggatgacgtgggctctccatgcccacaccaagaacctccctgacttagggtgacagccagctcctgggggggctgccacccaccacctctgtcctccccaggctccacctcaaggcaatgtcggggcagccactgagctcatcctctcgcaggctcaggacccaccgaaggccggtgtgcaaatgtccagacccagtgcaccaaggctggccgcgccctccaccccacatggagctgccccagctctgggtgactcctcctgcaccgcaggtcacaacgaaccctccctccacaaccactggcctcgtccaggcctcaacacttcttcctggccttttttcagcaccgcaggagactccgactctaaactctgccccaccagagttacccaaaggccacctggcctgtgctcccaggaatctcccgcctggagcgtccagcaggacccagt

SEQ ID NO: 497663 - DNA, 347 bp, Homo sapiens
aggcaccctcccgccatcaaygccccggaaggtgggtggcggcaggagctgtggctctgaggggatctcaggagcactggattcttggtgccttcctcagcacccgtcaccccagctaactccagctaactcagcacccatgactccaactaacccaggtaatctccaaagacatgttttcttgtctctggtgatgttttacatgtaaaagtgcagagcactggaggctggggtctttgcatgatggctgtgcttgctgggatccactgttcagcctccccaggtgctcgccggcccctccccattttatgtaggatcgttcggactgtcagcgagacataaaaaag

SEQ ID NO: 497664 - DNA, 506 bp, Homo sapiens
atgcattttattcaccgtgtttagtattcgatcaaaaatcacatgtcatgaccaaaggcaggaccacacgaccaaaaaccaagagaaaatacagatcttagaagcagctacagagatgatccagataacagattttgcaagcaacaactttcaaataaccttgwttcaagaaccatagctcaggaaaatagaggaacagatgaagaaattcaccagagggaattttagaattctatgaagaaaaaaaaactaaaaggaagaacacagattagacaaagaagaagacagacttggtaaactggaaaacagtttaatagaacataagcaaactgaagcaacaggaaaaaaataataaaaaatatagaaaaatatgttagagacaaatgggacatagttaaaaggttaacaaccagtaatcagtatctctggagaagaggtaaggaatgaaaaaggcagcaatatttgaaaagatagcttccaaaaccctttcaatcagaagcatgata

SEQ ID NO: 497665 - DNA, 498 bp, Homo sapiens
ctgattttttgtatttttagtgcrtacggggtttaatcatgttggccaggctggtctcaaactccagacctcaggtgatccacccgcctaggcctcccaaagtgctggggttacaggcgtgagctactgtgcctggccgtggccattacttttgctctgagaatggtggactagacaagttgttttgtgtccttgagtgatacggagtgaccctgatgaatcctgttctggttccttaagtaacttcctgatcagcaccgcccagatcttcaacagtgaaatttcactgaattcaataagtgggcagcttgtgagtagtgtggcgtgttcccttgattttatatcttgccctgtgttccctagtttaggtctcctcttctgctttatctactgctgtggtcacctctctactggtaatgtctcagatcttctgggattgtgcactggggctcttaaaaatacccttaaagttctctgttgcctgtggctccttgttca

SEQ ID NO: 497666 - DNA, 553 bp, Homo sapiens
tgattttttgtatttttagtgcatacggggtttaatcatgttggccaggctggtctcraactccagacctcaggtgatccacccgcctaggcctcccaaagtgctggggttacaggcgtgagctactgtgcctggccgtggccattacttttgctctgagaatggtggactagacaagttgttttgtgtccttgagtgatacggagtgaccctgatgaatcctgttctggttccttaagtaacttcctgatcagcaccgcccagatcttcaacagtgaaatttcactgaattcaataagtgggcagcttgtgagtagtgtggcgtgttcccttgattttatatcttgccctgtgttccctagtttaggtctcctcttctgctttatctactgctgtggtcacctctctactggtaatgtctcagatcttctgggattgtgcactggggctcttaaaaatacccttaaagttctctgttgcctgtggctccttgttcaattgtatggcaagactctatgtgtccaaaatgggagggcttgggagccaggaggac

SEQ ID NO: 497667 - DNA, 558 bp, Homo sapiens
ctgattttttgtatttttagtgcatacggggtttaatcatgttggccaggctggtctcaaactccagacctcaggtgatccacccgcctaggcctcccaaagtgctggggttacaggcgtgagctactgtgcctggccgtggccattacttttgctctgagaatggtggactagacaagttgttttgtgtccttgagtgatacggagtgaccctgatgaatcctgttctggttccttaagtaacttcctgatcagcaccgcccagatcttcaacagtgaaatttcactgaattcaataagtgggcagcttgtgagtagtgtggcgtgttcccttgattttatatcttgccctgtgttccctagtttaggtctcctcttctgctttatctactgctgtggtcacctctctactggtaatgtctcagatcttctgggattgtgcactggggctctyaaaaatacccttaaagttctctgttgcctgtggctccttgttcaattgtatggcaagactctatgtgtccaaaatgggagggcttgggagccaggaggactgac

SEQ ID NO: 497668 - DNA, 346 bp, Homo sapiens
caacaacgtatttcaaaataccccagaccattgtcggtacgtccatcacatttccagtcaagtgactctcacytgcagcctgtcttgaaaaatgcagtcacctccctccgaccttgaatctacatgaacgctttaaagtgtgttttcacctttcaattctgcaaaattgcttactgctacagaatccttttaaagcttgtcagggtgatgctgctgatgataagaattatcccagcagggttccgcttccactgccagaattaatgtggtctatttaaagtgcagctcacctgccaattagcgcctgcggtgtccataatttaatttagggatatacattgatctg

SEQ ID NO: 497669 - DNA, 466 bp, Homo sapiens
ctgcttcaaatgaggttctcactgaatccccctgayaaaccctcaagctaggcgagactatcgccttcacaagtgaaaaaaacgaaggctcagagggaactttccccgaggccattcagactcaccctagcagtctgacttcaaagccagggttgcttctgccttgctggatgtaagtgcccagctgccagctgcccttggctggatggaggtggaccaagaacctcatggcttactcacaccaattcctctaaggtcattcccccaaaggcagataagatataaacaagaagaagtatgagggcccaggaagcctgagggcaggtggccctgagaaaagctaaatccctgcaaagctcctcacccagcctgtaacactaaatcactcatacacagggactcaaggaggcgtccgggagatgggaagctgcagagacataatccaggacacaggaggtggccaaag

SEQ ID NO: 497670 - DNA, 620 bp, Homo sapiens
tgatgtgaataccttttacatgcctattatttgtctagggtagggatccatgagccttcagaccaaacccagaccaatgccagtttctctatggcccttgagctaaggatgacttctacattttcttttccttttttttcttttttgagatgacctctacattttcaaatggctgtgggaaaacatcaaaagaataataatattttatgacatgggaaagttatataaaattcaaatttcagtgctcaccaatcaagctgaaacaaaacatagccacatccattcacttaggtgcctgtctatggcagctttaggctacagctttggagtacggtggtagagctgagtggtcgcaacaggggccatatgacctgcacaccctaaaatagtatctagccttgtacagaaaaagtgtatcagggctgggtgtgatgacacacacctgtaatcccagcactttgggaggtcaaggcaggaagatcacttgaggccaggagttcaagaccagcctgggcaacatagtgagaccccatctctaccaaaaaaaaaaaaawtttaaagaaaacaaaaaagaaaaatttgcccatctctagtctaaatactagatggagattaaaaat

SEQ ID NO: 497671 - DNA, 415 bp, Homo sapiens
gtgctggagttgaaaggttaggaacacatgaagatctgtgaactgtagctaaccttgtgaatagaaggcagtaattactgagtaacatttttggtatatatcaagtaaaagcttgtcttttcctagttctcttctcctttgttaagtgtatccttctctaactacatctttattcatccttttcttccttcctctttctttgtccacaacccaaccaaacccactgctctctcctctcwccccctgcccgtgccatgaccacttgaacattccaggagggcagaataattgtaataaggctaagggcttattacacttcttacacttaaggactcaacagccttgctttagagaggatggtagcggaggatcctctctggtctctgtgagaagaaaagagaaaggaccatcctac

SEQ ID NO: 497672 - DNA, 483 bp, Homo sapiens
cagctgcctgttcttgcaaataaagttttattgaaacacagccatgtttattaattacatatggcatatcrctgttttcatgctacaaagggagagttgaagagttgcaacagagattgtatagcctgcaatgtagaaaatattttctacctggctctttccagaaagaaagccaacccttgggttatatgtgtatgatacctgcccatttccgtatgtatattatactttgatttaaaaataaaattaaggccagtgtggtggctcacacttgtaatcccaacattttgggaggacaaggcaggaggattgcttgagcccaggagtttgagacaagcctgagcaacaaagtgagaccctgtttctataaaacataaaaaaaaaaaattaactgggcatggtggtgtgcccctatgatcccagctactcaggagactgagatgggagaattgtttgagctggggaggtcaaggctgcagtgag

SEQ ID NO: 497673 - DNA, 616 bp, Homo sapiens
ttgctcatctatactacggaactcaccccctcccatggttttgtgtaagtactaaatgctgtaacagatcaaaatgccctgcaccgtgactgtcccatagaaaatgctcagaaaacactggaagaaaataaaaacagatgtgcatgagtgtcgaagggatgaattaacgcacgagcacatgagtgtttctctctgggatagtgcagttaacaagaaaaggctggagttatgttaattcccagtaatatcctcagagggtgtgggagaacaagatggactagcaagmcttgaaatgcaatcagatctcgtttttatctcccttgctacagctttattgtagtgaaatatgttcattttaacagagggcaatcaccctaaatagacaacgcaagaggcatgagacgccagcagaaattttcagagcatctgcccaggacgcccagctccaggccgttttggtttatgtattaaaactgcccgcagatgtgattgtgcgtagctggctgatggatatttgccgcggttaggctgcattagactcaatttatcccccagcactcattgttgctattgattgatttttaaatcagatgaaggcaatcagtaaataccaccc

SEQ ID NO: 497674 - DNA, 425 bp, Homo sapiens
ccaagaaatgcatagattgccagcatgcaatggaagtgggaggaggcagggaaggattgttccttagagtcttcagacggagcayggccctgctgtcacctcagtttcagacatcagaagtgtgccatcccatggccgggtgcagtggctcatgcctgtaatcccagcactttgggaggccgaggcaggtggattacttgaggtcaggggatcgagaccagcctggtcaacatggtaaaaccccgtctctactaaaaatacaaaaattagctgggtgtggtgttgcacgcctgtagtcccagctactccggaggctgaggcaggagaatcacttgaacccgagaggcagaggttgcagtgagccaagatcgtgccattgcactccagcctgggcgacaagagcaagactctgtctcaacaacaac

SEQ ID NO: 497675 - DNA, 535 bp, Homo sapiens
ctggggaagagaaaccattcctccatttgatttgtttttggtttttgttttgttttgtttttagaggtgagtcttgctctgtcatccaggctggagtacatgggtgcaatcatagctcactgcagcctcaaactcttgggctcaagtgatcttccagcatcagcctcccaagtagctgcaacaacaggtgtgtgccaccatgcccagctaatttttgtatttttttatttttgtgagactataaaactcactatgttgcccaggctggtctcaaactcmtgggctcaaacaatcctcctgcctcagcttcccgaagtgtggggattacaggagtgagcctcctcgtccagccatccctacatttgtattaataactatggaacagcaagctccttaagaaaaaaatacaaatgggtttagacttcattcctttgtttgatcattcattaattcagccatttgattgagttcctactatgtgccaggcactgttttaggggccagggtttcagcagggatcctatcaggcagatag

SEQ ID NO: 497676 - DNA, 633 bp, Homo sapiens
gcatgggaatctactgctggctgtttgtgtgacsttgggcacatttgctcgcctctctaacccttggtttcctcttatgcaaaatgggagtgatgacagcaatggtccttcccgggatttctgggaggcttaaagggattaatgagtgtgaagtgttcagcatagcgcttgggacggtgccatgtgtcagtggtgctctttcagtaattatgatagaaacccaactctcaccagtctggaaagaattaggtggcgacatattggaaaggctggtggaaaatgaaggcttgaggcttggcgagattgagtgctcctttcctctcctctttgatttctgctgtgttgtcctgatgaggacccgcgatgggccctgggaattccagagtcaagtgatcatgtcctttttaccaacagcttgcccacaaggaagctgcttgtacacaaggacacctacctgcaaggaacactgggaaatggagttcgtagactcctcccccatacagcgtcctccatgctgtttctcttccaccggcttaatgcaggtgaggatggcaatcttagaagccacatattgaggatggcattggaaagttggaagcaagatgaaaagagcttctctgtgatttagaacag

SEQ ID NO: 497677 - DNA, 553 bp, Homo sapiens
cctcttatgcaaaatgggagtgatgacagcaatggtccttcccgggatttctgggaggcttaaagggattaatgagtgtgaagtgttcagcatagcgcttgggacggtgccatgtgtcagtggtgctctttcagtaattatgatagaaacccaactctcaccagtctggaaagaattaggtggcgacatattggaaaggctggtggaaaatgaaggcttgaggcttggcgagattgagtgctcctttcctctcctctttgatttctgctgtgttgtcctgatgaggrcccgcgatgggccctgggaattccagagtcaagtgatcatgtcctttttaccaacagcttgcccacaaggaagctgcttgtacacaaggacacctacctgcaaggaacactgggaaatggagttcgtagactcctcccccatacagcgtcctccatgctgtttctcttccaccggcttaatgcaggtgaggatggcaatcttagaagccacatattgaggatggcattggaaagttggaagcaagatgaaaagagcttctctgtga

SEQ ID NO: 497678 - DNA, 529 bp, Homo sapiens
gcaaataaagatgtaacaaaagccaagctctctggaaatgmagggagttcagtacagaaaccatttccccatcccatcccaaacacgtctcctcctcactctccctcgtttattgggcgtttgcttgctatgatccagccctgtggccgacatctgtgactaagagagagagaaaagcaagcttcctcctaaatgatgcctgataacaagtgagtaagtgggataaccacggagtacgaccgagagatgaggaaagaagatgtgactagagagaccactgcagatggaaaaggcctctctgagatggacacattcgagatgaagctgaatagtgagaaggagctgggcatgtaaaaatggggagagaataggcaaaggcttattatggtacaggagggctaagggaggtccccaaatgccagtgggaccttgaccccagccaatgtccaggctcttgacaccagcgtgagaagaaattaagaaaatagtgacagtacagagatttattgcaaagggaatagtatgcact

SEQ ID NO: 497679 - DNA, 592 bp, Homo sapiens
ggttacagctttctttgtttacctactgtttctcgcagatgaaatcatgtataagcaaatgcaaaatgttatgctcagattgttccctaatatatcagttacactggaacaaattcacatcttccaaacaagcatcactgcagaaccaactgtgcagtgttgcgagasgggctgtgtggagaagctttctaaaggaggtttctggaggacattgtagggtaggactgaactgtaggatctcaagagcacccaatcgtggcacctgcctttgtttacctactgttagtaaaccaagtgtctgtgaatccatgtttccctgtcttacccaccactgttgctacatggaaggaactggaaaggcagctcattcttcagggctgtcgtgagccaccctgggctctgattaccgctctgttggatccatcagccaccaaagaaggctgaggctgcccaggggggcagtaggaaggggagccagctctcccttgacccagaactgagagagttgtacagaaacagatgcccagacattgttatttcagacctgtcacattaaaaaaatgtagtcattgacatgatgttgtcaattcaa

SEQ ID NO: 497680 - DNA, 605 bp, Homo sapiens
tgggaaaatattgaagcaagggctggggctggctcggtgtgcggaaatcctgtgcaagtgagagctggccagcggtgtctgtggagtccagatgaaatcttttcacagtggatctttccagactttctgttggctttcacccaagtgaatcayaatgaaggagaagtattttatgccaagtcaaaaggatacccaaccagcatggtttaaatggaccctgtacccttgcagatttaccagtgaaaaactggcccaagaaatgggcattctggaggctagaatccagatttgctttgagagataatgtcagataagacagaagtgattttgacctcagctttggactcatgaatgcctctcccaagaagtcaggaaaaagtgggcagcaattattagataccagactagtgtccacatccaagcctttgagaaaaattgctttcctagcatcaccaccaaagagaaactggtaaaacagacaggcattccagagtccagaattcagatctggtgtcagatcaaaggatcagtcgtgcaggctagagcagaagtgggcctgtaaattctccagcactaggcctaagtgagaggcttcacctgactgt

SEQ ID NO: 497681 - DNA, 630 bp, Homo sapiens
tgtccagcttgtatgtctgctgaaggctgctgaacttgttctccatcacagaggtggtgtgacagcagtctgagggcaccacactccatgactgggctctactgctggtgctgtgggaaggcaggtgacccaaagacaggtcctgccttccacwtccaggccacactcccaccaacttccaggcccaccttgatattctgatgtgatgctcttttcagagctcttcttattgcctgggacaattttatattattatatcataaatatgataaaaatatgatattaggacatcacaatattatgatatcataattcatatgtatttataacatcacaatgtattatgacatcataatctgtattatgacaccattgtctattatgatgtcataatttccatgtattgtgacatcacaatatattatgactccataatgtgcatgtattaaaacatcacaatatattacgatagcataatggatagggattatgacatcacaccatattacaacatcataatttgtatgtgttatgacatcacaatatatcatgacatcataatttatatgtattatgatgaattcatacatattacataatttgcatgtaatacgatgtattacaaattat

SEQ ID NO: 497682 - DNA, 630 bp, Homo sapiens
tgtccagcttgtatgtctgctgaaggctgctgaacttgttctccatcacagaggtggtgtgacagcagtctgagggcaccacactccatgactgggctctactgctggtgctgtgggaaggcaggtgacccaaagacaggtcctgccttccacttccaggccacactcccaccaacttccaggcccaccttgatattctgatgtgatgctcttttcagagctcttcttattgcctgggacaattttatattattatatcataaatatgataaaaatatgatattakgacatcacaatattatgatatcataattcatatgtatttataacatcacaatgtattatgacatcataatctgtattatgacaccattgtctattatgatgtcataatttccatgtattgtgacatcacaatatattatgactccataatgtgcatgtattaaaacatcacaatatattacgatagcataatggatagggattatgacatcacaccatattacaacatcataatttgtatgtgttatgacatcacaatatatcatgacatcataatttatatgtattatgatgaattcatacatattacataatttgcatgtaatacgatgtattacaaattat

SEQ ID NO: 497683 - DNA, 496 bp, Homo sapiens
aacctattaactcagcccaatacagacatttttgtggttcacctgatcttccaggcagggatgttgctgctttctttagagaggccaggctttgccttttgccacatataggtgagtgccgtctgtggtggtgtcagttggtagggtcagcctagccacagaccctgaggtgagtgataaggtgccaggagtggtggactgggctaggcagtctcccaatcttcaggcttctcgatggtcctctatacagcatgaatgagtcctggaggtccttgacctgaactgggccagtgaacttgtcctcaggtcttcagggtgcaggtgttgactgtgacatgkaggagcaggctggtccctaggtcaccagcttaactctcaggcagggccaagcagagcactcagatggtgggagctcaaggacagatcataggcctgtgagggctggtctcgcagcaaggccccaggccacggctaaaatcatcacatggaaggaggg

SEQ ID NO: 497684 - DNA, 496 bp, Homo sapiens
aacctattaactcagcccaatacagacatttttgtggttcacctgatcttccaggcagggatgttgctgctttctttagagaggccaggctttgccttttgccacatataggtgagtgccgtctgtggtggtgtcagttggtagggtcagcctagccacagaccctgaggtgagtgataaggtgccaggagtggtggactgggctaggcagtctcccaatcttcaggcttctcgatggtcctctatacagcatgaatgagtcctggaggtccttgacctgaactgggccagtgaacttgtcctcaggtcttcagggtgcaggtgttgactgtgacatgtaggagcaggctggtccctaggtcaccagcttaactctcaggcagggccaagcagagcactcagatggtgggagctcaaggacagatcataggcctgtgagggctggkctcgcagcaaggccccaggccacggctaaaatcatcacatggaaggaggg

SEQ ID NO: 497685 - DNA, 496 bp, Homo sapiens
aacctattaactcagcccaatacagacatttttgtggttcacctgatcttccaggcagggatgttgctgctttctttagagaggccaggctttgccttttgccacatataggtgagtgccgtctgtggtggtgtcagttggtagggtcagcctagccacagaccctgaggtgagtgataaggtgccaggagtggtggactgggctaggcagtctcccaatcttcaggcttctcgatggtcctctatacagcatgaatgagtcctggaggtccttgacctgaactgggccagtgaacttgtcctcaggtcttcagggtgcaggtgttgactgtgacatgtaggagcaggctggtccctaggtcaccagcttaactctcaggcagggccaagcagagcactcagatggtgggagctcaaggacagatcataggcctgtgagggctggtctcgcagcaaggccccaggccayggctaaaatcatcacatggaaggaggg

SEQ ID NO: 497686 - DNA, 486 bp, Homo sapiens
ctgcttttgggagaattcgcagtttggccctcccacrgacaagtttagagcttggcaggaataacatgggctgtggcttcctggaaaggtcaccctcaccgggtgcctttttcatggatgtgaatgttgagtcatgagggagggtaactgttggtttacccaggcgatgctaagagcagaggagaaaaccccaattcccaggcatgtgtcttgagccagggacaggctggccagaccctgatcccctggggccccagagagcagcctacggccctgggttctgtggaactccctgcatgctgattgccgtagcctcagggacacgctagccagatgaggttggtgatgacccatgggcttctggaactgggctgctggtcctgggagggccagcccatctcccttggagagggcctttgtgttgagagatgctcacagaggcctgggtgtcagggacactcactccaggcaaagggccctcttggg

SEQ ID NO: 497687 - DNA, 611 bp, Homo sapiens
acttccagtccctcctgggattgagtagctctgatcatgaaaaattcttcccagtgtgaagtcataacttgcctcccatcaagttctagaccattgattctctgcccacagagacacctgcggggctcttacaaattctggccaggcgcagtggctcacacctgtaatcccagcactttgagaggtcgaggcaggcggatcacaaggtcaggaaatcaagaccatcctggctaacatggtgaaaccccgtctctactaaaaatacaaaaaattagccaggcgtggtggcaggcgcctgtagtcccagctactcaaaagggtgaggcagaatggtgtgaacccgggaggcggagcttgcagtgagcagagatcacaccactgcactccaacctgggcaacagagcaagactccgtctcaaaaaaaaaaaaaaaattctgatggggcagggcatgatggtgcatgcctgtaatcctagcactttgggaggctgaggtgggtggatcactagagcgtaggaattcaagaccagcctagacaatgtagcaaaaycccatctccacaaaatacaaaaaaattagcctggggttgtggtgcacacctgtagtcacag

SEQ ID NO: 497688 - DNA, 623 bp, Homo sapiens
gctgcagcctcaacctcccagggctcaggcaatcctcccacctcagactcctgcgtagctgggacctcagctatgcaggaggctraggtgggagaattacctgagcctggggagacttaggctgcagtaggccatgtattttttgtagagatggggttttgccatgttgcccaggctagtcttgaactcctaagctcaagcaatctaccctcctcagcctccgaagtgttaagctttcaggcactgtacccagcaaaaatcttgtttatttttttaaatagcccactgatacaaatttcagatgtctgcaagccgtgcttcacagaaaagggagctgagtctcagagagggacacagtggcccctttgtgacaacactgtgagctgaccccacacttgccatgctcagcccatatgggttccttctttccccagcaccattcattccttagcatattcattgattccaaaaaggcttgtgaatcacacctacgcctgccagcccttatatctcctgtgtgctagtctgggctctctctccccagggatccccatcagtctccaaaggtaggaaaattaccaaaattgtgcaatccctcacacagcaatggggacttggggaca

SEQ ID NO: 497689 - DNA, 574 bp, Homo sapiens
gcctggcaacacctcctggggtcacaggagccagctgtgcctgaagcttacgcaacctctagatatttaaccacatgggacaagcaatgcccctttcagcttcagccagtttgagcttctgtcactcgcaaccaagagtctcaaagtccacatcrggcttctggacccagtttgttgcgtctaacaagcacccgtggcccctcagtgggttcagagtcaactggaagggtctcagtcagcacagaggtaagagtgtgcccctgcagacacagccagtcctccagaaaggagctgggtcttggaggggacagccccgctcatccctccatcacactttccaggctccacagcccagccccagccaggagttcaggagtttaagaccagcctgggcaatataatgagaccccatctctataaaaagttgtttattttttttttaattagccaggcttggtggcatacacttgtagtccaagctacttgagaggctgaggcaggagaattgcttgaacccaggaggtcaaggctacattcactgaactatgatcatgccactgcactcctgcctggg

SEQ ID NO: 497690 - DNA, 612 bp, Homo sapiens
gcttctttcatgaaaacagcactagaaggctgggcgtcgggctcatgcttgtaatcccagcactttagaaggctgaggcggtaagattgcctgagctcatgagttcaaggttgcagtgagctatgaccactccactgcactccagcatgggtgacagagtgagatcctgtcttaaaaaaagaaaagaggctgggggtggtggctcacacctataatcccagcactttgggaggtcgaggtggatggatcatttgaggtcaggagtttgagaccagcctggccaccatggtgaaaccccgtctttactttactaaaaatacaaaaattagccaggtgtagtggtgtggtaactgtagtcccagctactcaggaggctgagggaggaggacggcttaagcccaggaggcaaaggttacagtgacccaagagggtcactactgcactccagcctgggcaacagacagagactccatctcaaaaaataataataaataaaaataagaaagaaagaaaataccaccggagacgctacctccacaaagctyacacctgcccttctgagggccacagaatctggaacaatctgagagcctcccctcccccacactctgc

SEQ ID NO: 497691 - DNA, 484 bp, Homo sapiens
agcagggcaggggcaggcccatccttggggctcctattccaaaatcagagtccctggagagcccccaacatccctgggcaccatgaggctgggaatcaaaccccagcaccccttctgctatgccaggcctcagtttccccactgggatcatggggcgctcagtggcgagggagcagatcaggagaggctaagaggagagagtggagactcccaaaacagagggggaggcctccagcccgctggccacagcagcacctggtcctcagggagcccttctgagcatrtgactggcatcctgggattacgagctcctcaaagcaatggtgtacctcctccacctcccacatccagggtcagacacccctcttctggtcttctaacccctgcaccttcctccatcacagcacctctgtgctgtgaccactggttgctggtctgtctttcctaggttatatccttgaggagggcagagatgggagggcag

SEQ ID NO: 497692 - DNA, 524 bp, Homo sapiens
cagtttgggtcatttctcacccctgttgttacagtaggttgactttcaattccttgggaagttgaagcacagtaagacacatccccaaaacctggctttttgcatttgccttgactcacgcagtttcagagcaagaacggctcagcatttgtgagggggcgggcttcccagatccaggagcttctgcatgcacccatgcggagtagatccttctagttttgaagctctccagagttagctgtgaagactaaaggaaagaagagatgcactcacaggttgtccaagttgtctctaaacagactccattcctttctggtaagaaaagtaagatacagttgaaggacggcaggggagaacgcaaagatgtgtgagtaatcaaggaagaggtgaaaggccgcaccttactttcaaagcacctctctccagaatgcttgcctcacaagctgcctcattcaaaggcaaggctctgctgctcccygccttcttgctgtgaccacattcctcaggactctatccccacagcc

SEQ ID NO: 497693 - DNA, 530 bp, Homo sapiens
gctttcttgacataaaacgaggcaaaggccaaaggggaactgcacttggcctggaatggcagcatgtgtgtgtgtacgtgtatgtgtgtgtgtgcgtgcacgtgtgtgtgtgtgcctgcaaccacatgttagtgtgagtgcattgaagatcatcccctccacccattgttttcttgctccagactctgaagaactgtctgccaacttctaaccacctggggtggaattattatttttcaatggagaaatcatttacatacagtgaaatgcatagatcttaagtatatggtttgctgtgttttcacaagtgagtaaaattcatgtaacacatggtycaatgaagacatgaaacattttccttgcccctagaaagttctttttctttgtatttatttatttctttttgagacagggcctctctttgttgcctagcctggagtgcaatggtgtggttatagctcactgcagcctgaaactggtgggctcaagtgatgttcctgcctcagcctcccaagtagctggaattacat

SEQ ID NO: 497694 - DNA, 473 bp, Homo sapiens
ctggtgagtggctgcatctagagttgaggcccaactgggctaacttccaaggctactctcaggattacatgatgctctccttacccttacctggcaatcaaatagctccagaaagtgtattgcatgagacagatttcccagtggcagtgccctggctctaccacttcccacccagatagcatttagctacttaatcactcctaaatgcagtgtcttcaactgtgaaatgggtattataacagcagccattttgcagttattgtaaggactgagagaacctgtacagatcatcyggcccagttcttggccgtagtaggtactatgttgtttgttttcttatttcctgatttaagggaaaaaaaagaaaaagaaaaagtgtgtgtgtgtgtgtgtgtgtgtgtgtgtatgcatacatagacatatcctgcatacagtaaccattctccaagatgacccccaataatccttacccc

SEQ ID NO: 497695 - DNA, 578 bp, Homo sapiens
gggacttcaggcacctgccaccacgcccgactaattttttgtatttttagtagacacagggtttcaccatgttagccaggatggtctcgatctcctgacttcgtgatctgcctgccttggcctcccaaagtgctgggattacaggcatgagccaccgcgcccagccaagtgcccatatttttttttagagatgtctgggctgtggatgtaggaggagagtaggaaacagacatgaattatcrtttgccagtctctctgctttgttcttgttcttgtgccaaggattgctttttggtgggaggaggacagtggttctagaatccttaatctgatttgtttacctgtgtatctccagtataatgtctggtgtataataggtgctcaataaatatatttgaatgaatggataaaaaaatgaagtggaagaaaactgggaaagccacggagtcaccaacctgggactaagaacatggtgaggccattcgaagcaatttctcctaagacttctccactaatgtgatggaatcatagtctaggtggaatacggaattgtcatgaaatgcctcaacttttatcct

SEQ ID NO: 497696 - DNA, 619 bp, Homo sapiens
tcagctcagattatctgctgtttgaccctgagtagartgaatttatgtgttcttggaagggatgccacaaaagtgatgtgtccttagcagatcacaatggagggtcaacgatgtctttatatcttattactagtgatattagccttgatcacttagttgagaaggcatttgccaagtttcttcatggtaagattgtttttaacctttgaacttaaaagtacactaatttattactttgatggcccaatggtgattttcaatttcctctcatgccctgtacatgtattcattggaacacttgtgtaaggaagcatttttcattctcctccatttattcagtatttatatcattattgactcaacatttattttgaaggtgagctataatctaaaactgtcattatttatttttgtggctcaaatcattccacagggtatccacaggctggtttcagactcgtgaccctaagcaatcctccctcagcctcctgaaacactaggagtagaggcacaagtctccatgtctggccccattaacctttttagagtgcacatttcagtggaatttagcacattcgtaatgttatgcaaccgctacctctatccagttctaagacat

SEQ ID NO: 497697 - DNA, 619 bp, Homo sapiens
tcagctcagattatctgctgtttgaccctgagtagaatgaatttatgtgttcttggaagggatgccacaaaagtgatgtgtccttagcagatcacaatggagggtcaacgatgtctttatatcttattactagtgatattagccttgatcacttagttgagaaggcatttgccaagtttcttcatggtaagattgtttttaacctttgaacttaaaagtasactaatttattactttgatggcccaatggtgattttcaatttcctctcatgccctgtacatgtattcattggaacacttgtgtaaggaagcatttttcattctcctccatttattcagtatttatatcattattgactcaacatttattttgaaggtgagctataatctaaaactgtcattatttatttttgtggctcaaatcattccacagggtatccacaggctggtttcagactcgtgaccctaagcaatcctccctcagcctcctgaaacactaggagtagaggcacaagtctccatgtctggccccattaacctttttagagtgcacatttcagtggaatttagcacattcgtaatgttatgcaaccgctacctctatccagttctaagacat

SEQ ID NO: 497698 - DNA, 619 bp, Homo sapiens
tcagctcagattatctgctgtttgaccctgagtagaatgaatttatgtgttcttggaagggatgccacaaaagtgatgtgtccttagcagatcacaatggagggtcaacgatgtctttatatcttattactagtgatattagccttgatcacttagttgagaaggcatttgccaagtttcttcatggtaagattgtttttaacctttgaacttaaaagtacactaatttattactttgatggcccaatggtgattttcaatttcctctcatgccctgtacatgtattcattggaacacttgtgtaaggaagcatttttcattctcctccatttattcagtatttatatcattattgactcaacatttattttgaaggtgagctataatctaaaactgtcattatttatttttgtggctyaaatcattccacagggtatccacaggctggtttcagactcgtgaccctaagcaatcctccctcagcctcctgaaacactaggagtagaggcacaagtctccatgtctggccccattaacctttttagagtgcacatttcagtggaatttagcacattcgtaatgttatgcaaccgctacctctatccagttctaagacat

SEQ ID NO: 497699 - DNA, 619 bp, Homo sapiens
tcagctcagattatctgctgtttgaccctgagtagaatgaatttatgtgttcttggaagggatgccacaaaagtgatgtgtccttagcagatcacaatggagggtcaacgatgtctttatatcttattactagtgatattagccttgatcacttagttgagaaggcatttgccaagtttcttcatggtaagattgtttttaacctttgaacttaaaagtacactaatttattactttgatggcccaatggtgattttcaatttcctctcatgccctgtacatgtattcattggaacacttgtgtaaggaagcatttttcattctcctccatttattcagtatttatatcattattgactcaacatttattttgaaggtgagctataatctaaaactgtcattatttatttttgtggctcaaatcattccacakggtatccacaggctggtttcagactcgtgaccctaagcaatcctccctcagcctcctgaaacactaggagtagaggcacaagtctccatgtctggccccattaacctttttagagtgcacatttcagtggaatttagcacattcgtaatgttatgcaaccgctacctctatccagttctaagacat

SEQ ID NO: 497700 - DNA, 581 bp, Homo sapiens
tgcttgggaggctgagatgggaggatcgtttgagcccaggaggttgaggctgtactgagctgagattgcaccattgcactccagcctggatgacagagtgagaccctgtctccaaaaccaacaggaaacaaacaaagaaacggtaatgtaaccttgacatgtaaagggcagaaaagaatttttacaaaagatattttattttaaataaaaatgggtactaggtckaatacttgggtgacaagataatctgtacaacaaaccccaataacatgagtttaccgatataacaaacctgcatgtgtagtcctgaacttaaaaaaactgttttaaaaattaatgcttcatttggtaaatcaaccaagatagctgcaaattagtctagagtgaaaaattgataaacttaaaaatcgattaacacattttaagggcataatatgatattgttgactataagcactacgttgtacagtagatctctagaactaattcatttcacacagtgtaacttcaagctaattgaacaaccaccgattgtcccctccccgtggctcctggttaccaccattctcccctcagcttct

SEQ ID NO: 497701 - DNA, 633 bp, Homo sapiens
ccctgtgtgtttgttttggttctggatggaaccagctcaggccccctgccctaggtgggggagggaggagctgccccagccaggggcacgtttgttccccagtgtttactgggggcactcccagcatgaatgctgtgcccatcagccaggttggggcgtctgggccgagaccttcagggcaggctccccttcctgatcctggtggccctggctgcacctgggctgacctgctttgctttgcaaacccaccattccccactgtctgcaagcagctccaggggatggtgtagaagtgcaggcttactgtgcagaaggacagcagcagagccatccctcgtggtctcctacagccccacatctggaaagactccagcggcatcgtcagaaaatttgcacagcccatgcctggcccggtgagggaggcagtgtgcccagctccatctcagagctcggtgtgagagcagcatgtcccgggggaggccctgtgctacgagcgggctggggatgttcttggctctcaaagccttaycttgagttgtctgggctccaggagcaaaagacacacccctgaacagcagaggacagggcagtcagggttgctgcattggccagtgcctcatgtcatgtgaccag

SEQ ID NO: 497702 - DNA, 592 bp, Homo sapiens
gtagggtaaggagcttcattgccccagaggccagcgccccccaggtctcagggggagctggcacaggcaagattaagtgcaggacccayggagccgggactcctgctgacccatctccaaagaggtcgagccccgcctgcaccagcgccctcgtacaccggggccaggggctgcttatacacagaactagctcggcctccttccgcccaatccagaactggggactccggggacacttaccatctggtggtgatggtggctgtaggggatgttggtctcctggaaaaaggcgctgagggctgtctgcaggaagaaaggcccctgctcaccctccaggcccccgccggccctgccgctgcccttgttcccaggctcctctgaggctggggatgaccctggctggactgctgagtgggaggggtgagtcgcggtgctgaggctcagtggcttgcctgtcacccccaaccctcactgctgtctaaggaggagccacggaaccttgggcagttggggtgggtggagaagacccttcccctgctgctcgccacctgcctcagtgcctaaggcctgcagagccctccccctgcaccag

SEQ ID NO: 497703 - DNA, 579 bp, Homo sapiens
cccacacagccaagcctggaagcctggagtcggtcaacaratgagctggacaaagcaggcaggagcaggaggcagcagcagagctcagaggacacgcctcgagatggcagggaaggcggatgccaggcttggcaccttttttatgtgtgtgttaaaacagatacaacacaaaatctgccattttaactacgtttcaacagcgttgagtaaagtacatctataatgtcatgcaaccgccaccatccatttccagaacttttcatcaccccaaacggaaaccccacacgtagccatcagcacccacacactccccatcccctcctccagcccccggcagccaccatgtgcttcctgtctccagggatttgccatttttggacctgtcatttacatggaattgcacaacaggtgaccttctgtgtctaggtatgtttccaaagttcacccacggtgcagcacgcatcggtgctgctttcctttttctggccaaataacaggcactgtgtggatatccacacgctgtgcacgcgttcctttgcgacggacaccgggctgggcctgtgtcctggctacggtgag

SEQ ID NO: 497704 - DNA, 579 bp, Homo sapiens
cccacacagccaagcctggaagcctggagtcggtcaacaaatgagctggacaaagcaggcaggagcaggaggcagcagcagagctcagaggacacgcctcgagatggcagggaaggcggatgccaggcttggcaccttttttatgtgtgtgttaaaacagatacaacacaaaatctgccattttaactacgtttcaacagcgttgagtaaagtacatctataatgtcatgcaaccgccaccatccatttccagaacttttcatcaccccaaacggaaaccccacacgtagccatcagcacccacacactccccrtcccctcctccagcccccggcagccaccatgtgcttcctgtctccagggatttgccatttttggacctgtcatttacatggaattgcacaacaggtgaccttctgtgtctaggtatgtttccaaagttcacccacggtgcagcacgcatcggtgctgctttcctttttctggccaaataacaggcactgtgtggatatccacacgctgtgcacgcgttcctttgcgacggacaccgggctgggcctgtgtcctggctacggtgag

SEQ ID NO: 497705 - DNA, 542 bp, Homo sapiens
tttgttgttgaaactgtttcgtctaacccctggttccaataacatttgggggtccaaggcttagggtatttttttaaattgtagaaaacccttaacttattggtctttttgaggaaatgagatgcatcgccactgcattacaactaagccattaatcctgtagcttcatcaacattaactggttcactttcatgatgccaatggggaatcagttctttctacagatgttcaagagaaaagattgccaggtgtggtggctcatgcctgtaatccccgcactttgagaggctgaggtgggaggatcgcttgagcccaggagttcaagaccagcctgagcarcatggcgagactccctttctaccaaaaaattttgaaattggctgggcatggtggtgcacctgtagtcccaggtactcaggaggctgaggcaggattgcttgagcctgggaggtcgaggctgcagtgagctattattaatattacagcctggacaatggagcaagactgtgtcaaaaaaaaaaaaaagagaaaagccttttgag

SEQ ID NO: 497706 - DNA, 550 bp, Homo sapiens
taccaaaaaattttgaaattggctgggcatggtggtgcacctgtagtcccaggtactcaggaggctgaggcaggattgcttgagcctgggaggtcgaggctgcagtgagctattattaatattacagcctggacaatggagcaagactgtgtcaaaaaaaaaaaaaagagaaaagccttttgagaagagtgcaagttcttttatatatttacaaaacctttattcactcaatttttttgtttgtctttattttttaagattgtattacttgattttattttacactaggtggtgggcacacaaagcaatccttaataaagttgacaattagcttcattcaacatttttaataatgcacatataaaaaaagtattcatcttacaaattcttctgcaatccaaacatataatagcttggagaacatttagaaaacaaaagccaatgtaaaaagacagattaaaacaactagaacagtacaggttttatttatatggctcgaattttacaggtttcttactgtatcatcartgtcagaaatctgttctgtcag

SEQ ID NO: 497707 - DNA, 508 bp, Homo sapiens
ttttctctataaggcaaatcaccaccttcttgcactgaggaatgctagacagcacttctgcacaacactaagggccattttaaacaccagaatcaccaataaaaagcgtaaaaataaatgagaaaaagatgacactaaatagaccaaaaaggagacttgtaggcagcgctgccctattatttttagagacagggtctcactctgttgcccaggctggagtgcagtggcacaatcccagctcacagcagcctcgacctgctgggctgaagggatcctcccacctcagcctcccgagtggctgggatagaaggcgagtgccaccatgacagcccagtgttgccttatttgacctcagtggagaatgtgcaggatcgttatgtccatgaatgaatgagaaagcaccacaagtattgattttgggattagaaataaatgttagtgagtaggcaaatttgcaaacacaaaatccrtaaataatgaagattgactgtaactctactgcttaaaa

SEQ ID NO: 497708 - DNA, 553 bp, Homo sapiens
tggaagccagccagggcactgcccggcccgtccaggacctgtggcatctgatcaagctccggaagatggtggagggtcatgatgaagtcatggccaaggtacgcccccagcctccagacacttcttttcctcccttcaccactggctctctcctgggacgtcttttttttgtttttgagactccgtctcgctctgtcacccaggctggagtgcagtggtgtgatcttggctcactgcaacctccgcctcccgggttcaagtgattctcctgcctcagcctccctagtagctaggatttcaggcacatgccaccacacccggctaatttttgtatttttagtagagatggggtttcactatgttggccaggctggtctcaaacccctgatctcaactgatccacctgcctcggcttcctaaagtgctgggatgacaagcgtgagccactgcgcccagccttctcctgggacatcttgttgcttactcacatacgatgggccatctccttatgcagagtgggaagaagggkgctttagagtcaggcacaaccaaa

SEQ ID NO: 497709 - DNA, 602 bp, Homo sapiens
tggtagttatacaacctcactgatgtactaaatgacactgaattgttcacttaaaaatggctaattgtacattatgtgaatttcaccccaatttttttttgagacagggtgtcactctgtcatccaggctggagtgcagtgactcagtcatggctcactgtagcctcgacctcccagactcaagcaatcctcccacctcaacctcccgagtaactgggaccacaggtgtgcaccactgcacctggctaatttttgtattgtttgtagagatagggtctccttatgttgcccaggctggactcaaactcctaggctcaagtgatcctcctgctttggcctcccaaagtgctgggattasaagcgtgagctactgtgctcagccttaccccaatttctaaaaaatgcctggaggagctaccatgggagaagtaccagagtagtcacggtgaacaggcacgcccggcctagcaggggagatagacacaagtgagtgagaatctccaagaaccagccctgtgaggagcagcaaagaggcattccttctgccttacagaagaggaaactgacgctcagaggagctcagtgattggctgaaggcccag

SEQ ID NO: 497710 - DNA, 595 bp, Homo sapiens
gcatgcaccaccatacctggctaacatttgtgttttttgtagacatggggttttaccatgttgtccaggttggtctcctgagctcaagtgatctgccctactcagcctcccaaagtgctggaatttaaaaataaatttcttttagaccttcaccgtatattctaagaaaatttaatactcctaaaaatgaaaaggagagtaagaattttggaatgtagaaaactcaaagaaactaacttaataacataaatgacattttaaatatctttggaacagtaaagtgtaactggaacaaaactaatatttgtaaataatgcaaaaacttatttgtataaaggctaataatttggttatgaagaaacatcaacttctagtaggtaaaagtaaaggaggctaagacataacatatcaaaaaatcagatacytgggaaaatttgacaagatgcaaaaattgaacagtcagcatttgtggcagaggaaaatcacttcttttgtttaaataaacaaacacatacaaataacagagaaatgctgggattctctttgttttttctatgaactcctttgttttaggttcatttaattgaattcaggt

SEQ ID NO: 497711 - DNA, 495 bp, Homo sapiens
ggacacccaggctctcagggttcctcatgctcctagggctattttcaattccaatgtgaagccagcctagctttaaatgtgggcaaatatgagcatgaattaaacatgaagaggcaaagagatatatttaagaaagaggacggcttgaaatgcatccagccatatttttwaaaaaataacaaaatattaactacttttcaggattgtcagaagaaggtggcttgaggatgagaatagccgccctcaagtgaatttccattattttccttacaactgcctttctccatttcttcatgtataacctgtactcttattgggctttagtcaggatttactgtgcatgatactttgaaacctttgcacaatggtagtgtgaaagcatgcagagcagcccctgacactgggaaattctaagaagggaataaatgaccccctcttacacagcaacagcttggccactgatggctagcccagaataattctggaagtttcagc

SEQ ID NO: 497712 - DNA, 480 bp, Homo sapiens
ttgagatttaatcagcaggtagaaataaccastagagaactgaatcaataccagatagccttctagctcttgtagcatcatggagcacctctgttgcttaaaattagaagttgtcctttagtaggtaagcaaattgtaatgtagttgctaaaaatgtgtattttggtggctaggtggtaccttatgttaagttctaataaagtatacatttattgactattatgttcttgacactgtaccatatattaatagttactatgtttgtgtatgtgtgagtttgcgtatcgttgaaagccctgttaacccatgttctttcgttttcttaagtacagcattgcaaaaaggttatttttctatgaagaacaataaaatgttgcttaaacaagttacagtcaagatttattaatgaaaatagacttttttctttcttttttgaaaaaaaaaagacacaattagtggaagagaaacatctatttcttg

SEQ ID NO: 497713 - DNA, 223 bp, Homo sapiens
gcagttgcttataatatgcctgggacccttagaaacccaagaccaaggaagcttcctggattccaagctgctatattgcctctgtagctccctcaaaagkcaattttattcactgaaactaaacaaggccagttgctgtggctccggcctgtaatcccagcactttgtgaggatgagatgagaggatcacttgagctcaggagtttgagaccagcctggccaa

SEQ ID NO: 497714 - DNA, 468 bp, Homo sapiens
cttgcaaagacatgaggacagaaagatggagcagccagtttttgagataacagcagacaaggatccagaactggaggaattaagtacaggcacctgggctcagtatggaagactaagtctggctctgaaccaaggataaattccatgagaactcttctcacttttctrcttttcaccctaattctacaagataaataggacatttttcttagctggagaataagaacattggttctttaggtatgctctaatggatacaagtctagaaaagcgagcattatcaacttcatcttacagtgcccaaggctgaacttgtcaactttcaaataaattcccatcccagctttattgtttctgtcaccagcagttttcttcatgcccatgcacagaaacagtattacttagcacgctttcagatgtaaataacaaatgctgcctgagactaaacagggaagaaatttactggct

SEQ ID NO: 497715 - DNA, 468 bp, Homo sapiens
cttgcaaagacatgaggacagaaagatggagcagccagtttttgagataacagcagacaaggatccagaactggaggaattaagtacaggcacctgggctcagtatggaagactaagtctggctctgaaccaaggataaattccatgagaactcttctcacttttctgcttttcaccctaattctacaagataaataggacatttttcttagctggasaataagaacattggttctttaggtatgctctaatggatacaagtctagaaaagcgagcattatcaacttcatcttacagtgcccaaggctgaacttgtcaactttcaaataaattcccatcccagctttattgtttctgtcaccagcagttttcttcatgcccatgcacagaaacagtattacttagcacgctttcagatgtaaataacaaatgctgcctgagactaaacagggaagaaatttactggct

SEQ ID NO: 497716 - DNA, 468 bp, Homo sapiens
cttgcaaagacatgaggacagaaagatggagcagccagtttttgagataacagcagacaaggatccagaactggaggaattaagtacaggcacctgggctcagtatggaagactaagtctggctctgaaccaaggataaattccatgagaactcttctcacttttctgcttttcaccctaattctacaagataaataggacatttttcttagctggagaataagaacattggttctttaggtatgctctaatggatacaagtctagaaaagcgagcrttatcaacttcatcttacagtgcccaaggctgaacttgtcaactttcaaataaattcccatcccagctttattgtttctgtcaccagcagttttcttcatgcccatgcacagaaacagtattacttagcacgctttcagatgtaaataacaaatgctgcctgagactaaacagggaagaaatttactggct

SEQ ID NO: 497717 - DNA, 624 bp, Homo sapiens
tcttagtacgttttgtgttgctatatctgagactgggtagcttatcaagaaaagaggtttatttagctcacaattctgcaggctgggaaattctagagcatagctccacatatggctggcttatgttaagggctacatgctgggtcaaaacatggtagagaaagtcagaggggaagtggacatatgcaaaaaggcaaaacaagaggggctgcctcactttataacagtctactgtgaagggaacaaatccattcccataagaacaagaactcacaagatagcattaatatattcatgagagatctgyctttttgacccaaacacctcccattaggcctcacctcccaacactgtcacactggcaattaaacttctatatgagttttggcagggacaaaccacatccaaaccatagcagtaattgaatacaaaataagagatgagattaatcagagaaaatgtatagggtgagagcaaataaagtatgaaaatctcagcaacaccaacattgatggacaaaggagaagggcgaacgaaggaaactgaaaaatatgaaacaggaataagagaaaaccaaaggaatatgtagcatcttggaatcaaaagcagagcaaagagaagtca

SEQ ID NO: 497718 - DNA, 624 bp, Homo sapiens
tcttagtacgttttgtgttgctatatctgagactgggtagcttatcaagaaaagaggtttatttagctcacaattctgcaggctgggaaattctagagcatagctccacatatggctggcttatgttaagggctacatgctgggtcaaaacatggtagagaaagtcagaggggaagtggacatatgcaaaaaggcaaaacaagaggggctgcctcactttataacagtctactgtgaagggaacaaatccattcccataagaacaagaactcacaagatagcattaatatattcatgagagatctgtctttttgacccaaacacctcccattaggcctcacctcccaacactgtcacactggcaattaaacttctayatgagttttggcagggacaaaccacatccaaaccatagcagtaattgaatacaaaataagagatgagattaatcagagaaaatgtatagggtgagagcaaataaagtatgaaaatctcagcaacaccaacattgatggacaaaggagaagggcgaacgaaggaaactgaaaaatatgaaacaggaataagagaaaaccaaaggaatatgtagcatcttggaatcaaaagcagagcaaagagaagtca

SEQ ID NO: 497719 - DNA, 624 bp, Homo sapiens
tcttagtacgttttgtgttgctatatctgagactgggtagcttatcaagaaaagaggtttatttagctcacaattctgcaggctgggaaattctagagcatagctccacatatggctggcttatgttaagggctacatgctgggtcaaaacatggtagagaaagtcagaggggaagtggacatatgcaaaaaggcaaaacaagaggggctgcctcactttataacagtctactgtgaagggaacaaatccattcccataagaacaagaactcacaagatagcattaatatattcatgagagatctgtctttttgacccaaacacctcccattaggcctcacctcccaacactgtcacactggcaattaaacttctatatgagttttggcagggacaaaccacatccaaaccatagcagtaattgaatacaaaataagagatgagattaatcagagaaaatgtatagggtgagagcaaataaagtatgaaaatctcagcaacaccaacattgatggacaaaggagaagggsgaacgaaggaaactgaaaaatatgaaacaggaataagagaaaaccaaaggaatatgtagcatcttggaatcaaaagcagagcaaagagaagtca

SEQ ID NO: 497720 - DNA, 624 bp, Homo sapiens
tcttagtacgttttgtgttgctatatctgagactgggtagcttatcaagaaaagaggtttatttagctcacaattctgcaggctgggaaattctagagcatagctccacatatggctggcttatgttaagggctacatgctgggtcaaaacatggtagagaaagtcagaggggaagtggacatatgcaaaaaggcaaaacaagaggggctgcctcactttataacagtctactgtgaagggaacaaatccattcccataagaacaagaactcacaagatagcattaatatattcatgagagatctgtctttttgacccaaacacctcccattaggcctcacctcccaacactgtcacactggcaattaaacttctatatgagttttggcagggacaaaccacatccaaaccatagcagtaattgaatacaaaataagagatgagattaatcagagaaaatgtatagggtgagagcaaataaagtatgaaaatctcagcaacaccaacattgatggacaaaggagaagggcgaacgaaggaaactgaaaaatatgwaacaggaataagagaaaaccaaaggaatatgtagcatcttggaatcaaaagcagagcaaagagaagtca

SEQ ID NO: 497721 - DNA, 478 bp, Homo sapiens
caaaatctacaaaatgtttgttgtacattgcaggatgtacaagagttaaagacaactaaatattcaacaagaatctgttccaggtggcgaggtgttagagacagaatgtggctgacggggaacttttccttatggtcaagattcaggaaaagcagcaacaaatgtaatagtgaaatagcaaaagaacgaacataaccaattccatttctgtttaagaggctttgagccatttctgtwtgtaggctaggatgctttcagagcactggggtaaaacacaaaaacagcaaccatgtagtttttgaaactgactgcgatgaaagcatgtaagcaactgtgtcgtgttgaagacttacaggaagaagcaggcttgactactgtcacatgagagaccatgactcaaagacaaaggcgcttcataaacctccctcaaacccttgctggcagccagatgcctgtggttattggctccctgcctgtc

SEQ ID NO: 497722 - DNA, 478 bp, Homo sapiens
caaaatctacaaaatgtttgttgtacattgcaggatgtacaagagttaaagacaactaaatattcaacaagaatctgttccaggtggcgaggtgttagagacagaatgtggctgacggggaacttttccttatggtcaagattcaggaaaagcagcaacaaatgtaatagtgaaatagcaaaagaacgaacataaccaattccatttctgtttaagaggctttgagccatttctgttygtaggctaggatgctttcagagcactggggtaaaacacaaaaacagcaaccatgtagtttttgaaactgactgcgatgaaagcatgtaagcaactgtgtcgtgttgaagacttacaggaagaagcaggcttgactactgtcacatgagagaccatgactcaaagacaaaggcgcttcataaacctccctcaaacccttgctggcagccagatgcctgtggttattggctccctgcctgtc

SEQ ID NO: 497723 - DNA, 478 bp, Homo sapiens
caaaatctacaaaatgtttgttgtacattgcaggatgtacaagagttaaagacaactaaatattcaacaagaatctgttccaggtggcgaggtgttagagacagaatgtggctgacggggaacttttccttatggtcaagattcaggaaaagcagcaacaaatgtaatagtgaaatagcaaaagaacgaacataaccaattccatttctgtttaagaggctttgagccatttctgtttgtaggctaggatgctttcagagcactggggtaaaacacaaaaacagcaaccatgtagtttttgaaactgactgcgatgaawgcatgtaagcaactgtgtcgtgttgaagacttacaggaagaagcaggcttgactactgtcacatgagagaccatgactcaaagacaaaggcgcttcataaacctccctcaaacccttgctggcagccagatgcctgtggttattggctccctgcctgtc

SEQ ID NO: 497724 - DNA, 643 bp, Homo sapiens
gctgaatctgaggctgatttcagtatacatttcaatagagtcaaccctgatggggaagaggaagatgttacagtacataaatgactttctcttgattgttgaaaaatcattacctgtggaatgactaggaatattggaagcagcatagtgttgacgtacgcaaaacaagacagcttggtcagctacaatcttggaatccgtgtcttcttaattttrtttatttatttttgacgtataatgtagtatgtcaatcctttcgaactatttagataaccacttgatgcacaaataggaaaaagcagattgtggcagtgtcgccttttgtggttttatgattttcaaattgaatttaatgattacaccctttcccttcatagatcttttttcttttttttaagccatgctgtgacctacaagcaaactaaatagccaacatttctgaacccctatgtctcctgtgccaagctgctccctgaaatggacttcttcatctgtacagatttgttaaaccattctatttgcttcttaataataggatttatattagtactcattaccattggacacaatgacataagtactctccacagtaaagcagacctttcacaacagtcactctgtgtcctaaaattttccaacatag

SEQ ID NO: 497725 - DNA, 643 bp, Homo sapiens
gctgaatctgaggctgatttcagtatacatttcaatagagtcaaccctgatggggaagaggaagatgttacagtacataaatgactttctcttgattgttgaaaaatcattacctgtggaatgactaggaatattggaagcagcatagtgttgacgtacgcaaaacaagacagcttggtcagctacaatcttggaatccgtgtcttcttaattttatttatttatttttgacgtataatgtagtatgtcaatcctttcraactatttagataaccacttgatgcacaaataggaaaaagcagattgtggcagtgtcgccttttgtggttttatgattttcaaattgaatttaatgattacaccctttcccttcatagatcttttttcttttttttaagccatgctgtgacctacaagcaaactaaatagccaacatttctgaacccctatgtctcctgtgccaagctgctccctgaaatggacttcttcatctgtacagatttgttaaaccattctatttgcttcttaataataggatttatattagtactcattaccattggacacaatgacataagtactctccacagtaaagcagacctttcacaacagtcactctgtgtcctaaaattttccaacatag

SEQ ID NO: 497726 - DNA, 434 bp, Homo sapiens
cctggggaactttggtaaaacatgaagactgagctccacctggactaactgaaccrgaatcactcgggtatggaactcagggaacctgtgcttcttaaaaactcatggagtaattctgatgcacagtgagggtggtgaaccacagttccagacagttttccataggtttgctgggcctttctgtaagcaagtggctgctgcttagaaaactgttcccaccccataccctatgcacaagcacacacacacacacgcacacacactgtctctcaagtatcagggctgtagtgtggtataactgagtcatgggcatgagcccctttcccaacctgcccaccaggtaagctcaggtcacgagagcaataactaccacatgtgcaggtcttcactgcttaccaagctttcttcagagatatgagtgcctttaatcttct

SEQ ID NO: 497727 - DNA, 619 bp, Homo sapiens
ttggagcgaggatgggatacacagcagggaagacagccagttttggggacagggttgaaagaggaaactccagggctgtggatgcagaggtctgtgaactgggctcagaaagagcctcagagctgcatatgccttcccaggtctggggcaaaggaactcactttcaggctgacgatgggagctgaaatccctgagatgctctctggtgggatggggttgggggatcttgcagtgtgggcccactcagcagtatacgcagcaccaggaagcagaccatgatacccttggagcaccttttctccagcctggctgactctgcctgctgagggcctccacctgctcctccaagtgaggggtgtctccaagtgtgtgtagggaggggcagygatggtgccaggactccaaccatcgggaggtaagggaaacggaatcttctcttagagttcaaccataaagtaggtcaggtaggatcaggtagagcttagcagagccaccttagagaggcagtgagacatggagactgcaacctctggaaagaggtggggacagtcaggcagaaggagggctggccagcttcaggagccctcatcacggagctgcaagggcagaggtggaggct

SEQ ID NO: 497728 - DNA, 605 bp, Homo sapiens
gtcagagcagcctgggatttggatgggaggagcaggaggggagctgcattccaagcaggcaagtagagttaagaattaggaatgaggtaagtgcttctgactttggatcctgggggcatcaagcaagatcagcctggagtttacacaatggagaaaatcagagtggggagagagggcaaactgtggtcaatgaagagttggaggaaagacttggaggaggtgagacctgtawtgcaatattcacgcagatgaatttctttccctaacatctgaccaggtacaaaatgctacacattttggaaggaacctagatggatttagatgaattcatgcgccagatgccaatgactgtaaggctttaacagcagctttgctgtatggtgtccagctctctagtggtcatagctgttgtagcctctggcattgatctcttttcaatagcgtctgtgcttctttttacacgtcattctcctttctctttctttttccaattaactagattatctttgcatttccctattcaaattcggaaaggaaagtgtctgacttgtttaagaaaatctagttaggtgtccattagattagggtggctctggcactttaaa

SEQ ID NO: 497729 - DNA, 605 bp, Homo sapiens
gtcagagcagcctgggatttggatgggaggagcaggaggggagctgcattccaagcaggcaagtagagttaagaattaggaatgaggtaagtgcttctgactttggatcctgggggcatcaagcaagatcagcctggagtttacacaatggagaaaatcagagtggggagagagggcaaactgtggtcaatgaagagttggaggaaagacttggaggaggtgagacctgtaatgcaatattcacgcagatgaatttctttccctaacatctgaccaggtacaaaatgctacacattttggaaggaacctagatggatttagatgaattcatgcgccagatgccaatgactgtaaggctttaacagcagctttgctgtatggtgtccagctctctagtggtcatagctgttgtagcctctggcattgatctcttttcaatagcgtctgtgcttctttttacacgtcattctcctttctctttctttttccaattaactagattatctttgcatttccctattcaaattcggaaaggamagtgtctgacttgtttaagaaaatctagttaggtgtccattagattagggtggctctggcactttaaa

SEQ ID NO: 497730 - DNA, 636 bp, Homo sapiens
ggcctcctcattccctctttacctgcctaccagcccagtaaactgctggttccctttctcctgttcccccttcttctcttcactgtcctcccattcctcttggtcttcaggtctcagctttattattactgcctctgggatggtcttcctgatgatccagactagacctgaccctgttcgctcttcccaaagccctctgcatgtcctgatccttacacccaggaaacacactgaaatcacctggctcattggaacagagggagtgtcctgttgtctgtmtttgccttgcccggggcatctgggcatacacagccactgggatttggttgggttggtatcttcagggatggagcgggaaaggggtactaggtgccctgtggtcttcaggatgagctaagtcatggttcacaggggagaggtgaggctgtgatgccagtgagtccttgcacaggcaaagtctccagggttggagaattgcaggggacgggggtggcagatactgagttcagaaagggagcaagttcgtgataagaaaggctagttatgggctaaaacagccactgtgggccggcggggagctggtgtaggggtgagtagcctgcatcactgaaagagagtgaagtgtctactccacca

SEQ ID NO: 497731 - DNA, 646 bp, Homo sapiens
acctctcagtacctcagaatgtgacttcattcagaaatagggtctttacagaagcaatcaaattataaaaagattattaaggtgcacccaatccaatatgtsgggtattcttataaaaaaggggaaatttgaacacagacacagacacacacacacacagacacacgcatgcatcatggaatatgaaagcagagattggatggtgtggcagggtccaaggaatgccaaaaattgtcagcaaaccaccagaagctaggagagaggtctggaacagatttcccctcacagcactcaaccagccctgacaacactgtgatctgggacttccagcccccagaactgagataacacatttctgttatctctgttatttcgcctatagaaaagtaaaatggtactgttagtttattgtttgtgaagatgctgtttaacctgatagtggaaaaatagttactaatgtttacctgtgtataatgtacacatttgtatcagtcaggaaaactgcttaaggcattacatgcaggaagaaagtaatacagaaaacttgatgtttagcacatatttgaaagagctggaagagtgaagatcaggaaaaactgctgatggcctcagaaaatcaaaaagttgctaaaaaaactctccacca

SEQ ID NO: 497732 - DNA, 646 bp, Homo sapiens
acctctcagtacctcagaatgtgacttcattcagaaatagggtctttacagaagcaatcaaattataaaaagattattaaggtgcacccaatccaatatgtcgggtattcttataaaaaaggggaaatttgaacacagacacagacacacacacacacagacacacgcatgcatcatggaatatgaaagcagagattggatggtgtggcagggtccaaggaatgccaaaaattgtcagcaaaccaccagaagctaggagagaggtctggaacagatttcccctcacagcactcaaccagccctgacaacactgtgatctgggacttccagcccccagaactgagataacacatttctgttatctctgttatttcgcctatagaaaagtaaaatggtactgttagtttattgtttgtgaagatgctgtttaacctgatagtggaaaaatagttactaatgtttacctgtgtataatgtacacatttgtatcagtcaggaaaactgcttaaggcattacatgcaggaagaaagtaatacagaaaacttgatgtttagmacatatttgaaagagctggaagagtgaagatcaggaaaaactgctgatggcctcagaaaatcaaaaagttgctaaaaaaactctccacca

SEQ ID NO: 497733 - DNA, 508 bp, Homo sapiens
gctgtttcctggggccaggttccttcagtaggcactgtgatccaggccactgggacagcttaagtcacatcctcttcccctgtccccatctggtttgatgatctacatccctgcatgtgcctttccagaaatgtgttcagaagtaagccctatatccttccttcagagggagaaggccaggggtcgggtctctgtgaggggtgctctgaacactgctggggaagatacaggtgtcctcccttttcctcactcccccaacaggcaaaggacaggaatcaagcttgtatcaaaggcagcagtggcagaggagaaggtctgcttctgaggaggaatgagcaaagctgtggagaatgcttaagtagaattggcagcaggaatctttgatgccctcagcaacaaacacttgagtggcaggactgtagtgttgatttttcttttaatcttctctcaccttcatgataatatagttctctgctggaaaagycattctttacccttttatggcact

SEQ ID NO: 497734 - DNA, 553 bp, Homo sapiens
tcctatatttacacattgcatctgctggagaagtctgtgcaatttattactacgtggaagctaaagggacacaaagagggcgaatcttctgcttatgcccctactatctaagtcagattgctcatgattaggagcaaatagtctcacctacctccacccttttgcatttatcttattaaataacataagggccaaatttccttgactttccaaaatcatctcctatccatccctgggaccctgaactgctggcctcaaagcccatttgagctgtcaggcatttcctatgctgtacctctcagtttcctgggctgccagatcctcctcctctgaaaggtcaaacagtactaaaacctcacctcatctggctctcagtcccctttgtttctcttatattgttctgccattgccctaaagccaaaagatctttggggcagyggccctgtttggtgtttggcacaatttcatttactgaacatctcgatgtacatttatgatgccatataactaataataaaaacaggacagcctagggcatcgttttttattgtca

SEQ ID NO: 497735 - DNA, 628 bp, Homo sapiens
tgaaataaaacatgaattggaacagttgtctagattatagattataaagtcagggaatgaacttttgctagaaattctcaggttgtctctcatagtttaatatctctagggtattactatctccttgacaaagttgctaaataccagtaaatacttttaaaagagaaagtggatatagcttgatacaaaaagttagttatactctagaaatttttgaagaaatacctcatcttctatattccaatgcctagggagtttctcaggacaagaatggaatcccatgttgtgttcgtctaccgtttggccgttatcttcccatccttctattgatggtcatattcttgttctccaagatctctgtcttgttctctgttgttcttttttgtagaattcttttctcttttaggtgggtacagagagatataattcaatatctttgttactgattttgcttcattgtgttttgatttgtttttaaatttcttttgttcttacttttccttctgctctcatattgtctctgttgtctttacttgtttgktctgcctgtaacatttgatacttccatcaaatatggctattcttagctatgttttcatgtttaacaatgaagcaccggccgggcatg

SEQ ID NO: 497736 - DNA, 675 bp, Homo sapiens
tcacttgctctcagaagttttccacttgcaattcacttgtacttgaaattgatcacatacaatgcaattgaaatgcaaaaagagaaaaaagaccttgtagaaactgttaggaaaatttattcatatcattgtaaacgtgacagagtataatggtctctgtcctcattagtaaaatacggtcaagtggattgaagtaggtcttagatcaastgccttggatcctcctccctggataggtgaccttgtccaaaccatttagtttaaggacatagtatgtatatcacaggtgctctcagaatagtgacatatttatcattatttgtaagcctcatgttcctgtttttctcccttgactctgcctcattcttttccatgagagagtgctggtgtagctctgcaaaggagaaattattctgacctgtgttcatactgtccattgaagagaagcaagtcagctcgtgtaacccaggtgttcttgtttgctctttctgtcattctcacagtagaacatcatgatcccctggcttcttcacagaaatactgaatgaaacctgagaagtgctttgcagaccatctgttagcatgttgacgtaatgacgatgaaattttccagcctcatcttccaagaattcaattcctttatattagtgaaaatgggaaggaggcagtaatcag

SEQ ID NO: 497737 - DNA, 626 bp, Homo sapiens
tccattgcttggctgagtgatcagagtgccacgggccaagccaagcttgactaagaacagataaccctccggccagctcagggccttgctgagcacttcacgggctggggagacctgagctggctgccatttccttgccaccatcgtgggctgtggctagttacctccaggaaggccttctgcagtttccaaggaccctttctcctggtgctggggcaggacatgggttgggaatgaagatgagtatgtgtaaccccaccctctggccacatctggccacttctgcacatgtggctctggccttgtggccacagagtcgtcagtatggctggcgggaaaaccacagaggaatgttcccaagccatgcctgggggagaagaggctggtggggactgctacatcatgctgagcttttaccttttcccaccccaccctgtctgcagggggttccagaggccatactccaggcatgygggtggcatgggcttggcctcggcctccagcaggccttgctcctgccttggtgacacccattcagtgctaggttctctggagagatccagacccatctaaacaggtgtgggggcctctcttagcccaccctttgccacctcctacctcccacc

SEQ ID NO: 497738 - DNA, 357 bp, Homo sapiens
ggcttgggctgggcttggggctccctgctggtgtggtgtttgcccagttgtcctggcaaccacagggcagtggtgaggagtgacatgcagtgacctgagaactgtgtgtaggtacaaagaagtggagacctagccctcccataagcccattggaacttcgtgcactccctgagccactcggcccattgtccatgtggggactggacccaaggtcttggaacccagcaggccctccactgcyttcccctccccagcagcttttctctccacagcgggttctctgtaagaccagagttctgagatctctgtcgaaagctcctgccctccccctgctgttacccttcttcctgtgtgatt

SEQ ID NO: 497739 - DNA, 357 bp, Homo sapiens
ggcttgggctgggcttggggctccctgctggtgtggtgtttgcccagttgtcctggcaaccacagggcagtggtgaggagtgacatgcagtgacctgagaactgtgtgtaggtacaaagaagtggagacctagccctcccataagcccattggaacttcgtgcactccctgagccactcggcccattgtccatgtggggactggacccaaggtcttggaacccagcaggccctccactgctttcccctccccagcagcytttctctccacagcgggttctctgtaagaccagagttctgagatctctgtcgaaagctcctgccctccccctgctgttacccttcttcctgtgtgatt

SEQ ID NO: 497740 - DNA, 357 bp, Homo sapiens
ggcttgggctgggcttggggctccctgctggtgtggtgtttgcccagttgtcctggcaaccacagggcagtggtgaggagtgacatgcagtgacctgagaactgtgtgtaggtacaaagaagtggagacctagccctcccataagcccattggaacttcgtgcactccctgagccactcggcccattgtccatgtggggactggacccaaggtcttggaacccagcaggccctccactgctttcccctccccagcagctttyctctccacagcgggttctctgtaagaccagagttctgagatctctgtcgaaagctcctgccctccccctgctgttacccttcttcctgtgtgatt

SEQ ID NO: 497741 - DNA, 357 bp, Homo sapiens
ggcttgggctgggcttggggctccctgctggtgtggtgtttgcccagttgtcctggcaaccacagggcagtggtgaggagtgacatgcagtgacctgagaactgtgtgtaggtacaaagaagtggagacctagccctcccataagcccattggaacttcgtgcactccctgagccactcggcccattgtccatgtggggactggacccaaggtcttggaacccagcaggccctccactgctttcccctccccagcagcttttctctccmcagcgggttctctgtaagaccagagttctgagatctctgtcgaaagctcctgccctccccctgctgttacccttcttcctgtgtgatt

SEQ ID NO: 497742 - DNA, 472 bp, Homo sapiens
aaaccaaggcaccgacttcccgttccctcctcactcggggggccccagaactggagagtactgtctgggcccccgtgcccaccttgagctggcccaggctccaaggaggaaaaggacagacagaatgcaggaaaatgggkggagggacacatgggacagggctgggaagacaccaccaccccctgcagagggagcaggcttctagagctgaggtggaagccacagggctgggggcctgaggcagcgtagaggagcaggaggggcaaggctgagagacccacacggcacaccttgttgaatgtgtgactttttgtttttaatagaaaaaataaacaaaatcacaatggtgaagcccagagggatgggggccggggcgtcacagggcaggctcctgctccatgggctcctctgccggcctgtggggcaagcacaggggagggtattgagtggggcgcaccagcaggggtgaggg

SEQ ID NO: 497743 - DNA, 528 bp, Homo sapiens
ccactccctaagcacagcacagccctgggtgtccagcagggcaccctgcccacctggctgcttgccataatcccccattccactggggtttagacacctgctccctggcggctggaaacatcctctctcctgactgacaggcggctgggagttggattcacctctttctagggcgacagcctccctcctcctgtataggcccttctcccaggagtcccaagacccactaaggccttccagggatgctgatgacatctactggctgactgctgggccctgtgacccatgtccacacagctcttactccaaggatgggctcagtctactcgcatcagaatcacctgagacatgagtttaaatcactggttcctgggctgccctacagaatccaaacctttgttgggggggcagggtgtcaaggcctgagaatctgcattttaatacsctcccttggttaattctgatgcgaccaaaagtttgagaaccactgcctcacagcgtccccaggctgcctcctgccaacctgac

SEQ ID NO: 497744 - DNA, 392 bp, Homo sapiens
tctcactatgttgccaaggctgctctcaaactcctgggctcaagcaatcctccctgcttggcctcccaaaatgctaggattacaggctgggagcaagatcttgagggctggggaatcaggggactcctggagggagkagaagacttctatgatgaatgctgccaccatctccctcccagagattaggaagcatcctcccttccacagaccaggccacagcagccccagctccccttgcctgtgagtgcctccacccacagctccctttctaggctgggctcacagccagacccaggcatcagtggcggaccgtttacctgcaagagcccagagaagttaaaagatggctttggcttaaaagctcaaacttggacgttttcccctaggcccta

SEQ ID NO: 497745 - DNA, 561 bp, Homo sapiens
tgtaatcccaactacttgggagactgaggcaggagaatcgtttgaacctggaaggcggaggttgcagtgagttgagacagcgtcactgcactccagcctgggcgacggagagagactctgtttcaaaaaacaacaacaaaaaagaaaactggcaggtcctacctgccagtaagtggcagaacccagacacaatgtgtttctcccttccccactctcagatctgtagactctaatcttggtgttctttattctacatggcatgggatctatgccacaaaaacattgatcttgctgccctgtagctgttcacrcatcttcctcccctaagggtctgacagtctcttcctcaaggacagtgcctttgtccaaccttatctccagcctgcagggcctggcacaggttctggcttaaatgctatactaacagtaattacattttcataaaatttattttatgaaaactaggtactctccaaggtcctttgtaccccatgagtctgagattactaaactaacagtttaaaagattctgggaaccaggtgaccggggttctggtccca

SEQ ID NO: 497746 - DNA, 485 bp, Homo sapiens
gaagctccctgaatcctggggacagaggatctggttaccaatgcctgtgtccctgaaatcccttcagatggcaccacctctacccagacaacctcaaacgaacagtgtggggctcaggaaagaaacatgatggggccaggtgtggtggctcacacctgtaatcccagccctttgggaggccgaggcgggtgaatcatttgaggtcaggagttcgagaccagcctggccaacacggtgaaaccacatctctactaaaaatacaaaaacagagccgggcatggtggcacacgcctgtaatcctagctactcgggaggctgaggcatgagaatcgcttgaacccaggaggcagaggttgcagtgagccaatatcgtgccactgcactccagcctgggggacagagtgagacccttgctccaaaaaaaaaaaaaaaaaaaaraaaaagaaacatgatggaagagtaggcaggggccagccacccaggcc

SEQ ID NO: 497747 - DNA, 603 bp, Homo sapiens
gctgggtgtgtttttgtgttcttggtgtcttttcacgtctatgtccatgtgttcctatatgacacagtcgctgagaatgcctgagaatgcctaagtgtgcactttttttttttttttttgagactgagtcttgctctgtcacacaggctggagtgcagtggtgtgatcttggctcaccgcgacctccacctcccaggttcagcctcccgagtagctgggattacaggtgtcagccaccacacctggctaatttttgtatttttttttttagcagggacaggkcttcgctacgttggccaggctggtctcaaactcctgacctcaagtgatccgcccgcctcagcctcccaaagtgctgggattataggcatgagccaccacacctggcctatgtgagtgcacaattctgtatccaaacgtgtatgagtggatctgtgtacctctgtacacctgtatggtgtacaggggcattcctctacgtacagatgagtgtctgtgtgactgtggctggtgtgggtctccaagtttgtctactgtgtctctttgtacacccgtgtgtctacacatcgtttatctgtttgcatctcaatgctatggggctct

SEQ ID NO: 497748 - DNA, 630 bp, Homo sapiens
acagttaataaaaataaaattggcaagaatttgaaaagtggagaccctggaatagtctggctcatcagagaaaatggcagcctcacaccatcttaaggggacttcttaagcacttgattctcttagatgatgtgttcctggataacctctctctagccttttatatgtaggtcaattaaatataaatattcttgtggaatgactgctaatgggtacagggtttcttttgggggtgatgaaaatgmaattagatagtggtgataactgcacaaccttctgaaaaaaacactgaactatacatttttaaaaagttaattttatagtatgtggattatattttaataaaaatataaacatgctattaataatatatgatccttatagaagaatgtggaaaagaaatgttaacaactaaaaacctttaaaaatacgttaacaagtgaaattattatatacagtctgtgtagagcacaatctaatttatattttctaccacgtgttgacagtaccagcaacagtgaggtattaaattctgcagtcaggcaaaatgaatactgagttaatctttgccacttgtccccacttacaatcaccacgccaaccaccctccctaaactgctcattaaaatg

SEQ ID NO: 497749 - DNA, 630 bp, Homo sapiens
acagttaataaaaataaaattggcaagaatttgaaaagtggagaccctggaatagtctggctcatcagagaaaatggcagcctcacaccatcttaaggggacttcttaagcacttgattctcttagatgatgtgttcctggataacctctctctagccttttatatgtaggtcaattaaatataaatattcttgtggaatgactgctaatgggtacagggtttcttttgggggtgatgaaaatgaaattagatagtggtgataactgcacaaccttctgaaaaaaacactgaactatacatttttaaaaagttaattttatagtatgtggattatattttaataaaaatataaacatgctattaataatatatgatccttatagaagaatgtggaaaagaaatgttaacaactaaaaacctttaaaaataygttaacaagtgaaattattatatacagtctgtgtagagcacaatctaatttatattttctaccacgtgttgacagtaccagcaacagtgaggtattaaattctgcagtcaggcaaaatgaatactgagttaatctttgccacttgtccccacttacaatcaccacgccaaccaccctccctaaactgctcattaaaatg

SEQ ID NO: 497750 - DNA, 646 bp, Homo sapiens
tgcgcttaacaaaacttgtcctgtttaacttacctgagggttctgcagcctaccgcagtaattttagttcagctgttttcagatatattgccttgtatcttcgttctttcgtctcctatcctttttagaaatttatcacctgtttctctttcagcctgacttacaaaatctaatttttggcctaaaaatttcccctagcttggtactagtccttttatttctgcctgtgattatattttaaaattaaacttaaatgaatctaattcattggatataaaaaaaaaaagtaagtggcttgctttgcttactctggttttccatcctcattcctggatataatcaagattgcagtaggctaacaatctwatgctgaaaacaagaatgaaaaacataccatcttttcaagttactttggacccatagagagaaagtggattggtacttaataccttccctgaatttaacagaattgatgtggactgtacataaaatatgttgaaaaataaaactatttttttggctataagtcttcataaaattcatttataacagaggttgataaactttttccaaaaagtgccagagtaaatattttcagctttgtgggccaaatggcctcttacaactgctcaattctcagtgccat

SEQ ID NO: 497751 - DNA, 616 bp, Homo sapiens
taatgtgttatttcaggggacagagtagaatattggtagttgtgtctagaaatttggcaggattcaagtattgagaaggacttgtacgttacgctacagagtttgaatgttatactataaaacaaaatggggaattaaccactgaaggattctgagtagaagaatgacataacaaaatttgcattttagaaaaataactctggcagtgttgtggagggtggaactgaaggatgtaaaagcagtcttcatttatgaagtcacatgttcattgagtttagcagataccaatyaaacacattaaaatcttgaaataccaacttttgaattagtgtgcaattgattgtgctgttcttctgtgtatattgactatattaaatactcaagaatctgattttcggtctcggctacacagtatctgaactcccttataaagttagtacctggcgtctttgcttctcaggtaggcagtgggcagtttttcttttcttttcttttcttttttttttttgagacggcgtcttgctctgtcgcccagactggagtgcagtggcacgatctcggctcactgcaagctccgcctcctgggtttgtgccattcttctgcctcagcctcccg

SEQ ID NO: 497752 - DNA, 616 bp, Homo sapiens
taatgtgttatttcaggggacagagtagaatattggtagttgtgtctagaaatttggcaggattcaagtattgagaaggacttgtacgttacgctacagagtttgaatgttatactataaaacaaaatggggaattaaccactgaaggattctgagtagaagaatgacataacaaaatttgcattttagaaaaataactctggcagtgttgtggagggtggaactgaaggatgtaaaagcagtcttcatttatgaagtcacatgttcattgagtttagcagataccaatcaaacacattaaaatcttgaaataccaacttttgaattagtgtgcaattgattgtgctgttcttctgtgtatattgactatattaaatactcaagaatctgattttcggtctcggctacacagtatctgaactcccttataaagttagtacctggcrtctttgcttctcaggtaggcagtgggcagtttttcttttcttttcttttcttttttttttttgagacggcgtcttgctctgtcgcccagactggagtgcagtggcacgatctcggctcactgcaagctccgcctcctgggtttgtgccattcttctgcctcagcctcccg

SEQ ID NO: 497753 - DNA, 424 bp, Homo sapiens
gagaatcttcgtttgaaacaggtaccacagtggtttttatgtcaataaaagcttgcagaccacagagttagatgatagctggttgttttaaaatatattcttgataaataagtggatgaaaaaatggcagatatttgaggatggtattttactgatttttcctgcccacctgctccccacccccatatatttagttattaccctgaatagcgagaaatactcattataaaaccagggttgaggctcaactctgctttttctgttggtcatagtaaaaagcttacatcgtcttaaatctttcartctaccatctttctccccctctattcatacttttgtgttatcactttaactgatccctactttaacttaatttcagtatggctcctaatataacacccttctaatttatcatgaaagtagc

SEQ ID NO: 497754 - DNA, 424 bp, Homo sapiens
gagaatcttcgtttgaaacaggtaccacagtggtttttatgtcaataaaagcttgcagaccacagagttagatgatagctggttgttttaaaatatattcttgataaataagtggatgaaaaaatggcagatatttgaggatggtattttactgatttttcctgcccacctgctccccacccccatatatttagttattaccctgaatagcgagaaatactcattataaaaccagggttgaggctcaactctgctttttctgttggtcatagtaaaaagcttacatcgtcttaaatctttcagtctaccatctttctccccctctattcatacttttgtgttatcactttaactgatccctactttaayttaatttcagtatggctcctaatataacacccttctaatttatcatgaaagtagc

SEQ ID NO: 497755 - DNA, 424 bp, Homo sapiens
gagaatcttcgtttgaaacaggtaccacagtggtttttatgtcaataaaagcttgcagaccacagagttagatgatagctggttgttttaaaatatattcttgataaataagtggatgaaaaaatggcagatatttgaggatggtattttactgatttttcctgcccacctgctccccacccccatatatttagttattaccctgaatagcgagaaatactcattataaaaccagggttgaggctcaactctgctttttctgttggtcatagtaaaaagcttacatcgtcttaaatctttcagtctaccatctttctccccctctattcatacttttgtgttatcactttaactgatccctactttaacttaatttcartatggctcctaatataacacccttctaatttatcatgaaagtagc

SEQ ID NO: 497756 - DNA, 527 bp, Homo sapiens
ctggctagtgtaggcaagcagtagcttagaaaacacttaatctattttttaaaatctgttcctaagttttctttgcttaggctgtaagactacatgtaacacccacctgccacattctgcaatcttttaaatttatccaagaaaaaaaagttttttgaggaatatttatattttaatacaatgtgcttattttgaacataatctatttgtaataaacaaatcatttgctaagtatctaaaaacatattgtttaaattaatttcaaaaggaaattaccaaattaccyattttcacagccatcttttaaattttatttttaatcatagttagaggggcttttgataaccaacattatgtgaaccctttcaatagaaacattattttattttatatatttttttagatgaggtctcgctctgttgcccagtctggagtgcagtagcacaatctcggctcactccaaccttcacttccccagttcaagtgattctcctgcctcagcctcccctgtagctgggattacaggc

SEQ ID NO: 497757 - DNA, 503 bp, Homo sapiens
aaatcacagtaacagtctttttttctttcacaaaagggaattcattccatcagtcttgattcattaaaacagattgaaattgtatctactttgtctctgttgaccttcatctttgaatgaggctttgtatgctcttataataaatttctcctgagatttttggtgtcagttgcaatttccaggaattaataataataaaaaagaatgctttgtgagtatcagaaacagaaaattgagaaagccctatttmttcttctttcaggatattattgaacaatgaaatgagcactgaataagaaccagaatttaggctggcatcccaggactacaactttctgtgtttgaccccaggcaagtcacttaagctttctcagccttagcttcctcacctggagaacaaagctaatgatgcttgccaattcaaaaagtaaataacatacacatagtcaaaaacacataaagtattcaacttaattagtaaacaaataaataaaattaaaata

SEQ ID NO: 497758 - DNA, 477 bp, Homo sapiens
ctgggaatccaggtgcagggggccatagggattaaagtcggaagagccagatccaggcctgtgagggtgaagctgggctgaggttgctggaggctcttgagagaatggattggagcagggcccatgagtcagcctcatgtcctgggtggctattttcttggcttctaagaaaatcaaaattctttctcacttcccctcccaagactaggtccatagctgtgtagattcaggatcagcagtgtggagttggaggcagagctttcattgggagtgggactgaaatcctcacaccctgcatctctcatacccacccgcaatggtaagagcattcacaggacttgagcttccagcaagaggatgcctgatcaaattgtttgccccctgtgaaatcaccatattaatgggaagataggcttgcttaggaacaacggagtytgtgcctctcctgcaggagaaaccaggagctctaagagaatg

SEQ ID NO: 497759 - DNA, 595 bp, Homo sapiens
gaaactaccacccaagaggctccctgccaccataggctaccccgagatcaacagctccaccccttcagggttgcagcaactacagcagcccctgcctgggcatcctggttgggggtggcttggagggcagctaaggggagtggcattcagagctgacagcctgatttgtcctttccccagcttcaaggcccagcctctacccagtcccccagcccacctcgtctgcccaggggccctgagtgtagtmgaccatgaaaagcttgggacagggtcctcataggacaaggtttgtatggcccagggtcccagtactgagacaggggacatcagagtctctctccaggagggggaaccagatccaggatccccaattcacagtgctccaggctccagcctacctggctagaaccaactttcactgttgtccccaaacctgctacatccctcgaaccccagggcccagttccttacctcaggggctttcagaccaaagacatggatatcatcctctacaccctcatgccagccataacatcctacccagcactgtgtctaggattttgcctcccaagcatttttagacccatttcagggc

SEQ ID NO: 497760 - DNA, 591 bp, Homo sapiens
ttgaagcccagaaaaacactggaactaagtggctgtctaaagaatcaaatctctaaataagttggttcttgaaattgatgctaggtacaactcttccataaccgattaagtgtcatgatttagttattaatggtgcttggattaaaatataaatagaaaaactaaaaaaattgacttaaaaatttatttggaagttaaaatgactcagaatagccaagatacccttgaaggaaaacaaagttctggtacagacagatgacacatagtagaaatacttccatgcacagatggtcactcaatttatgacagaggtggcactgtcataaatcattaataaagagatcattaataaaaagatgggcttttaaataaaatactgccaacaaataaacaaatgctgcttagaatattgaatatctaaatatgggaattattgacctaggctcttgtatcacactatacatraaaatcagttccttgtgcatcaggatttcacatgtgaagagcaaaattacaagtattttagaagataataaaaaagaatattttgtgacttaaggttccatgatagttttttaaaacagatcacaa

SEQ ID NO: 497761 - DNA, 591 bp, Homo sapiens
ttgaagcccagaaaaacactggaactaagtggctgtctaaagaatcaaatctctaaataagttggttcttgaaattgatgctaggtacaactcttccataaccgattaagtgtcatgatttagttattaatggtgcttggattaaaatataaatagaaaaactaaaaaaattgacttaaaaatttatttggaagttaaaatgactcagaatagccaagatacccttgaaggaaaacaaagttctggtacagacagatgacacatagtagaaatacttccatgcacagatggtcactcaatttatgacagaggtggcactgtcataaatcattaataaagagatcattaataaaaagatgggcttttaaataaaatactgccaacaaataaacaaatgctgcttagaatattgaatatctaaatatgggaattattgacctaggctcttgtatcacactatacatgaaaatcagttccttgtgcatcaggatttcacatgtgaagagcaaaattacaagtattttagaagataataaaaaagaatattttgtgacttaaggttccrtgatagttttttaaaacagatcacaa

SEQ ID NO: 497762 - DNA, 629 bp, Homo sapiens
gtatgcaaagtttatgtggtacagttcatctttatcttcccctaactctccctgccatgaatccacttggatctccacttaatggaggggggaccaagagggccaatccctgtatcccgcaggtggtcactcccactctgtagctacagagtcctttccaatattgaaggattactatcaaaatgaccaccttttgccacatgatggattgaagaaagtgtctattgggaggccagtctaatccattacccctgccgaataaaagagcctcagagatactccttcactaatcaaaagtgcatctcttgtgttagtgcatcaaaggtatcatgctcatrcatgggggatgctattgttatgtggccagtctgctccctgagaactcttccctgcaggtgacacagggaaagtcttcaaaggcggcagcagggatcagtgaggcggcgcaatccctgcagcttctccattcctgagctgaatatttgaagccatttggctaaactcttggggtggggacaaaaaagctgatcgggagttataggatctgcaggtggagaaaaaaagaagggactatttaggaaactgcctcctgggggctgtccctgtggctgcgcaggttgtcgggcgcc

SEQ ID NO: 497763 - DNA, 526 bp, Homo sapiens
gctgcccccaggccagggagaaaccaaacccgcacacacctaatctctgacttccagcatctgcaactgtgagaaaatgaagctctgttgtgtaagccacctgctccttggtattttttttgatgggaaccctakgaaactgcaatcaactgtgcagataaatacagtcagccattcagtccctatagcctgctttcctattccaggaggaagttgccagcctgcatggagaggaggctagctgggaacccaggggagagccagctcctggtgggggcttcatagatcagaggtgttaaagctgccatcgaggacaactgtctacctggcagccttcccaggtatgcacatgcagtgagttgtttgattgtgacagtaacccagcaaggtaggcattattacaatccccactgtgcagatgagaaactgaggcgcgatgagattaggtgacttattaaagttcacacagctaggatgccttggatctgggattggaatccaggccggtctgggtcccgagtcggcc

SEQ ID NO: 497764 - DNA, 526 bp, Homo sapiens
gctgcccccaggccagggagaaaccaaacccgcacacacctaatctctgacttccagcatctgcaactgtgagaaaatgaagctctgttgtgtaagccacctgctccttggtattttttttgatgggaaccctatgaaactgcaatcaactgtgcagataaatacagtcagccattcagtccctakagcctgctttcctattccaggaggaagttgccagcctgcatggagaggaggctagctgggaacccaggggagagccagctcctggtgggggcttcatagatcagaggtgttaaagctgccatcgaggacaactgtctacctggcagccttcccaggtatgcacatgcagtgagttgtttgattgtgacagtaacccagcaaggtaggcattattacaatccccactgtgcagatgagaaactgaggcgcgatgagattaggtgacttattaaagttcacacagctaggatgccttggatctgggattggaatccaggccggtctgggtcccgagtcggcc

SEQ ID NO: 497765 - DNA, 526 bp, Homo sapiens
gctgcccccaggccagggagaaaccaaacccgcacacacctaatctctgacttccagcatctgcaactgtgagaaaatgaagctctgttgtgtaagccacctgctccttggtattttttttgatgggaaccctatgaaactgcaatcaactgtgcagataaatacagtcagccattcagtccctatagcctgctttcctattccaggaggaagttgccagcctgcatggagaggaggctagctgggaacccaggggagagccagctcctggtgggggcttcatagatcagaggtgttaaagctgccatcgaggacaactgtctacctggcagccttcccaggtatgcacaygcagtgagttgtttgattgtgacagtaacccagcaaggtaggcattattacaatccccactgtgcagatgagaaactgaggcgcgatgagattaggtgacttattaaagttcacacagctaggatgccttggatctgggattggaatccaggccggtctgggtcccgagtcggcc

SEQ ID NO: 497766 - DNA, 626 bp, Homo sapiens
attccccgaaagcaggggatttttatacagttctagaagccttgtatcgcaatgggtgctaagcagtccatatttgttgarttaatgaatacatcaatatcctctcatcctagctccctgagttgcaaaactggggaaatgtaagcatattttctgtggtttctaaaaatgagaatgaaggcagcactctgacgtgagtagagtgcacagccctcttgtgtctgctacctggttcttctcctgatgctctctcctcacctccctctgagctgtgtcccactgagctgtcatcccacaaatgcaccacctcacattcactccccttcactggatcttcagagcatctccaaatgaggtctgtgggaccaccatccatctatcaagctgttctcagctaccaaagaaaagatgatgaaacgcctgtgtcacaaattttaaataagagtaattgtgatttccagagaagattttgaaaatgaaagaggaaccaggaactgaaggaatgtcgtgaatggttttgcctggaatggacaaaagcctcagccacgctgtgtcatctccttccatctaggtgtcccacgctcctgatcagtgcgcttctggagaaactttccagagccgggaaa

SEQ ID NO: 497767 - DNA, 626 bp, Homo sapiens
attccccgaaagcaggggatttttatacagttctagaagccttgtatcgcaatgggtgctaagcagtccatatttgttgagttaatgaatacatcaatatcctctcatcctagctccctgagttgcaaaactggggaaatgtaagcatattttctgtggtttctaaaaatgagaatgaaggcagcactctgacgtgagtagagtgcacagccctcttgtgtctgctacctggttcttctcctgatgctctctcctcacctccctctgagctgtgtcccactgagctgtcatcccacaaatgyaccacctcacattcactccccttcactggatcttcagagcatctccaaatgaggtctgtgggaccaccatccatctatcaagctgttctcagctaccaaagaaaagatgatgaaacgcctgtgtcacaaattttaaataagagtaattgtgatttccagagaagattttgaaaatgaaagaggaaccaggaactgaaggaatgtcgtgaatggttttgcctggaatggacaaaagcctcagccacgctgtgtcatctccttccatctaggtgtcccacgctcctgatcagtgcgcttctggagaaactttccagagccgggaaa

SEQ ID NO: 497768 - DNA, 620 bp, Homo sapiens
tgcaaagacaaagggaggaggtggtgttgccagagctcggaagagttggcaggaagtgccgggtgggagctggagggatgggaaggactcagctcctaagagacactgcccaaagcacagaaagaaagagggagaaagataccctggcatctcccctctctcaccagtgcctcctgttggctgaaactaccaggacaccagttgacaaggaagcccgggaaacggtttgcagagcctgggattcagagcggagcaggggaagggagagaaasgaacgtgagggcaaatgaccaacaatgtcaggcatccaggaaataatctctaaattacagaagagcaaaacaagcctacacccaggcccacagactcttccttgagattgctccaaattccctccacctgggagacctctctccccatctagtgagcaaaatgcctgcaggggcgggtggagattatggaaatggccctcagcccaggcaaactgctcattattaaaaagcctccagacaggagcccaggctcatgtcaggtcaaatctgggggattttcgagcagcattttatgctgctgagttgctgagcaggaaggtgatgagcagtagtgagataacaagccag

SEQ ID NO: 497769 - DNA, 632 bp, Homo sapiens
acagggtcaacctgacctgaactgcctctctgcgctccagtccagaagctctgagctctctgccttggtgaaatgaggtctgaggcttgtccactgagtgtctggtacattaccccgatggtgcttggtagagtcccaggagtctccaccatctaccgtcaggcaaccacatgagtaccatgtaaagagagtggtaggagctcaggctcttcattcacagactttgtcatctcagagaaaccgtgtataagaattcatgtattagggacatgttgattgctaaaagtatatgcattatgagacaaggaaatattcctggaatctgtgtactcagcagggggtggagaattggggcttatctgagggagaacttatattcccttccttgcaagctcattcctttggtcccatggcccctgggagaggggatgcttcaaggacgaaggctgtgggtctcagggacagttgggagctggcttcagcaatgattctttctcagtctctggggtttctggtattgagttgagggtgtggattagagaatgaccgttggygctgcggagggaaaaaactgtaggggaagattccccaaagacctggctgagtctcactgcagtgcatcccacacgctg

SEQ ID NO: 497770 - DNA, 639 bp, Homo sapiens
tggcatgagcaagtggtcagtaagggccagggacattgctttgaatgtaaatctcacaagaggaggaacactgttttgttctctatttctactggcagtgcctggcatagaagaggtactcaataaagatttctgaaggaattaatgagtgagtagatgagacaaaccacttagctgttgagctttaacttactcattgaaattcagggaaacttgacctaaatagacatttctcaagacagtcaaatgaccaagaggtaaatgaaaagtgcgcaacatcatcaatcatcaaaaaagatgtaaggtaagtgttgggatgatgtgggatgtggagaaaagggtgtctttgcacactgttggtggaaatgtaaattactatagctattatggaaaacagcatggtggttcctttaaaaatagaactaccacatgactcagcaatcccactgctggatatatatatatccgaaagaaatgaaaacagtatgttgaagaaatgtctgcacacttatgctattgttgtggcattattcacaatagccaagagaaggactcaaactgagtgtctaccaatgaataaatkcattaaaaatgtggtacatgtacacagtggaatactattcagccttaaaaaaggaa

SEQ ID NO: 497771 - DNA, 629 bp, Homo sapiens
gtaaaaacttaacttttgggtatcaattattccaatataaagtatctccaaatgacactccttcttttgcaactgacctttgacagagagcgagatgagccttctctctcactgtctccatttaaacatgatcacaacagcaaaaaggtaaacatgagaataactatgtcacatttatgggaaataactacaaatttattggcagatttaaaacaagaattatatgaaaacagtgactcatgtcccttcaaagtatttctttttaagttggattatttaaacaggagagaatgtgacaaaatgcttataatgaggcaaatagcagcaagttctcatgaaaatgtaatggtgtggtttcagctcagggtacatcaaaggactgctggaaatgtgattatatagcttcccagaatcagattttacagctatgtacctgatcagaaatattataagacctcaacatattaaaaaaaaaaaaaagcatttctcgcctaatccttgaagagctaattcctcacatccaaaaggacttcattcttaatgagaattaattcaaaatagcactgctggtctatggtagaatcagtctactttgctcrtttattaggacacatctacactgctaagga

SEQ ID NO: 497772 - DNA, 633 bp, Homo sapiens
ctgtttaagcaggatttgggaaatacraatgggtctatctttcaaggctgaagataattttccctataaaattatagttggctaaatactccatgctcaaaaaacagaggctaaatgtgactgatataaaacaaagaaaactttaaaaatagttgacggatatagatgtgtgtatgtattggagatggagaatggatttatggcttattttattctattttgtttctgtgcatcttaatttttaaatacagccaggaacacaacacaaatttagatacaagatttataaaattataaatacataattgaaaaatgaaaaacttaaaaaataataataataataccctttgattacatggatagttagtctccataaatacaaagacatgcccccacactacgcttatctttcttgctggtggtatgctgtgaaggactgagtgggtaacagggaaactgaaatctgcagatgatcagaacatgcatttctttctgcaagtgaataaaatgaaatgagataataggttaatggcaattttatttctaccatcaggcacccattctgggcttgaatgccttgtctctcctgagattctgtctctgcatcctgcagccagttcaaagtgaaactgc

SEQ ID NO: 497773 - DNA, 528 bp, Homo sapiens
ggcaaggcaacttaatttctattcagactccattctgtcaagcggtggaaataatccgggtccccgtttctctccactgctgtcccatggatgactaagaaggcgaggagaggggcgcgtggtccgggtcttcatctggccgtgctggcacccgcggcctggcccgcattcgcttccggtcttcagtctgtgctccatcaagggtgttctttcaaggtcacactttcctttcttccaaccctgaggctcttcargcctggcttgctgtcagcggactgtggtggccttgaaaaggaaacgttattctgctgctcctgcgccacattggagacattaagagcaggaaaagctgaacggggctctctagggaccttcactccagcaggctgccttcattttgcggactatggacacaagcaaatccctcaggtaccagggatctgttctccgtctccctcattgcacttggatcaaccctgcaaggctgcctctgccctgtgtgctgaaacaccgcccggccgtttcttc

SEQ ID NO: 497774 - DNA, 615 bp, Homo sapiens
ctgaaactaccaggcagactgagatttaaccaagatcagacactgagttgttattattatttatttatttatttatttattttttgagacggagtctggctctgtctcccaggctggagtgcagtggctcgatcttggttcactgcaagctccaactcctgggttcacgccgttctcctgcctcagcctcctgagtagctgggactgcaggcgcccgcccccgtgcctggctaattttttgtatttttatagagacggggtttcaccgtgttagccagaccccgtgatcygcctgcctcggcctcccaaagtgctgggattacaggtgtgagccacgagttattattattttttaattttttgccgctagtctgtgggtgggggtggcagagaggtaaggtgaggatggagttagaaacaaggctagattagtcacagaaaaagcatacattttattaccacatttaagttgtgaacaaaaggtatacctttgttctacgtactgtccactttttgcaattggcatagcttatcatgagtgcatattactttatcaattaaaaaaagcagtaaaagcatatgaaagtaaatgtcatgaaaagtacaaataaatag

SEQ ID NO: 497775 - DNA, 488 bp, Homo sapiens
tcaatgagctaacattgccactgcactgcagcctgggtgacaaagccagactgtctcaaaattttttaaaaaaaggaattttaacaataataccaataattttggtaacaacatggagtaatttcattcctatagcacttttgttcctagaggtcgactgctcatggaccatccgtggaccaggataccccttgtccgttagcatagggtctccgggaagacagcaccacacacggaaggaatcgaaggagctgagcctccctgaacatttctcactgggactggtaggactcagtggattagaagaatggcattcccagtctagaggggcaggcagtaacctgtgtgtgggcattgagagaatatggtacrtgatccctgtcattgctgtgaccctggaagtttctcaggaaatccaaataactaatgccagttggactgtttataaggtttcctctcttcaggaaatcatcaaaatattctttcag

SEQ ID NO: 497776 - DNA, 427 bp, Homo sapiens
cacagctatcatcacacttactagggtgtctttggcatcgaatgactagaattgtccccaggggggaaggaaaaagcacaaactttcacatatgctgtgtctaaagtagtttcagcaaatcctctgaggactcattcttcaggggtaattgttgagcatacttttaacagcttttccttaataaagcatctttttcttgacttcctgaaactgaattttgtgatctaagccttgttctcattacagratggaaaacataattatttttctgtttttcttcttttttcctgataaactatagccactatattgagagatgctatttatctttaaagataaaactattgtattctgacagcacagtggtttccaaagcaacccaagtaacttacttggacacagttgttcttctttctcactgggggag

SEQ ID NO: 497777 - DNA, 528 bp, Homo sapiens
gtgtctgctacttcttagtagaacaaatccccatacatttggtcacagaagtcttctgtgttaattgttgtggtatgggagcagaagaaaaacatggtttgacagtttttcccaaaacaattkgtgtcaagggaatgagatttgctagcactgcttaggctcagggaaacacagctcggaaagagaaataataaaagagcagggggtgaagaacctttgattcctgggtggccacatggtcccccatggtatagagctgcagttatgctgcatttggttactcaaggtaaaagctatcagtggaatttagatatggatgcacagggaaatgcaaactgttgatgacaaaagccaaacttcgtaaaatatttgaaaagatttatttgaagacaattgtgaggacaatcgttcttgacacagtctcaggagatcctgagaacatgtgtgtaaggtggttaggttacagcttgcttttatacattttaggaagacatgtggaattaatcagtgtatcaatacatgtgaggt

SEQ ID NO: 497778 - DNA, 451 bp, Homo sapiens
gctgggcaggaaaaagcaagtatcttctagaatcagtcyactttcaactcttacttatatgacaccagtggcttggagagttatattattaagataaattgtttttattggtaacttcctaaaattcctcactaaagacgagtattaggtatcaaaacatccaattccatagccacttttcaaaatgcctaaagctaaactccttaaacttttgattatcatttgagatatacttcgtaatttctttccatatgcatcaaagtcaatataaaaacatttttagaaagagtaagatcaatattgcatataagaattaacatagatgattcattcacagtactgttatttaaatttgtaataaatttgcattttgcaattacattacaaaaataatgatatagattcatttataggaaaatttgtgtatgggggtttaattatgaagaattga

SEQ ID NO: 497779 - DNA, 526 bp, Homo sapiens
ttactaaaggtgatttttatatatcctttataaaatgctcactcatgacttttgccctttttccattagtttgcccrttgcttgttattgatttgtgggaggtatttatacattccacacatgagcccttttatgattaaaagtattaaaataatttcctattctgctgcttgaattttgaatctctctctctctcttttttttttaatatgaggtctcactctgttgcccaggttgtagtgcagtggcatgatatcggctcactgcaacctccacgtcctgaggtcaagcaattctcctgcctcagcctcccaagtagctgagattacaggcatgcacccccacgcccagctaatttttgtatttacagtagagatgggtttcaccatgttggccaggctggtctcgaactcctgacctcaaatgatcctcctgccttggcctcccaaagtgctgggattacaagaatgaaccactgtgcctggccctgaattttcaatctcttaatggtatcttttaatgaaga

SEQ ID NO: 497780 - DNA, 474 bp, Homo sapiens
gtgccaaggggctgaccaccaaccctttggtgcagaagaactgaattgcaggcctcaatttcctcctgcagtgttgcatccagaatccagtattaaaactctatctgtgcatggatttatgccctgggttgtgcatttattctataagcagagatattataccagtcactacackttgaggatgtggggcattgtgggcacctgaatgccaatgatgatggaagtggcaaagcttgagtagcacaaagccagaagaccttcccagagttggaaattttttaactttgagccagcagcttcccttagaacttggagctctattagtaaacatctagttaaatcttttcatactctagatgaggaaactgaggcccacagaagggtaaagacctgcctgaagccccatacaactcatatctcctagctcccttcctgggtgcttttcctgacaccctaagtgggctgcattgagca

SEQ ID NO: 497781 - DNA, 423 bp, Homo sapiens
cccatatgtcaatagcaatgggtattacaccagaaatatttgtcctgtggatattagctcaatacatagaagaacatttagtcttttagttcagtatagtgagaaaatacagggctcaattcactttaacacaaatataaattttgaaatagggaagagagtttaaactgtgtctttgtagagtattaaaatgccatcttctattgatggatcatttctagttttggcagttattagagtacagattttgaaraaatggtaataaacattactagttggtaataaacagcacatgctaagttctttggtttctatgtatgaaatcaaagactgatgaaagtcaaagaaaactatagtctcatgtggctttggatagatttgtccataaagtaaaaaagagaatagtagttttcagtatcactg

SEQ ID NO: 497782 - DNA, 642 bp, Homo sapiens
gcaaatgtgaagtttcccttcacactgaaacttgcctaagaggacatccctgtctagcatcaacattctccttggtaccaagcacagggttctactaatcaatacagactcatcaaatgttagagatattctgcaatggaaatgctttactttttaaagtaatggtgtgcccatatgtcaatagcaatgggtattacaccagaaatatttgtcctgtggatattagctcaatacatagaagaacatttagtcttttagttcagtatagtgagaaaatacagggctcaattcactttaacacaaatataaattttgaaatagggaagagagtttaaactgtgtctttgtagagtattaaaatgccatcttctattgatggatcatttctagttttggcagttattagagtacagattttgaagaaatggtaataaayattactagttggtaataaacagcacatgctaagttctttggtttctatgtatgaaatcaaagactgatgaaagtcaaagaaaactatagtctcatgtggctttggatagatttgtccataaagtaaaaaagagaatagtagttttcagtatcactgtggttatgcctagaaatcttcactacacgaaatgatgaggtttacatgag

SEQ ID NO: 497783 - DNA, 638 bp, Homo sapiens
  misc_feature (1)...(638): n = A,T,C or G
tggggagtacagtcaacagacagcttccacctgtaagcacctcaatgatctgccttacctgcagaaagccatcctgccaagatcatattcttgctgggtcaacccagcatatgatgactgagtgaagcaaaagtataaatgtcaactctagagcttcccgttgggtttgtttttgtcaagccggcatcacaatttgacttttccctctaccaaaccccactttttctttcacaggcgttaatccataataagcatttgcacccaaaattctagtggctgtttcctttgaacccaacctacagcagtcattactacgagtaaccacctaaaatggtggtaagatgggattttggaggcaaattgctcacacctggctgataatgaggacccccgnccccacctccattgctggtagcaggtaaagcacaggcagcctttagcacaaagtgatggtccaatttttaaaattttcaccagcgctaaatggaaatggtgcatttgtggaagaatataattagctgtccattaaaagacattaagaaattaggagctctaaaaataacaatattgaatattattgcgaagcatgattgatgtgctccagaaatataaygaactgatgatggccaataacaagc

SEQ ID NO: 497784 - DNA, 194 bp, Homo sapiens
ccagaaagcctttggcttttcttcgaatatccagacagaattgggcatctttgttaattgccgttggggacgcccggctgtgcgctttcgccggctaaygtcgcctgtgctcagagcctggtttgctcacctttgaactgcaaagggatcaagttcagcttgagttccctgcattgggaaggagagagagcgcg

SEQ ID NO: 497785 - DNA, 194 bp, Homo sapiens
ccagaaagcctttggcttttcttcgaatatccagacagaattgggcatctttgttaattgccgttggggacgcccggctgtgcgctttcgccggctaatgtcgcctgtgctcmgagcctggtttgctcacctttgaactgcaaagggatcaagttcagcttgagttccctgcattgggaaggagagagagcgcg

SEQ ID NO: 497786 - DNA, 632 bp, Homo sapiens
ctggccagcagcatcgatcgctggtggtcattttggaaatttgggggagaactttgaattttatcatgacaggaaagggggctcctggcctttagtggatgggctcctgttccaaacaaaaattttcctgcattgtggatgatgtatgaatgtaacaatagatgttcatgtgaatgacaggcctttatatgtacacaaaacccagcttgagcacaaaatatttttttgcaagtttttaacttttttggaaatacagctagcaygtaaatgcacagaaggttatactttgttttgtacagaattttaccagggggtgttcactattttggaaacatcacacagcaagtttgagatcctgagacagtcggtttgtgtacctgtgaccttccctgttgttcagtgtgcaactacaaacatctgactccttcatgtcttctagtgtgattgtgcctgggcacttacatgttgaaatatatatttatatatatatatatatatataaaatatatatatttcagaaactacttcccttttacttcttataatatagttaagacactacattggtattttaaaagtatgtgtagaagtagattgaagcagaaatgctcccttataagtagctacaaaag

SEQ ID NO: 497787 - DNA, 632 bp, Homo sapiens
ctggccagcagcatcgatcgctggtggtcattttggaaatttgggggagaactttgaattttatcatgacaggaaagggggctcctggcctttagtggatgggctcctgttccaaacaaaaattttcctgcattgtggatgatgtatgaatgtaacaatagatgttcatgtgaatgacaggcctttatatgtacacaaaacccagcttgagcacaaaatatttttttgcaagtttttaacttttttggaaatacagctagcacgtaaatgcacagaaggttatactttgttttgtacagaattttaccagggggtgttcactattttggaaacatcacacagcaagtttgagatcctgagacagtcggtttgtgtacctgtgaccttccctgttgttcartgtgcaactacaaacatctgactccttcatgtcttctagtgtgattgtgcctgggcacttacatgttgaaatatatatttatatatatatatatatatataaaatatatatatttcagaaactacttcccttttacttcttataatatagttaagacactacattggtattttaaaagtatgtgtagaagtagattgaagcagaaatgctcccttataagtagctacaaaag

SEQ ID NO: 497788 - DNA, 605 bp, Homo sapiens
ctgctaatttttttgtattcttagtagagacggggtttccccacgttggccaggctggtctcgaactcccgacctcaagtgatccacccaccttggcctcccaaaatgctgggattacaagcatgagccastgcacccggccgacaatttcttaatgactaatgatgttgagcatcttttcatgtgcttaatcgccatttgtatatcttctttggagaaatgtctactcaagtccttttctcattttttgattgggttgtttatctttttgttgttgaaatgcaggagttccaaatcctgggggtttcttgactggtaatttccaatccccaaccacacacctgtcaggaagtcttaaagatccaggtggagaccaacagtccttttgtaggagccaggaggctggatgcagaagatggtggtagatgaggagggaacggaaaggcatctaacactcacctacccctgccctaaatccaggtaccctcttccattgaagaaaaacccacattctgcttgtggatgctcattactcttatccacagaagctctgttaacctacccaccacaggcatggaggccactgaccttcatccccaaccaca

SEQ ID NO: 497789 - DNA, 605 bp, Homo sapiens
ctgctaatttttttgtattcttagtagagacggggtttccccacgttggccaggctggtctcgaactcccgacctcaagtgatccacccaccttggcctcccaaaatgctgggattacaagcatgagccactgcacccggccgacaatttcttaatgactaatgatgttgagcatcttttcatgtgcttaatcgccatttgtatatcttctttggagaaatgtctactcaagtccttttctcattttttgattgggttgtttatctttttgttgttgaaatgcaggagttccaaatcctgggggtttcttgactggtaatttccaatccccaaccacacacctgtcaggaagtcttaaagatccaggtggagaccaacagtccttttgtaggagccaggaggctggatgcagaagatggtggtagatgaggagggaacggaaaggcatctaacactcacctacccctgscctaaatccaggtaccctcttccattgaagaaaaacccacattctgcttgtggatgctcattactcttatccacagaagctctgttaacctacccaccacaggcatggaggccactgaccttcatccccaaccaca

SEQ ID NO: 497790 - DNA, 504 bp, Homo sapiens
agtggaacccccacggcatcttccaggcctctggtttttcttcatccactgatctctccacagagaagaaattatatttaaggtcccagtgaaacttgaccctaactaaagcattctgttcagaagtttcaacccctaagggagaaaaagctgttccaaagggccgatcttactttttgttggaagcttctgagctctgtctgtccaaagaacattctgctgatgagtcacaacagacgattagttaggactgcttggttttttaggaaacaggcattgtacaaagtgtaaggatctctctggcagttgggatttctgctttcagtttgctaacactgagttcctctctgtcgygatcaaaaaagtcgagcccttctgtgactccaagcaccactgagtatttgttcacaggcctgtatgtggcttggaggagagaaagctgctaggagacaggtctgggccaaactgcaaggctgattagcaggaaaacagactctatcctta

SEQ ID NO: 497791 - DNA, 620 bp, Homo sapiens
ggccagctctcccttgccttcagggtcagcagcttaactctktctgttttggggcaccagcgcactgagctgtgtggcttccttctgtccgtctgcaagacagacagctttggctctctctctccctttctctgggcgccagcatgcccaccatgttaagccatattgaacctagctgagccccaagagtccctgtacagcgttagcagggaaattttacctttgtgacttaaagcaaagtatgagcttacacaaagaggttatataacaagcggaggtgtgcgcctgcttgccaaagttgctgagtcatgcaggcccggatattcgccttggcctattccttgaccaaagcacatccatgtaccttacagcttcgctcatgggacccaccgaggggactaaaagtgggagaggatggattcatcaacaaaaatctggccctaaagtcagaagaaagggtgtgctgggaggcaaaccccaaatgttgaccgtggtcccagtagatgcactatttgggaccagcctgcctcataagatcagccctggaattggggccagggatttctgttgttcccttccacctttaagctccacactttatagttaacatggcacttcac

SEQ ID NO: 497792 - DNA, 469 bp, Homo sapiens
ttactgagacttctaggttggctcatgacccagatgcattccttaaactcttcccacctgaactcataaacacacaaaccctgctttgagcctccttcagagaataaaatctctgttaacctggaataaaatatatctagtaaataaagaataatgtattaccattgttgatgacataaggaattttgaaacagcccaaacatctcatcatagggttttatgtgccctacttatgtatcatcataagcttataatgaaagagctactcaatgaaatgtkatttatttattcattaaaaaatggtaaatgagcagtcaacaaattgaatgtggctgtggtttttatcacgttaaaaaaaaaaggaaaatggcaggaaggaaatataccaacattttaacattggttacatagcctgtagcacatttaaacagaaagaaatcttgttaaaggaacattttgtgagaactgc

SEQ ID NO: 497793 - DNA, 554 bp, Homo sapiens
catcacccagttaaaatgtgcctgaaactgacccacaaaatcatgagataaactaaaatggttgttgtcctaagccactaagataatagagcagatatatatgcacttaacactctctccygggggtctgcttttcctttccccattttgtgttgcacgcctggttgttctcacagatttcatgagtggggaggtgtgatgagcctgggatattcatcttcaacagaaacaatccagataaactcttcattcaaacagggtttgggctgcactgcaattttgttgtcaaattggatttggaggtgctcaggtttagcaagcacttccatgggaaagagaactctgttggatggtaatgtaagaggactctgtctacagaaataaggtgagacagctcagtgcagtttaacaattgtgccatgtgcttaactaatctctttcttacagttactctttgaagtgagtattgtttccattatacagacaagtaaattgaggccaggcagcacaagcagtaagtgccagatgggatttcaaaccaggcttgtttacca

SEQ ID NO: 497794 - DNA, 610 bp, Homo sapiens
ctgaccttaggcatctgaggaagcctagatgagatgaactgacgtcagtgagagaagacagagatccctggatgcttctttcatttcatagagaggcttgctgggcacatgtttgtgttacaggaaagggacattgcccccccwttgtgtcctctttttataagtaactgggatagtcactttgtcagggaagggaaaaatagtctacttggatgctagctagtccagaaataggtgccagattttcttttaggaactcttctagaaagttggctgccaagcacctggtgacctccggcccatgggagcatgatgccccttctgccaggggcactattgttgtgggaagctgaacttgagtgcatgtcccccactgtgagaagggaggagccctcagtgtatactggctccttgtctgggaaaccccatgtgaactccaaggacgttttcggacagtccttgtcataccacactttgatggtctgtgaaaacccaaacaaagtcaaagagaaagaagaagcaggttgcatcttagattctcactggactttccattgtagaaaggcaaattcttggttttctcgctaacagatggaagaaccaaagataa

SEQ ID NO: 497795 - DNA, 634 bp, Homo sapiens
ctctttaatctctttataagttaactaataaatctattttcttcagacttctgcaatagttctttaaaatcacaacagttagcaagctgacttttgtaatgtgctcaatacaaatacttgtgaacttttaatatgttgagtgctttcattttgataactggatctccatttgatattttcatttgtataactcatttgcagtctgaaaattttttttagtgccagtccctgaacatatcattgaaagttaattttctttgcattttaaaatatctggattatgaaraaaaagtgatgaaaataaattaaaactgaattaccttttctaatgttttttttttttaagtaatgtaattctattttgtttttatgtatgtgatatctgtttctgttgagatttgggagttattgaaatctctgtaatgtgtatggtagaaaatttcttgtgaccttaaaattttaccagttatttatagaaagagaaaatgggaaatgttttataggctttttactagcagtatcagtgaacacttgaactccattattcatgaaaataacacgttaggattggaatacgtctattcaaaagtgaaagaatataaagtgtttagttttttgtttttactctaaagat

SEQ ID NO: 497796 - DNA, 654 bp, Homo sapiens
tggttgcaggtatttcacatttacaacatatgttctaacttattttcatcatctacaataaaaaactggtatgtttaatcatatatttcaaataagttatctgcattactgacaacactagcatacatattttctttttaaaaaatttatcttttaaattgacaaataataattatatatatgtatgtacaatgtgatgttatgatacatgaataaattgtggaatgcttgcatcaggctaacataccattaccacagaaaaattcattkctttgtggtgagaacatttaaatctactctttttgtcatcatgctacacaatatatcattagaatttactccttttgtctaattcaaatgtaccatttgattaacatcacccctttccccatccacaagtgtattgaatctgtagaataatattaaataatatcaaaagggtagctattttaatgatattgagtcttgtaatccactaatgtgatatacttcctcatatatttaggcttttaaaaatcactttcattgtattttttaaattgaaaagtaaaagctatatatatttatggtgtataacgtgacatatttatatgttatggaagggctaaatcaagctaaataagatatggattatcttacagaattttggtagat

SEQ ID NO: 497797 - DNA, 608 bp, Homo sapiens
ccagactttggggttgacgaccttaaattggaaaagagaaatacaagcacatgccaataccacacgtataattgtgacaatctatctttctgcacctgagaccaatatctaggcttgcatttgcaaaaatatggtagttgcttatcagctgtgtgaatttggccaagtttcttaacctctctcagcatcagttttcttgcctataaaatggagataacagtaacyaccacataggtataatattaagaataaaagaaatagtcatatacatctgttatagtttctggcacattactaagcgctcaaaatttttagttatgtcattgttattattattaattgtattattagtcgttagcataatgctattccaagaacgatcattgagtttaatataaatgaaaaatcctgtgcaaaaccctgtagaagatactaagatccaatgagatggttccaagtttaaaggagattgtaacctggtagggatgagatatatatatatatatataaactaatcatactattaggcagaagatagtaaatgctagaaataagttaaaattcaaaattaatggtactgagcaattaatcacaagcagttaaatctg

SEQ ID NO: 497798 - DNA, 608 bp, Homo sapiens
ccagactttggggttgacgaccttaaattggaaaagagaaatacaagcacatgccaataccacacgtataattgtgacaatctatctttctgcacctgagaccaatatctaggcttgcatttgcaaaaatatggtagttgcttatcagctgtgtgaatttggccaagtttcttaacctctctcagcatcagttttcttgcctataaaatggagataacagtaaccaccacataggtataatattaagaataaaagaaatagtcatatacatctgttatagtttctggcacattactaagcgctcaaaatttttagttatgtcattgttattattattaattgtattattagtcgttagcataatgctattccaagaacratcattgagtttaatataaatgaaaaatcctgtgcaaaaccctgtagaagatactaagatccaatgagatggttccaagtttaaaggagattgtaacctggtagggatgagatatatatatatatatataaactaatcatactattaggcagaagatagtaaatgctagaaataagttaaaattcaaaattaatggtactgagcaattaatcacaagcagttaaatctg

SEQ ID NO: 497799 - DNA, 463 bp, Homo sapiens
cccaaaaaggaaaagtataaagctagagattttataatagcccaaggagctccttttcactagggcagagtctgatagcactgtccttttagaacagttcatgacccagtggtcrgaatccaggcttccagttccaagaggccggtatagagggaaatgaggaaattaggcatggaagacctaccactgcaaactgggtgggaccacagttaggtgagtgaggtgtccaagtcacaaaatgttatttcactcttccaattaggaagagtgataagaataagaggaaaattcagcatgactgataaaacttacaggatcatgggctgactctttactaagtcagatggctcttatggcaataacttaatttttcacaatagagatatgttattatgtcctatataacaaataagtagcttggatgcaagaagttccaacattggttaattcagagacacaacgt

SEQ ID NO: 497800 - DNA, 505 bp, Homo sapiens
tacaagtaagaattgcccagctaagcccrttcaatctatagatccctgagagatcataataaactggtatttaagccactaggtcttggggtactttattataaagcaacagataatgagaattataagcttggcattaaacctccaaaatcttcccaactctagctttagattaaaagttgaatatttaatatatgggtacaactttttattgagtgaggcaaatttctttagagtccattggtatgataagaaagagtgtctcctaatttttaaacagagatagttcagccagaattttcaaccatttgaatttgacatgttgttttgaatactgaaggttgaagagacaccaggtcaaattgattagataattgcaaaataaggcagtaataatcacaactcaatccttcagtataaaatgtattgaaatatctataaaaagtatctagtgtaattgcacttgtcatttggctgaccgtcagcatgtcactatctgagtaaa

SEQ ID NO: 497801 - DNA, 505 bp, Homo sapiens
tacaagtaagaattgcccagctaagcccattcaatctatagatccctgagagatcataataaactggtatttaagccactargtcttggggtactttattataaagcaacagataatgagaattataagcttggcattaaacctccaaaatcttcccaactctagctttagattaaaagttgaatatttaatatatgggtacaactttttattgagtgaggcaaatttctttagagtccattggtatgataagaaagagtgtctcctaatttttaaacagagatagttcagccagaattttcaaccatttgaatttgacatgttgttttgaatactgaaggttgaagagacaccaggtcaaattgattagataattgcaaaataaggcagtaataatcacaactcaatccttcagtataaaatgtattgaaatatctataaaaagtatctagtgtaattgcacttgtcatttggctgaccgtcagcatgtcactatctgagtaaa

SEQ ID NO: 497802 - DNA, 529 bp, Homo sapiens
ctggaggccacaactatttctttgattgatttaatattgtactttgacagaagaatattgaaacgtgtttgattcacatagctatatcgtacgctgaacgtactaaactagttagatctcccactctgtctgaaccataaaattagtgaactaaacaaactsaagaaacatcttacatgtgaaacacagaaactgtttttatacagcttaacatatactaacaaagagattgttgttattttaataggctaaactgtgatcctaaaatattagtaatcactttaaggccctaattaacacctgcacatgtagaggctttttagaattatctgctttacttctcagtaggttgatgttgataattgaagtaaggcaaatgtcctctgttcatctttactgcaactcagacttttactatatatcctattcattaaaaagaataaggaagcaagaaagataaaggtaatcaatctaccttcacatctgtatcaatacctatatctatatagctttgtattttatatttgct

SEQ ID NO: 497803 - DNA, 529 bp, Homo sapiens
ctggaggccacaactatttctttgattgatttaatattgtactttgacagaagaatattgaaacgtgtttgattcacatagctatatcgtacgctgaacgtactaaactagttagatctcccactctgtctgaaccataaaattagtgaactaaacaaactcaagaaacatcttacatgtgaaacacagaaactgtttttatacagcttaacatatactaacaaagagattgttgttattttaataggctaaactgtgatcctaaaatattagtaatcactttaaggccctaattaacacctgcacatgtagaggctttttagaattatctgctttacttctcagtaggttgatgttgataattgaagtaaggcaaakgtcctctgttcatctttactgcaactcagacttttactatatatcctattcattaaaaagaataaggaagcaagaaagataaaggtaatcaatctaccttcacatctgtatcaatacctatatctatatagctttgtattttatatttgct

SEQ ID NO: 497804 - DNA, 529 bp, Homo sapiens
ctggaggccacaactatttctttgattgatttaatattgtactttgacagaagaatattgaaacgtgtttgattcacatagctatatcgtacgctgaacgtactaaactagttagatctcccactctgtctgaaccataaaattagtgaactaaacaaactcaagaaacatcttacatgtgaaacacagaaactgtttttatacagcttaacatatactaacaaagagattgttgttattttaataggctaaactgtgatcctaaaatattagtaatcactttaaggccctaattaacacctgcacatgtagaggctttttagaattatctgctttacttctcagtaggttgatgttgataattgaagtaaggcaaatgtcctctgttcrtctttactgcaactcagacttttactatatatcctattcattaaaaagaataaggaagcaagaaagataaaggtaatcaatctaccttcacatctgtatcaatacctatatctatatagctttgtattttatatttgct

SEQ ID NO: 497805 - DNA, 637 bp, Homo sapiens
catgcacaatccatagggctttctcaggacgtgtatcagtctacttctcaatcctttattatgtcaagactttacttagcatcaacatactggcaattgagttttattttatagcactataaacatctaatgcctttttaattgtgctatggaataattctagtaatacgctactagacatgaaactttaagacaagatcgctaataataataataataatagctaataattatcagcacttaactctgttccaggtgctatgttaagcatctgacatctactcaatcctcactatattactatacccatttaagagataagaatatataatgatcaaataagtaaattgcccaaattttaaaagatagtaaatggatgagctaggatttgaacctgatstgattcaaaaatttgtgaacttgaccatcacccaatattcttaatataaaattaagcatttagaataagtcttgagctgagtgcagtggtgcatgcctgtaatcccagcactttcggaggccaaggtgggaggatcgcttgagctcaggagtttcagaacagcgtggacaacataggaagacctcatatctatttaaaaactcaaaaaattagccaggcgtggtggtgcacacctgt

SEQ ID NO: 497806 - DNA, 637 bp, Homo sapiens
catgcacaatccatagggctttctcaggacgtgtatcagtctacttctcaatcctttattatgtcaagactttacttagcatcaacatactggcaattgagttttattttatagcactataaacatctaatgcctttttaattgtgctatggaataattctagtaatacgctactagacatgaaactttaagacaagatcgctaataataataataataatagctaataattatcagcacttaactctgttccaggtgctatgttaagcatctgacatctactcaatcctcactatattactatacccatttaagagataagaatatataatgatcaaataagtaaattgcccaaattttaaaagatagtaaatggatgagctaggatttgaacctgatctgattcaaaaatttgtgaacttgaccatcacccaatattcttaatataaaattaagcatttagaataagtcttgagctgagtgcagtggtgcatgcctrtaatcccagcactttcggaggccaaggtgggaggatcgcttgagctcaggagtttcagaacagcgtggacaacataggaagacctcatatctatttaaaaactcaaaaaattagccaggcgtggtggtgcacacctgt

SEQ ID NO: 497807 - DNA, 519 bp, Homo sapiens
acaggcatgtgccaccacacccggatactttaaaaaaaaaatttagagaaacagggtcttactatgttgctcagtctggtctcatattcctgggctgaagaaatcctaccacctcaggttcccaatgtgctgggattacaggcatgagctgcctagcccagctaaattatatatacatttttaaagtccaagaatgaattttcatttgcttttaaataattatctcaagtggaactgatttttatatacatgctaaaaaagagatgaaatgtaaagagcataatttataacacaattctaatttgtcattttatatttagattttgtcttactaagtctgaaggaaattcaatacacatagtataactgtraattttatactttcctttgtccttcgcatggtgaaaagatgaatcaaatgacctaatcctggaatggcttgttttccttgcttacactttgcagaaaattgattacttgttaaatataaccaaagtgacaattttttgaggctgggaa

SEQ ID NO: 497808 - DNA, 588 bp, Homo sapiens
  misc_feature (1)...(588): n = A,T,C or G
gaaagccgagatcccgccattgcactacagcctgggcaaaaagagtgaaactgtctcaaaaaaaaaaaaaaaaaaaaaaaaaaaagganggaaaggaaaagaatatctccacttatgggcagcagaaaactgctgaagtgagataaatagaggagttaatattctagagaagaagcaaaccgttggttgcaaaacagcctttcttctataggtatttacttatattaggaactaagaagaggctgggattctaagctggggacagagaaatgaggggagtttttggaagtttcctggatctacaattaaattggaaattgagggacatggctgattttccctaaagacatttgttacattcaaaatttagattgaaagttaaattggaagtttaacagaatgctaaacctctaagctgaaaagccctggaagacaaaagaaaagcttttttgttatatcttggtgttgaacagtgattaaagctaaaggccactgtgagtgcacaaggaggctctcagtctagagccctagagggtcatcytctaaaaacagacaaatcagagacaaactgaaactaaacaaaactgc

SEQ ID NO: 497809 - DNA, 557 bp, Homo sapiens
cacccaaatgtctttacattataactgataaatatttgataacgaaagactgaggaaaatttggtaacaaaagtgagatattctttaagtgtaaaacatacagcaagttttaaaactacaacaaaaataaaattgatatcctatgaatttttatattgattgcatattgaagtaatactatgtagatatattgcactaaataaaatatattatcaaattacttttatctgtttctctttactgatttttgatgtggaaactaaaaaaaattacttgtcttcccataaatgtatatgctcacatttgtaaaactatctaacatcttatttcatactgtatttgtattagatagcactaccataaagaaagagctaaatacgaygcctgaaccaagaaatgtattttgaagagcctatatttgcatgtaaatgattttgataatataaggaaatgtaaacagaatcacatactttctagagctacatattaataaccaaaaccacagcacaagtagataaatttaaaggcagatcattactattagtatctccaaatta

SEQ ID NO: 497810 - DNA, 528 bp, Homo sapiens
ctggtcagtggtgaagccttagatggaaaaacgtgaagcagctatactctggaaccctctgtcttatgagctattctgtarcattttcccatcttactactggcaactcacctttcaactcatgtgctgtaaaattacagtcaacaaatgctgacataaatgacacaaaaggggagaaaaactgtgggttcttatttgtttgcttagttgaggggggcatggtaattgtagacagagggaaacaattcagggtatatacatactagaggagcacccactaggtttcaggcactgtgcagtgtttctcactcaccattgtctcactggatcctcagaaatactgtggaagcctattattttattaccttctttctgcagatgaagacgttgatgctcaaaagtcgctaatgagaagctgagccaagagtcagatccaaagtccttccagctctgaagcctgcattgtttccaacgcatgatgttgtctgaatggtgagcaatggaagacagaagatactaacatggtag

SEQ ID NO: 497811 - DNA, 528 bp, Homo sapiens
ctggtcagtggtgaagccttagatggaaaaacgtgaagcagctatactctggaaccctctgtcttatgagctattctgtaacattttcccatcttactactggcaactcacctttcaactcatgtgctgtaaaattacagtcaacaaatgctgacataaaygacacaaaaggggagaaaaactgtgggttcttatttgtttgcttagttgaggggggcatggtaattgtagacagagggaaacaattcagggtatatacatactagaggagcacccactaggtttcaggcactgtgcagtgtttctcactcaccattgtctcactggatcctcagaaatactgtggaagcctattattttattaccttctttctgcagatgaagacgttgatgctcaaaagtcgctaatgagaagctgagccaagagtcagatccaaagtccttccagctctgaagcctgcattgtttccaacgcatgatgttgtctgaatggtgagcaatggaagacagaagatactaacatggtag

SEQ ID NO: 497812 - DNA, 528 bp, Homo sapiens
ctggtcagtggtgaagccttagatggaaaaacgtgaagcagctatactctggaaccctctgtcttatgagctattctgtaacattttcccatcttactactggcaactcacctttcaactcatgtgctgtaaaattacagtcaacaaatgctgacataaatgacacaaaaggggagaaaaactgtgggttcttatttgtttgcttagttgaggggggcatggtaattgtagacagagggaaacaattcagggkatatacatactagaggagcacccactaggtttcaggcactgtgcagtgtttctcactcaccattgtctcactggatcctcagaaatactgtggaagcctattattttattaccttctttctgcagatgaagacgttgatgctcaaaagtcgctaatgagaagctgagccaagagtcagatccaaagtccttccagctctgaagcctgcattgtttccaacgcatgatgttgtctgaatggtgagcaatggaagacagaagatactaacatggtag

SEQ ID NO: 497813 - DNA, 394 bp, Homo sapiens
gtgttttccaggttagggacggtccctgcragggagcaggctgccaaatttcctttctctctgtctaactccttacacaaatcccaaagggccctttcaccaaatcattaaattctacagaggtggtcaagctcgcactgcttttcatgaaacgcagaaagaaaagggtccttgaagtttagaagatgcccaaggaaaactccttgaatgacatcaaaagaatgagtttccatagctgttgaagcacgagggcagtgtatccgcacaaagggggatcggggcactgggacgggcccaccgctctgtcccaggacaattgggtcactgaaatagggaattaattaccattggagagtgggcagcccattcaccactggctgagttttattaaacg

SEQ ID NO: 497814 - DNA, 561 bp, Homo sapiens
ttctgcagaaacacagaggaaagagtaaccaagaatagagagtggaaccctcccaaaacacagccaggatgcttcaaggatgctttgaccccctcacagtattgtgtgccatgcggtgccctcarctttgtgactcacaaaggagctgtagtagggacatgttgaggacaccaggaccaaactcattcgctactacagaaagaattcgagttccttcatcccttaatttcctgttagctttacattttcatactcaacctgtacctcctccaagtattatgaaattcctacacaagtagaagtcctaaaaatctagaaaaggacaggatagggcttctgaaaaaggacaatatgttctgattgtgtctctggaaaacagaggtcttaattcattactattgcagaaccttagttttcttatcagtaaaatggatggatttcagaattgaatacaaatacatatttaccaatttacaagagtatcactttatcaatactttactgctcatgcttctcttctttccaaagtcagcctctctaggaagccattacctgtccttg

SEQ ID NO: 497815 - DNA, 402 bp, Homo sapiens
tcctgatcatctgccctggcatgaggcacctaactgaacttttcccctatctggtgggctttgggaacactttctccaacaaagtctgaatctcaacttgaagcaaggggtgggaagttggggaggatctgccaagttttttccctctttggatgcgctccctcagccatagaagtggcggcttttcccggcatttgctattcctggattctttagcgttctctttaaccaatccttcttaattgatctccttttactagttattttcttacgttaaatgtcccttattcaatttactgcataatgtctgtcccttactgaaacttaactgatgtttacacaaaataaatacataatcttgaaaaktggtgccatctaaactatggtcatatgaaaatatgg

SEQ ID NO: 497816 - DNA, 649 bp, Homo sapiens
gcaaccttggttgatgtgagatggggcttcacgacgtccggctcaatagactccattaggtcacactcatttgcaagtatgtgtttcaccaggcatctggaggcttcatcaatgtttatattttcctatgagggaaaaaataaaacagcttttcttattcaatactctgaaataatgctagagcagagacttatatgtgacaattcatttaaatattccttcctatatgctacatatgcatccccctcctgtttccctcactcttatttgttccttcaaagaactttactgtttggttcctcaaaaaagaagtatttattttgctatgtcatataggaggaatggtgtctggtaaatgtacttagtaggttaaatttcagttasagggcaattttcttattttcacattttcacatactcaaactataaaaatattgtagaagaaacataaacctttaatctgacttagatttataattgccctctgccacatactatttttgtgaccttgatataaaataagaatgataagacatcttttatagtatgcattaatggtttcacagatatttctgggtctctatattctagtgaaatggggaagagtacactgttctgacctctttgaacttagccatggacatgtgac

SEQ ID NO: 497817 - DNA, 389 bp, Homo sapiens
ctgcctgtccttattttgctttccagttattatttgataccattcttttaggtgaaatggaaggaagactgaagaaaccagtatataaaagttgagctgaactactgtaggctttgcagtaaagcagacataggttgragtcctaattttgttcttttaaaaatattctttatattctgttgctccacaggtgatttcagtgcatttaataactaaatgtacttaggcaaaatatttaattttctttggccttacctataaggcagagataatacccatctggcagaattatgagaattaggaatattttactggggcaaatgtagaagttaagtaatattatgtatttttacgactatatagtacatataatgattttaacaacatct

SEQ ID NO: 497818 - DNA, 389 bp, Homo sapiens
ctgcctgtccttattttgctttccagttattatttgataccattcttttaggtgaaatggaaggaagactgaagaaaccagtatataaaagttgagctgaactactgtaggctttgcagtaaagcagacataggttgaagtcctaattttgttcttttaaaaatattctttatatkctgttgctccacaggtgatttcagtgcatttaataactaaatgtacttaggcaaaatatttaattttctttggccttacctataaggcagagataatacccatctggcagaattatgagaattaggaatattttactggggcaaatgtagaagttaagtaatattatgtatttttacgactatatagtacatataatgattttaacaacatct

SEQ ID NO: 497819 - DNA, 580 bp, Homo sapiens
aatgtttcgtgttccactgtgcttcattacagtctcctgagtatcatttatttagtcattctcccattcttgtctttttttttggtagggggataggtggcattacctaataccatgttgaacaagatcagcaattctgaggtggcgggggctgcctcactccaggaggcacaaacgcagcagacggagtcttcaattggagggaagccctggacacagccgcttggaaacaggctatggcaatactcaccgcaccaggcctggtggctcagcctraaatcccagcactttggaggccaagatgggtagatcgcttgagcccaggagtttgagaccagcctggccaatagtgagattcccacctctccaaaaaaaaaaaaaattagttgggtatggtggtgtgcgcctgtagtccctcccagctacttgggaggctgaggcaggaggatctcttgagcccaggagttcaataccagcttgtataacatggcaaaaccccatctttacaaaaattagctgggcatggccccatctgtagcgtgcacctgtagtcccagctacccgaaaggctgaggtgtga

SEQ ID NO: 497820 - DNA, 507 bp, Homo sapiens
accatttgctaaacagatcaggtgtgtggtttatggatccattcagccctctcagcagaagccagtaataaaaataagattatcaaggaaagatctgtggagaattcttttgtctggtggctttgacccacatggatcacatgggacaaagtttttgagacctttataccagaggaaatgctgctagcttgaactgattcgaacagagatgggacaaaatgaaggaaggatgtcagacttctgagaatccacaggatgggccaatagagctacatggatataaacawgatattctgtaagaaaaaggaataatgacccaaaagttagttcaggagttgacaggaatggcattataaccagagggtagagggcacaggcctggaagtaatgctgtctcctcctcagttacagagagccagacacctccactcagggctgagggggtagagttgcaaccctgttgggtcgagaggactaggtattaatccaaagccttaaaacctaata

SEQ ID NO: 497821 - DNA, 558 bp, Homo sapiens
cactctcactctgcctcctgggtggagtgcaccccgccacatccaatggcctgtgtgccagggccacagtggctgagcagacaaacctgccccaggtgccgtttggcccatcctgggcagatcgcgggctccttcacaggcctgacgctcgttcactctgtccgatgcctctgcagagtgggcatgggttgtcctgctcyggccatgaccccacccaccctgcctgtggcaggcatccgtcccactcgtccacctgcttgaagctcacgtgtacccgactcctacagccacctgccctgtctcccagcagccgtgcccccgagggtgccacagcccctcctccacgaaggcccagagcaggagccggaggccattgccagagcccaggaatggactgtgcccattcggtaacctccccagactgctgggtcctgcagtgggggccaacccccatgggacatcccagggcaggcagggcagggcacgagttaccgcggtggcctcacagccctcactccactccttgccagcagccaccccggacagggcagggcaggg

SEQ ID NO: 497822 - DNA, 509 bp, Homo sapiens
gctgagtccttggtcaccccagctctcagcagtcctgtgatactctgaggacctctaatgcactgactgcaccccagctcacagcaccttgatcccctcttcacccctgcctgcccagcctaggcctgcagccccttctcaaaatcactgcccacagccctccatgcctcctctccctaaacctgcccctgcagaggacacagcagcccaaagtctcaccctcaactccactctcctctcccaggccacatcctcgtgcctccaaacgcacggctttctaatacgaaaatctgaagactgaagaatgtgaagtaaatcaccctggtatgaacacacaaccgactacacctctggccaaggaatgcttccttcccgggtgagggatgggaaggcacggcctctcactgtggagaactccttcccacataatgtctaaatacataaaacggcatcgattcacattccaatagtgcygggtgtgccccacagattgcttaaatcacaaaggt

SEQ ID NO: 497823 - DNA, 517 bp, Homo sapiens
gtttaatcctaccttccttcctgttccattcaagaccctattgtttttcttccccacatagatgtctctgcagagatctcctctggctcctctggccctgctgtccagccctgactgtgacccacagtgtgttcctttggccccagcttgttcctcattccttcatgtctgtgtcaagggtacaagtctgcttctcctccttgtggtctgtgtttagttcaaggaccgtagaacacacactcttgcgtgcaaggcgcttgacgtaggcaggtgtgcagtcagtgccagaacgggcttcatgccaaccccgttgatccgcagcattagtgaacctgctcagccacttagcatttagaacatgaatgcaaatgttwaaatgttccatctgtctcttttaaaagtctgtaaaaatagaaacacctttgtaagatgaccaatccttctttaagaaccactgtctctaacatttcaaaactgtacctctataaccctgtcctccagcccctcccacccaata

SEQ ID NO: 497824 - DNA, 523 bp, Homo sapiens
ctgctggcacttgagattaaggatgtttctgacctcggaggacacaaacatcctggcagccaggagracgctctccaccactccgtgctttcctgggcttcctattcctccttctctcttgcccgtgaagtggaacgcctttgctgatgaggcatccctttatcatccccacattctgagaggctaaggtcagaggaagcatgcttgtgaggaagtgtaaatcatgctacaagatagactttgcaaatctgttatgtttctaccacattcttcctcctaagcatcagaatctgtatttgggcttatttctgccaaccacagaaagaaacacacattgcctagctcagagaggtgttttctggagaacttattttccaagacacaacatggctatttgtaacagttttttaacactttctgaaggcataaaagttgtagtggggagatggtgtaaatgggttcttcctactactgcttcaagtagcacagcacttacttcaagagcatggggcccacccatggg

SEQ ID NO: 497825 - DNA, 517 bp, Homo sapiens
tgaggttcatgagagaatttcgctttttttctcttaattaatctcactgagttagcatagacagcaaacaaacacatgtccccatgacttctttgcctccttttttcccttattctatccccttcaccagtccactgatgttgccaactttatctgtaagccatctctgagtactcccttcagtccttttttacattatagggagtacttttttacattataggggagtactttttatggacttttttacattatagttactcaatctcactcacactacagatgatgacatatagcagtttgaaccttatctgttttgcctttgaaatgtaattgttttacttcgaatttatttatttatttatttwtttttgagacggagtcttgctctgttgcccaggctggagtgcagtggcaccatctcggctccctgcaacctccgtctcccaggctcaagtgattctcctgcctcacctcctgagtagctgggactacaggcacagcatccccacgcttt

SEQ ID NO: 497826 - DNA, 498 bp, Homo sapiens
ttcatgagagaatttcgctttttttctcttaattaatctcactgagttagcatagacagcaaacaaacacatgtccccatgacttctttgcctccttttttcccttattctatccccttcaccagtccactgatgttgccaactttatctgtaagccatctctgagtactcccttcagtccttttttacattatagggagtacttttttacattataggggagtactttttatggacttttttacattatagttactcaatctcactcacactacagatgatgacatatagcagtttgaaccttatctgttttgcctttgaaatgtaattgttttacttcgaatttatttatttatttatttttttttgagacggagtcttgctctgttgcccaggctggagtgcagtggcaccatctcggctccctgcaacctccgtctcccaggytcaagtgattctcctgcctcacctcctgagtagctgggactacaggcacag

SEQ ID NO: 497827 - DNA, 517 bp, Homo sapiens
tgaggttcatgagagaatttcgctttttttctcttaattaatctcactgagttagcatagacagcaaacaaacacatgtccccatgacttctttgcctccttttttcccttattctatccccttcaccagtccactgatgttgccaactttatctgtaagccatctctgagtactcccttcagtccttttttacattatagggagtacttttttacattataggggagtactttttatggacttttttacattatagttactcaatctcactcacactacagatgatgacatatagcagtttgaaccttatctgttttgcctttgaaatgtaattgttttacttcgaatttatttatttatttatttttttttgagacggagtcttgctctgttgcccaggctggagtgcagtggcaccatctcggctccctgcaacctccgtctcccaggctcaagtgattctcctgcctcacctcctgagtagctggractacaggcacagcatccccacgcttt

SEQ ID NO: 497828 - DNA, 641 bp, Homo sapiens
agctgggaccctatagcaattttacataagataggctgctatttagcctttcaaagactgcttttcatcactggaaaatgagagggttgatgatctccaagacccattccagtctaagatgattaagttctgggacccccttgaaaacttttggtttgaaaaattcactggattrtcagcttcatatataaaacttccccagcacccttcagcatctatgacatttggtatttattgcttgacattaggaatctccaatcagcttttcattcactgaacatgtttgttgcagtgttataatatcatagtcccatgctagacatggaggtaggaaaataagtgtcaacatttattttaaaatttgggatatattaaaggtgtagaatgagaaagagaaagtaaaaagcaaaaatgaaaaagaaaaaaccacataataaaggtcaagataattcaatggagggaaagaatagttttactgttatttttaatgaataatgctgggacaattttatatccacctacaaaagagtgaagttggacccgtacctagactatgtataaaaataactgaaaacagagttaaagagctaaaattataaacctagtttcataattttgttttataattttattagtagtta

SEQ ID NO: 497829 - DNA, 641 bp, Homo sapiens
agctgggaccctatagcaattttacataagataggctgctatttagcctttcaaagactgcttttcatcactggaaaatgagagggttgatgatctccaagacccattccagtctaagatgattaagttctgggacccccttgaaaacttttggtttgaaaaattcactggattatcagcttcatatataaaacttcyccagcacccttcagcatctatgacatttggtatttattgcttgacattaggaatctccaatcagcttttcattcactgaacatgtttgttgcagtgttataatatcatagtcccatgctagacatggaggtaggaaaataagtgtcaacatttattttaaaatttgggatatattaaaggtgtagaatgagaaagagaaagtaaaaagcaaaaatgaaaaagaaaaaaccacataataaaggtcaagataattcaatggagggaaagaatagttttactgttatttttaatgaataatgctgggacaattttatatccacctacaaaagagtgaagttggacccgtacctagactatgtataaaaataactgaaaacagagttaaagagctaaaattataaacctagtttcataattttgttttataattttattagtagtta

SEQ ID NO: 497830 - DNA, 476 bp, Homo sapiens
taatgcaatcatgcattgcttaataacaggaatatgttctgagaaacttgtcgttaggtgatttcatcatctggtgaatattgtgygtagagtgtacttacagaaacctagatagtacatcctcctgtacacctagactaaatgatatagcctattgcttttaggttacatatctatacagtatgttactatagtgaatgctgtatgcaactgtaagacaatggcaaatatttttgtatatctaaacatacctaaacattaaaaaggtaattcattgcactataatgttaggatgactatggcatcactaggcaacaggaattttcagctatgggaccactgacctgtatgcagtccatcactgaccaaaacatcattataaagcatatgactgtatcatattaactgtttaacttaagcttcagggcagaagctgtgcccagaaatgaccaaaacttcttattggagttttgaca

SEQ ID NO: 497831 - DNA, 656 bp, Homo sapiens
gttgctgtcttaatatgcctttgattatgcaatccttatttttaaggaactcagtgtgccttaygatattttcattattcttctcagggttttggtattgaattataaatggtatgccataaaacattttaagttataggaatagctgtttcctcctgtcgatcaaccacatcatatttcattttcattgtcttaattgagaaacgaattatccacattcccaatggagtttcaacctctgtgctaaatcagccatcaaataatccacttgtatgtaagtggaaaaggatcactcatatttacactcttcaacattgtaactttatggttagttgttttattctttaaattatgaaatcccataagaaaagatatttattgcgggaggcacctgagagattagaaggggctatatagtaggtgtaaacttctgttctgtggaatttttgatttaattttgtaaattaaaccctacttaaatagcaaatgaccaaattttaaaacatggtaaacttttattagttatagtaattactaaacaatcattttaataatatgcgattattgtatatagtatttactgagtatattattatgtaagtgtatataaaaggtacaactgatagactgttcaccaaaaaagtcctgatacattt

SEQ ID NO: 497832 - DNA, 656 bp, Homo sapiens
gttgctgtcttaatatgcctttgattatgcaatccttatttttaaggaactcagtgtgccttacgatattttcattattcttctcagggttttggtattgaattataaatggtatgccataaaacattttaagttataggaatagctgtttcctcctgtcgatcaaccacatcatatttcattttcattgtcttaattgagaaacgarttatccacattcccaatggagtttcaacctctgtgctaaatcagccatcaaataatccacttgtatgtaagtggaaaaggatcactcatatttacactcttcaacattgtaactttatggttagttgttttattctttaaattatgaaatcccataagaaaagatatttattgcgggaggcacctgagagattagaaggggctatatagtaggtgtaaacttctgttctgtggaatttttgatttaattttgtaaattaaaccctacttaaatagcaaatgaccaaattttaaaacatggtaaacttttattagttatagtaattactaaacaatcattttaataatatgcgattattgtatatagtatttactgagtatattattatgtaagtgtatataaaaggtacaactgatagactgttcaccaaaaaagtcctgatacattt

SEQ ID NO: 497833 - DNA, 475 bp, Homo sapiens
gcttccaggtgtgaccactgttgagccaagctcctgtcacagcccttattgccatgtagaagcagcttctactgaagttaagcccaaggtaacacagatcagccctctgtattacttctccagggttgccagctcattttaacccagactggtcaaaaattaayatcccatcatttcagcttgcaaagccattcaacactaggtcaatgtgaattcaatagaatttcatatcacttacaataaagactctggcttttttgaaagtgcatacagaaaaaaaaaaagatgaagagagatgaagctgcagatccctgggccagttgtcaaagggaaaaagcctttatgccagcgacaggagctaagcccatcctttttggatcttttaaagtgaaggtgggtttgagcagagaaaatcctattgtgttgaatgattctgccgggagagaggtagagactttggaatataaacgagtgc

SEQ ID NO: 497834 - DNA, 553 bp, Homo sapiens
ctgtacaccctctagccactgatcaagacagaatgtattatagttgttattaaatattttttattaataacaaagtatttgaaatgaaatatatgaaataaaatattttcatttttaccagagattttagaaaatggtttgaaatgatgagtatattgtcatattgctggtgtgtgttgggctggttgccaaatgggaatatgattttgagtaaaaggtccaggtcattcttccattttctacggttttctttataactaaaaattgctttagtgatgaatactagtgaattttacccaacaactgagtatatagcatactgtggtgtgttagtyagggtatgagttgggttgttgttgcaaaggcataacttgatggattagacaaggtataaattaatttctctctacttaattgtttgaaagcagagagttagtaagggctggtagagtgtctctacaatcacctatatgtggcttccatttctgtgtctaaagtggctgctcctggtctagctatcacttctgcatcccagtcaatgtgaaggagaaaa

SEQ ID NO: 497835 - DNA, 624 bp, Homo sapiens
tgtgttgttaacaccacccaggcagaagagcaacttaaaattctctcctcttcaggacggtaagtcttcttctaaagttacatgaaagttgttttttaatgtttcatttgtgcaatgtattactttcaccattacatgaaaaacagaattgaaaaagacactgattaccacacatagcctttaagctgaaggaagaattttcatgctatgtgtatcatacctgtggtcatgtgtgacatttaattaattttattgtwtatctattttattaaacattgtaagtattaaactcagatcaaaagatcagagtccttagcattaagatgcagagtaaggggaatcccttttgtccctatggtccaggagcatttcaaagagttagaagcaggagattatactccaaagagtaatgaaagttagactaaggaaaggtgaaaactgtgactttaagggtcttgtaagtgacatctggtcattatattcacctctttctcatcaaaagttttcagctcagttagttgaggcaattttataataaaagttaatggacaattaaaaatagctttagagttactcttgcagctcacaggtagagttttgaataaacatgttaagaatatatta

SEQ ID NO: 497836 - DNA, 693 bp, Homo sapiens
tcaccatgtttcctgcacagcccatagaaccatgagccaattaatcctctgtttttttgtttttgttttgagacggagtctcrctctgtcacccaggctggagtgcagtggtgccatctcagctcactgcaacctccctgtcccaggttcaagcgattctcctgcctcaacctcccaagtagttgggactataggcaggcgccaccatgcctggctaattttttgtatttttagtagaaatgggctaggctggctaggctggtctcaaactcctgacctcaggtgatctgtctgcctcggcctcccaaagtgctggaattacaggtgtgagccactgccaccagactaaacctctctgttctttataaattacccggtctgaggtatctctttataacaatgtgagaatggcctaatacagggagtaactgcattttcaaactttgtcagcatgcagaatgcttcttcctccaggacaggtgtgggctttttgtgttctttacagctatgtgtgtggtttagcttctcaaagagggccacctagagggtaataggatgacagtaggtaggaattagagatggaccattgaatgctgagtggaaaagattctgggaattcaaaatgaatgatccccagtgatgggggaggagaggagagggtacatatagacatgccatttgacactcatagac

SEQ ID NO: 497837 - DNA, 340 bp, Homo sapiens
tcaaaactccatttaacacctgtcctctataaatgcccttcctcaccaggtggctcagatgacatttcaggtyccctgatagcagtcagttcagtcctcacacctaagagtcttttaatatcacctaggaaatgttgccttgtcaaatggttacaggtttctgtgggaaaatttgaagaaaaattattcgatatacttgcatgtatctagtttccctttcaatcaataggacctagggctgtgaacagacttacatatgaaaactgaaagggctgtgattttccaaagtggcattcagagcagattgatatctctttctctctctctccacctgtctgtc

SEQ ID NO: 497838 - DNA, 340 bp, Homo sapiens
tcaaaactccatttaacacctgtcctctataaatgcccttcctcaccaggtggctcagatgacatttcaggttccctgayagcagtcagttcagtcctcacacctaagagtcttttaatatcacctaggaaatgttgccttgtcaaatggttacaggtttctgtgggaaaatttgaagaaaaattattcgatatacttgcatgtatctagtttccctttcaatcaataggacctagggctgtgaacagacttacatatgaaaactgaaagggctgtgattttccaaagtggcattcagagcagattgatatctctttctctctctctccacctgtctgtc

SEQ ID NO: 497839 - DNA, 526 bp, Homo sapiens
ctgctgcattgctgttcagttttgctgttattgaagctatctgttttaattatttcaatcaatggtgttcttatgtgtactctytggaactttaagcaaatggaataatgtagaaaatccaataaataagtaaagggagatgaagaacagagaacactgtgtttttcagggaaaagaacaatagcagcagtggtgtcaacagagactcctcttctctgtggccttgctggcttgtgctgcagagatactggctcagttctcttggccttgtcacctaaggtcaacaccagtctctcttctgttatttggacttctttaagtagctaaaggtctccctgtggctgcttaatttcagccatcactacagtgcttctgagcgacatcatggtcctacagatgtcacttatgtgtgtaaaccacagatctgcacctgggcaaactggtcctcatggaaccacgtcttgccgagacaaccctacaaacaggaaactcacctgtgtttataaacaccatcttacttagcgat

SEQ ID NO: 497840 - DNA, 526 bp, Homo sapiens
ctgctgcattgctgttcagttttgctgttattgaagctatctgttttaattatttcaatcaatggtgttcttatgtgtactctttggaactttaagcaaatggaataatgtagaaaatccaataaataagtaaagggagatgaagaacagagaacactgtgtttttcagggaaaagaacaatagcagcagtggtgtcaacagagactcctcttctctgtggccttgctggcttgtgctgcagagatactggctcagttctcttggccttgtcacctaaggtcaacaccagtctctcttctgttatttggamttctttaagtagctaaaggtctccctgtggctgcttaatttcagccatcactacagtgcttctgagcgacatcatggtcctacagatgtcacttatgtgtgtaaaccacagatctgcacctgggcaaactggtcctcatggaaccacgtcttgccgagacaaccctacaaacaggaaactcacctgtgtttataaacaccatcttacttagcgat

SEQ ID NO: 497841 - DNA, 523 bp, Homo sapiens
ctgcattgctgttcagttttgctgttattgaagctatctgttttaattatttcaatcaatggtgttcttatgtgtactctttggaactttaagcaaatggaataatgtagaaaatccaataaataagtaaagggagatgaagaacagagaacactgtgtttttcagggaaaagaacaatagcagcagtggtgtcaacagagactcctcttctctgtggccttgctggcttgtgctgcagagatactggctcagttctcttggccttgtcacctaaggtcaacaccagtctctcttctgttatttggacttctttaagtagctaaaggtctccctgtggctgcttaatttcagccatcacyacagtgcttctgagcgacatcatggtcctacagatgtcacttatgtgtgtaaaccacagatctgcacctgggcaaactggtcctcatggaaccacgtcttgccgagacaaccctacaaacaggaaactcacctgtgtttataaacaccatcttacttagcgat

SEQ ID NO: 497842 - DNA, 523 bp, Homo sapiens
ctgcattgctgttcagttttgctgttattgaagctatctgttttaattatttcaatcaatggtgttcttatgtgtactctttggaactttaagcaaatggaataatgtagaaaatccaataaataagtaaagggagatgaagaacagagaacactgtgtttttcagggaaaagaacaatagcagcagtggtgtcaacagagactcctcttctctgtggccttgctggcttgtgctgcagagatactggctcagttctcttggccttgtcacctaaggtcaacaccagtctctcttctgttatttggacttctttaagtagctaaaggtctccctgtggctgcttaatttcagccatcactacagtgcttctgagcgacatcatggtcctacagatgtcacttatgtrtgtaaaccacagatctgcacctgggcaaactggtcctcatggaaccacgtcttgccgagacaaccctacaaacaggaaactcacctgtgtttataaacaccatcttacttagcgat

SEQ ID NO: 497843 - DNA, 609 bp, Homo sapiens
tctctcctatgcttattcaactctggacttcacttaaactgaagaaatcatcattaacttagttttttattctccacacactggcaaagtccttagtaagtatcagacactgcccaagacccaagagctgcaccgctgaataagcgaggtctcgaatctggtagaacttccattagaggggagaaagatgaacagcacacacaaataaaacctttcatagcagaaagggagaggcagtgtgatgaaaacaccacagagtgatgggacgatgaagattccaaggctacgttagattatatggctaggaggggcctctctgaggaagccgcagakaagccgagatgtggctgacatgaggaaaccagccgtgtgcaaaaatggaatgaagtcatttaaggaagaacaaacacctgcaactgccctgaaacaggaacaagctagagttgtttgagatacatcaagaagccctgtgtgaatggggtagggtggatgctaagctagctggcaggtggcggtgaggggggcccctttaggtcagggtgggtagaattccttgagaggatacaggaagagagtgaaaccaccgggttaaggttttccatagctcac

SEQ ID NO: 497844 - DNA, 609 bp, Homo sapiens
tctctcctatgcttattcaactctggacttcacttaaactgaagaaatcatcattaacttagttttttattctccacacactggcaaagtccttagtaagtatcagacactgcccaagacccaagagctgcaccgctgaataagcgaggtctcgaatctggtagaacttccattagaggggagaaagatgaacagcacacacaaataaaacctttcatagcagaaagggagaggcagtgtgatgaaaacaccacagagtgatgggacgatgaagattccaaggctacgttagattatatggctaggaggggcctctctgaggaagccgcagagaagccgagatgtggctgacatgaggaaaccagccgtgtgcaaaaatggaatgaagtcatttaaggaagaacaaacacctgcaactgccctgaaacaggaacaagctagagttgtttgagatacatcaagaagccctgtgtgaatggggtagggtggatgctaagctagctggcaggtggcggtgaggggggcccctttaggtcagggtrggtagaattccttgagaggatacaggaagagagtgaaaccaccgggttaaggttttccatagctcac

SEQ ID NO: 497845 - DNA, 649 bp, Homo sapiens
ctggaaagctcttcctgtcacaccacggatctcgagtgttctgtgcagtagggaaaccttagacactcttcactgcagagggtggtgcagccgaaagtgtagatcgcagggtaactctcccagagcacagccaccgagtgcaggaggcatgcagaagggacggagaagcatcccctcagggatgggtggacagaagtggctctcccaggtggcctgatctctgtggaaggcaacactctcatcagcaaaggcagccagcaggacagtcagtccacataaacaaccagccagaaggagagaagtgactttacagctcttgaccgcactgcgggctgggatgcagacggatacggctggagctatgggatgttatagggacgcagagctaagtaagyctgcagggggcttgaggtttggcaattcacagccaagattccaaaccaagggaggctgcctggagggatgaggtcttaaaatgggaagtgaaagcagtgtgcaggcatccatcaatctatggcaggaggattattctcctgaagcacagagcagactggcagagagagggcctggaagggaggaccagctagctggagacaactgcagaacgcaattatcggtctgatttgaactgaagcaggaaatggcaacc

SEQ ID NO: 497846 - DNA, 640 bp, Homo sapiens
gtgacagcaggtgcataagtggcctckagctttttcctcattatttccagcaaaccccgtctctgtctacttacctccttccttaacagccttttcctaaccaattctttctgctcccctagaaatattacattctgcaaatgcgaaaggaaaagaaatgggtatctgctcagtgccgatttcagagagtatctacaaagcttttctcttttgcacagatactgcactgaagactcggaggggttgagccgctggagccacgcaaattcagacacctcttccgccccaggtcactctactcgcccacgctgcctgccacacccatccggttgtgcgggacactccccgcgtttcttcagcgattcttatcgggctccctccttgttcaataaaggtgaagggtgtggggttttctgtgcatacgctcaggaagttgagtcccggtgaaacgtgtcaggttgccatttcccaggctggaaagattttcccaggacgggtatgaatagacgatgaaagtgcacactcttacccggctgcccgacccaggtgccaggcttctgactcaggaccatctgtgggtgcgagtgcagggaggtgagtcactgcagccttgctcagtccccctgcagaggtcagatcc

SEQ ID NO: 497847 - DNA, 625 bp, Homo sapiens
ttgaagctgacaattgcaagtaagaatacagtttgcccctgtaaattaaataagttatggttatatttgctcctgaatacttttaatcttattttggttgactatattctaaataaaatgagctaccagtaatgccttctaaaaacttagcaatcactaaacattttccaaggaaatttcacaaggaggggaaactggtagatggtcttcaggtttgaagcacctgcaagtatgtaatacactatttaagtaaacaaatgaaccttactcatatttccatggtgtctctaccttcttcttgcagttctggctttagttattgctttatgtccttgtctcctctgacagcctgaacacaagagggtatgtattcctttttaagaycagtgtttagtataatgtctagactctcccagctattcaataaatacttactgaatgaatgaattcttgaatgactatatgcatgaatacagaatttatccatgggttaaagatggaacttcaaagtattgtctgattgttgccaattgggacacaaattttttaatcccttaatgattttgcttcattttcattcttttttgtgcctgcataaaaatttaaataaacattgactctttta

SEQ ID NO: 497848 - DNA, 610 bp, Homo sapiens
tggctgaaggcaaattataccctgcatgagttatcaggttgataattgccattacytttaacgcaaaaacctcaaatacttttgcgccaacctaaaagctttagatttattttcaaataaagtattgttgtgattaacagattaataaaaacatgccaggtcttagttttaatgattaactttggggactgagtagacagtaaacatttggctagaatttcctgtcctcagataccgtgcgattgaaagaaaatccgcttggtgatgtgctatttataacactattttaaaaggttatcttgttcaaatgcagcatgtgcttaggagttaaatcccagaactgcctgaccaagaaaaaaaaaaaaggtgctttaaagtagcatgttgtcatagtagtgtgaaaatgtgaaggtgcgactggccgtatgtgaaatgaacgcattcccacagtgactccagcctctggtgagaaatcccgagtcactctcatgagtcgagaagccctcaccagatggcagggcagagagttgcttcctcagtgctttcaggtaaaatcttacatgacagagcacaagaaaacacgttactctaaaaagcaaattgacggaat

SEQ ID NO: 497849 - DNA, 417 bp, Homo sapiens
ctggccaaactacacactgcttgtctatgtcaatatttatgytgccgcttctctgtgtctactggagtttttctcctttggaattaattattatgctcttaaagaaaaattttggtttgaaaagattgtttttataaaaaatctatacagactttctaatttaccaaagaataattacataaatattctgaaaatatcagaagtgttctaatgaaaaaggaggaaatatgggctcaattcctgcctcactagaataaaaattattcagtggttatctttttttttgaaaaacagagaccttgttcactcttgcatggaatttgatggggctgtgatcgtcatgcaggttgtggttacgggggcatctctttcctttcctctgcaggccagtcgtggtcagccagcacctaaagtgga

SEQ ID NO: 497850 - DNA, 417 bp, Homo sapiens
ctggccaaactacacactgcttgtctatgtcaatatttatgctgccgcttctctgtgtctactggagtttttctcctttggaattaattattatgctcttaaagaaaaattttggtttgaaaagattgtttttataaaaaatctatacagactttctaatttaccaaagaataattacataaatattctgaaaatatcagaagtgttctaatgaaaaargaggaaatatgggctcaattcctgcctcactagaataaaaattattcagtggttatctttttttttgaaaaacagagaccttgttcactcttgcatggaatttgatggggctgtgatcgtcatgcaggttgtggttacgggggcatctctttcctttcctctgcaggccagtcgtggtcagccagcacctaaagtgga

SEQ ID NO: 497851 - DNA, 608 bp, Homo sapiens
cccatgctgctgctctgcctatggagtagtcattctttattcctttacttctttttaaatttattttttattttttttgagacagagtctcactcttgtcgcccagactagagaacagtggagcgatctcggctcgctgcaacctccacctcctgggttcaagcgattctcctgcctcagcctcccgagtagcagggattacaggtacccgccactatacccagctaatttttgtatttttagtagagacggggtttcatcatgttggccaggctggtctttaactcaagcaatccgcccacctcagcctccaaaagtgttgggattacaggtgtgagccactgcgaccggcctcctttactttcttaataaacctgctttcactttactctatggattcacctcatactctttcttgcgcaagatccaggaaccctctcttggggtctggatcgaaacccctttccagtaagcattgggcactgtgctaaatgctgggaatacccaggaaacaagaaagagtccaggcggtagccagacctcaaggaagtaccatctcgtcaggatcagaaatkctgcttcctaactcagaaataatttttttttct

SEQ ID NO: 497852 - DNA, 509 bp, Homo sapiens
aacctactcctaatttaaaagcacatatgccaacattaccccttgaattaaattcaaggaataattcaagtctaattcaagagtggtctaatgcaggtccaattcaagattcaggactgagagccctatcagacctggccccacctacttccagcttcaggccacatcccgatctcactctgaccacaactcgtctttcagttcctcaaacctgccctgcagttctgtcgctttcaggattttttgcatagcctcttccctgggcccagaacatttttttaccaattctcttcatggttaactccaaaaaagatatacaggggattgcagcctacatgtcacttcagggaagctccgttggctgccttaaactggtctggttccccccatcatatcctccragaaacacatcttttgaaggatttatcacagcttcaattctataactgtgaaatcagttgtctgatgtctatttccaaccccgccccccgcccccccaactagaatat

SEQ ID NO: 497853 - DNA, 605 bp, Homo sapiens
agtcaagttctcatgacagaaaaaataaggtactatcactgctcttggaggagctcagagtctagtagttccagatccatcaccacttttcacacccccacatccacttgcacagatgccactgataccaaaacacagcactatacttggtagctctaactcttccatcctgtcaccactgttrgatcatgaatagagctgcagtggatggtacgtgagtgacccccagcattaactttcttcatcctctttttgaaaagaggactctcctacaatctagaggaccacccagctagattacatatcccagactcctggacaggtaggtggggctatggggctaatttctgacaaacaggagatggatggaagtggtatgcaactttggagtcatagcttttaaaaagaagcagttatccatgctgcttcccacttttcacaggctggaatcgaactagaagttataaggcaggtcccaccacaatggcaaggctaacatcccgcaagatggtacagctatgaaataggaagaccccagtgaacaacctcatggaggagtcaaccaccagcccgggactattaaatgagagcaccatgaactgagc

SEQ ID NO: 497854 - DNA, 605 bp, Homo sapiens
agtcaagttctcatgacagaaaaaataaggtactatcactgctcttggaggagctcagagtctagtagttccagatccatcaccacttttcacacccccacatccacttgcacagatgccactgataccaaaacacagcactatacttggtagctctaactcttccatcctgtcaccactgttggatcatgaatagagctgcagtggatggtacgtgagtgacccccagcattaactttcttcatcctctttttgaaaagaggactctcctacawtctagaggaccacccagctagattacatatcccagactcctggacaggtaggtggggctatggggctaatttctgacaaacaggagatggatggaagtggtatgcaactttggagtcatagcttttaaaaagaagcagttatccatgctgcttcccacttttcacaggctggaatcgaactagaagttataaggcaggtcccaccacaatggcaaggctaacatcccgcaagatggtacagctatgaaataggaagaccccagtgaacaacctcatggaggagtcaaccaccagcccgggactattaaatgagagcaccatgaactgagc

SEQ ID NO: 497855 - DNA, 605 bp, Homo sapiens
agtcaagttctcatgacagaaaaaataaggtactatcactgctcttggaggagctcagagtctagtagttccagatccatcaccacttttcacacccccacatccacttgcacagatgccactgataccaaaacacagcactatacttggtagctctaactcttccatcctgtcaccactgttggatcatgaatagagctgcagtggatggtacgtgagtgacccccagcattaactttcttcatcctctttttgaaaagaggactctcctacaatctagaggaccacccagctagattacatatcccagactcctggacaggtaggtggggctatggggctaatttctgacaaacaggagatggatggaagtggtatgcaactttggagtcatagcttttaaaaagaagcagttatccatgctgcttcccacttttcacaggctggaatcgaactagaagttataaggcaggtcccaccacaatggcaaggctaacatcccgcaagatggtacagctatgaaataggaagaccccagtgaacaacctcatggaggagtcaaccaccagcccsggactattaaatgagagcaccatgaactgagc

SEQ ID NO: 497856 - DNA, 514 bp, Homo sapiens
ctgcctacatttgcagctacaaagctgtgtctgtttcctgtgctgttgcaggtaagaaaatggtagccaatttacatcctgttccttgtctccttgctcgtgcgaaggtgtccaggggttgggcttctgaactgactttctatggaagccaattcctccgaagaagtaaaagacacactgctttaactataaggctggctttgtgagttggaggttattgatgtatgaacattttctagttttcagtgagtaaagagggacggaaggtttaacctctagcaaggggttaactttcagcatcaagtttctattctagttggacacaaggatttcatggtcaaactacatctcaccaccttgatacctggggctgcatcyagtcaaagaggataactttccagatgggggggtgggggaaggtaacaacattagaaagtgcataagcagtaactcttccctgctagaacttctaagaaatattgctaagctgtcattaggaattaaggtgaaaatc

SEQ ID NO: 497857 - DNA, 654 bp, Homo sapiens
ctgcctacatttgcagctacaaagctgtgtctgtttcctgtgctgttgcaggtaagaaaatggtagccaatttacatcctgttccttgtctccttgctcgtgcgaaggtgtccaggggttgggcttctgaactgactttctatggaagccaattcctccgaagaagtaaaagacacactgctttaactataaggctggctttgtgagttggaggttattgatgtatgaacattttctagttttcagtgagtaaagagggacggaaggtttaacctctagcaaggggttaactttcagcatcaagtttctattctagttggacacaaggatttcatggtcaaactacatctcaccaccttgatacctggggctgcatccagtcaaagaggataactttccagatkggggggtgggggaaggtaacaacattagaaagtgcataagcagtaactcttccctgctagaacttctaagaaatattgctaagctgtcattaggaattaaggtgaaaatctagcacaggtcctcgatcctttaaacacaattccaaaacccagaagactgaaaaccgaaagctacatttggcaagcaaccaaacaactgcgttcacttggtggcaagcctgatctgaattgacatgaggctctttgcagc

SEQ ID NO: 497858 - DNA, 654 bp, Homo sapiens
ctgcctacatttgcagctacaaagctgtgtctgtttcctgtgctgttgcaggtaagaaaatggtagccaatttacatcctgttccttgtctccttgctcgtgcgaaggtgtccaggggttgggcttctgaactgactttctatggaagccaattcctccgaagaagtaaaagacacactgctttaactataaggctggctttgtgagttggaggttattgatgtatgaacattttctagttttcagtgagtaaagagggacggaaggtttaacctctagcaaggggttaactttcagcatcaagtttctattctagttggacacaaggatttcatggtcaaactacatctcaccaccttgatacctggggctgcatccagtcaaagaggataactttccagatgggggggtgggggaaggtaacaacattagaaagtgcataagcagtaactcttccctgctagaacttctaagaaatattgctaagctgtcawtaggaattaaggtgaaaatctagcacaggtcctcgatcctttaaacacaattccaaaacccagaagactgaaaaccgaaagctacatttggcaagcaaccaaacaactgcgttcacttggtggcaagcctgatctgaattgacatgaggctctttgcagc

SEQ ID NO: 497859 - DNA, 564 bp, Homo sapiens
tgctagaacttctaagaaatattgctaagctgtcattaggaattaaggtgaaaatctagcacaggtcctcgatcctttaaacacaattccaaaacccagaagactgaaaaccgaaagctacatttggcaagcaaccaaacaactgcgttcacttggtggcaagcctgatctgaattgacatgaggctctttgcagctttatcatcaaacttagcatgcctgttcacatgttttgctgaggtggtttgatgtgtctgctgttycaatcctctggcggtgctacagtatacgtggtaggtgctcagtacctttccatagctccactcccttttatgggatggactgtgtccttgaaaaagatatgttcaattcctaaccccacatacttgtgaatgtgaccttatttggaaataggttctttgcagatgtaatcaagctaagatgagatcactggagtgggccccaatccaatacgactgctgtccttataagaagggaaaatacagacagaaacatacaaggagaagatgaccacatgacttcagaggcaggaactgaagtgctg

SEQ ID NO: 497860 - DNA, 564 bp, Homo sapiens
tgctagaacttctaagaaatattgctaagctgtcattaggaattaaggtgaaaatctagcacaggtcctcgatcctttaaacacaattccaaaacccagaagactgaaaaccgaaagctacatttggcaagcaaccaaacaactgcgttcacttggtggcaagcctgatctgaattgacatgaggctctttgcagctttatcatcaaacttagcatgcctgttcacatgttttgctgaggtggtttgatgtgtctgctgtttcaatcctctggcggtgctacagtatacgtggtaggtgctcagtacctttccatagctccactcccttttatgggatggactgtgtccttgaaaaagatatgttcaattcctaaccccacatacttgtgaatgtgaccttatttggaaataggttctttgcagatgtaatcaagctaagatgagatcaytggagtgggccccaatccaatacgactgctgtccttataagaagggaaaatacagacagaaacatacaaggagaagatgaccacatgacttcagaggcaggaactgaagtgctg

SEQ ID NO: 497861 - DNA, 567 bp, Homo sapiens
tgctagaacttctaagaaatattgctaagctgtcattaggaattaaggtgaaaatctagcacaggtcctcgatcctttaaacacaattccaaaacccagaagactgaaaaccgaaagctacatttggcaagcaaccaaacaactgcgttcacttggtggcaagcctgatctgaattgacatgaggctctttgcagctttatcatcaaacttagcatgcctgttcacatgttttgctgaggtggtttgatgtgtctgctgtttcaatcctctggcggtgctacagtatacgtggtaggtgctcagtacctttccatagctccactcccttttatgggatggactgtgtccttgaaaaagatatgttcaattcctaaccccacatacttgtgaatgtgaccttatttggaaataggttctttgcagatgtaatcaagctaagatgagatcactggagtgggccccaatccaatacgactgctgtccttataagaagggaaaatacagacagaaacatacaaggagaagatgaccacrtgacttcagaggcaggaactgaagtgctgcag

SEQ ID NO: 497862 - DNA, 637 bp, Homo sapiens
ttgttataagggccttagtcataaacctggcaatggatgagaaaaaatatttcattttccttacaatatagtctctaaaatttattttgtcatagactccaataaatatttactccaggcaatgttatggggcctgaaattataactatatcacaataaactgaaaacaaaacctgcgtaactcaatgcctatgttcattggtaccttttcctgactaccccattccttcctggaattacagaaatgttaagaaactttcttcaaaaatgtgttactctctaaggaaatactgtgtcgatactgccaacattacatatgacttatagtattttttcctttggggaataaggaactcaaagccttttaaaattgtgattaaaagttttctgaacaacaaaaaaatcatttcctaatggttagccatttctgagaactttagtaaratttcttttgaaattgatgacttttggaagaaagaggaagaagagaaaaatgtgcccacagtgaacaacttgggaaaccaatgaatcgaaaaagagaattctccagatgatacaaactgctctagaaaattccctttcagtttggaccacagaagcttaatatcaaagacatgtttgattctacctcatcctt

SEQ ID NO: 497863 - DNA, 421 bp, Homo sapiens
atctcacatttctgtataattaaataagagcctaaggtctggatgattctttacttttaacaagaactccaggtaattaatatgatcaacctcaacttcagcttttttcctgatgactgcatattatttaaaaacaaaaccaaaccctgctatttgtttcytctttcaggttaaattattccaagtgattccaattaagcaatcctcatgtgtatctctttaagctgtgaccaggaagatctaagaaggttctatggcattttggaacttttctccctgacttgattgtatttgaagttttgccaaaatgaaaaatcaagacctgtgccttggggcagagctgtagagctacgtcatgacgcttggttttcatttaagacagggaggccattctggaaatcaaactttaattaagcacaca

SEQ ID NO: 497864 - DNA, 571 bp, Homo sapiens
tatgacatacataatgacatatattaactcttatgcatgactatgatcagcatcttttcagagagtttcttgtttaagagggaggagaacccaatgtcattggatgctggagacctggagtgagcaaaaagggcctttgtagaggatgagaaagtgagaaagggaaaaaacagtgttcccctatcccacttttctaataaacccatccacatacacattgaatttacctttatagtacattatgagacgtccatatgtgatgagtaagttgggtgtttatcaaccttgtaactgaatattattatttaatttatcacatagctactgaactattgttrttggtgatgtttcctggcaaattccaggctctgtttcatacagggttgttgttgttttctaattgttaccaaagcctgtgttttctctagtataaaagtttccctagcttttgaacaaacaatctaaatggaaaagctaaccttttcgttggataaaggcaagtaattggtttctctcatttcactgggcctttaggcatgaccatgagcaggggtcatggcgaaactctgtt

SEQ ID NO: 497865 - DNA, 574 bp, Homo sapiens
acatgttcaaggtatgtgataaatggccaatgtgttagtctgtctgggcaacaaaataatggtattttgggtggtttataaacaacacaaatttatttctcacagttctagaagctgggaagtccaagatcgaagagctggcaggtttggtgcctagtaagggcccatttccttcttgatagggatgacttctcactacgtcctcacatggtaaaaggggcaaatgagtcccctggggcctcttttataaagtcactaatttcactcacgagggcttcactgacatgacctaatcacttgcccaaattccccacctcctaatcccatcaccttggggactagggtttcaacagggattctgaggggtcacaaacatccaaaccacagcagtcagaaatcaggagaatggatcatggggagtgacaggcttagcccgccttggattggcagatatggagtgagaggaagtaccaacagttttcaaaaccaatcaaaccaaaacatttcatttatcacatcgaattcacaatgtacyatcgttaccactacaatgactggccaagagcctccttac

SEQ ID NO: 497866 - DNA, 569 bp, Homo sapiens
tgggttatggacaagtcaccaaagccctatgtctggtgtccttatctgtaacaatagaggtagtgatagctatgccacctgcctctaaggttttcatgaagatgaaacaaaaactgaaggaacayagaagaatagattttaaatattctcatcacaaaaaaaaatgataagaaggtgaagtgatggatatatatttatcagcttgatttaatctttctacaatatatatacatatcaaaagaccacactgtaccctataaatatattcaactattatttgtcaaataaatttaaaaactgcagtaacaagcactttgcaaactatgatgcactatataaataaaggaataattattctctgcaaatgataccaagagatttattttttttttttggccactctaattcaaggattttagtatgtaaccatcatagccatggagaccttgaaatctaattgcatttactaatttactatgagttatcactaggaattccctaactcagtatcaagaatatagaaatcagaatatcaaagttttaagaattatgaaatttgtctaaaggga

SEQ ID NO: 497867 - DNA, 569 bp, Homo sapiens
tgggttatggacaagtcaccaaagccctatgtctggtgtccttatctgtaacaatagaggtagtgatagctatgccacctgcctctaaggttttcatgaagatgaaacaaaaactgaaggaacatagaagaatagattttaaatattctcatcacaaaaaaaaatgataagaaggtgaagtgatggatayatatttatcagcttgatttaatctttctacaatatatatacatatcaaaagaccacactgtaccctataaatatattcaactattatttgtcaaataaatttaaaaactgcagtaacaagcactttgcaaactatgatgcactatataaataaaggaataattattctctgcaaatgataccaagagatttattttttttttttggccactctaattcaaggattttagtatgtaaccatcatagccatggagaccttgaaatctaattgcatttactaatttactatgagttatcactaggaattccctaactcagtatcaagaatatagaaatcagaatatcaaagttttaagaattatgaaatttgtctaaaggga

SEQ ID NO: 497868 - DNA, 547 bp, Homo sapiens
ctgccgacggtgggggttgggagcgatttttcgtctttaggttggattcggaacgcggacgtctggatgcttgtgtatctctgtccctcatattgctgtgatgccttacaggtcagttatcctctccgagcacagtttcctcctccgtaaaatgggaacaataataattcccttcttacaagacttgtgcagctcaaaaagaccaygtatgtgaagctctagtaaatttggggtgctatggaaattttaaaaatatgagttttgcacagattcggctacagtccaaaaagagttataattgctttttgcaccttctttcatttcgtagtttctctaattctcagtgcacgaaaattatttccctacgtccacaaactgattttcctcacctccattgccatcatttctcctgctttccagtctgaacagcacattaccgtttacagggcattttcacattcatggcccctttgtcctcattgttttaactaggtacgatgtggttttttttcagcgaagcaaatagtcgtaggctgagttgccgaaa

SEQ ID NO: 497869 - DNA, 539 bp, Homo sapiens
gagagaattattgtggaaataaataagacatctgtgaaagtacctaagcagagttctgaccatattgggtgttctccataagtcatagatcctctgaatgaacaattaataaagaagttagcattgcttctcaatgttccaaaatattgctgtgataaagatacgtgcgaagtactgcagacacaagagagtacctctaagtctgtctcagggcacaggaaagcctttgggcaggaggtggccagtgagcgtgcatgtgcgtgtgtgtgtgtgtgtgtgtgtgatactgggtagggagtgatcatttctgaagctggaattcaaacccaggcgtatgtctaactctacagataagggagcagaagtggatcccatggaaaaaaacaaagggcatttaggcagaagkcacatcatatagaagagccaggtgagttgaaagtattttacagactctagaaataaaggaagtttcatgtgaaagagaataaaaggtgggtggtaggtggtgaggctggaaagggaggcagggacatctcgag

SEQ ID NO: 497870 - DNA, 607 bp, Homo sapiens
agtactgatgcggaggtcacaactagagcttacaactraaacaaatgaaggaaacataaccatctcaatctcatggatgtctctgaggccactggtcactgcactgctccaggttgcctgtgtaatcattgcgcatgaagtgcaggccccgccatttcctcctggcctgtcttgctggactcctagaccagcttttcacaaagggtgtttttgctgctactattcaacaaacagtgctgggcagaggctgagagggtcagagcagctcctgggccaaccaggcctgcaggaaggaggagggttatgtatgaggtctcaagaatccaggttcacatgcaggtttgattcagtttccatcctcacagcaggacattctcccgtgttttctctccttagaagtgattttgatttctctctttttagtttaactgctgttatttagttgatgctacatttgttcttactgaagtttgatagaattataattcctaacagtattttcagaatacagttttgatgtaattcttatgaatatattatttacatttcattgggatcataaagttagatagcttaaaagtagtgtattctggctgaaggaagaagt

SEQ ID NO: 497871 - DNA, 607 bp, Homo sapiens
agtactgatgcggaggtcacaactagagcttacaactgaaacaaatgraggaaacataaccatctcaatctcatggatgtctctgaggccactggtcactgcactgctccaggttgcctgtgtaatcattgcgcatgaagtgcaggccccgccatttcctcctggcctgtcttgctggactcctagaccagcttttcacaaagggtgtttttgctgctactattcaacaaacagtgctgggcagaggctgagagggtcagagcagctcctgggccaaccaggcctgcaggaaggaggagggttatgtatgaggtctcaagaatccaggttcacatgcaggtttgattcagtttccatcctcacagcaggacattctcccgtgttttctctccttagaagtgattttgatttctctctttttagtttaactgctgttatttagttgatgctacatttgttcttactgaagtttgatagaattataattcctaacagtattttcagaatacagttttgatgtaattcttatgaatatattatttacatttcattgggatcataaagttagatagcttaaaagtagtgtattctggctgaaggaagaagt

SEQ ID NO: 497872 - DNA, 607 bp, Homo sapiens
agtactgatgcggaggtcacaactagagcttacaactgaaacaaatgaaggaaacataaccatctcaatctcatggatgtctctgaggccactggtcactgcactgctccaggttgcctgtgtaatcattgckcatgaagtgcaggccccgccatttcctcctggcctgtcttgctggactcctagaccagcttttcacaaagggtgtttttgctgctactattcaacaaacagtgctgggcagaggctgagagggtcagagcagctcctgggccaaccaggcctgcaggaaggaggagggttatgtatgaggtctcaagaatccaggttcacatgcaggtttgattcagtttccatcctcacagcaggacattctcccgtgttttctctccttagaagtgattttgatttctctctttttagtttaactgctgttatttagttgatgctacatttgttcttactgaagtttgatagaattataattcctaacagtattttcagaatacagttttgatgtaattcttatgaatatattatttacatttcattgggatcataaagttagatagcttaaaagtagtgtattctggctgaaggaagaagt

SEQ ID NO: 497873 - DNA, 607 bp, Homo sapiens
agtactgatgcggaggtcacaactagagcttacaactgaaacaaatgaaggaaacataaccatctcaatctcatggatgtctctgaggccactggtcactgcactgctccaggttgcctgtgtaatcattgcgcatgaagtgcaggccccgccatttcctcctggcctgtcttgctggactcctagaccagcttttcacaaagggtgtttttgctgctactattcaacaaacagtgctgggcagaggctgagagggtcagagcagctcctgggccaaccaggcctgcaggaaggaggagggttatgtatgaggtctcaagaatccaggttcacatgcaggtttgattcagtttccatcctcacagcaggacattctccygtgttttctctccttagaagtgattttgatttctctctttttagtttaactgctgttatttagttgatgctacatttgttcttactgaagtttgatagaattataattcctaacagtattttcagaatacagttttgatgtaattcttatgaatatattatttacatttcattgggatcataaagttagatagcttaaaagtagtgtattctggctgaaggaagaagt

SEQ ID NO: 497874 - DNA, 596 bp, Homo sapiens
gctgcatgttgaaagttataaaatagcacatttctaattctgtcattccacttttattagctggcattcttctggaaaggagggctttcctgcccatcccctgacyctctttctctctttttctgtgtgttgaatatcactctggacataaggattttttttttatttggctgatgtgggctttttcaaactgtgtgtgtgtgtgtgtgtgtgtgtgtgtgtgtgtgtgtgtgtgtgtgcatgttttgccatgaacctattagtcttcaagcacttccttgctttctgatacaacaaaatattataggcttaccttctactttcacctctcagtctctgaatcagtcatatagttacatatatttttaatgaggcttgatttctttttgagggaaatgatatttaaaatccaggttccagggactaggtatgctcactgctatggataagaaagcatcttttaaaatacaatcttatgatccccccaaaagtaaaacagagaggcagcttttgatttggaactgggagctcagagcctgtctctatctctaggattccagcactggagaagtaagacaatgaatacattctgcctc

SEQ ID NO: 497875 - DNA, 596 bp, Homo sapiens
gctgcatgttgaaagttataaaatagcacatttctaattctgtcattccacttttattagctggcattcttctggaaaggagggctttcctgcccatcccctgactctctttctctctttttctgtgtgttgaatatcactctggacataaggattttttttttatttggctgatgtgggctttttcaaactgtgtgtgtgtgtgtgtgtgtgtgtgtgtgtgtgtgtgtgtgtgtgtgcatgttttgccatgaacctattagtcttcaagcacttccttgctttctgatacaacaaaatattataggcttaccttctactttcacctctcagtctctgaatcagtcatayagttacatatatttttaatgaggcttgatttctttttgagggaaatgatatttaaaatccaggttccagggactaggtatgctcactgctatggataagaaagcatcttttaaaatacaatcttatgatccccccaaaagtaaaacagagaggcagcttttgatttggaactgggagctcagagcctgtctctatctctaggattccagcactggagaagtaagacaatgaatacattctgcctc

SEQ ID NO: 497876 - DNA, 670 bp, Homo sapiens
cagacatatcatgagaaacctcgcagagagaatccatgtgataaagaactgaggtcctctgttaagaacaagcraaaaatggaggtctacagccagaagccacatgtgtgagtgctcttggaagtggatcctcctgccttcatcagactgtcagaggattgtagttctggctcagaaacttgactgagagttcatgagaggcactgagccagaaatacctaactaagctgcttttggattccttatactcagaaattgtatgagataacacatactcattgtcataagctgttaaattttggagtaatattttatgtaacaatagataacaaagacatgggctgacatttgaatcactgagtcttttccgtgaccgtccagcatcttctcatttcaagtccccctgaatatttaatttaactgcctctattagagtacacgcaaaaacaaaacaaaagaatcaaaaaccactttcctaatctggcccttttttctctattcaaattcatctattgactactattctccagtcagctccaccttatgccttcacagtacaaaaccgacaaatgaactccttgagtatgccatgattctcagaactttgcaaaagttacttccctctgctaaggagggcccaccccttctttatctaacttgtccttcaaga

SEQ ID NO: 497877 - DNA, 611 bp, Homo sapiens
tctggcctccagaagtgtgaaatcataaatttgtacagcttttatgtcggtggtaatttgttgcagcagcaataggactaatgtacctgggttccctgggatgccatttactgaaacagagagcatcagtgctcttcagagaaagagcaggagttgggacctctgtttaggtcgtgctggatttgaggtgcccattagctatccaagtggagttatcaagtaggcaggtgataactgaccctggagctcagagaaagattggaatttcatgtgaccttgagcaaktcctataatttctctgagcttcagtgtcttctgcaaaatgggggttatatcttctttatctatcaaggatcaaaggagacattctatggcaagtgttcaaagtatgccactaacataaggcatttgctattctgataaattggcctctcacccaaaggcaataggagtcatttctcacagagaccttttaaagtcttttgtccccacaaactcatcatatcccatcaactgccacaaaatgcagagagcagcacttagggcagtatgtggccacaattctcaaggaaacacgagatcactctggacacatccaattaatagaactg

SEQ ID NO: 497878 - DNA, 589 bp, Homo sapiens
atttctggaatcatcttcaggactttcgtgagctcattgtaatgtgttatgtgaaatgcatgtcctcaaaacatgggtggttgtataaatgaggaagctggcctcatggagccaaagcagcatggaaaggcccaaataacttgctgtggggaagactgactgcctctggggtttttaatcagcatgaaaagccacccagggccccaaatcattagtagcattttaattggcagcagagtaatactgtgtctactttggcttamagatataaatttcctgctctctcataacagatggtgatgaggtgcatggtaggaagcatggcaagaactgtgttactcaaaatgtagacttaattgcaaatttgaaatggaaataaagtgaaggttctgtctttatttacaataaatttcatgtgttaaatggacttgtctaattcttctattttaccatgcgattgaataataaacatttattatgtgcttctggcatgcactgtgttaaatattttacatggattatgtcatggatctcttgccatgatcctgaggaaagtattattgctgcttttagtagcatcgaatgttgg

SEQ ID NO: 497879 - DNA, 475 bp, Homo sapiens
gattcctcagaactgccaggaggagagactaagtctgctggtcagcagagactgtggccatgcctccccctaggggctcaggcccagggagttccaaattctgttcctgagcctctggctggcgttattggagatcctgcagggaagccctgtccactgagaaaggatgggtcaagtttagacctgaagaggcactctggctgcacactgccacagccagtgtgttgggctgtggggacaattcttggggccaagccacccagcttccctggctccagcaggggaaaagcacagactggagctctggaaatgggtgccacccttctcctgcccaggaagattagcatgttaggcagttgtgagtctcagtgctggwtgctgcccctcccccaaggagctcaaatggcttagacaggaggcagccacagcctgtgctggttgcccctccccgtgggagttcagtaagcttaagcag

SEQ ID NO: 497880 - DNA, 594 bp, Homo sapiens
gccaaaccatatcacagggatgcagagaatttgttagatcccttgttccagctaggtacacaacacagtaattcacagtagacagtagatagaaacctgaacctgggcaccaatcttccctcctgaggaaataacagtgctgagaaacacaagtcagtctcagatgttaagattccagccaggaggagaaacagtgtccaaaagaagataaacagactgcggtggatgtcaaagaagtgatcaaggtactccgcacactctctgcctcttggagctgccaacatgtgaaagctgggctgactcttgctaggaccaactgattattgtataattcaatattactgttgacaataagtccccttctttttttccttgtttgaarctattttcaaagttttaaaaatcacagaaaatgcttggttctcataccaatctgttctcataccctactaccttgtgctcctacttgtcttactttaggttccattttcttcatccctctgtaagtttagctgagtttcagaataatgctatggccacaaaataaaaagcaatcttaaaaaatcattatgagacagagtgcagatgttggag

SEQ ID NO: 497881 - DNA, 643 bp, Homo sapiens
atttttatttattccttatatttattatataatgttatataataaatattgtatgattatatttatttaaatgttaataaaaattatataaaaataaaaatataatttaaatataagataaatatatattattatactaattttatactatatttaatagctaattaatattttacagtaaaatatttattaatcttttaataactaataagttttaataacttattaatattaataactaatattaatacttggayagttatttttttttgagatggagtcttgctttgttgcccaggctggagtgcagtggcccaggctggaatgtaggagcagagtgatctcagctcactgcaacctccatctcccgggttcaagtgattctcctgcctcagcctcctgagtagccgggattacaggcgtgtgtcaccatgcctggctaatttttgtagttttagtagagacagggtttcaccatgttgggcaggctggtctcgaactcctgacctcgtgatccgcctgtctcagcctcccaaagtgctgggataatacttggatagttattttattcaactctggaactcaatttcataacatttttcttacacgtattatatttattgttttggttaaagcaaactgt

SEQ ID NO: 497882 - DNA, 643 bp, Homo sapiens
atttttatttattccttatatttattatataatgttatataataaatattgtatgattatatttatttaaatgttaataaaaattatataaaaataaaaatataatttaaatataagataaatatatattattatactaattttatactatatttaatagctaattaatattttacagtaaaatatttattaatcttttaataactaataagttttaataacttattaatattaataactaatattaatacttggacagttatttttttttgagatggagtcttgctttgttgcccaggctggagtgcagtggcccaggctggaatgtaggagcagagtgatctcagctcactgcaacctccatctcccgggttcaagtgattctcctgcctcagcctcctgagtagccgggattacaggcgtgtgtcaccatgcctggctaatttttgtagttttagtagagacagggtttcaccatgttgggcaggctggtctcgaactcctgacctcgtgatccgcctgtctcagcctcccaaagtgctgggataatacttggatagttattttattcaactctggaactcaatttcataacatttttcttacacrtattatatttattgttttggttaaagcaaactgt

SEQ ID NO: 497883 - DNA, 590 bp, Homo sapiens
caaaatgggaaaaggcaagtgagtgagagccccgtggggtcctgtgcaagactgggaatgaaaaaatcccctggctctcctccatgcccgctccatcccccacacttctaaactgaggcacagagccacccagaagttttacaggggcaactcttgagtccaaggggagtgatcttctgttgtcctgaaaatcacctggacagaagggcgggcaaccccactcactcctgccactggtagccaggtgggccatgcctgctagagcttacagcccagcagactgcttctacctgaactcggcaggcaagcacaatcccatgttccccaggaagtacttggatagcagattaggtgggctccacccactcctgctgctcatcgccaagtgagacttgctggcttgggtggtgcccaagcaggaaggagccctcactcttggatcactgagagagatgagatgccacaggccagtggaggcatggggtgtacctccctccgaagggccagctgggcaagkatattacctgtctgccaaacgtggtccctgcctgagggacctctctggaccagaacacccaagaaaagaaatg

SEQ ID NO: 497884 - DNA, 603 bp, Homo sapiens
tattctaacaaacaatatggcttagtaagcattacgaaacaaattcaaattctagttgttctaaatttactctagaatatttttagtaggtaatataacaatagagacaaattcaattaatcattttatatgtgagaaagtcttacaatcacatctcagagataacatamacaatcagtagattatgcatcaattattttctaataattaataattcatttgatatcatagcttaagtatttatccccaagttcttttattgttcttttactatacttctgccttcttgtgagggcattccttggagatctgttttaaagctattatgagaaagattagaaggaaatacattatagaaggcacatgttgaacaatatcatgtgtctaagaaagaggtcaaatagattgatgagcccttttaaaaggacacttagaaaaatgaccacagatcggctgatttttgcaatgccgtctgttgcaattattttttacccacttttgaaaaagaactctcatgacatctaatgctatgacaactctagtgctgtgacttgcttttgaaaaaaagtttgttataagtcaatattaaagcagtgagaaaca

SEQ ID NO: 497885 - DNA, 603 bp, Homo sapiens
tattctaacaaacaatatggcttagtaagcattacgaaacaaattcaaattctagttgttctaaatttactctagaatatttttagtaggtaatataacaatagagacaaattcaattaatcattttatatgtgagaaagtcttacaatcacatctcagagataacatacacaatcagtagattatgcatcaattattttctaataattaataattcatttgatatcatagcttaagtatttatccccaagttcttttattgttcttttactatacttctgccttcttgtgagggcattccttggagatctgttttaaagctattatgagaaagattagaaggaaatacattatagaaggcacatgttgaacaatatcatgtgtctaagaaagaggtcaaatagattgatgagcccttttaaaaggacacttagaaaaatgaccacagatcggctgatttttrcaatgccgtctgttgcaattattttttacccacttttgaaaaagaactctcatgacatctaatgctatgacaactctagtgctgtgacttgcttttgaaaaaaagtttgttataagtcaatattaaagcagtgagaaaca

SEQ ID NO: 497886 - DNA, 603 bp, Homo sapiens
tattctaacaaacaatatggcttagtaagcattacgaaacaaattcaaattctagttgttctaaatttactctagaatatttttagtaggtaatataacaatagagacaaattcaattaatcattttatatgtgagaaagtcttacaatcacatctcagagataacatacacaatcagtagattatgcatcaattattttctaataattaataattcatttgatatcatagcttaagtatttatccccaagttcttttattgttcttttactatacttctgccttcttgtgagggcattccttggagatctgttttaaagctattatgagaaagattagaaggaaatacattatagaaggcacatgttgaacaatatcatgtgtctaagaaagaggtcaaatagattgatgagcccttttaaaaggacacttagaaaaatgaccacagatcggctgatttttgcaatgcygtctgttgcaattattttttacccacttttgaaaaagaactctcatgacatctaatgctatgacaactctagtgctgtgacttgcttttgaaaaaaagtttgttataagtcaatattaaagcagtgagaaaca

SEQ ID NO: 497887 - DNA, 521 bp, Homo sapiens
tattgcttgtaatcttcaaacacctaataaatgcttaaactaccagcttrgttttaatttagctatattttcaaaagtaagtacaaagacttaatggaaacttaaatacagcttctttattaatttctgtttagctaaaaggaagagactaaaatagtgccaagaatatggaagttttttttcttttcagtcttcacactctcttacagtaacatttaatggtccttctggtattcttagcccacttaactagtgtgatgaacattactattatttgccagatgcttagtgactagagaaaagaacaaagttttcaagatgtattttttgctctctgatttgattctagatattctaccaaaaggtcaaaactgtagaataaaaactatgtatcaaaagtctcacttttatgagaaatcaatacatagtataacagagatagaatcctatgacatttcgaattggaaactaagacaaatgtagataactttaattttaaaattttttaatagtaaacaatc

SEQ ID NO: 497888 - DNA, 568 bp, Homo sapiens
tggcgagaggtcgaggagactcactgcagccacggctgtcataaaaccctagctcacctgtrgcaggtgggacctgggtaggggcagatgactttaacaaagcctccaatagggctggggaggaacatgtgtgactcagatgtgctgacccagagtggcggccctgccaaagaccagcaaaccaccccctcaagaacgaagtggggaggagggtaagcagaaaccagcaagctgacagtggcggacggacctcctacttcctaaaaaagcagtgcttaaccttggaaacatgcacattccacttagacacaaaatattttgagcataatttcagggagtttggggactctgtaaagccccctatgaggtgtatgttttctagattaagagcctttatcactgatagagcattctatcaatgaaaaaatcatatttaatcctagattttgcccaaaagctagaaacaatccaaatgtcccttttaagttccttccagccctgcttctgaacgttcatccctaggttctcactcacctccaagtttccagtcaccaatcccctgccttac

SEQ ID NO: 497889 - DNA, 681 bp, Homo sapiens
ctggtaagcaacagaggtgggcagagcgactatagtaagttttctgtatagtttacctcttytaagtttctggaaggcaggagccagatcgcactgagctttgcaactggagccagggctccagagtactgctcaacaaaggtttgctagggcaacagtagctggggatttagcgaccagaccccagcaagcagattctcagggatgaaagtagtcctggaagcctctaaagccctggttgctcagtagaatctagtttcaagaggagcccagcatttcaagtggctctgaagacagaggagatttggagagtgctctttgcattgtggcttccaggcctgaaggagagtgagctggaggttgctctctgttctcacctcttatgccatgtcaggtttttcccaggcaggcttgagtcctgggggagccccgcctcatggcccaggctgcagtgctgatctccctgccttgtggtgaggattgcagctcagagagctaaagggcagtaaaccaccttggttttggctttgtgcttaagttgcaggctcttctggttatcctttgtgaaggaggctcttaccctggctggaaagagggagcagcccctgcctcccatctacaatgggacagtaaaggaatatggctgtttctcaagtggaacagtcacagttaattttgggg

SEQ ID NO: 497890 - DNA, 503 bp, Homo sapiens
atgactccagcatgagagaggccccggaacctctgcaggcatgctgcttcatagattgcgggagtctctaactgttgtacccagaatggaaccgaaacacagacacaagaaagaaaagagagagctccttatagaacaaggtgtccgagtgcaggaagacttccttccttccatggagtttgccagaaaatgccaggcaacaggcgacaagcacaaagcccagcgcstgtctccatgctccagggagccaaggtggtcatccaggtgcagccgaggtgggaggagccagttttcctttctgctgagcccctgtgcccaagccagcctttcccactaaggacccgttgtctgtcaggagtgggagaacggactctcgagggacaggaaggctgtgggagggtcttggtttcctgtgcacatggtgtgttactgcagctcacaccagaggcatcgaggcacctcgtgaggaatgctgtcctatgccccagtccttcccgccaccc

SEQ ID NO: 497891 - DNA, 600 bp, Homo sapiens
accatggtccttcacggccttcccacgcccagctcccgagggtcaaggaccatcaaggccatccttttaaacacaacatgcctgtcactggccatgtccacatgccagaagccagctgcttacttacagtggacatcgcctctgaaaacacagccctcgctccattgcttcagatgacacagatgggtctcaaccaaagcccatcccctccccagatgtagagcagtggcgaccttgcagacccaacrcacaccacaatgccctcggatttctcagtgacatggtctgaaaagggcaaatccgatatttaaaacagatttaagatgtaactcactcacatgaagttcagccacttaaagtgtgcagtgcaattctgttacacaaccattgccatgatctaacctcagagcattttcatcaccctgagcccatctgtggtcactcctcattcccctgttccctgcccctggctcccgctatctatgggctgtctctgcagatttgtctgttctggacaccacatataaatgctgccgcacaacagtattagtccgttctcatgctgctaataaagacatacccgaggctgggtaatgtata

SEQ ID NO: 497892 - DNA, 578 bp, Homo sapiens
ccgggatgggaggcagatgcgtctgcctgctctgtccaggcctggggcctgttcccaccaggacgtgccggaaagaggctcttgctctgtgggaaaatcattctgctcctctttcctgtacagccctgaggcagagcccgcactgcggtttccttagttgggagctgtggttgtgaggagcccccagtctctatcgttcagggatccccttgacctcagtaaaagccccccttaagtccaccaaccttctgagagcctccacttggctctggtggggcagtgccctggaagagaggtttggggctgctgatcctggccgagggtcttccagaatgacgctactcaatgtccaggaatcataggagcccagtgtcttggcctcaccaggctctgtcaccccctcaaccctgtggccctgcagttcttgaagctcaggtcccagtccttggtgacgactgaacaaccctggcctctgcttacttcttcaggaagctggagccttaccctgttagcaacgtctttccagcatcccygggagagaagcagcttgccagccctctgggcttggttttaaacct

SEQ ID NO: 497893 - DNA, 627 bp, Homo sapiens
ctgtgaaattagcctgcatgcccgcacattagcgcactccgagtaggaggggcagatgyggcagcaggatcaggtaccatcgtccccttcctggcatatgcctccttctttaaagcttatacatgagactgaaattttcccataattacctcaccacaaaggtgagtttgtttggaaagtttcagcaaagcctgcttgtctgtcttgctattttgcaagactaaaaaaggacaatggagatgaagaaaatgtgcatgtgaataactggcaggagccttcctttaagtcaaaaccgtgcaggggtgcagaattcagagagaaaaatatggacaaattaacttattaaaaccacaagaaatgtgcttctattttatgctctgattaagacttttaccaaaacatttcaagccaattaaaaatataattttcattctactgcccctgaaggatgggtggtgagctgagctctgaaggatttcacaggaggcacctctcagcctccacacgttctcatgcagcaggtggtaagcaagatctgaaaataattgccggatagaatgtttacaaagaaaatctcatgaatgagttaagttgggtttctattgaagggtactgattttattttca

SEQ ID NO: 497894 - DNA, 627 bp, Homo sapiens
ctgtgaaattagcctgcatgcccgcacattagcgcactccgagtaggaggggcagatgtggcagcaggatcaggtaccatcgtccccttcctggcatatgcctccttctttaaagcttatacatgagactgaaattttcccataattacctcaccacaaaggtgagtttgtttggaaagtttcagcaaagcctgcttgtctgtcttgctattttgcaagactaaaaaaggacaatggagatgaagaaaatgtgcatgtgaataactggcaggagccttcctttaagtcaaaaccrtgcaggggtgcagaattcagagagaaaaatatggacaaattaacttattaaaaccacaagaaatgtgcttctattttatgctctgattaagacttttaccaaaacatttcaagccaattaaaaatataattttcattctactgcccctgaaggatgggtggtgagctgagctctgaaggatttcacaggaggcacctctcagcctccacacgttctcatgcagcaggtggtaagcaagatctgaaaataattgccggatagaatgtttacaaagaaaatctcatgaatgagttaagttgggtttctattgaagggtactgattttattttca

SEQ ID NO: 497895 - DNA, 679 bp, Homo sapiens
gaaattagcctgcatgcccgcacattagcgcactccgagtaggaggggcagatgtggcagcaggatcaggtaccatcgtccccttcctggcatatgcctccttctttaaagcttatacatgagactgaaattttcccataattacctcaccacaaaggtgagtttgtttggaaagtttcagcaaagcctgcttgtctgtcttgctattttgcaagactaaaaaaggacaatggagatgaagaaaatgtgcatgtgaataactggcaggagccttcctttaagtcaaaaccgtgcaggggtgcagaattcagagagaaaaatatggacaaattaacttattaaaaccacaagaaatgtgcttctattttatgctctgattaagacttttaccaaaacatttcaagccaattaaaaatrtaattttcattctactgcccctgaaggatgggtggtgagctgagctctgaaggatttcacaggaggcacctctcagcctccacacgttctcatgcagcaggtggtaagcaagatctgaaaataattgccggatagaatgtttacaaagaaaatctcatgaatgagttaagttgggtttctattgaagggtactgattttattttcattgttcttggagagcttctggggggatgagatgaggttttaaagatggtgctgctt

SEQ ID NO: 497896 - DNA, 610 bp, Homo sapiens
gggtgtggtggttccctccctgggcctggctgctcttcacagtgtgaccctgggtaaaggtccgtttggtggctccgatgggaaaaaattcccaggcgggcatcacctccatggaggtgacagtatgaaagrgatgtgactgcccccagagcaagggtttccctagagggaccccaaaaagctggcaagaaggtggcaagggtgaggaggtggtggggagcccctgcctcagtcacaccaggtggaggggttcaaggcagctcccagcttctcctctgttgttaactgttttcccacccccccccccccgctttgccccctccgtcccatctgtccctatgctggaggcctgggagcaaggcctgaacccagtgagagaccactgtgggggagcctaggtcatggagaaactgtgggccagccagatgtctatggggtggggggtgaggctcaatttcctttaatccgccattcttctgatggggcaggctgcccatctaccaggaaacctgcagggtccttgcaccgggaggggatggatcaggggagacctggctgcttctctgccttctgctattccctttatggggggtggggggagagacagagg

SEQ ID NO: 497897 - DNA, 610 bp, Homo sapiens
gggtgtggtggttccctccctgggcctggctgctcttcacagtgtgaccctgggtaaaggtccgtttggtggctccgatgggaaaaaattcccaggcgggcatcacctccatggaggtgacagtatgaaagagatgtgactgcccccagagcaagggtttccctagagggaccccaaaaagctggcaagaaggtggcaagggtgaggaggtggtggggagcccctgcctcagtcacaccaggtggaggggttcaaggcagctcccagcttctcctctgttgttaactgttttcccacccccccccccccgctttgccccctccgtcccatctgtccctatgctggaggcctgggagcaaggcctgaacccagtgagagaccactgtgggggwgcctaggtcatggagaaactgtgggccagccagatgtctatggggtggggggtgaggctcaatttcctttaatccgccattcttctgatggggcaggctgcccatctaccaggaaacctgcagggtccttgcaccgggaggggatggatcaggggagacctggctgcttctctgccttctgctattccctttatggggggtggggggagagacagagg

SEQ ID NO: 497898 - DNA, 599 bp, Homo sapiens
aagtgctggcaagtatgtggaacaactgaaactgtatatgctactggtggccatgtaaaataatatgaaaagtagttgtgctttcttaaaaagtaaacagccacctaccatatgatgcaggcatcccatttctaactgtttactgaagaaaaaaaacaaagaaaatgtcaatacaaagatttttacaggaatggaatagtaactttttaacagctatggccatatctagaaaactcattaattattattattatattattattgtttgagatggagtctcaccctgtcgcccaggctggagtgcagtggagcgttcttggctcactgcaaccttmatctcgcaggttcaagcgattctcctgtctcagtgtctcagcctcccgagtagctgggattacaggcacccaccaccacacccggctaatttttttgtatttttagtagagacggggtttcaccatgttggtcaggctggtctcaaactcctgacctcaggtgattcgcccgccttggcctaggtctaggaatttgaaataacttagccaaagtcatacacattatggcgtaattggtacaaaacaggttggtagccatcagga

SEQ ID NO: 497899 - DNA, 531 bp, Homo sapiens
agctgaaagctaatgcatgagtaaatcaggttataaaattgatactatctctgaaagtcttcaaagattcaggtcatttcgacgaaaacttatttagcatctactaagtgccaaatactatgttaggaattagcaatcattagaagaataagacaatgttgctatcctaackgaacttagagactgtggaaaggatctcagtgtatttcaaaacagtgagaagagtgctatgaaagaaatattcccatagagccacagaagttcaggggtgtgtgtgtgtgtgtgtgtgtgtgtgtgtgttgaatacttagactgggagtgaagacaggcttttcagtggagatggtgcttgcattgatttttaaggattaatagccattaactaaggaaatataacttgaaattatcctaaagggattatcttaggtgttctaccacctcgatttttaaaaaccatttcatatatgaaattctatcttattttccagaacctttgaattaaatctctctaaggacagcctgacacttcaa

SEQ ID NO: 497900 - DNA, 627 bp, Homo sapiens
ctgaaagctaatgcatgagtaaatcaggttataaaattgatactatctctgaaagtcttcaaagattcaggtcatttcgacgaaaacttatttagcatctactaagtgccaaatactatgttaggaattagcaatcattagaagaataagacaatgttgctatcctaacggaacttagagactgtggaaaggatctcagtgtatttcaaaacagtgagaagagtgctatgaaagaaatattcccatagagccacagaagttcaggggtgtgtgtgtgtgtgtgtgtgtgtgtgtgtgttgaatacttagactgggagtgaagacaggcttttcagtggagatggtgcttgcattgatttttaaggattaatagccattaactaaggaaatataacttgaaattatcctaaagggattatcttaggtgttctaccacctcgatttttaaaaaccatttcatatatgaaattctatcttattttccagaacctttgaattaaatctctctwaggacagcctgacacttcaaagaataggatttaatcattcaacaaatgtggttaagaaattcttctgttagcttattttaataagagggatatccatttattcattgataagcaagta

SEQ ID NO: 497901 - DNA, 631 bp, Homo sapiens
aatctgactcccctttccctcccgccasgggctgtccagaggctccgctttgcctcagcctttagccccagagaggcagggtgtggagggtgggggctggcttcttgggtaagagatgcctcagggaagatctacctggctccctgctccttaaacctttccctcctgcccaggtccaccccttcctcttccctggtcacttggcacttcgacctcctgcccgtttcggaaaggggtgtgccctgaggtgactgaactttgcctgatcatgaccttgatcatgcacagggctgctggtggggtgaggccatcccacgcaactctggggtctgtgaagccaccaaggatcaaggaatggaagagctgcctgagtgtagagggagttcggtcaggcttcttaaacttggagacttggaaacagaaggccttgtaggccacataggttttcagagactcgcctggcagaggcctggagcgtcctgctgcgtggactgtgggcacccagccaccaggaggttgttgatctcattcttgctcactggtccctgccagactggtggtgcctctctactgtcgggcagccccacctctgtggtgccccatccacctacagccctcatgcctgggccca

SEQ ID NO: 497902 - DNA, 467 bp, Homo sapiens
ctgagccgcgagacccactatggaccagcctctcatttcctcatctttcaaatggggctgaagtggaaggatttsggctgccctcccaggcgatgccccgtgggtgtgcgagttgtttagctgcttttggggctgtaagctggggggtcagggcaggacagagactgcaggggggctgaggtggaagagtggggagggcaggagaggcctgagccaagcgcccagtggtcccaggagaccagccggggcagccacaggggtggtctggttctgtctgttgctgcccagcatgttgtaaccacctcctcagttcccccttcccccctcccaaataatcctatgccttggcagtggtgttcccaggttcgcttcttttctttggggcgtggagtcaagtgtccgcgtgggtgctggggcagccagagacaaggccactgagggattcaggccgcactgctctgggccat

SEQ ID NO: 497903 - DNA, 607 bp, Homo sapiens
ccagcaggcttgaatgcaaaactagtctttgaacattcctaggaactgatacaaatatctaggttgctgcccaaagcactgaaacaatcaacccctggcccttagccattaaaccgtcatacaaactccatacyctgattctcccactgtagacatacctactggattattgctttctttctctgtctttcatgaggatatgctgcagcaccatacaagtaagttctcctaatacatgctttggacagatcaccctagatcaccctgctgtttagtgcttctttctttggaatcccaactggccccatttccagagggtttggggcactcccttatgggaactcccctaatgctgcttttgagacaattccagtcataagtttgtcagaaagaaacagaatttgtccgtcttctgtggagaaagtacttcttaaatatcagtgactcctttggcttttgtaatgttagtttttccttttcagttttgtatctcactctttattattttttctgtatttcactcatggattttcctcctctccttaaaagaaaatgttcctccagagtctcctattgggctctcgcttttcttttctacatgcacatt

SEQ ID NO: 497904 - DNA, 607 bp, Homo sapiens
ccagcaggcttgaatgcaaaactagtctttgaacattcctaggaactgatacaaatatctaggttgctgcccaaagcactgaaacaatcaacccctggcccttagccattaaaccgtcatacaaactccatactctgattctcccactgtagacatacctactggattattgctttctttctctgtctttcatgaggatatgctgcagcaccatacaagtaagttctcctaatacatgctttggacagatcaccytagatcaccctgctgtttagtgcttctttctttggaatcccaactggccccatttccagagggtttggggcactcccttatgggaactcccctaatgctgcttttgagacaattccagtcataagtttgtcagaaagaaacagaatttgtccgtcttctgtggagaaagtacttcttaaatatcagtgactcctttggcttttgtaatgttagtttttccttttcagttttgtatctcactctttattattttttctgtatttcactcatggattttcctcctctccttaaaagaaaatgttcctccagagtctcctattgggctctcgcttttcttttctacatgcacatt

SEQ ID NO: 497905 - DNA, 636 bp, Homo sapiens
taatatatttttgctatgtagagactttcctcattactgagatacacaaattaaaatattgaacaatagtttcaaggtgtgtgcaggcgaacctaatggtaggacaaatatatacatatacacacgtatgcatatgtatacacacatatatatctttctctatatttttatatatatatacacactatatatatatggtaaaaaagataaagcaattgtacaaacatttatcatggctgaaaattaaatacggatgtttgttataatttttcaactttttatataattgaaattattcaatataaaaagttgctgttgcagtgtcggttctcctggaaggagacagcatgacagagttagwtttactagggagccatcagactgcaatgcaagtctggaaaagtctctctgtcagttccataaggagctccacggcaaagagccagttagagaagtccagcattgggtgtaaatgttccttgtgccactgcttttctcaggcattcattagttatggccctgcagagaaaagcttgactagactcaaaagtagaacaagaccttatgtaatacaacagcgctcaactaatcacaaagactctcaactatcagactctcaactaatcacaaaattta

SEQ ID NO: 497906 - DNA, 570 bp, Homo sapiens
tataataatgcaaactgatcctatatagacagggtttggctctgggtaacaagaaacactttagctattttaagcacaaacaaatttggttctgggaatctggtgtttacaaattgttggtaggattggagcagcaggtctcagagtcaamtttcatatctgttaaattaaataagcaggaggccattagcctgaggctggctctgtactttgagtttccacataacagacagctacctaacttagtatgtaaacaaaccaaaactgaactaggagtatatgtttcataacaaatggctgcatttcaatcacaaagagccaagcttcagccaatcaccagaagccaactgatcagaccatgcccaaataaggcagatgcctcagtgtagccagtcaggtgcttcctctactttgcttccattttcaacctttaaagcttgttactcttgctgctgagtggagctctctgaacattttcttgttttgagcactgctggaatcataagtcattgttcttggatcagataaactctgttcaatttaatttgtctaaagttttccttttaacag

SEQ ID NO: 497907 - DNA, 633 bp, Homo sapiens
  misc_feature (1)...(633): n = A,T,C or G
ggtgaggatgcaaacaacaggtacccactctcaatcatttcagccattgctggttggaatgcaaaagacttcagccactttggaatacaatttggcagttcattataaaattaargtagtctagataatatcaagactctgaaaagcggatgaagtgaaattattgggacaccttgaaaaggaaccaatatgttcataactgaccttcttactccaaccttgagatcagagagtgaatttcacttagctaattcaagcagggagggatttattatatagcattcggtagagtacagaatcttggaaaggctagaaaaagtgactcaggactgagcttccaagaaaaacttggtggaggtgctggagggaagcctanaacccaatacttcagtaacagtcagaaaacagcttccaccagtactgagccaaaaagggcagtgctctgctattcccagggacagtgggaaaaagccacatgcccaccttttctgtgacataattttgttagcaaccagtatctctgggtgtatttgagtggtataatctaaatcacatgataacataccagctccctagtggaaagggaaactgggaataaaagattggtttgtttatttgttttttctttgttag

SEQ ID NO: 497908 - DNA, 593 bp, Homo sapiens
ttgagaatctaatacatgtgatgaacctcaaccctataatatcaggacttaacacccaaaaccaaactatccccctaacaaatgtgcactcttctctcttgctctctctctgtctccctccctctctttctccctttttctcccccctcacttagtgggtgtstttttgtttcacttagttacttgcacatggcaaaaggctattaagcctaccattgttattatatgtaatgaagatgtgacctgtaaaagacagacaaaagtaagcagggggaaacacaagtattttgcttgagaaagaattttatcatgatattgggaagaaggaatgtatagaaggagaagtgtaaggaaacctacccaaataaagaatctccaagagaaaaaaagaggaatgctgtatctcagaaagacatgtgaccatacatttgttgttcctgagacaactcatagaactaatgaaaagaggtgcacactataaagaactgccatagatcaataccagtggaaggaaagggaagagaagacaaggatagaggaggacaaatatttgggcaggagaagttgagtggtgatataggtccaatatttga

SEQ ID NO: 497909 - DNA, 592 bp, Homo sapiens
gaggtaatctatggaggagctgagagtcgatggccatctactgacagtattcctaaaagctggagagctaagactttycttgaagggagacttgagtgggacactatgcccaacttactcccctctactaatctgctcttcagttagttgaagatggttattgagttccttagcaataatatcttctccaaagcaagcgttcacatcttttccatctctttgccttttatgttattcttggtcgtaagttctaaaacggtttttcccttcctcaatttagaagcctaagactaaacatggaattctaataatatgtaaaccgtaaaacacagcatggaaggctacaaaggacaaaacaaacagttagcattaatcaactttcttaagagatgtaagggaaaattcctaagtgaaaaaccggaaaaaacaattattttacttaagcctagcattttaaggacgtttgagttaaatagacaaaaaagatagggttccatataaaaaattaactatgtacttaatggcaatctgacccttgtaaaatccttcaacgaaattaagtagccttgttagcatctcattttaaatgtgt

SEQ ID NO: 497910 - DNA, 634 bp, Homo sapiens
actgctgtggtttggatgtcgcctctaaaattcatattgaaacttaattcccaatgtggcagtgttgagaggtggggcctttaagaggtgatcatgaaagctctgaatggattattccatttgtggcttaatggattagtgagttaatgaattaaaaacttatcataagaggagaactggtagctttaaaggatggggaagagagccctgagctagcatgttagcacattcggcccccttgccatgtgatgccctgcacctgctcagaaccccttgagtctccactagcaaaaaggttctcagcagggttagcccctcaaccttggactttgagcctcaaaactgtaaaaatacatttattttctacagaaattaccatttcagatattctattataagcaacaaaarttggattaatacaatgatccttttataatgtttttaccattctttccctcatcttcctatttatgcctctctgtaggcctttagaatgctttcagttatgcttctgacctctgacaacatacggttttgttggtgtttccttgtggaattcaaagatgttttcactatttcatgcattttttggtgggtttactgattccactacttcctcttcagttatttctgt

SEQ ID NO: 497911 - DNA, 634 bp, Homo sapiens
actgctgtggtttggatgtcgcctctaaaattcatattgaaacttaattcccaatgtggcagtgttgagaggtggggcctttaagaggtgatcatgaaagctctgaatggattattccatttgtggcttaatggattagtgagttaatgaattaaaaacttatcataagaggagaactggtagctttaaaggatggggaagagagccctgagctagcatgttagcacattcggcccccttgccatgtgatgccctgcacctgctcagaaccccttgagtctccactagcaaaaaggttctcagcagggttagcccctcaaccttggactttgagcctcaaaactgtaaaaatacatttattttctacagaaattaccatttcagatattctattataagcaacaaaaattggattaatacaatgatccttttataatgtttttaccattctttccctcatcttcctatttatgcctctctgtaggcctttagaatgctttcagttatgyttctgacctctgacaacatacggttttgttggtgtttccttgtggaattcaaagatgttttcactatttcatgcattttttggtgggtttactgattccactacttcctcttcagttatttctgt

SEQ ID NO: 497912 - DNA, 490 bp, Homo sapiens
acatgtaaacacaaattccacaagagaaagaagacaattagcttgaaggataatttctcaatagacacaagagaaacycaaaactattgggtttctacattcaaattgaggaaaataaatgatattcaatctcaaaatctgtatctagaaataatttaaaaatcagttgaataaagacatttttagataaattaaaaaacagaatttcccatcaatgagtctctcttaaaataatttccaaagaacagactctggaaagaagaaaattatcgcagaagaaaagcccaagatgagcagggaaatactgaatgaagaagttgagaaacatgttggtaaatttaaataaacattaactttataagataataataatgatgtctagcttgttcgagagacaaaaataaaatagaactaaaatattctgattactcatttaacctaaagaattagggtttatcttaaagtggtgtactattatgatacaatttgg

SEQ ID NO: 497913 - DNA, 490 bp, Homo sapiens
acatgtaaacacaaattccacaagagaaagaagacaattagcttgaaggataatttctcaatagacacaagagaaactcaaaactattgggtttctacrttcaaattgaggaaaataaatgatattcaatctcaaaatctgtatctagaaataatttaaaaatcagttgaataaagacatttttagataaattaaaaaacagaatttcccatcaatgagtctctcttaaaataatttccaaagaacagactctggaaagaagaaaattatcgcagaagaaaagcccaagatgagcagggaaatactgaatgaagaagttgagaaacatgttggtaaatttaaataaacattaactttataagataataataatgatgtctagcttgttcgagagacaaaaataaaatagaactaaaatattctgattactcatttaacctaaagaattagggtttatcttaaagtggtgtactattatgatacaatttgg

SEQ ID NO: 497914 - DNA, 582 bp, Homo sapiens
aagaatgtatatgaaaatatagaaagagggaatatatctgatccataaagctcacttatataagccattattttaacagtcactttcatattctatgtaaaagaagtaggaacagtacttaactactctccttgtggtaaaaaacaatagttgaatacatatctacacaactgccacacaatttttaaaaaagcctttaaaactgtaaaaacaacagcagaaaaggaagtggacacttcaaggaaatttattaatattccctccacgttattcagtarctataatatatatatatatatatagtaactatgatatatatatacagtaatatatatacagtgactataatatatatagaatgattcctattatttcatagctttcctctataatatcatttaaaataagcttatattagtgagatcgaaataatctattacaaataatattaaatatattatttttatatatttaaatataatatatataatatatcaaatatataatatattaaatattaaatatatacacacatatatatatggatgaatgaagaaaatgcagaatattattggaatagaa

SEQ ID NO: 497915 - DNA, 641 bp, Homo sapiens
tacatcaattaaattccaccatttttcctcttagtatccatgggtgagcctacttgcctaactcctgaaatcgtatcagaaatctgctgattaccaggttcagatgctttctatctatctgagactgcctttccctggtatgggctacaaccaattattattttaaagagcgactttaacaatcacctgatgggcacctgacattcctcagtatgggggcactctcctgcccttgcatgcctgcctagctacctgacatttcccccctcaagagtstgtgacccaattatttgggaaaatagacagagatcagtcttctgtaactgcttcctgctgacaaaggggcagtggcagttgttccatgggtcttgacctcttgatagctgtcagggcagtgtggctctgtgagttggtgaaagcggtattcagccaggttcaagggagacaggggcagaatttcacctctgttgtgtcccactgctgggtattataggggtcctatatagaagggtggctcttaaatattgagaggccagtatccctcactgaggattatctggagcttgatggcctaaagatgcgaagagacaaatcacattattagatttagaagacacggaccaaaaaggagcaagaataag

SEQ ID NO: 497916 - DNA, 641 bp, Homo sapiens
tacatcaattaaattccaccatttttcctcttagtatccatgggtgagcctacttgcctaactcctgaaatcgtatcagaaatctgctgattaccaggttcagatgctttctatctatctgagactgcctttccctggtatgggctacaaccaattattattttaaagagcgactttaacaatcacctgatgggcacctgacattcctcagtatgggggcactctcctgcccttgcatgcctgcctagctacctgacatttcccccctcaagagtgtgtgacccaattatttgggaaaatagacagagatcagtcttctgtaactgcttcctgctgacaaaggggcagtggcagttgttccatgggtcttgacctcttgatagctgtcagggcagtgtggctctgtgagttggtgaaagcggtattcagccaggttcaagggagacaggggcagaatttcacctctgttgtgtcccactgctgggtattmtaggggtcctatatagaagggtggctcttaaatattgagaggccagtatccctcactgaggattatctggagcttgatggcctaaagatgcgaagagacaaatcacattattagatttagaagacacggaccaaaaaggagcaagaataag

SEQ ID NO: 497917 - DNA, 641 bp, Homo sapiens
tacatcaattaaattccaccatttttcctcttagtatccatgggtgagcctacttgcctaactcctgaaatcgtatcagaaatctgctgattaccaggttcagatgctttctatctatctgagactgcctttccctggtatgggctacaaccaattattattttaaagagcgactttaacaatcacctgatgggcacctgacattcctcagtatgggggcactctcctgcccttgcatgcctgcctagctacctgacatttcccccctcaagagtgtgtgacccaattatttgggaaaatagacagagatcagtcttctgtaactgcttcctgctgacaaaggggcagtggcagttgttccatgggtcttgacctcttgatagctgtcagggcagtgtggctctgtgagttggtgaaagcggtattcagccaggttcaagggagacaggggcagaatttcacctctgttgtgtcccactgctgggtattataggggtcctmtatagaagggtggctcttaaatattgagaggccagtatccctcactgaggattatctggagcttgatggcctaaagatgcgaagagacaaatcacattattagatttagaagacacggaccaaaaaggagcaagaataag

SEQ ID NO: 497918 - DNA, 651 bp, Homo sapiens
  misc_feature (1)...(651): n = A,T,C or G
atactaggttttattacaaagtattgtaggttttattgcaaagatgttatgtctaatgtatctattttaagcatgatgcttgctgtaggtttttgactgataaattttattaaaacaaggaaaacattctctgtgcctatgttaataatacacagcatgaatagaacatagtctgtcatgccatataatatgcatgntatgtgcatgtatatattcaaaccattcaaacatatgtgcatgtatgtatacatcatattaattaatgtttcatgatatatatgacacattttcatacacactgtatatacttatatttactcatacacaccgtatatacatatatatacctatatattcacttatataggtatatatataagtaaaatctaattgtatataataattctatgtgttagcatattgtatacagtttcctaatactatatagtgctttacagttttaaattgtcctaaacaaaaagaayagtatatttttcttttcataaactctctttgcccagttgtgatatctcaattatactagacttataaaatgatgtgggtatgttttatttccccaatatctgataaagtttatgtaagattagaatgataatttccttggatgtactatagaacccatctgtataa

SEQ ID NO: 497919 - DNA, 457 bp, Homo sapiens
tgctatttgttttcacccttttccaggcctagtcatcatggtaaagctcaaggccaacaaaagacaaatgcagaggcgaggctgccactggacaaaatgtgagtgggcagcccagagtggaacacagagggagctgaggggtgaaggaggcagctcatcacttgtgagctatgggattctggaccagtagcttaaccttgtggagctcagtctctttatttgtaaaatgggagactggactagattaggggtctcacccttccccatcaggaaaggtaatcagcctttcctgattaccccatttattgttctacttccctgtcaacactccatcttttactccctagccatgactttttattgggcataattcttattcagtacttacaggtttacattttatcagcaactgtagaatttctgtcctggcrtgtgtacattgcagatcattccttct

SEQ ID NO: 497920 - DNA, 519 bp, Homo sapiens
ggtgcgggatataatctcctggtgtgccgtttgctaagaccattggaaaagagcagtattagcgtgggagtgacccgattttccaggtgccatctgtcacccctttctttgactaggaaagggaattccctgacctcttgagcttcccaggtgaagcgatgccttgccctgctttggctcacgctcggtgcactgcacccactgtcctgcacctactttttgacactccccagtgagatgagcccggtaccttagttggaaatgcagaaatcacccatcttctgcgttgctcacgatgggagctgtagaytggagctgttcctattcggccatcttggctccaccccaggcacattactgttaatgtacccatcacagttgctatgttactcagttgtcaccattgtttaacctgcattcatttgcatgtacatgggtgtgtgcatgtgtgcctaattctatgcaattttatcccctatataaatttgtataaccaccattacaatcaagatacagctg

SEQ ID NO: 497921 - DNA, 316 bp, Homo sapiens
gctggaagaactagtttgaacacatctggaggccaagtatggattagagaagcaggtttaatattttttcttaccaagggaaattagctactggaaattgctcaaattattactgtcacaatcttctgctaccagggtaagattttcagagaatkgttctcaaggagatgaagtctgatcagtcttgatgagattactttgtacggatggccttattctaagattttaaaaacaactgtgggcatgaaatatcatggatgattgtagatttgtgtgtatggggaacaggaaggttggtggggagggaatcagttgt

SEQ ID NO: 497922 - DNA, 626 bp, Homo sapiens
gttcacttcagaaaaagcaggatggcagcccacttctgaatgcgcatttttctctaggctttgacctgacctgaatattgtttctcattgaatttccttttatttatttctttttagatatcaactttccttgaacttttcctgtcatttgtgttgcagttggcagaactacagaacttctcccttctgcaaaaaatgtgttttttttctttaaccatttctaagtttttccctgtgttgtctttatctcccccacttctatattttacacacacacctgtgcctcattatatgamgacccaggacaaattcatcaggtttgtttattccaagaagtgtgaaggcctcaggtagccccctaaaaaatccctccatgactcacctgacagcagaaatttgtcctatgaaactttggagctggattagaaaatatgaccctttactctcttcattctggccatggtcatagaatctgtgtttaatcctaaacacattctcaattcacacttgattcataacctgcttttttcttctctttgtttacatgttggcaaaacataaggaatgtaaaaatataaaaactattatgaattatgagccctgctcacaaggattgtagaaaaact

SEQ ID NO: 497923 - DNA, 626 bp, Homo sapiens
gttcacttcagaaaaagcaggatggcagcccacttctgaatgcgcatttttctctaggctttgacctgacctgaatattgtttctcattgaatttccttttatttatttctttttagatatcaactttccttgaacttttcctgtcatttgtgttgcagttggcagaactacagaacttctcccttctgcaaaaaatgtgttttttttctttaaccatttctaagtttttccctgtgttgtctttatctcccccacttctatattttacacacacacctgtgcctcattatatgacgacccaggacaaattcatcaggtttgtttattccaagaagtgtgaaggccycaggtagccccctaaaaaatccctccatgactcacctgacagcagaaatttgtcctatgaaactttggagctggattagaaaatatgaccctttactctcttcattctggccatggtcatagaatctgtgtttaatcctaaacacattctcaattcacacttgattcataacctgcttttttcttctctttgtttacatgttggcaaaacataaggaatgtaaaaatataaaaactattatgaattatgagccctgctcacaaggattgtagaaaaact

SEQ ID NO: 497924 - DNA, 402 bp, Homo sapiens
tctggcagcaatgctcacttgcctgtcacacacctcctgctgtgyggcctagttcctaacaggccatgaaccagtacaagtctgtggccccaggagttggggccccctggtttaaatgatagaaagaagctatatttagaaaagactggagatggtattctaataagaggagttataaaatttttatgaattactccatggcagggtgaagagcagactgccatcatcccctagtgaatgctatggaatccatacaatctccccaattgcaaagaggccaactaatctttttattattcatttatttttatttttgtattatactttaagttctagggtacatgtgcacaacttgcaggtttgttatatatgtatacacgtgccatgttggtgtgcttcacc

SEQ ID NO: 497925 - DNA, 467 bp, Homo sapiens
tcacacagtgggctgttagaaaagctagcagttagtgaaatctattttcagtttcyacccacctttttttttttttttacttaagaatgtaattaaagagaaaaatgtcatttttatcctgaagtctatttttaaactcttaatttggcacatttactgttctcaaagttgtttatctcaatgtcgtttttctttcttgacattaaaatgcaaagttaatgttgattgcatagcggtcatttcacttatccactcaccgctatattgtgtctgtgtcctaaattccctgtaatgtttcagatctttctctgttcttcaattttgtttaaatttacaatggtgatgggtaaatgagcctgttttaaaatgaacagttgcaacagttgcaaggactaagtcttgctgcaatataagggcactgtcatatctcacacatttgcttttttaaaaaagtgaaatatctgtag

SEQ ID NO: 497926 - DNA, 467 bp, Homo sapiens
tcacacagtgggctgttagaaaagctagcagttagtgaaatctattttcagtttccacccacctttttttttttttttacttaagaatgtaattaaagagaaaaatgtcatttttatcctgaagtctatttttaaactcttaatttggsacatttactgttctcaaagttgtttatctcaatgtcgtttttctttcttgacattaaaatgcaaagttaatgttgattgcatagcggtcatttcacttatccactcaccgctatattgtgtctgtgtcctaaattccctgtaatgtttcagatctttctctgttcttcaattttgtttaaatttacaatggtgatgggtaaatgagcctgttttaaaatgaacagttgcaacagttgcaaggactaagtcttgctgcaatataagggcactgtcatatctcacacatttgcttttttaaaaaagtgaaatatctgtag

SEQ ID NO: 497927 - DNA, 467 bp, Homo sapiens
tcacacagtgggctgttagaaaagctagcagttagtgaaatctattttcagtttccacccacctttttttttttttttacttaagaatgtaattaaagagaaaaatgtcatttttatcctgaagtctatttttaaactcttaatttggcacatttactgttctcaaagttgtttatctcaatgtcgtttttctttcttgacattaaaatgcaaagttaatgttgattgcatagcggtcatttcacttatccactcaccgctatattgtgtctgtgtcctaaattccctgtaatgtttcagatctttctctgttcttcaattttgtttaaatttacaatggtgatgggtaaatgagcctgttttaaaatgaacagttgcaacagttgcaaggactaagtcttgctgcaatataagggcactgtcatakctcacacatttgcttttttaaaaaagtgaaatatctgtag

SEQ ID NO: 497928 - DNA, 356 bp, Homo sapiens
tttacccatcaccattgtaaatttaaacaaaattgaagaacagagaaagatctgaaacattacagggaatttaggacacagacacaatagagcggtgagtggataagtgaaatgaccrctatgcaatcaacattaactttgcattttaatgtcaagaaagaaaaacgacattgagataaacaactttgagaacagtaaatgtcccaaattaagagtttaaaaatagacttcaggataaaaatgacatttttctctttaattacattcttaagtaaaaaaaaaaaaaaaggtaggtagaaactgaaaatagatttcactaactgctagcttttctaacagcccagtgtgtgaaaatc

SEQ ID NO: 497929 - DNA, 462 bp, Homo sapiens
agatattttaccttcttaaagaagcaaatgtctgagctatgacattgcccttttattgcagcaagacttagtccttgcaactgttgcaactgttcattttaaaacaggctcatttacccatcaccattgtaaatttaaacaaaattgaagaacagagaaagatctgaaacattacagggaatttaggacacagacacaatagagcggtgagtggataagtgaaatgaccgctatgcaatcaacattaactttgcattttaatgtcaagaaagaaaaacgacattgagataaacaactttgagaacagtaaatgtcccaaattaagagtttaaaaatagacttcaggataaaaatgacatttttctctttaattacattcttaagtaaaaaaaaaaaaaaagrtaggtagaaactgaaaatagatttcactaactgctagcttttctaacagcccagtgtgtg

SEQ ID NO: 497930 - DNA, 663 bp, Homo sapiens
cctacaggtttgagctgaattgtgctgggttaaacattatggggagagatggtgcataatttagcttctgtagaaattttatatrataaacttacctgcatagtagagcgaggaatttagaagctacctgacattgtatagattattgaaactttttgagcctcaggttgtcttgaagtggtaagattagtaatttttacctcatctatagtttatgaggattaaataagatggtgtgtgtaatatactgagggtgttacttggcaaaaaggaaaagtcagttctcatatctacccaaacatttgagttttctgagagaaaactctgtgaaattcttcacagagcaacatccctgaatcatgaccatcataaagcacataatgacatttcggtcaacaatggatctcatatatgatggtgatcccatacccttattgctggggtgatcagactcaacaccaggtcctgggggcaacaaagtctggcagagtcaaaggattgagaaaaagacagtttgagagagaaaggtgggaccagggggccatcgcgattgtggaggctgcgaaggtcccaggctctgggaacccgcgctatttattggtgatccaataaagaaacaggtggtgagaatgtggaggtcaaaacgtcacgttgcactaagca

SEQ ID NO: 497931 - DNA, 660 bp, Homo sapiens
tatggcagaaattcacaaataattgttttttccatagaatagaaggattataatgttagtctttgataacatcattcttacactcttgtgtttctaagtaccttcttaagtgaaaggaaaagcagatttatggcaacacatggggaaaactcagcacccacaatctctgtaatcagtgtaaaagccttagtgagtgtggttagggctgtactgatgtacacttaactgttgggacaattacgaatcattgccgtgcttgaacatgcaactttataatgacttccatytcctctctaaatttattcatagataaatttttaataatgatagaagcaaggatagatgaagaataacaaatcaaaagacaagattattttagggcaacattcacatccacattaacaatggaaaaactggtactttgtatgtgctgtaaatataaacaatatattacacagtaatagcaggtaatcttgagttctttatgaattccatatcatactatttaactcattcaacaacttttacagataaggaaattgagaagtaggaagtttaccaatgatgctcccttaagaggacacagggtctctctgaacataaggctcttctaaggcttcctccctgaattctgtttcattcccagatcccagaatgagc

SEQ ID NO: 497932 - DNA, 612 bp, Homo sapiens
tgatctgtgcttttctccatccaaagagactactgacatctacttaggctccactttttaaaccacagcttgaaaagtggctccaggcagaatgcagtgactgtgaagctaactttctgagttatcgttaagaatcacagtacggtcttggaatgttgtccaatgtctaaaatacatgctttatataatttgtctagtttcataatctttgtggaatagagtaaaccttctatttggtcatttctagaatcaaacattacaaaayttttaacagctaccactcaatcaccttccctaaacactcactagggatttagataatatgtgaaaagtttttaaaatgcaagaaagaaatagaaagaatttttattaaagaaaagtgtaacccaataattattttgtttcaatcttaattatcagtatttaaaatataattaatatttaatactattgcacttttgactttaacgtttattttactcttgtgaaatgccacagaacagagaaggaagtgtatttcagggtcttctcaaagatgcatatggcctatttttaaagaacaggtacacacaactgatataaggaaacaacaagacaggaaaagatataaag

SEQ ID NO: 497933 - DNA, 625 bp, Homo sapiens
ggaagaaggaaaggggacaggtggccttggcctgcttcagtgcccactgtgtggcagggcctgtgcttcgtctgcatcagctcatttaatctgcatatgtagcagggcctgtgctaggggcttcacccacatttgctcayttagtcttcacaatgatcccatgagatggggaaactgagacccagagcctataaggatggtgaggaggcaacatcagggacctcagggagctttaggtgttcctgcatgaggcaagggccaattgatgtgtggcaaatagaagtggccactgcacttgaaggggaggtgaatgaacctaaaaaaccactttcaacaaggtatctccctgcagagcggaggtaatgatgcaaagaaaagagagaaggaaggaggcccattgggagaaagaccagcaggacagaaacaagcagcagagccgaaatgaagaaagggaacctcactctggatgaaggaagatggcacgaaggatggagagcaggctctgaaacgctggggaaacaggaggggaaagctagaccttctgtaggcaaagcacactgaccatgaccacgatgcaaatgtcaactaattaaaaagagactctcagaaccagtgggcacaagga

SEQ ID NO: 497934 - DNA, 587 bp, Homo sapiens
tgaagccaaaccccatgctagaagtcagagaaaaggcagggactgccgttggctgtcagacatatcttcatggagggagtggagatttattgagtgttaaatgtcagtatggatgtaataaagatagtacactgtaagtaatcagcactttccaggtgaggaaccatttttaataagttgtcaacctgtctagtactatgaattattttttargtagaagaagatgaagaaaacccatttggagtgatttaactttcagatctactcctcatctctgccccttcttgacaggggtgcaagtgtcctggggtgcccaaagaccttggggcttacacacccttcatttcacagaaacccaatattccttttgttttatttcctaagatggggatagtcctgatgcagcatgggcttctgactttcagagcacattgtgacaggcagagaagtttgaggaaatgaatacagggaagaaggcaagtagggcgggaggtacaaggacctgggatggtgccaagcctctgacaagggtggcccaggtgccagcaggcctactcgctcctcaaagatatatgcataatttcaga

SEQ ID NO: 497935 - DNA, 432 bp, Homo sapiens
tgccccggccatgccttcactggctttgtgctcctacctgctggcacaggactgcagccccctttctactccctctgaaagatttggggaatctctagtaggcagggagttttctgacctcacgacgacccactgctaatgccctattcgttcattttactggtattggttaagcacctactaggcgccagatgctgttctgagtctgagggactcaacagagaacaaagcaaatgcctgacctcacagagccacgttccagtcagggaaacaaacaacaagcaaaatgaatggagactatattagtctgttctcatgctgctaagaaagacgtaagtgagactrggtaatttataaagaaaagaaggcttaatggactcacagttccacatgactgggaggcctcacaatcatggtggaaggtgaaagagg

SEQ ID NO: 497936 - DNA, 496 bp, Homo sapiens
tgccaagagcaaagagctcattaaaagtcataagaagatgaaagctgcacagtatctgagatctgatcttgtggatgtggctatgragtacaaggctgaagtgccaccaaccccagtcccttacccatggtaaccgtaatgaataaattgtggcatacttctccactgagactggacagagcctcagaattcttcccaacacagtgcttcagaaggatattaacaagcaaatggatttcacacaggagtgtaaactcatttgccatccctgtcatagactatggagcagtcatgagtcttggagtagaagagattatcaaactacatcccattgctttgtctactatgtgtccctattttaacccaatttacaactctcagttgtgtctcaagtactgggcatcatttgaggcactggctagaaaatgcaaaatcacagaatacaaaaagtagaggggacctaagacaacattgagtccagctcccccatttggca

SEQ ID NO: 497937 - DNA, 342 bp, Homo sapiens
agtgacagtgaactgaggcttggaggatgagtcagggaggcaggcagggttgggtacgtcattgcatgtgcagaagtctgaggtgaggggaaaaagacccatgtgagaggaagtaaaaaaaatagcgtggctacagcatagaggctgtagcagagagtgtattggggagcacaaggtcagggctggaggggtggtggggggcaagcccagatcaggggctgtgccaggggcatggtgcaggagaggcagtggtccagcttacaccttcaatcactccagttgctsagtggagaagagcttggagaaggaatatgggaagagggaggtcaggtgtttggagtc

SEQ ID NO: 497938 - DNA, 610 bp, Homo sapiens
ccacccaaggaggggtggggcatttgggctttcccagggagctgggagacccttgaaggcaccaggcgagtaaagtgtttgcaggcaggaataagcttctcattaataatacatttggtgcataattgtttattcaaatcagcttgaaatagtaagtgtccctctcctatcctggccataaatccaaagaaaatgctgtttaaatagtcacaagtggcaagcagggacttcaactrtaaaaaatggctgtgttgcagccttcatttgggcctgttatggcagcatccaggccaggctgtgtgcacgccctgctgctccttcctgctgaagtgcccttgtctcccactccccgggggcacaggttggcactgtggagtctggggaggagagcagaccccagtgacaacaggcatattgataaaagggtggccacctacttgccccagctacttatggtcattgccagagcctgtgtctcccaggcccaggcaaagttacacacagcaggtggccctgtgccctccagccctgcagggaggtgtgcatccgccactctattcctggctggctgcagccacttgggccttctgtctggtccctttccccccag

SEQ ID NO: 497939 - DNA, 610 bp, Homo sapiens
ccacccaaggaggggtggggcatttgggctttcccagggagctgggagacccttgaaggcaccaggcgagtaaagtgtttgcaggcaggaataagcttctcattaataatacatttggtgcataattgtttattcaaatcagcttgaaatagtaagtgtccctctcctatcctggccataaatccaaagaaaatgctgtttaaatagtcacaagtggcaagcagggacttcaactataaaaaatggctgtgttgcagccttcatttgggcctgttatggcagcatccaggccaggctgtgtgcacgccctgctgctccttcctgctgaagtgcccttgtctcccactccccgggggcacaggttggcactgtggagtctggggaggagagcagaccccagtgacaacaggcatattgataaaagggtggccacctacttgccccagctacttatggtcattgccagagcctgtgtctcccaggcccaggcaaagttacacacagcaggtggccctgtgccctccagccctgcagggaggtstgcatccgccactctattcctggctggctgcagccacttgggccttctgtctggtccctttccccccag

SEQ ID NO: 497940 - DNA, 507 bp, Homo sapiens
cagagctcagtacttacataagctttccatgtatgcatagttctgtccttctaaatataaagcatgcctatgggttcagaattacatctttatggttacatgtaatatataccatgctatatttgcttattttttattgtttcttttccccacccttctatgggttccaaaaaagatttttatccatagcacaaagactagttttaaggraatagtagacactcaataagtactgttcaaagaatgactaactgaatgaacctcaaatcccccatcagacacttgtgaagaaattcttatttatttatttatttatttatttaggacagagttttgctctttcacccaggctggagtgcaatggcacgatctcggcccactgcaacctccacctcccgggttcaagtgattctcctgccttagcctcccaagtagctagaattacaggcaagcgccaccacacccagctaattgtgtagttttagtagagacggggtttcgccatgt

SEQ ID NO: 497941 - DNA, 600 bp, Homo sapiens
aaaacaatggaaaatccctagtaacagcttgaatcactcactagcaggaggaaaatgtgactcgtttcttttcctctttagcttttgttgatttttttcataatgagctcagaaagagggaaagatcaatattcatgttgagttggtatccatcatagtgatattcagtgattataactctccaattctcactaggacaaatataaccacgcaaactggctaactgcacttgctggcatggttcctttggaaactcctggatttctctgaattacaaacagaaggagagtwatagattttgtctctttaattttctgtctcttgaaatctcagatcacaaaaattgagtctttcttaactggtgatttcttattcgtcaatgactccttaaaagatatgcagaaagtaatggccctctaacccttcacctttgtaagctctttaatcctgaggggatggacttcctgatttctgttctctcagattctaaggaggaaaagactagctgttgtctctcaagtctacctattgctgtcctacagagcaaggacccctcttgttctccagctcctcaggaataggattcttggttccctaact

SEQ ID NO: 497942 - DNA, 663 bp, Homo sapiens
caaaaagttatctatatggagatctcaaaatgaattaacaaattaaatcctttgacattgtatgagatcccattagggttcattgttacagttttctttaatgtttctaaaatagaaatgttgtcctgggcagagcagtgtaatgtacttgctttggcatcaaatgccacattttttttttttttgagacagcgtcttgctctgtcacctaggctggagtgagtgtgcagtggtgcaatcgtagctcactgtagcctcgaactcctgggcttaagcaatcctcccacctcagcctcctgagtagctgggactacaggtcccaggtgcccagctatttttaaaattttttgtagagacaagtcttgctatgttgcccwggctgatcttaaactcctagcctcaagaaatccttcagacttgtcctcctagagtgttgggattacaggtgtgagcctccacaccaggcattgtttctattttaactttgctacttacgagaagtcttaatttgaccaacaactaatgtaagctctagtttccccatatgtaaaaagaagataatgcctaaattgcagggtttattgggagaattaataagaacacgcctaggccaggcacaatggctcatgcctgtaatcccagcactttgggaggccaaggcag

SEQ ID NO: 497943 - DNA, 491 bp, Homo sapiens
tctatttcatttttttatagcttatagtgactcattaaaatggatttccacgaatgcaatgcaacacacagtttgaagtccactggaaaatcttttaaaactgttattataaaatgaatttagtaaccttttcaaaattttactagtrtagtttctgtggtttttaagaatacaaatattttgccttctggtcttttttttcacacaagtatatggcagattcctataaatattttaatagatcagcagtttccaatgccatgtttcggtgatgatattttaccagagatagtctgtaatgaaaaattgagacaaatgatgacaatgtaatttgcagacatgtatacttatttataataaatttgtagacatgtatatttagttagttattcaacaaatattcagtgccttttatatcttaagaatggttcatgttaattggaggcaaacaagaaaggcaaagttactgcttagttgaaatttacattcta

SEQ ID NO: 497944 - DNA, 491 bp, Homo sapiens
tctatttcatttttttatagcttatagtgactcattaaaatggatttccacgaatgcaatgcaacacacagtttgaagtccactggaaaatcttttaaaactgttattataaaatgaatttagtaaccttttcaaaattttactagtgtagtttctgtggtttttaagaatacaaatattttgccttctggtcttttttttcacacaagtatatggcagattcctataaatattttaatagatcagcagtttccaatgccatgtttcggtgatgatattttaccagagatagtctgtaatgaaaaattgagacaaatgatgacaatgtaatttgcagacatgtatacttatttataataaatttgtagacatgtatatttagttagttattcaacaaatattcagtgccttttatatcttaagaatggttcatgwtaattggaggcaaacaagaaaggcaaagttactgcttagttgaaatttacattcta

SEQ ID NO: 497945 - DNA, 639 bp, Homo sapiens
catccatgcatttctaggaagaaattaggtgcattataaataacgagtcctctgaaaatgccgaagtgtcttaatcttttgaaaaaaattatctcaaatttacattcacaaggagccatgtcttttgccactaactgaaactcagtaacaacactgaagtatgagcttgggccttgtctgacaataaaaaggaaatgctaggtcccagggaccacttcaagatgtgcttgttcctttaaagcagggagttgtcacatccaatttttaacacatatgtatattttaacacatatgcatattttaacacacatatatatttctgattatactgtaaaactggtaaattatttttaaaamatcataaggcccccaaatcccagagaaagttgtttctattacaattttagtctatttgtctcttttaagtttctcttccctctgagcatatgtatctctaatgcatgtctgcttatgtaggcatatttatacatacaccctttcttttacaaaactgatatcaatttttgtattttaaataaaatacaaatgttttacattctttctaaacaagcagacactacttttggcacctcccaatgctggccaggtcatgttaactacccttaatcagcttttttt

SEQ ID NO: 497946 - DNA, 522 bp, Homo sapiens
gtttgactaattgggtcacgggcctttgacattttgataggctgagggagcaaggggtactctggcgatatctttcttcccttgcycaggggttcttaaacctctgctttggtggacgcttaggaaagggagaggtttctgtagtggaaactgctgattccttctctacttttctttgtatcctggagggtttcctacatgtcaaaaaatgtgaaaagccacagacattaaacttggacagacagtggtatacaaacttttgtttagtgtagttaataatctttgccatcccactaatatttttcaattggcaagtacttctatggcacacaatctaaacaacttgttagatgtggggcaaagaagtaactcaacatacaaaatttgaggaccttgtactatgtgtcaaactagtggttaactctatctaagcaagagttcttaactttttctaagctatgtttttgaggactagtaaaaccctcagctgtttccccaggacaatgcacacatgcttccaat

SEQ ID NO: 497947 - DNA, 594 bp, Homo sapiens
agaaagtattctagtgaagcctgaacggcgcaaacacaccctgtgattatcaccaactgggaactgtggaagccccttaatgccaaagcatgaaaaagcattttagcaacacatgccagctacttgttccaagctatttcacaaattcaaagagggcagtttacaaaaagcatagtacatacagtgtttgtttcwatgtcatttattcttttagatatttatttgagctcaaacccactgtgcttattggatatagcagaagcagggaagggacagttgtaacctttccttctcaaagccattataaggtcagttttaccaaaccagttgtctcttataagaataattgacttgaatggttttaccgactttaaaaaatttaacataatggcaggacccccaaacttaccttgacgaacactctattccagtggagaacatcctatatgccagctggcttgggtgtgttaaactgtataccattattacaatgcctagttctttataagaccaaataaagatcctggttctaaattatcataggtaaatatatggaccatgcagcatgaagcctgtatgtagttataaataaga

SEQ ID NO: 497948 - DNA, 594 bp, Homo sapiens
agaaagtattctagtgaagcctgaacggcgcaaacacaccctgtgattatcaccaactgggaactgtggaagccccttaatgccaaagcatgaaaaagcattttagcaacacatgccagctacttgttccaagctatttcacaaattcaaagagggcagtttacaaaaagcatagtacatacagtgtttgtttctatgtcatttattcttttagatatttatttgagctcaaacccactgtgcttattggatatagcagaagcarggaagggacagttgtaacctttccttctcaaagccattataaggtcagttttaccaaaccagttgtctcttataagaataattgacttgaatggttttaccgactttaaaaaatttaacataatggcaggacccccaaacttaccttgacgaacactctattccagtggagaacatcctatatgccagctggcttgggtgtgttaaactgtataccattattacaatgcctagttctttataagaccaaataaagatcctggttctaaattatcataggtaaatatatggaccatgcagcatgaagcctgtatgtagttataaataaga

SEQ ID NO: 497949 - DNA, 627 bp, Homo sapiens
gtaacagaaacaacagttgtcctcttttcagaatgtccttatacagtgattaagtaaaacatcatatttaaacttccaagcacagacccaagcacataatactcagaagctgttaactattgctacttcataaagagaattaccaaagcagaagagactggaaattaaagaaatgtaatttagagaataagagacaagatacaatgaaaattaaagatggattaatacaaagaaggatgaaacatatctttcttagtagaaaaatatgaagaaacaaaggagtaaatgagctatccttatatgtgccaattttcaggtactatttagatatttaaatataaatagcccacaaacatttaaaatgtgatattggaataaggagcaagcttagaactctcaatatagatatagaactaagctgtttaagggcagatgccatatgaagatgtgaaggcaaaaaaaaaaagttaagattaaaaactgaaccctaatgctttgtgtttatatctatatttaggaaatagaacaagcaataaagcaaatasagaaggagaactagctatgttgaaaataatccaatgtctaacacaccctctggctcataggatgttcacaaataaatactga

SEQ ID NO: 497950 - DNA, 570 bp, Homo sapiens
ccacaattagcagatgagtaatgaaatggtaatggcagccagcagtggcctctgctctcccaaggcccacgcccctgcctcctgtgagtgccagcttgggactgagaccagcagagcacctggtacccagaggtacctggagacacaccactgggccctcgcttggcaaagtgcatcttcctgttcccccttcctgaaatatgagctgtctttgatattcmtggggagctcatgtcctctatgagaggccttagcttagggtctccaaagatagggtaaaataggggagggggccttagaggatgggaaaggaggaaggagggaaagggggaacagcatttgcatagagcttggggcaggaaggagctgtcactgaatggaaagcaggcagcgtggctgaaacacacagtgaggtacaggattgggaggcaaagacagtcaggtacactgaggtatgggacagggaggcagagacaatcaggtgggccccacaggccacggggcggattttgcctcagggttggcagggcatcccatggcttcttcccttctgccctggcaagtcattta

SEQ ID NO: 497951 - DNA, 517 bp, Homo sapiens
ctgcctaaccccacttaccctcaggtcctgcactggtaagattgtgatggtaatagcacctccttcaccagtgagaaggaaatcttactgaagagatttcaggtagtcctgaagtacacaccacatggccggcacagaggaagcactcaagaaatagttattgctgtcgcttcttattaatactgctatatgttgggcaytgagtatgtgctggacactggctaagggcattataagcgtgttctcacctcaaccacctgctgatgtgagtattactgtttccaactcacagatgaataaatggagacttgggaagtttaagtgacctgcacaaaggaaccaactgcctccttggtgtgtatggttgacatggatccccatccctaccttagtgcagtattcaaaaggccactggtaacacgaggatgtggccaggagtgctaggggtcatttgtggaaaggcacagaaggcagacttcaatgaaagtgctggaatactgctgtaagtctgggggac

SEQ ID NO: 497952 - DNA, 669 bp, Homo sapiens
ccaattagatgaggttagaatttcagggtaaatcagcccacacaggtggcaaaggcagctgtgcctgcctggtgtactggctctgccttttaagaaatataacagcccagaggtcgtatgaacaggttggctaggctgtatggcttgcatraaatgaatgagctatagacagatgttgaccgtggacttaatttcaacaacacagactggaacatggtgagaagtttaaactaatgatttaaccatagtactttgctactcagtgaggacaaaccttgggagaaaagcttataacagagctgtcaacctagtgaattaaacctggctgaacaaagctttgtacatctgattatgatgtgacatccaacagcacatgcggaacccagattcttgagaagaatctacttcagagcaaggacctaagctttccatctttggaacacagcagacaatagtagctcaataaatatttgagtaagtaaatatgtggatgagtgaacagatggatcgatgggcaggcagatggatagacgaaagaatgtaacagaataaaatatgggaatgaacaggtaggaataaatgtttgttcaataaacaaatggatttgtgagttttaaaaaatgaagttacaagatagttatgggggtggatgggaaaaggaagaaaaca

SEQ ID NO: 497953 - DNA, 529 bp, Homo sapiens
aaatgcccatgtaagacagaaagcacaacaagtgtttttttatggatttagggctatctttccttttgtatctagagtcactgactacctttccccttcctaccaagactagtgtgctctcattacctcccctggcctctactttctcatctagctaaagggaactctcacagcacttcactctcagtgttttaaggagagacttgcattcaaagctgatgaaagcaaacccccggcactgagtgtggcacctagaaggcaccctctgagtggtggctgtggtgmccactagtgtcccaggagatggatgcctccatgggcatcatgcctggcttgtggctggagtttgcaatccgagggcaaggattgctcagtgattaggagcctgtgtgctgtcagacatctaattagccatcgtcttcccaggagacagctcagttgtgcaatttttatttccatattttacacattctccatcagcaagagagacccacgccaatctttcaccagcctcattgtttgtttgcat

SEQ ID NO: 497954 - DNA, 529 bp, Homo sapiens
aaatgcccatgtaagacagaaagcacaacaagtgtttttttatggatttagggctatctttccttttgtatctagagtcactgactacctttccccttcctaccaagactagtgtgctctcattacctcccctggcctctactttctcatctagctaaagggaactctcacagcacttcactctcagtgttttaaggagagacttgcattcaaagctgatgaaagcaaacccccggcactgagtgtggcacctagaaggcaccctctgagtggtggctgtggtgcccactagtgtcccaggagatggatgcctccatgggcatcatgccyggcttgtggctggagtttgcaatccgagggcaaggattgctcagtgattaggagcctgtgtgctgtcagacatctaattagccatcgtcttcccaggagacagctcagttgtgcaatttttatttccatattttacacattctccatcagcaagagagacccacgccaatctttcaccagcctcattgtttgtttgcat

SEQ ID NO: 497955 - DNA, 606 bp, Homo sapiens
agtctcatctatagaatttcttcaggaaacaacacaagaaaaacaacgatttgattatctagctctacattcacctatcctcactttcccagactaaggtaatgaaagtggaaccaagtagcctcgtttgaagcacaggatcagggatcttagttctcttggctagaaaacccctccctcccaccaccagagaatcatagctatgggttcctagatgcctccatgtttttaaggattggggaggagcaatttaaatacaaattttgcatcctttcttccttccctcccagttccttttagtatatgttctgtgacattaaccaaggcycagccgacacagagaacaaggccagaggttgtttgggtttaaatgaaagttgacacaactcaaggtttatctgcctcagtgggcagctctccagagaatggagtttttggacatgttggggagttttctgcctcttaatgagctccttctagcctgccaggtgatagcagggggttagcaattgctttaggggattcgataacaagaatgaggactgcatctcagacggtgtgcctgcctgcctgcctgcctgccgccagagtcatcattaatgcaaa

SEQ ID NO: 497956 - DNA, 601 bp, Homo sapiens
gctgttgtaaggactgacattagatgaacacaatatatttactatatttatagtcactttgccactttgctgtcctctctcattcagggtcttcttttttgttgttgttgytgtttgttttaagacaagatctcactttgttacccacgctggagtgcccatggcatgatcatagctcaccaaagccttgacctccttggcttaagtgatcctcccacctcagccttctgaatatggggaccaaatagatgtgtgccaccatgcttggctaatttttttatttttatagagacgggattttgccaggttgcacaggctggtctcgaactcctgggctcaagtgaaccacctgccttggcttcccaaagtgctgggactacaggtgtgagccactgcacctggccttctcttgttacagtgtgtaggtcagatgcaaactatatactcattcatacatacacatgaacatatgtgtatagaatatttagaatcttattatttatggaatatgtattatctttcttcattaaaaaattttttaaatggcttgaagcatgaagtctcccagcttttgctgagggggggtctctctgtgtgtggg

SEQ ID NO: 497957 - DNA, 601 bp, Homo sapiens
gctgttgtaaggactgacattagatgaacacaatatatttactatatttatagtcactttgccactttgctgtcctctctcattcagggtcttcttttttgttgttgttgctgtttgttttaagacaagatctcactttgttacccaygctggagtgcccatggcatgatcatagctcaccaaagccttgacctccttggcttaagtgatcctcccacctcagccttctgaatatggggaccaaatagatgtgtgccaccatgcttggctaatttttttatttttatagagacgggattttgccaggttgcacaggctggtctcgaactcctgggctcaagtgaaccacctgccttggcttcccaaagtgctgggactacaggtgtgagccactgcacctggccttctcttgttacagtgtgtaggtcagatgcaaactatatactcattcatacatacacatgaacatatgtgtatagaatatttagaatcttattatttatggaatatgtattatctttcttcattaaaaaattttttaaatggcttgaagcatgaagtctcccagcttttgctgagggggggtctctctgtgtgtggg

SEQ ID NO: 497958 - DNA, 601 bp, Homo sapiens
gctgttgtaaggactgacattagatgaacacaatatatttactatatttatagtcactttgccactttgctgtcctctctcattcagggtcttcttttttgttgttgttgctgtttgttttaagacaagatctcactttgttacccacgctggagtgcccatggcatgatcatagctcaccaaagccttgacctccttggcttaagtgatcctcccacctcagccttctgaatatggggaccaaatagatgtgtgccaccatgcttggctaatttttttatttttatagagacgggattttgccaggttgcacaggctgstctcgaactcctgggctcaagtgaaccacctgccttggcttcccaaagtgctgggactacaggtgtgagccactgcacctggccttctcttgttacagtgtgtaggtcagatgcaaactatatactcattcatacatacacatgaacatatgtgtatagaatatttagaatcttattatttatggaatatgtattatctttcttcattaaaaaattttttaaatggcttgaagcatgaagtctcccagcttttgctgagggggggtctctctgtgtgtggg

SEQ ID NO: 497959 - DNA, 601 bp, Homo sapiens
gctgttgtaaggactgacattagatgaacacaatatatttactatatttatagtcactttgccactttgctgtcctctctcattcagggtcttcttttttgttgttgttgctgtttgttttaagacaagatctcactttgttacccacgctggagtgcccatggcatgatcatagctcaccaaagccttgacctccttggcttaagtgatcctcccacctcagccttctgaatatggggaccaaatagatgtgtgccaccatgcttggctaatttttttatttttatagagacgggattttgccaggttgcacaggctggtctcgaactcctgggctcaagtgaaccacctgccttggcttcccaaagtgctgggactacaggtgtgagccactgcacctggccttctcttgttacagtgtgtaggtcagatgcaaactatatactcattcatacatacacatgaacatatgtgtatagaatatttagaatcttattatttatggaatatgtattatctttcttcattaaaaaawtttttaaatggcttgaagcatgaagtctcccagcttttgctgagggggggtctctctgtgtgtggg

SEQ ID NO: 497960 - DNA, 640 bp, Homo sapiens
acagtcaccaggtaattagctcggcactggccgaaacastccctaacagccctagccccacagtacctcaggctgtgtgttgtcccttgtgaaatctcatttagaaaatggttgctaaggcattcccataccagatatcacatcccatcatgctgctatgagtatgcagcacttagcctgcatgtgggtttccaatacctctgcaatgccctcttggtactgggattgggcagctggccctgccctgctacatttgggcttggcatggttctcccatgccaccacatcccatgcccttggggacatttattttgtcagcctccaccctctcgttgcagttcacatctctttacttatctctgttctttcctcaaatggatcccttatgtcccttatttactggtgtaccttagtgcctggcacagtgcctgacatacggtgtgtgagcagcaattgtgaaagggtgcaaggaaggaaggaagggagtgagggaaaatgaagaattttttttgcttggctttgaggtgatcaagatgagaccatcccattctcactaatgataaagtcacaaggacctccctttcctcagacagctgagcatggcattgcttaacaatgtaggctttgggatataatagac

SEQ ID NO: 497961 - DNA, 534 bp, Homo sapiens
tggccatcacagaaaagggctttcaagcctttctccctccctctttccacattgccataaggcatgagtgtgtgaaaggaccctacatacattgctagttgttaatgaccctgtgtttggctacatcaatgcttctaacaaggaaggttttaccaccagattgtccttgaaataacaacagtaactaagtaytgaatacttagtatgtgtgagaaactgttctaagcattatctatgtgtttaatctcattcagtccttcccaacaacctttaagtctgtataactcccattttgcaggcaagaatactgaggcccagagagattaggtaacctgcccagtatcagaaagcaagtaagctaacacgtcaggacttaactccagaggccaaactcatagtgactatgttacattgcctccccacctttgatctgaaacaccttcgagttgaggctcaaagggggcaaatacagcttttattcctctaacaggtatttattatgctaggccactctgacttcctttaaatcaaacc

SEQ ID NO: 497962 - DNA, 586 bp, Homo sapiens
gccttgttgagggactgctgcagttgaagaaaaacttctttggctaacatcctttctccttctaggggctgatcaacactagaatataaagatcccagcccccttatcccaattcaaataattttgaaagaccactccagctccagagcttcctataggattgtttgaggcctttgttgggactgcatcacagctcaacttctccctctgcaccaatactgcctccctcacttccatcggtgttgatcccaagaacactctttaaaaaccacttgcatgctacactttgtctcagaatctgcttcctgggtaacmcaacctatgacagtcaataaacaaaataaaatcactgctatggtctgaatgtctgtggcccaccccgccaaaatgtatacgtggaaatctaatccccaatgtgagagtatttggaggtggggcctttggggagtgattagatcatgaaggctcaaggaatgtgattagtgccctataaaagaaatcccatccataccataagacagggtgggaaaaaaaaagataaaaataaaaaaaacaaaagcccagagagatcccttgcctcttctac

SEQ ID NO: 497963 - DNA, 623 bp, Homo sapiens
ctggcacttgggcacattgtcacaaatctttgtgttgggattaatgccactaacctgtagtgttggggttccatctctgatcattatcagctaaaaatcttcaaaatgtttgtcatgcttcaggtgccctggctgcagagttgtgccaacttggtgcagattggggcacctctcccactactgggctgtttgggccagtattttgaggttctgggaagtatggaagtactggctgggcaatatgggawggtaagaagtacctcagtgaggtccttgctgctctaatttctcagagagtcttttctcagaagcttctcttttgcatcctcagtagctcaagtgaatatgccagtgtgtaggctcattgttaataacagctcctcatgttgtggaggaagggcccctgcaaagtcacgttttgagactggtgcttgaaaccacctcttcttggtcttggggagaaggcttggctgatgagctagcattatcagagatatgtttataataggcccaatttgatgtgtcctgagccttgggtgtaggcaccctgggaatttcaggggcctacccccctccttttttttttttttgcgtggatccgagtctggcttgttcttcctctc

SEQ ID NO: 497964 - DNA, 602 bp, Homo sapiens
atatgaatgtggacataaaatccaagcatgaagcgtagagcaaagtccacaakagatctgtaatgctctctgcctgcacggctgtaagctacagaaatagggtggtcattcaggcaaaactcactctcctgctgaacaggaggaagcagaaaggttcaggcttgatcaccacaactttgacccatagctgcagcagatattttgaatgaagtgcagattaaatattctagcttttgggcagggcgcggtggctcacgcctgtaatcccaacacgctgggaggccaaggcaggtggatcacgaggtcaggagatgaagaccatcctggctaatacggtgaaaccccgtctctactaaaaatacaaaaaattagccaggcatggtggtgggcgcctgtagtcccagctacttgggaggctgaggcaggagaatggtgtgaacctgggaggtggagcttgcggtgagccgagatcacgctgctgcagtccatcctgggcgacagaacaagactatctcaagaaaaaaaaaaattctagctttttttttttgttgttgttgttctagctggaaaaataaaccaaaatggtgattaagaactggagt

SEQ ID NO: 497965 - DNA, 493 bp, Homo sapiens
cttgaacctgggaggcagaggttgcagtgagstgagatcgcaccactgcactccagcctggagtaaaactctgtctcagaaaaaaaaaaaaaaagaaattccattgtaggggttcagtaatatatggtcctcttgacttccctaggcaacataagttatctggaagcaagccccatgttctcctaatgcttcttttaaattttattaaggtataatttatatgcaataaaatgcacacgattttgtttgatgagttttgactgtgtatacagtcaagatacagaacactttcatcactgcaaaatgtcccattattttcttccttcccagtcaaaacacactcctctctccaggctgctgacaaccattgatttgctttctatcaaaatagagtagatttctctttcctagagttttatgaaaatggaatcatactgtaggtactcctatggcactggcttctttctttcaccataaggtttttgaattttaa

SEQ ID NO: 497966 - DNA, 555 bp, Homo sapiens
caaacagagatcagaaatgtgcttatgatcccagaacaaaaaaagacacgtggagctggctcctgctaaaaacctgagctcggccaggtgcagtaactcacacttgtaatcccagcactttgggaggctgaggtgggcagatcacctgaggtcgggagttcaagaccagcctggccaacatggtgaaacctcatctctactaaaagtacaaaattagcctggcgtggtggcgcgcacctgtaatcccagctactcacaaggctgaggcaggaggatcgcaccattgcactccagcctgggcaaaaagaacaaaactccagctcaaaaaaaaaaaaaagtaataataaaaatttaaaacatttttaaaataaaaaataaaaaccttagctcaacgtatggtgtggaaccagacgcagtggagccaagctaagcccacacacatctggccygcaaatccaggtacaggaatcataaatacgtgttgctgtaagtcactgagattttttaggtagcttgttacacagcattattgcaacggaaactgactgatacaga

SEQ ID NO: 497967 - DNA, 555 bp, Homo sapiens
actttgctcaagttttcaagggatttccaacaaactttagccagagatttccatcagtagagctgaaatccacatcaggtattggttaccttatttgtgcattcatttcttcactcctcaaacaggtaggaaatggagcattcgtgggttttcactatctgtgtgccaggccctgagccaggcaccaaaggcaggaggatcacttgaggtcaggagtttgaaaycagcctgcacaacatagcaagacccagtctctaaaaaataattttttttagttagccaggcatggtggtgcatagctgtagtcccagctacttgcaagggtgaggtggggggatcacccaggaagttgaggctgcagcgagccatgatcacaccactgcactccagcgtaggagacagcaagaccctgtttacaaaaaataaaaagtaattgtatcgctataatctataaccagatgcactctgatatggtttggctgtgtcctcaccgaagtctcatcttgaattgtagttcccataatccccacgtgtcatgggagggactcagtaaga

SEQ ID NO: 497968 - DNA, 315 bp, Homo sapiens
taccggtgtaattatacgtgtgcatccataaattggacacaaagctggaaaatgggcttcagtggcaaaggcaaaagaatgacagagccataaaagatacaccatgccccagccgtgtgaaagccaccatgatggagcgtttgtttccaaggacttagcgatctggggtctcctttgtcattccctaatcttgtcctttcttcttaargtcaggcagtgcccaaatcttggcgttctcccaacgtctgaactgcaaatgtcagggattgctctgagctggcggggagtattgcttgcactttttgtggcttcaag

SEQ ID NO: 497969 - DNA, 315 bp, Homo sapiens
taccggtgtaattatacgtgtgcatccataaattggacacaaagctggaaaatgggcttcagtggcaaaggcaaaagaatgacagagccataaaagatacaccatgccccagccgtgtgaaagccaccatgatggagcgtttgtttccaaggacttagcgatctggggtctcctttgtcattccctaatcttgtcctttcttcttaaggtcaggcagtgcccaaatcttggcgttctcccmacgtctgaactgcaaatgtcagggattgctctgagctggcggggagtattgcttgcactttttgtggcttcaag

SEQ ID NO: 497970 - DNA, 569 bp, Homo sapiens
gtagtcccacctatttgggaggctgatgtgggaggatcacataagctctggaggccaacgctgcagtgagctatgattgcaccactgcactccagcctaggtgaaagaatgggatcctatcttggaacggaacgggaggggaggggagggaaaggagaaattaatttataattttcttctgtagttgctggatataaraaaaaaaagaaatgtgtgatttccaaagagttgtgggtccttatttgctggaatggaacctccacccaaaaaccacagtgggcagggctactgtggtctgctagagctcacaaaagtaaaccaaagtcatttcccaccttctctgcaaacagtgtgctcaggagtccacgccagccatgatggtggtgttgtttctgtggcctaaggaggtggcacgtgggatcatccctgagtcaccacccagagacgcgaagttccttgctcaggtcccggtgtgtcggctccagcgtcctgtcctccctgctcccccgccccaccgagaccgttgctgacagagccccactctgggcttcagcctcccgctccgtgag

SEQ ID NO: 497971 - DNA, 569 bp, Homo sapiens
gtagtcccacctatttgggaggctgatgtgggaggatcacataagctctggaggccaacgctgcagtgagctatgattgcaccactgcactccagcctaggtgaaagaatgggatcctatcttggaacggaacgggaggggaggggagggaaaggagaaattaatttataattttcttctgtagttgctggatataaaaaaaaaaagaaatgtrtgatttccaaagagttgtgggtccttatttgctggaatggaacctccacccaaaaaccacagtgggcagggctactgtggtctgctagagctcacaaaagtaaaccaaagtcatttcccaccttctctgcaaacagtgtgctcaggagtccacgccagccatgatggtggtgttgtttctgtggcctaaggaggtggcacgtgggatcatccctgagtcaccacccagagacgcgaagttccttgctcaggtcccggtgtgtcggctccagcgtcctgtcctccctgctcccccgccccaccgagaccgttgctgacagagccccactctgggcttcagcctcccgctccgtgag

SEQ ID NO: 497972 - DNA, 545 bp, Homo sapiens
tgaatgaatgagtgaatagccatgaatggacaaatgaatattcataaaggaatacatattcatgaatgatcaaatgaatatccatgaagaaatgaataatcatgaatgagtgaatgaatgtgaatgaatgaatgaatgtgaatgaatgaatgttcatgaatgaatgaagtgccacactgcctgggaccccactgtgagacagtgytctttgtggttgagcattgcctttctcttctttctcttcttcctcccttttcaggccagcaaattcccaacaccatagtgatagctgctatttatggagcacttagaatgtgctaggagcaatgtttagaacacttgatgtccattagcttatttcatccccatatcaatcctgtaatgagggtaggattattcacggcattttaaaggtgaaggagctgaggcacagagaggtttagtaacttgttcaaggtcacacacccaataattgacagaaccagagctaggcaacctggctccagaggccacggtcaaaccaactacaagaagtgattttccag

SEQ ID NO: 497973 - DNA, 492 bp, Homo sapiens
gaaactaataatacacaaggcctcagccttctgtcattgtcatagagggccccagccttctgtcattgtcattgagggccccaggcttctggcaggacagccaagagcggaatataaggtggcagaagtgggacagtaagtgagactctcttcgtggagagagcgttaaagttgacacacttccttgaagagctcagcacctcagggcttgtggtacaaagatgggttgaggggctacagctagagtcaggggacagtgyccacctttgccaaacacacccctggcctgcttgccaggcctggttacccaggcacacagagctcagctatccagaggggcatagcacaacctccccacggtaagacagggcactgggaccactgggagccaccagtttcctggaaagcagtgcagggccttctgtggatgtttgcaaagtgcagccctacaggtgacacctgttaggccaacaggtgccccggggccgccaa

SEQ ID NO: 497974 - DNA, 492 bp, Homo sapiens
gaaactaataatacacaaggcctcagccttctgtcattgtcatagagggccccagccttctgtcattgtcattgagggccccaggcttctggcaggacagccaagagcggaatataaggtggcagaagtgggacagtaagtgagactctcttcgtggagagagcgttaaagttgacacacttccttgaagagctcagcacctcagggcttgtggtacaaagatgggttgaggggctacagctagagtcaggggacagtgcccacctttgccaaacacacccctggcctgcttgccaggcctggttacccaggcacacagagctcagctatccagaggggcatagcacaacctccccacggtaagacagggcactgggaccacygggagccaccagtttcctggaaagcagtgcagggccttctgtggatgtttgcaaagtgcagccctacaggtgacacctgttaggccaacaggtgccccggggccgccaa

SEQ ID NO: 497975 - DNA, 530 bp, Homo sapiens
tcttggttcttgctgacgggatggtgctctcctgtgtgacacagacgatgacttggcaatgggcaggacaattgtgtgtttgcctgcctttcctactttcctccctctgagcaggcttcagcacctgccactgacaggggagggcaggacccagaggaaccccgcacagacctgtggcctgctcttaggagagggacggaggggaggacagggtggcagtcgcaccaccctgtgccctgggagcctcgacagcaatccttagccaccaggtctaacggggttctctctgccttacagaaacccttcgaggcatccaagtgttggggcccaccctaattcagacsttccaaaagatgaccgtgaccttgaacttcctggggaggtaagtgagctccagagcgcactgggggtgccccgtgggctctgcacatcccccttcacgatgaccccaagtctgttctgctctgtgacaggcctcaggtctgggacctcatggaagggcagtgccactttgtcttgaggctgggcca

SEQ ID NO: 497976 - DNA, 482 bp, Homo sapiens
gcagctggagcatggcaagcatctgaagcaaggactccccagtggactctcttaactccattactgctctctaaatttatttaacaagataagcaaactgttccttgttcatctctgaattgcctgcagcaactaataggtactgaacacttttaaaatcagattgaggttgggcttggtggctcatgcttgtaatcccagcactttgggaggccraggcaggtgcatcacgaggtcaggagatcaagaccaccctggccaacatggtgaaaccctgtctctactaaaaatacaaaaattagctgggcatggcagcacgtgcctgtagtcccagctacttgggaggctgaggcaggagaattgcttgaacctgggtggcagaggctgcagtgagccaagatcacgccactgcactccagcctgggcgacaaagcgagactccatctcaaaaaaaaaaaaaaaaaaaaaaaaaatccaattga

SEQ ID NO: 497977 - DNA, 463 bp, Homo sapiens
ataatatctttaaaatccatattaactctgtctataacattcattgagcatgtaataagaggatctgaggaaggtatgtaactctgcctgttcttttgtaagacagaatcccagcaaggacagagacatgtggcctgcgtcatcattctatggaactctatgcctggacttgttgtggaacataaagctggtattcgtgatccacacaagacactctaaatgttctgatcctgtcacctttttctctgtattatatctttcttgccgaggcagaaacattaaatctgttcttaattcgatcattttagctttaggatctgagtttcagcttgctgcagagtgcttcagaagtctctaatagacaccacaattttttcagtctgactgtccattaggagtgaccacatgactgagtttaaaacaaaaggttaatrtgaagaagtaaaattcactagttcaagta

SEQ ID NO: 497978 - DNA, 627 bp, Homo sapiens
aaaactaactgttgggtactatgctcagtatttgggcatgagatcaaccatactccaaacctcagcatcgtgcaatatacccaggtaacaaacatgcacatttaccctctgaatgtaaaataaaagttgaaattataaaaaattaaaggttaaaaaaattatgctgtccttgtagaatggataagcagggccagagctctggacagaagagaatgctgcgtcgtgaacaggctgacgggaggaaaggggagatgcaaggagaccaattaaaaggtttgggcagtaacacaggtgagatatggggggtacagagaargtgatgaaagaaatgtgttttgaaccaaaagcctatacaattgcctaacagatggcacagtgttgtctgttcagtgaatgaaaaattatcacttaaactttattgtattcatttaaactacatggagtaggcatggtatgattttcaaaggtagaaattttgctgagctagcttttcaaagctcccacctttctttttactgtgccctttgtttggagctcccttccccaggtatcctcaagtccttcagccctgtaactaccttcagatgtctcgccaggtagatgtctcttgaacaccctcataaagag

SEQ ID NO: 497979 - DNA, 558 bp, Homo sapiens
ctgttcctggcttattttatgtaacatcatatcctccaggttcatccatgtggttgcaaatgacaagatttctttcctttaaaaggctaaatagtrtttcattgtgtctatgtatcacatttccttcatctactcattcattgatggacacttatgttggttttatatcttggctattgtgaataaagttgcagtgaacatgagggtgcagatacctctgtaacatactgatttcatttcctttggatatatacccagtagtggaattgctggatcgtatggtacttccatttttacttttttgagggagcctgataatgtttttttataatggctatactacatgatttttaaaaaattgcacttgagccatgtatattttattatcacaagaaattcacattgcttttttaagactaagtaactcatgctgcttttggaaatgagtaacatagggaatgcatcttctaccaagaaagcaggaaatagctcaagatcaactctgtggagaagaaacggcaacagaaactagtccacgttggcagttaggtatttgcc

SEQ ID NO: 497980 - DNA, 444 bp, Homo sapiens
cagaaatacttccctgggtcattaagctgaaaaaagatttagtttctcaaaaaaccaaagtttgccaggcatagtggctcatgcctgtaatcccagttacttgggaagccaaggcaggagaatcgcctgaacccaggagtaggaggttgtggtgaggcaagatcgtgccttgcactccagcctgggtaacaagagaaaaactccgtttttaaaaaaaaaaaaaaaaaaaaaaaaaaccccccttccccccccccccccctcaaaagtcagagaaaaatgcttttacaaattttctgagtgtgctaagaaaaagagacaaagggaaagaaaatctcttcctttatttttaaaggtttattttaaataaacctctcatttatttgcttgtttgtttgaracagggtctagctttgtcatccagtctggagtgtgggggcgagatca

SEQ ID NO: 497981 - DNA, 475 bp, Homo sapiens
ctggcatgttggtttattgttycttctctttttcccgccagaagtccaggaaggcaaaacatatatctgcatatttccagtgcctagtacagttgcctgacactagtgcctcccagggaagtggaaagtgtaaggaaagagtgagtgaaaatttgaaagcagaccattcagtggagtgtgcatggtgagggatagttcttgggcactgagcctggaagaggctggcactcactccatgggcactcctgcctttctcttcttgcctcacacttggtaacagcaggaactggttagggttaggcaccagaaagatgtgactggaagcacctacagtgagtgtgggacttacatatagcttaccatttgcttgtggggtgctccaacctgctgattggtgctttgaagtctacagttaagggtgaaattaaatcccttaaatttattttccttgttttataatgattttcttggttat

SEQ ID NO: 497982 - DNA, 569 bp, Homo sapiens
gcctcacccagtggtcgtttatttacatgccttatctcccccactagactgttgttactacttttatttttttagattgggggttttgctgtgttacctaggctggagagcagtgatgcagtcctggttccctgcagcttccaactcctgggctcaagtgatcctctcacctcagcctcttgtgtcactgggattacaggtgtgaaccaccacacccagcatgtttttactacttttagggaaaaggactgtgtctcattctttctcagtagtgctttttattatagtatgagcacaatttaaaaaaatactgayttaaactcttttctcttttttaattctggctacagatgtttctgagaacatcaaactacataaaagcattttctcttagcactgcgaagatatccattcatccaacaactaaaacaacaatgaaaattcacaatccactggcatagcaagccataaacaaaccataataatgccaggaattgtagtacgtttatgaataaagtatgaaggtagggctggagacagtgactaactcatcttagaaaagtcaaaga

SEQ ID NO: 497983 - DNA, 600 bp, Homo sapiens
aaaattatttaaagggccttcatccatttttcaaaaagcagtcaaaaaggcaatacatagtaaccacacatatgtcaaatcagtgagaaatttacattgttttccatgtgatcaactcttcttcacaggttggagtatccaacaattcaataaccctgtctcttccttttttttgagttactgcttttgttatgctctgaaaaaaaaattgctgccatttgcctctcaatgtcagaataatctccattgactgtactgttctcctgtatrtcttttgtttcatattccattactgtttttaatcagaattttttctcaattctttagtaactaaatttaaagttaataaaagaaagcacccttcacgtgtttccaaactagcagtcgataatttctagctagttgtactggaacattccaaaatggttttccaaattgcagtaaatgtggcatattcccaactcaactttctttagctggattcttaaaatgcccactgccatttcaatgccatctgacattggggaatgtctaatagatgagaaatctgaaattatcctacttttgcaaattttagaaaaacatatagtcatgtaaaaa

SEQ ID NO: 497984 - DNA, 498 bp, Homo sapiens
ctgtgcacaaaattgtttttaaagacatgcaaaggtttttaaatttagatacaatrgactttagttttcctttaaattttggttcgtacttataagtatgaaattatatcttccctgagattatctaaaagtaagtttcaggtttatacacacatactaaaatcatggattttactgtttagagtatcacattaacaaatagttaagaactagttagcaaataaagaactagagaatatatctaaaatggatactccttttttctttttgttctggcccttttctgtgagaataaaatgagcattccatttagcatcctcccctcttttaaaactactttttattactattaaagtatggtaaatgttctgcaccattattgtgtatccttgcattatatattgatttatggcatatttaagtagcaattattctcactgttgtgaagtgcttgtgctctgctcattcaacatgcaaaaattttaaattacagtacat

SEQ ID NO: 497985 - DNA, 549 bp, Homo sapiens
tcagctacttgggaggctgaggcagaagactcgcttgaacccggaggcagaggttgcagtgagccaagatcacgccactgcactccagcctggtgacagagtgagactcsatctccaaaaaaaaaagaaagaaagaaaagaaaaaaagaaagcattcaggccaggtgcagtggctgacacctgtaatcccagcactttgggaggccgaggcagggtggatcacttaaggtcaggagttcaagaccagcctcatcaacatggcaaaatctctactgaaaatacaaaaagtagccaggcgtggtggtgggcaccgcaatcccagctacttgggaggctgaggcaggagaatcgcttgaacccaggaggcggaggttgcagtgagccaagatcgcaccactgtgctccagcctgggtgacagagtgagactcagtctcaaaaaagaaaaaaaagaaagcattcaatcgccagaagaaaacagcagctagtcaaaaatattctttctttcctcaaagactagaaacttttcaagttggcaaggaccttaaaga

SEQ ID NO: 497986 - DNA, 557 bp, Homo sapiens
tgctgatgtctaaaaacattacagatagttaattacctgcttaagcaaggtgtaaggaagtagcataacacttgaagcaattgttagtaagataatctctctcattcattcaacagatatttatttagtacctaacaaatgtgcgttactgcactagatgctaaggagaataaacataaaaacataatgtagaagttaagctcctggccctcaaacaacttttaatatagttgaagagacatgggatgttcttaagttatatgacaagatataatatgatcatgcactaaagtactggtacagtcaacatgatatgaaagtctaaaggaaggaaataggactgtggattagtgtgatcagataaagcttcacattggagaagtgttttcagctgagataaaggaagaatatggggaaatggagaaatgggaaaagttgaagagacggaaaccaactaaaaatacagaataaatacatgaacataagtaasatttgttttgaagtcagtagtctatcagcctaactgaaataaaaattttaagttgcgaaatagtaga

SEQ ID NO: 497987 - DNA, 504 bp, Homo sapiens
atctggggatagaactccaaatatctagaatggatagcatgtctgtagactcttttctttaaatatcactatgtcttagccaggatttttatagaagttggataaaagttaattgcacagggttgtggattgctaattctccatagtaacgattcatatgctttagaaatcagaattgttattttaacatgaaggtaaagaggcctaacacatgttcttaccttaattaagagccactccatttccacgtggcatcgggtactgggcaagataagcaaagatactctgcagaaaggaacttcggatcaggccaacacttgttcaagtgttttcctgagaccctgaatttccatatgatacagcttagtaaattagtttgagtctaaaatttttcagattcartattatcagcacctgaacctgaaaagatttaaaaaaaaatcaggaactgttctggaagcccttcctggccttttatgccagctccatcttgtacctaccagc

SEQ ID NO: 497988 - DNA, 554 bp, Homo sapiens
acatttcttgatatatttaagctgtacctggtaggcttctggtgctctaattagatctggggatagaactccaaatatctagaatggatagcatgtctgtagactcttttctttaaatatcactatgtcttagccaggatttttatagaagttggataaaagttaattgcacagggttgtggattgctaattctccatagtaacgattcatatgctttagaaatcagaattgttattttaacatgaaggtaaagaggcctaacacatgttcttaccttaattaagagccactccatttccacgtggcatcgggtactgggcaagataagcaaagatactctgcagaaaggaacttcggatcaggccaacacttgttcaagtgttttcctgagaccctgaatttccatatgatacagcttagtaaattagtttgagtctaaaatttttcagattcagtattatcagcacctraacctgaaaagatttaaaaaaaaatcaggaactgttctggaagcccttcctggccttttatgccagctccatcttgtacctac

SEQ ID NO: 497989 - DNA, 612 bp, Homo sapiens
ctgctgcaccagacccatccttcttggaaagaggacaaaatcacagcaggtgaaccttttctggaatatctgaactaygcatttggggagatgagaggcagagataagagtggaaatagacttaactaatccactaacgtttatatggcttattcctacagaaatagcagagtgaacagtgaacacaactattcagtttgcctggaggtaagagaggtttttttcctgaattaccctatatgtcagcaccaccaacattcaccaataatacctcattttctgtgtcatttttgcttctgttgtcaatatctgtgagtcacaagaaaaaaaaaaatgcgtttgcttttcagtgtagctttctttcccttaaaagctggccagagaaagtttcacatgatgtttgtcaaaggaagctttaagtatttgtcaaagacacagcatatgtttggatgccttcttttccagccaaatgagaatcaacccaggtacagatcattccagtttctctgcttttcacctgatggcgcctaccctcttaactttgtaacttatttaattacaactatttttaataacatccaccatgatcaagtaagatattgactttgcaga

SEQ ID NO: 497990 - DNA, 625 bp, Homo sapiens
ggcgatgcaataagacaggtagattccatggttatgagcttgctgtctcttctcttcagccaaaacagggtctttaggtctaagataaactcatagctatagaaatataacttggcaaacccttgaatgctggtgctggctgaagcaatgtgggcagagaaggcaaatgcatcttcagaataggatgcatagctgcccctttcagatggaaggattcaatgtaatcaacttcctaccaaatggctggtctccttgaggtctggtgttctgtcaagatttctgtgcctggggggccagacgttcatcagggacactatctagatagtttggtgaggtaaagcccttgcccttgggcccatgactaactctcttttcaccaccacagtccctccatttcacacgcctattgcacaagctttccagragctcacaagaggctctggctgaccctcatgaatgagtgatcctgtccacttagttgtcaagtgtttctcctctatggccatgcttcctaatgaattaataagttcacaaacacccatatgattttttttgcccactaataaaaaaattgctggacttggatatatgctggctaaactggggaaaatttattgacatgggg

SEQ ID NO: 497991 - DNA, 485 bp, Homo sapiens
agaaggaaggacaaacaatttcacaagaagatcctgctttctttgctctttgctctaactttgcactcactaagcatccttctgatttgtaatttaccttctgaacacacctacccccatcactggccctggacctccaataacaaattaataagcatagttgacctatacttggcctcccatgggttaacatgacttgtttcctcaggatctgactcctctgggtgaccaaaggcaaagttaagagaatccaagctggcttcagatccatacctgtgcagcctccaggaaggtgtaaaattaccttgccccactcgagcatcccccaagctacacctaaacactttctctgcctctcaagctaccttaagtactataggagagtaatgcacgatgatttgacttccccattgtttctgycaacaggcagctcttggggcccaaaattgatctcctgctgggatctgtatatgtcttgttgccag

SEQ ID NO: 497992 - DNA, 492 bp, Homo sapiens
cctacttctcagaggcagcactggcccaccaccccttccgggaatgctttctctccttatttcagggcagcactttcttctcggccatccctcagctcaatgattgctcttccttttcctcttcccttgctcttcttcctcatctcacaccacaaatgtctgtttcccaggatgatattttcagtccttccttctccttatgatacacactytttttatgagacctcacctacacccatggactaactctgaataccaaataccagcccagatcccctctcaactgcagacccatgcacccaaatgcctgccagacatccccatctcaggggaagaggaatggagaattaacaaatgtatatattaaaaagggataaaattctagacagtgataaggctttgaacaaaaagaaaaaagcgatggagagaatgaagttgatagtttagataatgtgcttggctgcatgaatcatctgaatcatgagggatgaa

SEQ ID NO: 497993 - DNA, 492 bp, Homo sapiens
cctacttctcagaggcagcactggcccaccaccccttccgggaatgctttctctccttatttcagggcagcactttcttctcggccatccctcagctcaatgattgctcttccttttcctcttcccttgctcttcttcctcatctcacaccacaaatgtctgtttcccaggatgatattttcagtccttccttctccttatgatacacactctttttatgagacctcacctacacccatggactaactctgaataccaaataccagcccagatcccctctcaactgcagacccatgcacccaaatgcctgccagacatccccatctcaggggaagaggaatggagrattaacaaatgtatatattaaaaagggataaaattctagacagtgataaggctttgaacaaaaagaaaaaagcgatggagagaatgaagttgatagtttagataatgtgcttggctgcatgaatcatctgaatcatgagggatgaa

SEQ ID NO: 497994 - DNA, 593 bp, Homo sapiens
attcttttgtatagttcaaatattataaaaattttaaaattctgttgtcctcacgttagaataatactcagcttcaaaagggtgaaatttgcccacagcattactttctccagtcaaaatcaatcaatgccatctgtcctcagtaacccttccattttttctgccccgtattgaatcatcctcattctcttatcatttctctgctatcataagacataaaaaatgaagttgtaactgctgagtgtttaaggaagatttctttctaaatatttcttgttactttactgttaacatatttcattgccaagtgagttgtttgaataggggtactctcactgactcattttaagcacataaagcaataatgcctagaaatttatttcctatatgttaatttatttttatcacatcattatttagtacatggcatttatttctttcagggatcacataattagtttgtgaaaatcactcygaagtggaggtctgtctccataaaggctaataacttcactgaaattaaagtagatctatgtgacacttaactataaagcagagaaagcatctggaatcttaggttctggtcctaggtt

SEQ ID NO: 497995 - DNA, 565 bp, Homo sapiens
accccaactccatgccttatccaagtcccaaccccaacccaacccatctctagctcagctccatccccaactcattcttgaccccatatccaaccccaactcaacttcacctccaatcctatgcccaacttyatgttaccctaacactgttcccaactcaaacccagccctgttccaagcacagttccaaccccatccccaaatcaaccccatccttatctcagactacccaaatccccaccccaacgacacaattactttcatccttaacccaatccccatcctgcatgtttgtatgtatggttgttatgtataacttgcaactctgcccttaacaagctcacacgcatgcatgagacatagatgagatgtctcagtgatgtttgtccatctgactgggcaggagatggtcctgcccaatccattgggacgggagatggtccaagcaatagatactgaggggccaggattcaagcaaagacttgacgttcttaagggaagtcgaaagaggggaagattaaatgggccgcagtaggctgggagaatcctctgcaatagatggtct

SEQ ID NO: 497996 - DNA, 611 bp, Homo sapiens
tgctcatgctaaagcagagaagattcaccatggcttctacaccaccagtggaagtgtcaccacagtgaaaaaggcaaacctctcagtattgttatgagaatatttttcactttgtgaaaggtttggcccactgaaaggttcttgggaactcccaggggtcttcagtccacagtttgagaaccactgccctacctagagtaagaattatgtccaggactaaggataaaaccaaactgtacctgccttcaaaaatcaactcttaaaaagatcattgtgatctgctattaatttaactgcttgcctgaacagtttaactattaggaagataataaaatccccaagtcactacwacatggcatctacaatggccagtatacaatgagaaattgtaagaccggtaaagaagcaggaaaatttgacacaagatttagagaaaatacagtcaataaaagcagacccacaaaaccaaatgtaaattctataactataaaatgtaggtggaatgaaatctttattggataggcttaacaataattggacactatcaaagaaaaaaaaaacagtgacttcaagacaggtaaataggtattaccaaactgaagtacaaagag

SEQ ID NO: 497997 - DNA, 611 bp, Homo sapiens
tgctcatgctaaagcagagaagattcaccatggcttctacaccaccagtggaagtgtcaccacagtgaaaaaggcaaacctctcagtattgttatgagaatatttttcactttgtgaaaggtttggcccactgaaaggttcttgggaactcccaggggtcttcagtccacagtttgagaaccactgccctacctagagtaagaattatgtccaggactaaggataaaaccaaactgtacctgccttcaaaaatcaactcttaaaaagatcattgtgatctgctattaatttaactgcttgcctgaacagtttaactattaggaagataataaaatccccaagtcactacaacatggcatctacaatggccagtatacaatgagaaattgtaagaccrgtaaagaagcaggaaaatttgacacaagatttagagaaaatacagtcaataaaagcagacccacaaaaccaaatgtaaattctataactataaaatgtaggtggaatgaaatctttattggataggcttaacaataattggacactatcaaagaaaaaaaaaacagtgacttcaagacaggtaaataggtattaccaaactgaagtacaaagag

SEQ ID NO: 497998 - DNA, 611 bp, Homo sapiens
tgctcatgctaaagcagagaagattcaccatggcttctacaccaccagtggaagtgtcaccacagtgaaaaaggcaaacctctcagtattgttatgagaatatttttcactttgtgaaaggtttggcccactgaaaggttcttgggaactcccaggggtcttcagtccacagtttgagaaccactgccctacctagagtaagaattatgtccaggactaaggataaaaccaaactgtacctgccttcaaaaatcaactcttaaaaagatcattgtgatctgctattaatttaactgcttgcctgaacagtttaactattaggaagataataaaatccccaagtcactacaacatggcatctacaatggccagtatacaatgagaaattgtaagaccggtaaagaagcaggaaaatttgacacaagatttagagaaaatacagtcaataaaagcagacccacaaaaccaaatgtaaattctataactataaaatgtasgtggaatgaaatctttattggataggcttaacaataattggacactatcaaagaaaaaaaaaacagtgacttcaagacaggtaaataggtattaccaaactgaagtacaaagag

SEQ ID NO: 497999 - DNA, 556 bp, Homo sapiens
agcctcgtgtttgtgcagctcctggcctgtcacccagcccgagttatcggtgacgataacatctagagagactggcttcctctagtcatgaagtgtcaggcgctgctccctcctccccaaactccagacttggatgagggactctctgtcccatcttctcacctctcctgcaccaaagggtgtcttggtttacctgggaagcatgtgagccaagtccccagacttctccctgccctagcaccccattgagaaaagccatctcccatccccaggctgctatctttcctccttagggttggcaccttccagagtcacctccttgattgtacacactgattgaggggccccacctgggattctgggaagcctggcaggcctgtgggtgaccttgaactcgtcctttctctygcttgagatctctcctctgagccaagaggggaggtcaacctcaacttgtccccttagcagccttatttatgttgctaaataacgatgatgatgatgatgacaacgacaatgacacagcagttactgcccactgttctaagtgctctac

SEQ ID NO: 498000 - DNA, 556 bp, Homo sapiens
agcctcgtgtttgtgcagctcctggcctgtcacccagcccgagttatcggtgacgataacatctagagagactggcttcctctagtcatgaagtgtcaggcgctgctccctcctccccaaactccagacttggatgagggactctctgtcccatcttctcacctctcctgcaccaaagggtgtcttggtttacctgggaagcatgtgagccaagtccccagacttctccctgccctagcaccccattgagaaaagccatctcccatccccaggctgctatctttcctccttagggttggcaccttccagagtcacctccttgattgtacacactgattgaggggccccacctgggattctgggaagcctggcaggcctgtgggtgaccttgaactcgtcctttctctcgcttgagatctctcctctgagccaagaggggaggtcaacctcaacttgtccccttagcagccttatttatrttgctaaataacgatgatgatgatgatgacaacgacaatgacacagcagttactgcccactgttctaagtgctctac

SEQ ID NO: 498001 - DNA, 579 bp, Homo sapiens
acctccttttaccttctgatacctggatatccctctcctgttcagccccacagttcccaacaatttggttcctgctccatgatcaggattttcaataaaccagacactccagagaaaaaataaaaaagaaagaaattcagtcagttgtgacaacatgggtgaaactgaagaacattatcctaaattaaaataagtctacacagaaagacaaataccacatgttstcacttacatgtagaatctaaaacaatcaaactcatagaagcagaattagaatggtggttaccagaggctggagtgttgggggaaatggggagatgattgtaaagggtacaaagcctcagactagaaggataagattttttcaagatctattaacacaatgtggtgaatatagttaataatagtatattgtgttcaaaatcactaagagtagatttcaaatgttctcaccacaaaaaataagtatttgagattatgaatatgttaatttggttgatttgattattccaatcaaatcataaattataacatcactttgtaccccataaatatatacaacaagcttgacacagtggc

SEQ ID NO: 498002 - DNA, 596 bp, Homo sapiens
ctgtcaataaattattcttgacaaattaatatgtcataatagaatttccattcacattgtccttctctaaaacttgttctcaccaactttctagtcttacttattccgctacccttgcaatacaaggtcattccaaccactcccaaatccatgaattaggctatctttgcttgcaggtaaaatagacaagaatgcattttcctcaagttctgcctactgggaaatttttcattccccgctgtccttcagggcaaatgagttaaagcagcttgtttacaattagtcctaaaacacrtttcactggagaacttgcgcaaaccaggcaacaatttttccaacattagacatctggtcttcaggaattctcaaagaagccataagtgtggatttcaaattctgtgacaacacaacaaacacgggatatttcatgggctgggaatataatctacttgctcataaaacttacttgcacctttagggccatagtatacctggtaaaatgtagagtccttttttttttttttttaatgaactgcttatgggttcaatgggtactccaagattttctcaagcatctttccttcacaggcctttac

SEQ ID NO: 498003 - DNA, 596 bp, Homo sapiens
ctgtcaataaattattcttgacaaattaatatgtcataatagaatttccattcacattgtccttctctaaaacttgttctcaccaactttctagtcttacttattccgctacccttgcaatacaaggtcattccaaccactcccaaatccatgaattaggctatctttgcttgcaggtaaaatagacaagaatgcattttcctcaagttctgcctactgggaaatttttcattccccgctgtccttcagggcaaatgagttaaagcagcttgtttacaattagtcctaaaacacgtttcactggagaacttgcgcaaaccaggcaacaatttttccaacattagacatctggtcttcaggaattctcaaagaagccataagtgtggatttcaaattctgtgacaacacaacaaamacgggatatttcatgggctgggaatataatctacttgctcataaaacttacttgcacctttagggccatagtatacctggtaaaatgtagagtccttttttttttttttttaatgaactgcttatgggttcaatgggtactccaagattttctcaagcatctttccttcacaggcctttac

SEQ ID NO: 498004 - DNA, 324 bp, Homo sapiens
aatatcaaccaaagcaccctcatccacacatccataataatgtttgatcaaatatttgggcatcccatggcccagtcaagtcaatacataaaattattcatcacaattcccacagatgtgcgcctcaagatgaaaacacaaaatcatccagcctttcaactactgtgaaaagtacagatttttactaaagaaaccctccacctgattcttaaaataggtatatgaygactaagtcatattaaaaatctctttgaggggatgaaagtcagataaaatccacaagaaagtgttcaaaatactcttgaggctttggaatctgttcat

SEQ ID NO: 498005 - DNA, 222 bp, Homo sapiens
tgtaaacataatacgatcaggttacaaaygcaatacattagggactatggcagttaagttcgcatataaataaagatgaacttaattttagacacaactcatccgagggcattattacagacaatggaaaatgtcactcgggagctagattgatcttgtagttccatagaagttgattttaaggtaaaaaagtacttgtcagtatcagcactgatcatgctc

SEQ ID NO: 498006 - DNA, 577 bp, Homo sapiens
acttagacagcctgacagccccgagctcaagctctctgctgtggccacctcacacagcatctgcacagtgtttgatattgtggttatgtgcttatgtgttctcttgtagactgagctcctccaggacagggcctggctttttgcacccatcacaacgcttcccctggggccctgcacagatggtcttgtggactgaactatacattatcttctaaaggtcaccactaagggcttgagtmgggccttcctgactctgacctagtttctcgctgttggtggaacggtgggggtgaggggcaccgtgaagaggtcccactttttattttctgctctttaaaatcaaaagaaaaaggcagggctcctccaggcagggtttactccagtgcagcaactcccctgttgccatcaaggttcacattctgccacctcagcttcatatgctgagacagaaaaagcagcaggaagacttgtttaacatttattcccaggattttttttaatttcctctgaaacgaatatgaatacactaaggtctttacactctgcaggagctaatcccccactggaagctttgggg

SEQ ID NO: 498007 - DNA, 577 bp, Homo sapiens
acttagacagcctgacagccccgagctcaagctctctgctgtggccacctcacacagcatctgcacagtgtttgatattgtggttatgtgcttatgtgttctcttgtagactgagctcctccaggacagggcctggctttttgcacccatcacaacgcttcccctggggccctgcacagatggtcttgtggactgaactatacattatcttctaaaggtcaccactaagggcttgagtagggccttcctgactctgacctagtttctcgctgttggtggaacggtgggggtgaggggcaccgtgmagaggtcccactttttattttctgctctttaaaatcaaaagaaaaaggcagggctcctccaggcagggtttactccagtgcagcaactcccctgttgccatcaaggttcacattctgccacctcagcttcatatgctgagacagaaaaagcagcaggaagacttgtttaacatttattcccaggattttttttaatttcctctgaaacgaatatgaatacactaaggtctttacactctgcaggagctaatcccccactggaagctttgggg

SEQ ID NO: 498008 - DNA, 577 bp, Homo sapiens
ggatatgattctcaggttcccttgaaattagggatggccttatgatagttcttgtccatcaggcataagcagaaatgttggccatttgggaaaagcttcagttttatcaggtaggttctatatatatgtgtgtgtgtgtgtgtgtgtgtrtatatatatagatacacatttatatacacatatatgtgtgtgtatatatatatagatacacatttatatacacatatatgtgtgtgtatatatatatagatacacatttatatacacatatatatgtgtgtatatatatagaacctatctgtattttttatatatatataacctatcattttatatatataacctatcattttatatatatatatgtatgtatgtatgtatatacatgtaaaatatcattctacctgaaagaggaacttgatgtataaagctatttatctcctgatttttatggaaaataaatcaacctctaaattcctcacttgtttatttcactgtgctgagagttctctgctatatgacgtctaatgcaaatatcaaatacacacatattaagaaatagatgggtggggtgcgg

SEQ ID NO: 498009 - DNA, 564 bp, Homo sapiens
tggatatgattctcaggttcccttgaaattagggatggccttatgatagttcttgtccatcaggcataagcagaaatgttggccatttgggaaaagcttcagttttatcaggtaggttctatatatatgtgtgtgtgtgtgtgtgtgtgtgtatatatatagatacacatttatatacacatatatgtgtgtgtatatatatatagatacacatttatatacacatatatgtgtgtgtatatatatatagatacacatttatatacacatatatatgtgtgtatatatatagaacctatctgtattttttatatatatataacctatcattttatatatataacctatcattttatatatatatatgtatgtatgtatgtatatacatgtaaaatatcattctacctgaaagaggaacttgatgyataaagctatttatctcctgatttttatggaaaataaatcaacctctaaattcctcacttgtttatttcactgtgctgagagttctctgctatatgacgtctaatgcaaatatcaaatacacacatattaagaaataga

SEQ ID NO: 498010 - DNA, 546 bp, Homo sapiens
ggatatgattctcaggttcccttgaaattagggatggccttatgatagttcttgtccatcaggcataagcagaaatgttggccatttgggaaaagcttcagttttatcaggtaggttctatatatatgtgtgtgtgtgtgtgtgtgtgtgtatatatatagatacacatttatatacacatatatgtgtgtgtatatatatatagatacacatttatatacacatatatgtgtgtgtatatatatatagatacacatttatatacacatatatatgtgtgtatatatatagaacctatctgtattttttatatatatataacctatcattttatatatataacctatcattttatatatatatatgtatgtatgtatgtatatacatgtaaaatatcattctacctgaaagaggaacttgatgtataaagctatttatctcctgatttttatggaaaayaaatcaacctctaaattcctcacttgtttatttcactgtgctgagagttctctgctatatgacgtctaatgcaaatatcaaatacac

SEQ ID NO: 498011 - DNA, 577 bp, Homo sapiens
ggatatgattctcaggttcccttgaaattagggatggccttatgatagttcttgtccatcaggcataagcagaaatgttggccatttgggaaaagcttcagttttatcaggtaggttctatatatatgtgtgtgtgtgtgtgtgtgtgtgtatatatatagatacacatttatatacacatatatgtgtgtgtatatatatatagatacacatttatatacacatatatgtgtgtgtatatatatatagatacacatttatatacacatatatatgtgtgtatatatatagaacctatctgtattttttatatatatataacctatcattttatatatataacctatcattttatatatatatatgtatgtatgtatgtatatacatgtaaaatatcattctacctgaaagaggaacttgatgtataaagctatttatctcctgatttttatggaaaataaatcaacctctaaattcctcacttgtttatttcactgtgctgagagttctctgctatatgacgtctaatgcaaatatcaaatacacacrtattaagaaatagatgggtggggtgcgg

SEQ ID NO: 498012 - DNA, 549 bp, Homo sapiens
tttttagtatataaaaacactactgatatgttgttttgtatcctgcaactttactgagcttctttattagttctaacagtttttttgtggcgtctttagggctttttatatataaaatcatatcatctgcaaacagctacagttgcactacctactttctaattgggatgcsttttatttctttctcttgactaattgctctggctaggacttctagtactatgttaaacaagtgatgacattgagcatcttcattttgttgttgatcttagacatagcttttagtttttcaacattaaatttgatgttagcgcttggcttagacaagtttttttttaagttaaagtagttctaagattatagctgctcaaaacctaggaaaccagctatttaacataacggtattcaaaaccaatagttacttgaaaaaggaaacactttgctattctgacagattaaattgtgctttattattttacgttgaataacttgtattttgatgctaagaatcacatattttctttgactttttaatgttctataccttac

SEQ ID NO: 498013 - DNA, 612 bp, Homo sapiens
gtggtacataaaggccttcatcatcagtctgttttttttgcttaactgtatggcctaacacatagaatgcccctcatgcaacatatgacaaaattctattgataaaagaataattcctcaaagtaccttggttttatttctttgtgttttgtctttggaaaacctckttatttaaagatgtctacatgtcattatgttcttaggtcatgtgtcacatctatgaagtctcatctcttgttcctatagagcttgatagttttttttctttctctaactttttaatttcttaatttttaatattttaaaatatgtatagcatctcattccatcacctagactggggtgcagtggtacaatcatagcttgctctggtcttgaacatctgggctcaagtgatctgccgagatcgacttggtcggggagaccctaacccagtggtgctagaggaattaaagacacacacacagaaatatagaggtgtgaagtgggaaatcagggctctcacagccttcagagctgacagccccgaacagagatttagccacgtatttattaacagcaagccagtcattagcattgcttctatagatattaaattaactaaaagtatcc

SEQ ID NO: 498014 - DNA, 628 bp, Homo sapiens
acagcacaagtggaaaattccacatgtaagtacttaacacaaactttagcaaatgtgcaaaattattgaaaatactgtataaaattacctttggctatgtgtataaggtgtaaatgaaacataaatkaatttggtttttagatttaggccccatcccctatatatctcattatgtatatgcaaacattccaaaatctgaaaaagtctggaattcaacacaattctgttcccaagcatgttggataagggatctcaacctgaaataacaatttttctcttacatagtcatcctttctgcttccttttcaccaagctcccaatattgtgatgtgaaaattttttggttaattatcctgtgattagtaggctatgcaaataatgcacagaactgtgcactgtagtatgcttttatattttctttctcacttttcttccttaaaattagtaattgctttcttttgcttcttttcacttttactgctgactttccacagtatccaatagcctgccaatacgattttccacaaggtcaacgtagtgtcagttcatctgttatttccaatatttcttggagcgctctctaggagacttccattctttgtggagttctccaggttttctgcacagc

SEQ ID NO: 498015 - DNA, 537 bp, Homo sapiens
atttttatttttaaagtattttccctttccacactatattcctctaaaggcattatccattatgtttgcctatctatctgttaggtctactttaatctccatttctaaaatatatatatttttttctcttcctttcttgagatctgtcacttcttttctgagatttatgaactctgatttatgttgtacttttgtgacatatatcacttgaatggtagttygccttacattttatttgtggttatgtgtatactcatacaatttatctagttattaatatcattaattcactcaacaaatattcattgatcctctactatgtgcaggcattatagtctgaagttgagccacagtagccaatcactagaaacatgaaagagagataaaagcttattgctttatgcaactaaaattttgtagtttgttatacaacaatagctgactaacacaacatatttacaatcattaactcatgtgtttagtctcaacagaatgcttttacaccatgaattcaccatattgaaattctcattttga

SEQ ID NO: 498016 - DNA, 538 bp, Homo sapiens
atttttatttttaaagtattttccctttccacactatattcctctaaaggcattatccattatgtttgcctatctatctgttaggtctactttaatctccatttctaaaatatatatatttttttctcttcctttcttgagatctgtcacttcttttctgagatttatgaactctgatttatgttgtacttttgtgacatatatcacttgaatggtagttcgccttacattttatttgtggttatstgtatactcatacaatttatctagttattaatatcattaattcactcaacaaatattcattgatcctctactatgtgcaggcattatagtctgaagttgagccacagtagccaatcactagaaacatgaaagagagataaaagcttattgctttatgcaactaaaattttgtagtttgttatacaacaatagctgactaacacaacatatttacaatcattaactcatgtgtttagtctcaacagaatgcttttacaccatgaattcaccatattgaaattctcattttgac

SEQ ID NO: 498017 - DNA, 466 bp, Homo sapiens
gtgaatattctggtacctatgacctgagggatcaaaatgtggacagggcaggatcaatttaatrccaaggtcagccagagaagctggtaaccctcactgggctggggtggtccctggcagaggacatagcacctgcaggaatcaccaagaattctaagagtaaagacaggaacaataacgcatacaagagggtggcaaagagagtgtccagcagccagaggagctctgcggagagcccgagtcatcagtagccttcagaaatcacctccacccacaccagatatgacttcctcccattcccccttgcccaggtgggaactttcattccaccaagaccctcagctctatggtccctccacaccacccctgaaatgcaaaatggagctggcatgaggagtcactcagccccaggtactccaggaactccgcatctccaggccctgcacactgactcactgggggtgtt

SEQ ID NO: 498018 - DNA, 671 bp, Homo sapiens
ctaaaatttaattatgtgttgtaaaattatgtacattacctatgtttagcttgaagattttgactttagaactctatagtaaagttcttgtttctctttttagtgacaattatgctttgtctcaagcacactgctaaaccactgctgacttcagatccaggaagstaaggacattaggtattactagtaaagacaacagaattaatcagatccactccctaaactttgtcattattcataactttttcactttagataggtgctgagaacaattatttttaatatacaatctaacttttaattatatatgtgtttaaagatatcaaaacaaagaaaataaaaatcactactacgatgtctcttacatgtgtagatgtaatcattatcatctttactcttttagggagtgtttttaacttgtattatatactttagcatgtaatataatatgtcaatataaagtataattttactatttacgtattattgtaaatttttttgccgaaacactttatccagtaactttttttagatattttttatgtcttaaattattctctgggataaagatgtaaattattgtccacatacttaattattaccttaagagtaattcttagatctgattccacaaccatttttgagacttttgatatgcattgttaaatttc

SEQ ID NO: 498019 - DNA, 591 bp, Homo sapiens
tgcttcagctacctgcctctacttcagccagagcaggtctcacttttcttttttatattgcagtttatgataagatcctctttgaaaagaagtattctgctgcttaaaaaaaagtttgaaagccartgttctagaaaataaaggtacatctgtattagctatgccaatggataaagtgtgcataaaatactaatcatacaaatattgctgataaatcaatttgtagagaagatattttaatgactttccattgaatctataaaaaaaaaactttgtatcaacagcagaatttatcatatctgagccttccttacttttctcatctcccagcactttacttttctttcccccttgtatgtaacaaaccagggatacaaaactacttccaatttagtgtttctttcatttgctcatttatttgtccattcattcatttaattaacatttattttgcaactaccatgtaccaggcagtgtggtaggcactaaaaacaacatgaataagacagactcagtctttagtttcatgaagcttataggttaaaggggcagaaagagattacagacaaaatgaggatttagaagatggga

SEQ ID NO: 498020 - DNA, 636 bp, Homo sapiens
attcaatttcagagttttcattgactctctaatgtcctccttccatctcatctcatcactgccttttcaaatgcaattgatttccctatgctcctgaaacctttttcagtccttcctagcactaaacaatgacactcatttaagaataaaaatttaggggctgggcacagtggctcacatctgtaatcccagcactttgggaggtggaggcaggtggatcacccgaggtcaggagttcaagaccagcctgaccaacatggcaaaaccccatctctactaaaaatatacaaaaattaggcaggcgtggtggcaggagcctgtaatcccagctacttgggagactgaggcaggagaattgcttgaacctgggaggcagaggttgtagtgagccaagatcacaccactgcactccagcctgggcaacaagagcgaaacccygtcttgaaaaataaataaataaataaatatgtaagaataaagactaaattaagaactaagaataaagccacctaagggaccgaggcagatttacctgatgggaggaaactgaaatgagtaagggatgtgcacagggcttgcaaaccacagctgaaactctggttttgactctgagtgaaatgggaagccagtggagga

SEQ ID NO: 498021 - DNA, 501 bp, Homo sapiens
atttaaaagaaaaagatcctgtttttcccctataaaactctcataacatcctactcgcaacacccttataagatgaaactcttagaatactttatttttttatcctttttcatttactattttttctggaatagcatgatggtattccttgcagcatattcctccatttcaagggttcctgtttggtcttatactcccagcctataacattcagctataactatacacatatatacatttttaacctcagcacctaacagttgtttcctctactcatcctcttcacccatgmttagaaacatgttttgattcatttgttatttaattagttatttacttggtagtttgcctcagatgatttctatggatgatacacactttaaatatgttaatattctcaaatattttcctttctcctggcagctaaatgtaaacttggcttgggttgggctctagctgtctttcaaatagtctgtaatttattgtaaatatattctaaca

SEQ ID NO: 498022 - DNA, 528 bp, Homo sapiens
gcacatgtcagggacccacttacttctagaaacattgattaccttattttgggagatacaaggagggggatggtaggaatgataccatctctgatcatacacagggctgtgtgcatatgtgtatagttgccagcatcaattaagatagatgtaggtgagagtrctttgtaaattattaaataaattttgaattgtaaccaaagtgtaacacaaacaagaggctttactataattcttacagaatgtagattataagcaagctttatcagttttgtaaaaactctgaggatttattaattctttgggcaacatatgtgtattagtttgttatcatgctgctatgaagaaataccccaaactgggtaatttataaaggaaagaggtttaattgactcacagatccacatgtctggggaggcctcatgaaacttgtaatcatggtggaaggcacctcatcacagggctgcaggatagagagtgagcgccgagtgaaggagaaaactccttataaaaccatcagatctcatg

SEQ ID NO: 498023 - DNA, 579 bp, Homo sapiens
ttaaacattatctctgagtgtgtctatgagggtgcatctagaggacactaacatttgaattggtggacagagtaaagtagatggacctctccagttgtggtgggcctcatcccatttcttcagggctcaaatagaatgaaaaggtggaggaatgttaaactaatggccagactgtttgaggtatgacagtgatcttctcctgctctgagaactcctgattctcaggccttcaaatctaggctwgaatctgtataatcttctctctggttctcaggctttgaaccagctttcctggatctccagctcacagaaggcagattctgggacttctcaacttctacaattgcatgagccaatagcttataagaaacctctttatatattcagtagaagatacacatctcctattaattctctttatctacagagctacgactaatacggatgggattataatatattagcacgtaaatgaacaattataatgtataagaagaggaaaggaaaggaccatattgctataaagcttttgtatagtattgaaatgaagtttacaagatttgaacaagattattctaa

SEQ ID NO: 498024 - DNA, 579 bp, Homo sapiens
ttaaacattatctctgagtgtgtctatgagggtgcatctagaggacactaacatttgaattggtggacagagtaaagtagatggacctctccagttgtggtgggcctcatcccatttcttcagggctcaaatagaatgaaaaggtggaggaatgttaaactaatggccagactgtttgaggtatgacagtgatcttctcctgctctgagaactcctgattctcaggccttcaaatctaggcttgaatctgtataatcttctctctggttctcaggctttgaaccagctttcctggatctccagctcacagaaggcagattctgggacttctcaayttctacaattgcatgagccaatagcttataagaaacctctttatatattcagtagaagatacacatctcctattaattctctttatctacagagctacgactaatacggatgggattataatatattagcacgtaaatgaacaattataatgtataagaagaggaaaggaaaggaccatattgctataaagcttttgtatagtattgaaatgaagtttacaagatttgaacaagattattctaa

SEQ ID NO: 498025 - DNA, 552 bp, Homo sapiens
gttaaacattatctctgagtgtgtctatgagggtgcatctagaggacactaacatttgaattggtggacagagtaaagtagatggacctctccagttgtggtgggcctcatcccatttcttcagggctcaaatagaatgaaaaggtggaggaatgttaaactaatggccagactgtttgaggtatgacagtgatcttctcctgctctgagaactcctgattctcaggccttcaaatctaggcttgaatctgtataatcttctctctggttctcaggctttgaaccagctttcctggatctccagctcacagaaggcagattctgggacttctcaacttctacaattgcatgarccaatagcttataagaaacctctttatatattcagtagaagatacacatctcctattaattctctttatctacagagctacgactaatacggatgggattataatatattagcacgtaaatgaacaattataatgtataagaagaggaaaggaaaggaccatattgctataaagcttttgtatagtattgaaatgaagt

SEQ ID NO: 498026 - DNA, 634 bp, Homo sapiens
catggctctgcaatttactacctatgtgatctcaattcattcaaaccctggtttacttctgctaaaaattgcatcataatacctaactgaaaggtttgagtatacagaaaacacatcttaaacttttaatgtaatgatttccatttcacaaagtccaagaggttctcacaaatctttcctcaaatcttaggcatcaggctttaaaccttttcaaacaagatcatctgggcctataatgcctccagtggaagccatttgcaatcttttgagattcactttttcctacaaggcaaaatggaagcatcactttccctgactgtggtagtgccatttggcttaccctatcccccacactaattgtcacccttttcttaaaatctagcagagtttcttacacactgtaaatgttcattaaatattagtaaaaatgataaatagaagaacagaaaaaaagaaggataaatagaaaggaagagaaaaggtaagaggaaagaaatacatgtttttcttttcctcccacttcactttaactctcccattaacataattacctacatggtgatatagtttggatatttgycccctccacatctcatgttgcaatctgatccccaatgttagaggtggtacttga

SEQ ID NO: 498027 - DNA, 536 bp, Homo sapiens
aaaattactcaaatggcaagtataacaaaatataaattctgattttcacatttctgtttaacaacttcaaaacccaatttagagcattcattcatcagcagaataaagagagagaattctaacaaatgtccaaagctaaggggyctcactgccctgctgcacacaattttaaactttaggcttctagatggatcgctgaagagatgaccgaggtaaatctctcaattctacactttattcgtcaatgcaccaattagaaacagtaacctgtcaccatgaatttactttccccttgtaataaatatctgttaaacactaaacccagcaaatctctgttaaacactaaaccctgtagcatcgtgttcaaagctactcagaacttgaagaaatctaaatctgcccttgaagaaatctaaatctaagaaagcactcatcctgaggccaggcacagtggctcacacctgtaatctcagcactttgggaggccgaggctggaggatctcttgagcccaggagtttgagaccagactggccaa

SEQ ID NO: 498028 - DNA, 536 bp, Homo sapiens
aaaattactcaaatggcaagtataacaaaatataaattctgattttcacatttctgtttaacaacttcaaaacccaatttagagcattcattcatcagcagaataaagagagagaattctaacaaatgtccaaagctaaggggcctcactgccctgctgcacacaattttaaactttaggcttctagatggatcgctgaagagatgacygaggtaaatctctcaattctacactttattcgtcaatgcaccaattagaaacagtaacctgtcaccatgaatttactttccccttgtaataaatatctgttaaacactaaacccagcaaatctctgttaaacactaaaccctgtagcatcgtgttcaaagctactcagaacttgaagaaatctaaatctgcccttgaagaaatctaaatctaagaaagcactcatcctgaggccaggcacagtggctcacacctgtaatctcagcactttgggaggccgaggctggaggatctcttgagcccaggagtttgagaccagactggccaa

SEQ ID NO: 498029 - DNA, 536 bp, Homo sapiens
aaaattactcaaatggcaagtataacaaaatataaattctgattttcacatttctgtttaacaacttcaaaacccaatttagagcattcattcatcagcagaataaagagagagaattctaacaaatgtccaaagctaaggggcctcactgccctgctgcacacaattttaaactttaggcttctagatggatcgctgaagagatgaccgaggtaaatctctsaattctacactttattcgtcaatgcaccaattagaaacagtaacctgtcaccatgaatttactttccccttgtaataaatatctgttaaacactaaacccagcaaatctctgttaaacactaaaccctgtagcatcgtgttcaaagctactcagaacttgaagaaatctaaatctgcccttgaagaaatctaaatctaagaaagcactcatcctgaggccaggcacagtggctcacacctgtaatctcagcactttgggaggccgaggctggaggatctcttgagcccaggagtttgagaccagactggccaa

SEQ ID NO: 498030 - DNA, 610 bp, Homo sapiens
cctgatgagaaatggttactttgtagaaacagattatcctgaaggccactcttgaattcgtggcaagtctggattgtataattcagatattatgcatataggaattagaaatatatgcacagttagaagccttcttttggaatatagggcagctccctggttgggatttgaaactgtagctgcctttctattggaagtatagtaataatgtagcaacaaactgccctttggtggtgctgagccaccattatgcactttgaggtgttttcccaaaggttaggatagatttgtcctgctggagggcgcttctgctttgaacccaagtccatgtgtttgtaagttcgtgatcttgaccacctgaagtcaagttcctgatcttggtcttagtgcccagtgctctagtctagcagcagtcgctccccctccacacacacacactcattcccttyctcactcactgtttgcatatgtgacgtgcactcagacctttacttgctcaagcacataaaacaggctgtgggttaggtgccaaagacatgtgctagatatttcggtgctgcaatgtaggtgtaggtaaagctgatggtgatagggaggctgggagacatac

SEQ ID NO: 498031 - DNA, 651 bp, Homo sapiens
gccaaaacttggaagcaaaccagaaaactgtggtacatccatgcaatggaatactattcagtgctaaaaagaaatgcgctatcaagccatgaaaagatgtggaggaaccttaaatgcatattgctaacggaaataagctaatctgaaaaggttgcatactgcatgattccaactatatgacattctggacaaggccaaactacagagacagtacaaagaagagtggctgccagtagtcagtggggagggagggatgaagagccagagcacaggatttttagggtggtgaaactattctgtatgatacactaatggtaacggtagtacatggtattatacatctgtcaaaaccaacagaactgtacaacacaaacagagaatgctggctcccctgggtgtgrgggggcatgggagccctggctcctgtaaatgtaaggagcattgggttccttgagtgcgggttgactgtgggagatgtgggggccttggcttccctggtttccttcagtgtgggagatgtgggggccctggcttccctgggtgtgaggagcattgagactctggctcccttggctttcccaggagtaggaacccctggtccctccagcctggctcctagggcactcaccccttgttagcccagtgcctggg

SEQ ID NO: 498032 - DNA, 430 bp, Homo sapiens
ctgccaaaagcagacccactcaggtgtgttgtagcagggattcaagtgggaatggcatcaccataggtgttgaatatgttcttcaatggttaagtacttttaatcagtctgaaaaagtgaaggacatacttctattattgtataaaatggctmaatttctgaaaacttccaattacgttaaaactgtaaaaataatagttgaatttaattgtaaaattaagctgtgctctaggtgccattcacacccatataagtatcttgataatttttttaaaaaatttttgaggactcagggatattctttggaggctatccagcattcctggcctctatccaatataaagctaaaagtgccccaaatcattgcaacaaccaaaaaaaaatgcctctatgagattccattatattcttggtcagacaataaaaactt

SEQ ID NO: 498033 - DNA, 536 bp, Homo sapiens
cgcaacctctaactcaaatctttctgaaggtatcaagtgggctttaaaaatgtaaaactttctgaaagaaattttcaaggggratagaataaaggaaaccaaaatattttatgtcctaatatatttgtttgactattttgagatgcttctcagagggcctgaaaacagaagtagtcctgaaaagactgtcttttgtcagggagatttgcatccgtagagaaaatctgcaggactatagagattgtttaaccacagagtgcatacccatcaaatattttaaagtggaaaataggtacttgaattaatgacaaggttagcttgaaacacaaattggaattccacattcccaatgtacattgtgtaatatccaaatgattattttaaatggttgtttatgattatttttgtgtttttaattcaggtgtaactgccgagacaaatgtgaaaataaacaatgcaatatcatctaaattctcaaattaaagtttctattctacttgccatatgagagaataagaaatacattcactatgata

SEQ ID NO: 498034 - DNA, 524 bp, Homo sapiens
tgtggtgaaacaaaaggcaggaaagttattaagtactggggtgagctaacagaagagtacaggaagactttatcggaaggttggtcaatttctttaggccatctgtgtttgataattggtacttgtaatctgtgtttgctaattaagtaggcttctgcccactcacacagagactgagagctaggagtgattttattttgttgttcattttactgtaattatatttcaaagggatggctcccagactcacgagaaagacattactttgttgtaaaactggggagaggccaggcaaagatttatacctcaaaggtgcagagraagaattcgttaattgcaagtttttgacaataaagtctctaaaaatagggaggtcaaagacctatagccaggaagaaacctgtccaagatttagtcaagctgaagagaatgttaatgaagtccattctggtcacagcttgggctgatattcactttttgggtatgaaaataattgttttcaattatagaatgaatttggttac

SEQ ID NO: 498035 - DNA, 590 bp, Homo sapiens
ttaattttgtgtatttttattactgaaaatttgccctttttcagtctttccctgaatggtcttgcttgtgtttttattccaaattaacttgtttgttctcttatcgacagggacgggggcagagaaattctagccagaaaagtgtgggtcactgacaaaccgccactctcaagccaaaaaacctgaaaccacaggccaaagtgagagcttatatacctgttttcccacttgaatgctgctttttcctcaaccacccctggccccgccctgcgccatcctgtgcctattaaaaccccagactcagctagtacatgggactatggctggacgtgggagaaaagcagcttgacttcagaaggacagcttaacagcgtaacttcggagaagaatctggctggagatgaccwgacttcaggggaaggtaaccttcctaccccctccgatttacagctccccttcccactgagagccactttcattagcaataaaatcccccgcatttaccatccttcaatttgttcatgtgacctccttcttcctggatgcgagacaagagctcaggagccatgggtgtggatataaaaggctat

SEQ ID NO: 498036 - DNA, 590 bp, Homo sapiens
ttaattttgtgtatttttattactgaaaatttgccctttttcagtctttccctgaatggtcttgcttgtgtttttattccaaattaacttgtttgttctcttatcgacagggacgggggcagagaaattctagccagaaaagtgtgggtcactgacaaaccgccactctcaagccaaaaaacctgaaaccacaggccaaagtgagagcttatatacctgttttcccacttgaatgctgctttttcctcaaccacccctggccccgccctgcgccatcctgtgcctattaaaaccccagactcagctagtacatgggactatggctggacgtgggagaaaagcagcttgacttcagaaggacagcttaacagcgtaacttcggagaagaatctggctggagatgaccagacttcaggggaaggtaaccttcctaccccctccgatttacagctccccttcccactgagagccactttcattagcaataaaatcccccgcatttaccatccttcaatttgttcatgtgacctccttcttcctggatgcsagacaagagctcaggagccatgggtgtggatataaaaggctat

SEQ ID NO: 498037 - DNA, 614 bp, Homo sapiens
tgcaaacttgcacaaacatttacagcagcacaatttgcagttgcaaaatgctggaaccagcccaaatgcccaccaatcaatgagtggataaagaattgtggatatatatatactgtaatatataaataccgggattacgcctgtaatcccagcactttgggaggctgaggggggtggatcacctcygccataaaaatgaatgaaataatggcatttgtagtaacctggatggagctggaaaccattattctaagtgaagtacctcaggaatggaaaaccaaacatagtatgttctcactcataagtgggaactaagctatgaggatgcaaaggcataagcatgataaaatgaactctggggacttgggggaaagggtgggagtgggggtgagtgataaaatactacacattgggtacagtgagcactgcttgggttatgggtgcaccaaaatctcagaaatcaccactaaagaacctattaatgtaaccaaacaccacctgttcccccaaaacttattaaaaataattttaaaaccccacagtattgcaaaggataaacatttgggtaatcaacaacaacaaccaacaactagaaaagagaacccggtgttaac

SEQ ID NO: 498038 - DNA, 500 bp, Homo sapiens
attagaataactttttgggttttttttatgttaattcatcatttattggttagtttttacaggattttaccagttactactctgcatgcattggatgcaaaatcaaaacaaacaaacaaacaaaacagaaaaataatatggtcactgctcaggaaaagtttattatattaggaaaaacacaaaattacagcatatttttatatttataataagcagaagagtaataaggataacatggctataatgccctttgtgatgctgtttatactgaattctcaccttaactgatactatttttagaggttctcaccctctctcgttgtattagcctccctttatctctgataagctgtaaacatgtcaaagtttcaaagaatacatttcatgtttgaatcttttggaayacaaagaaagatcttacttaaattctgccttatagtatggagtgatgattgagtttttagtgatgatataatcaacctcctttcaaagacaagggt

SEQ ID NO: 498039 - DNA, 537 bp, Homo sapiens
aagtaagaataggaatagatgcttcatataaagtgttttatacagaatctggaatgaattatagagtgaatatttgtattattactattatcatcagcattattattttataaaagaaataaaactaaggtttagcaagataccaaagtcactcagaaagtaagtcaaaaggaaaatacttgaattcatatttgtctgaagtcagtgcatacattataacattgttctgttctggattaatgctctttagagattaaataaaatacaagcacttggagctaatgtgtttgtcaaggaatgtactgtagtaataaaaaaaaaaaagtaatcccagtacagaaatctaaggaaaaaccaaaatttaggagatgataagaggaaaagaaatacaaagcaaatttataagtattaatgaaaaaaatgtatctatgagtatcaacaactgtatataaggaaatytaatatctccaaagataaggcagtgttttttctggaagggaagtatcatcagtgtcaaaagtgactgagaggacaagt

SEQ ID NO: 498040 - DNA, 588 bp, Homo sapiens
aattaatgtggtaaaggaatgattgctgaaaaatacaagctttcaaagcaattasgtccatatgtaggggcaggtacctaacactggctaaggttaagggctggtggtgaaagtgaggctgtctcccaaggagaagcctgctgccgattgcagcctaacccagtaagtaatgtaaatgctccaccaatttaccagatatcattcaatgtgggagcccctctttccttagagtccatgacaactaatcttgttcatctcaggtttcatgcttatgtataaacctatctgtaggtagtttgtttgacctataagtatggaggccttccttttgttggtaattttgactaagtccaaataaggtgcagtttatgaaattagcaggcatcacttgactgagtttctcttttggaagtttctatttaatctagggcagtgtgcttcttgaactgttttagcattagccatcaataccagcagaggacttatgtgtgtccagatggactcaggactcaattcagcctcctccaaatttgccaaagcatcatgcatcacactctccatggccagataagcctcctctatcatccc

SEQ ID NO: 498041 - DNA, 588 bp, Homo sapiens
aattaatgtggtaaaggaatgattgctgaaaaatacaagctttcaaagcaattaggtccatatgtaggggcaggtacctaacactggctaaggttaagggctggtggtgaaagtgaggctgtctcccaaggagaagcctgctgccgattgcarcctaacccagtaagtaatgtaaatgctccaccaatttaccagatatcattcaatgtgggagcccctctttccttagagtccatgacaactaatcttgttcatctcaggtttcatgcttatgtataaacctatctgtaggtagtttgtttgacctataagtatggaggccttccttttgttggtaattttgactaagtccaaataaggtgcagtttatgaaattagcaggcatcacttgactgagtttctcttttggaagtttctatttaatctagggcagtgtgcttcttgaactgttttagcattagccatcaataccagcagaggacttatgtgtgtccagatggactcaggactcaattcagcctcctccaaatttgccaaagcatcatgcatcacactctccatggccagataagcctcctctatcatccc

SEQ ID NO: 498042 - DNA, 565 bp, Homo sapiens
ttaagcttgttttaatccttatttttaggttaggtaatgttcaaaatgttaaataatagataagtcatgagtccatgcttcaaattcagatttaggctcttacctactactacatcacactgcctcgatagctttaaaaaggataaatgtaaccttctacatttatatatttagtatgaagcacctcatccttttggagtacaaatatggtcayttatccttatgataatcaaagtaaatattcaagaccccatcagcacaattaacaagatgctcattctctgttttgaagcttcccccttctgttgtctagagtctaattctgactaaagaggctcattatgattccaacagcaagaggagaagaggtctggagatgttcctattttgaaagttctaatttccaactgtcattgcttccatggcagctttgtctatggctgagaactgaccctgcacagttggatgcaactttcttgtctgaagtagtaatggcacccttactggtacagaaccctacacagatcacatccattctctttagggggagattatcccacactct

SEQ ID NO: 498043 - DNA, 611 bp, Homo sapiens
cttcgttaaattttctaggcagttcaaagatggccatttgctggtgaattttccaaaatagataacagataaaatgattatgtaagaacttggcacaacagatcattttgcctttagtcgttcaagaaatgatactaaactcaaagtcattcacttgaaacaactgagaagmccattcttaggtgtttagatccttgcttttagaaacattcttagttatatttgtgttttcaaaagttattgagtagatagatattttttcatgaatttttaaacattagacttagctgaattgattaaaattaggtgattatgaaaaaaatattgccctgctcgagggcatctggagccctacagttaccattactaaagtctgtgagtatgtctattttgaaaagtgtcataaaaatatctagtccataaatcattataggttcagtaatacatcattttgaactgattctatcttctgtgaaattctagagatatgttatctttaggtagcatgagtaagattcaggtatgctgtgaattttgttaacgtttatgttttccattaatggatagtcaggaatcttttgaactgcgtctatgtatttaaatgatttgga

SEQ ID NO: 498044 - DNA, 602 bp, Homo sapiens
attctgtatggcttgttttcattggagtgggggtcttgtctttgtgtcccttcatggtgttgctgaaagatgttgctggaaaagagggtcctgatactgaccacacagtaggattcttagatcttgtgcaggaaaaaatttgagwtgagtcagagagcacagtgaaagaagcaagtttattagaattgactccattacagacttggacatactcagaaaacaagagcaggaatgcattgtcttttgttagtgtccctacttataagtaagtataaagagaaagaattattattaaacttggacggtgtagatgtagttattaagtaaggggttattggttttaacaatgaccattaacccgttgacctaagctagctcattagtattatctttcagaaaaaatgctgcactcttaggacacttatacatttttcaggcttggtggaagatgtcttgtatggccataaatattctgcaattttaatttgtgtccagctaaaaaatatggctattttcagaccacaagtattaatcttctagatgcctggtgagtacctagctactcatattaagatagagtattctagtcatgtttattaaac

SEQ ID NO: 498045 - DNA, 629 bp, Homo sapiens
ttccttcaggttttgacacaaatatttccttctaagagataccttcacctatttctcagggtccccctcttgacttatctctattatatcacccttttaacattttcttcatagcatttactagtatctgaaattacagtcaggtgccacataatgatgtcggggtcatcaatgggcttcatgtatgacagtggtcccctaagattataatacagtatttttactgtacattttctatgtttaaatacataaatacttaccattgtgttacagttgcctacaatatttggtacagtaacatgctgtaaaggtttatarcctaggagccataggctataccatatagcatagctgtgtagtaggatacaccctctaggtttgtgtaagtacactatgatgttcacaaacagatgaaatcacctaacaatgtatttctcaaaatgtatcgccgttgttaagtgacacatgactaaatgctgtttccttgattatgatctgtctcttttactagaatgtaacctctttgaaaccaggaaccttgtctacctagttcactgcttcatccccagccttgaaaagtaaatgtgctgtatgaatgaataacaatttccagctcacaggtgttattc

SEQ ID NO: 498046 - DNA, 500 bp, Homo sapiens
ccaagaggagcgctcagttccccactaagtattctcccagatcactcctccctggggawcagatctgctgtttattcattcatttaataaatatttcacagatctcagagacaggaacaaaagactatacccagtttctttcatgttctgaggctggggtggggtggaaagggacgagttaagtctaaagatgggagaaggagctggggacgctgggacctttcaggcctctcctggggtggggacaggttgggcaccccacctgggaaagggagaaatggccctcacagtagcgctgcgcctgaggcaggtggaagatctcgtccatgtagggctctcgcagcgcccggctgaaggcggagaagaggaggcaggacactaaaaaggtacagctcaaggcggccgagaaacagtaaccctctagctgcgccattcctgctcccacagccactgcccaagaacccactcctggaaaattctgagcccggaaacccgagctg

SEQ ID NO: 498047 - DNA, 284 bp, Homo sapiens
ggaattaagtatgagggagctgcayagttcaataaatagtaagtgccgaatcctcaaagaaaatagcttctttaaaaatgactggcttttctgttagactcatcttcagtattcctggaggcaactctacatttgacatacatggtgggaaacacatttcaactgtttataacctcatgatgtgaaacttgactacctaaacaatgaaaggaaatttgactggagttctaacatactagcatggcttggtgatccctacatattgaagagtttaagtcaagact

SEQ ID NO: 498048 - DNA, 529 bp, Homo sapiens
gcaaccatgctgaactgtgagtcagttaaacctctttcccttataaattacccagtcttctgcagttctttatagcagtgtgaaaaaggcctaatacacttggtcatttagaaagatataccatacaacccaaagcaaaacttcctaaatgttttttttttataacagtggttcttaaagtgtggtccctgtaccacagcattagtatcacctgggaacctgttagaagtgcaaataattaagtcttgccttagacctaccggaaaacaaattctgatagcagagggagccaagtaatacatgttttaacgttcattttgtaatcacttatgattcccttagattcccaagtggacctgatggacatgaaagtttgagaatactgctgtcctctacattccccttgcttttctgatcactcatgctgctttgtcccctggtttctccaattcttcatctccaggcttcaccctgccaagraacaaagttcattgccaatgaacatatagacgatgttcctcctcagcag

SEQ ID NO: 498049 - DNA, 443 bp, Homo sapiens
tcttgtgaaagtggggagttaaattacctgccaactgaatcagaaaactgccaaagaaaagaaaaatggattcacatagaaagcctgttaatggaaagagaactccccaccaaggcatcgtcaaccatcagaagcactttaaagaccgtgagtstgctccatcccctaaacccaggagaagtgcacagaagcagacccagcagtgggaacagcccagtattaaattcaccccttggctatccaccctccaccatccacacatcaccccggggaacagcctcagggacggagcctcttccaggaacttccgagaacacacaaactgagagccctgtggccaaatacaagctcagatagagctggcccccccaagccctaaccagtggctggacctatttgcctcatgtctgctgaatgccaatccagatatgggtaacataagc

SEQ ID NO: 498050 - DNA, 437 bp, Homo sapiens
gttacccatatgtggattggcattcagcasacatgaggcaaataggtccagccactggttagggcttgggggggccagctctatctgagcttgtatttggccacagggctctcagtttgtgtgttctcgaaagttcctggaagaggctccgtccctgaggctgttccccggggtgatgtgtggatggtggagggtggatagccaaggggtgaatttaatactgggctgttcccactgctgggtctgcttctgtgcacttctcctgggtttaggggatggagcagactcagggtctttaaagtgcttctgatggttgacgatgccttggtggggagttctctttccattaacaggcttcctatgtgaatccatttttcttttctttggcagttttctgattcagttggcaggtaatttaactccccactttcacaaga

SEQ ID NO: 498051 - DNA, 437 bp, Homo sapiens
gttacccatatgtggattggcattcagcacacatgaggcaaataggtccagccactggttagggcttgggggggccagctctatctgagcttgtatttggccacagggctctcagtttgtgtgttctcgraagttcctggaagaggctccgtccctgaggctgttccccggggtgatgtgtggatggtggagggtggatagccaaggggtgaatttaatactgggctgttcccactgctgggtctgcttctgtgcacttctcctgggtttaggggatggagcagactcagggtctttaaagtgcttctgatggttgacgatgccttggtggggagttctctttccattaacaggcttcctatgtgaatccatttttcttttctttggcagttttctgattcagttggcaggtaatttaactccccactttcacaaga

SEQ ID NO: 498052 - DNA, 574 bp, Homo sapiens
tgcttttctccagcatcttgctgtgcagtccagtgagtaccttttggctgtttgggtttattttttttctggttcatcagatcaattgtagctttcctctgccttcttacacatagatgccaatatagtgcaaatcttacaactattgatagtttggcactataggttttttttcgtatgtgtgtgtgtatgatggagtcacactctgttgcccaggctggagtgcagtggcacgatctcggctcactgcaacctccgcctcccaggttcaagtgattctcctgcctcagcctccccaaatagctgggactacaggtgcacagcaccaygcctggctaattttttgtattttttagtagagacgggatttcaccatgttggccaggctggtctcaaactcctgacctgaagtggtccacccacctctgcctcccaaattgctgggattacaggcgtgagccaccacgcctggcctagtttttgttttttaagtggcttatttttactttataaatgcttacttacaataaggaaataatggtctttttatgccacaaacacttcagtagctata

SEQ ID NO: 498053 - DNA, 516 bp, Homo sapiens
tgtatctatcgatgtatgtcctgcctagtcacctccccattgaacctgagtttgaccatgtgactagctttgtccaatagaacaaaatcaaatgtaatacaaaaatagatattaaaaaactctttttgcattgggacttacttatgccctaaaaacatttccaacaggtgaagaagtccaggctaataagctgtagacattttactcagataacatctaacattamccacctactatggaagtgtggccacctcaggccatcgagcttcaaataagccaccacatgactgcagctatgtgagagcctcttgtagagcgcaacagtagaaacatccaattgagtccagctcaaattgctgactcatagaatcacgagacaataatgttgtccttgttttccgctactaaattttggtatgtgtatgttatgtgtatgtgtgtaattacaaatgcacatctgaaatagaaatagtaccttggtgtgctgtctgtcataacaaaaagttagaacatgca

SEQ ID NO: 498054 - DNA, 391 bp, Homo sapiens
ctgaattcagcctgcttttgytttttgctgtgacagagcagcactgaatttaatgcaaagtctcacaagcactgtgttctccctctaccaagctcacagattcactctccacgcctgaattttggttcttatgaaggtgcttttttgtactgagaattattaaatttggtgttcttgtgggagggcatgatcagaggatctttctattgctctgttccttcccatttttttgaattgttacatagtattctacaaagaagatagtctattatttatttagctagttttatattcatgaacatttaagttgttgccaatcttttactttttcaaccagagctatcataagcacctttgtacctttctcactgtgtacatgcatatgtttttc

SEQ ID NO: 498055 - DNA, 637 bp, Homo sapiens
cttgaatgactaaccaggtgaatgaaaatgaatgacagcaagcaactaattgtcattaaacagttaatagaagaaagttcatctatgttacctttggggatagttttaaataagagaggcttagagagtgaaagcagagaggatctaaggttggggcagtggtggtaagtgtctcttttgggtagagaggatgctcagggtccttcagatcccatcaggggaagcagtgcctgctgcctggggttccttccagcaggcacttgatcacaatgtcaatcaagtctactgtctgcaggagcaaaggaagaatccattatttgtaactcacccctcctgtgggagccaatcctcagataatgcagaagccctgaggggtccctctatctgggctgctatttcttggcaagattcacctggaccattctggaaagaatgctgtttgccctcgtaccraaaaaacattcagaaagaaagatgcaccatcctccctgcaaagtcctcttgggctaaccaccctggggcctgttcctcgctctgtctgcctggcgtttagacctgtgcaaaggcagaagaaccttgtgatttacttgcaagagccaagcagtgactggaggagtctaacatcctgctcagtggc

SEQ ID NO: 498056 - DNA, 571 bp, Homo sapiens
cctttggtgttcacctctcgaagctgcccgtctgtgatctggtcccatgtattagatagaaygaaagccctcaggcacagacagagtaggcactcaaaacatggttggctgaatcacatttcctggtgtgccctcagggccttcttttctcttctgagtctggacaggactggggcactcatagaccctctccagaggggcacagtctggtccctgctcacttcaaaaggaagactgattgttatttgtctaaactcacctcagctccccaagacttctgtttgcaagagaagaagctcagacaattgtctgtgcatacttaaaatgagttttaactttcaaacccaaaagctattctaattttgccccatcttatggcaattctattttttttctaagcttgcaattatgcagtttcaggatggggttctcataaaaaggaacacagcaatgggacaaggtgcccttggatgagacccagttgctgggcaggaggggcagctttcttgagatagtcgggccaggccatcgagccagttccaggagccagtttctggccagtggaaggcaa

SEQ ID NO: 498057 - DNA, 571 bp, Homo sapiens
cctttggtgttcacctctcgaagctgcccgtctgtgatctggtcccatgtattagatagaacgaaagccctcaggcacagacagagtaggcactcaaaacatggttggctgaatcacatttcctggtgtgccctcagggccttcttttctcttctgagtctggacaggactggggcactcatagaccctctccagaggggcacagtctggtccctgctcacttcaaaaggaagactgattgttatttgtctaaactcacctcagctcccsaagacttctgtttgcaagagaagaagctcagacaattgtctgtgcatacttaaaatgagttttaactttcaaacccaaaagctattctaattttgccccatcttatggcaattctattttttttctaagcttgcaattatgcagtttcaggatggggttctcataaaaaggaacacagcaatgggacaaggtgcccttggatgagacccagttgctgggcaggaggggcagctttcttgagatagtcgggccaggccatcgagccagttccaggagccagtttctggccagtggaaggcaa

SEQ ID NO: 498058 - DNA, 571 bp, Homo sapiens
cctttggtgttcacctctcgaagctgcccgtctgtgatctggtcccatgtattagatagaacgaaagccctcaggcacagacagagtaggcactcaaaacatggttggctgaatcacatttcctggtgtgccctcagggccttcttttctcttctgagtctggacaggactggggcactcatagaccctctccagaggggcacagtctggtccctgctcacttcaaaaggaagactgattgttatttgtctaaactcacctcagctccccaagacttctgtttgcaagagaagmagctcagacaattgtctgtgcatacttaaaatgagttttaactttcaaacccaaaagctattctaattttgccccatcttatggcaattctattttttttctaagcttgcaattatgcagtttcaggatggggttctcataaaaaggaacacagcaatgggacaaggtgcccttggatgagacccagttgctgggcaggaggggcagctttcttgagatagtcgggccaggccatcgagccagttccaggagccagtttctggccagtggaaggcaa

SEQ ID NO: 498059 - DNA, 571 bp, Homo sapiens
cctttggtgttcacctctcgaagctgcccgtctgtgatctggtcccatgtattagatagaacgaaagccctcaggcacagacagagtaggcactcaaaacatggttggctgaatcacatttcctggtgtgccctcagggccttcttttctcttctgagtctggacaggactggggcactcatagaccctctccagaggggcacagtctggtccctgctcacttcaaaaggaagactgattgttatttgtctaaactcacctcagctccccaagacttctgtttgcaagagaagaagctcagacaattgtctgtgcatacttaaaatgagttttaactttcaaacccaaaagctattctaattttgccccatcttatggcaattctattttttttctaagcttgcaattatgcagtttcaggatggggttctcayaaaaaggaacacagcaatgggacaaggtgcccttggatgagacccagttgctgggcaggaggggcagctttcttgagatagtcgggccaggccatcgagccagttccaggagccagtttctggccagtggaaggcaa

SEQ ID NO: 498060 - DNA, 595 bp, Homo sapiens
gggagtctggtagccctgtgcttggctgttgcgagaatgctctttgtagtggttgatatgatgaagagcctccacggagtatgccggagtgtttttttctgtcaaggacattgttggagtataattcttgaagcctagatgacggagcaccctttttaaattttattattttttaagagacagggtctctgtcacccaggctggagtgcagtgacgcagtcrtggttcactgtagcctcagcctcctgggcttgagcagtcctcccacctcagcctctcgagtagctgggattataggcgtgtgccaccacaccagactttttgtgtgtgtgtagagatggggtatcactatcttgtccaggctggtctcaaactcctgggcttaagcaaccctcctgcctcggactctcaaagtgctgggattacaggcaagagccactgtgcccggccagcatcctttttatcactcagattgctccctacatggctggtgacgtagtccctttctccattgcctttcatggaggaaggactagggtggtccctggagggcaggaggacgtgtgccatggtacatggtttggcacgttggggg

SEQ ID NO: 498061 - DNA, 595 bp, Homo sapiens
gggagtctggtagccctgtgcttggctgttgcgagaatgctctttgtagtggttgatatgatgaagagcctccacggagtatgccggagtgtttttttctgtcaaggacattgttggagtataattcttgaagcctagatgacggagcaccctttttaaattttattattttttaagagacagggtctctgtcacccaggctggagtgcagtgacgcagtcatggttcactrtagcctcagcctcctgggcttgagcagtcctcccacctcagcctctcgagtagctgggattataggcgtgtgccaccacaccagactttttgtgtgtgtgtagagatggggtatcactatcttgtccaggctggtctcaaactcctgggcttaagcaaccctcctgcctcggactctcaaagtgctgggattacaggcaagagccactgtgcccggccagcatcctttttatcactcagattgctccctacatggctggtgacgtagtccctttctccattgcctttcatggaggaaggactagggtggtccctggagggcaggaggacgtgtgccatggtacatggtttggcacgttggggg

SEQ ID NO: 498062 - DNA, 595 bp, Homo sapiens
gggagtctggtagccctgtgcttggctgttgcgagaatgctctttgtagtggttgatatgatgaagagcctccacggagtatgccggagtgtttttttctgtcaaggacattgttggagtataattcttgaagcctagatgacggagcaccctttttaaattttattattttttaagagacagggtctctgtcacccaggctggagtgcagtgacgcagtcatggttcactgtagcctcagcctcctgggcttgagcagtcctcccacctcagcctctcgagtagctgggattataggcgtgtgccaccacaccagactttttgtgtgtgtgtagagatggggtatcactatcttgtccaggctggtctcaaactcctgggcttaagcaaccctccwgcctcggactctcaaagtgctgggattacaggcaagagccactgtgcccggccagcatcctttttatcactcagattgctccctacatggctggtgacgtagtccctttctccattgcctttcatggaggaaggactagggtggtccctggagggcaggaggacgtgtgccatggtacatggtttggcacgttggggg

SEQ ID NO: 498063 - DNA, 595 bp, Homo sapiens
gggagtctggtagccctgtgcttggctgttgcgagaatgctctttgtagtggttgatatgatgaagagcctccacggagtatgccggagtgtttttttctgtcaaggacattgttggagtataattcttgaagcctagatgacggagcaccctttttaaattttattattttttaagagacagggtctctgtcacccaggctggagtgcagtgacgcagtcatggttcactgtagcctcagcctcctgggcttgagcagtcctcccacctcagcctctcgagtagctgggattataggcgtgtgccaccacaccagactttttgtgtgtgtgtagagatggggtatcactatcttgtccaggctggtctcaaactcctgggcttaagcaaccctcctgcctcggactctcaaagtgctgggattacaggcaagagccactgtgcccggccagcatcctttttatcactcagattgctccctacatggctggtgacgtrgtccctttctccattgcctttcatggaggaaggactagggtggtccctggagggcaggaggacgtgtgccatggtacatggtttggcacgttggggg

SEQ ID NO: 498064 - DNA, 603 bp, Homo sapiens
tttaataagcaactctcttgtactaatagaaaatgtatggttacaatcacataagcataagcagtgaaagtttccgactttactttttacagttcccaacacaacctaagaagttgtcggctgggcgcagtggctcatgcctgtaatcccaacactttgggaggccgaggcaggcggatcacctgaggttgggagtttgagaccagcctgaccaacatggagaaaccctgtctytactaaaaatacaaaaaattagccgggcacggtggcacatgcctgtaatcccagttacttgggaggctgaggcaggagaatcacttgaacccgggaggcgaacgttgcggtgagccaagaatgtgccactggactccagcctggtgacagagcgagactccatctcaaaaaaaaaaaaaaaaaaaaaagaagttgtctctatttcagaaaataaaatttaaatatccatttgcctcaccacaagatttagaattaggggctaggaaatccccttggcttctctatggggaatctgttaagccaacaagggatccttccagggcttttgtgggagattttcaaggctaagtataactacagtatcttcag

SEQ ID NO: 498065 - DNA, 523 bp, Homo sapiens
cttccgcagccagggtcctcctccactcacccatactatcaggttctccttccagcccccttgacagctaaggtacattttgttgccccccctccccccgcattcatctggaatggaccacaagctcctgaacatgagaccacactcaacccagagacacacctatcctgaggcacctgaggacrgcacacatgggggcatcataggaagggcctggctttggagttacaaaaccatggtgtccgcctgaaacaacaccgtgtactgacatgagatcccggcaggccactctgctctcagagcctccatttccttgcatttaaaaccggaagcatacactggcggagaggcaccctccccatgggattgtgtgcggagcagaccaatgagtgtgacaagcctgttagcaaggtgctatgtacaatggccactcacatttaaaatcacgctggaagtcagagcactcctggaaatgtcccacacctatggccctttccaggggtttggagtcacgccttggggg

SEQ ID NO: 498066 - DNA, 555 bp, Homo sapiens
cctagcttcacaacacgtcaggaatctgaaggcgtctcatcgtctccaccatctcttgccaggttatggcgggagccagatcccacgcttgtcctcttagggtctgttctcaacctggcactcacagcatctctttaaaacttacacagggctatgttatccctttgctaaaaatccaccaaagactcctcatctcattcaaaatgcaagccaagttcttcccacagcctgcaaggccctctgtgccccgcctccaccctgcagctctctgaccgccttcctccttcctccgcgcctcgcccaccaggcacactcctgcctcgggcctcacactgtcaggcacctcacctggatgggagggatctccrcttgccagaaatgcactgggccaactccttcaccgcctgggagctttgctcaaatcttaccttctgaatcaggcctgcccaccctatttaattctgcaacagacgccttccacccctcccccacactctcaagccccctaaacctgcctactgtttccttctacaacatttcctttttaacatgcca

SEQ ID NO: 498067 - DNA, 450 bp, Homo sapiens
gctgggctgcctggccttggatggccggaggctggggagtggggaggagtggtggcagtggtgtacaggggcatcctcaacagrgcttcccttcattccaccaccagaggctggcctcgtgtttccccaagcctggcgtctccctctggcttcccagccatggagcagtggccgctcataggggcttaccctggggcgcctgctgctcctcttcttggttttgctgctgctgcagtgcccaggtctgggagttggggtgggggttcctaggcatgggcccaggtgtcctggagctggctggcttgcagggaacgcacgcaccatcccaaggccagaccaactgactctcacttttctcttgctccctttttcttctgaggctactggattcttcccaccaaacgaagaagatagggaggggaggtttggggggctccatctagggaagga

SEQ ID NO: 498068 - DNA, 458 bp, Homo sapiens
actcccatttcatacatgagaaaactgaagcaacttagccaaacacacaataaattgagctagttaacagactcattttttctgcgtctgtattctgagatctagacattgtgctgtactgcatgggtagacaaagagaagtgagaaaatctttcaagaagctcccagtctaggagatccacaataatacagtttaatctttacatattgttttatctttctagagtatctatccatcaagtgtcaactgatataaacattacaatattactctgtagctttaattaaaacgactctgtagttttaattttctaagcattgaccaaaacatgtcctctgaatattaacatgtcctctgaatattgacatgtggaaattttcatktcaaaactatgtttctgaattttgtttccattatatctgtgaaaataaaaagtaaacaatgaggggaactgtag

SEQ ID NO: 498069 - DNA, 548 bp, Homo sapiens
aatccgtgaaaggttttattttgtttatttgactttagaatattaaaaaatattttagtcatttcattaaaaagccttggcatggtaagctatcttagaagtcaaaatatatattgaatcatttaaatattcttcattttggacaaataatatgatagattttctgaagaaaaccaaatatttgatgaggctcttaatgaacaatgtaaaactgtttaattagagttacttgacacattcttgtatttaaaatagttcattataaacattttactcttgtatttttataaagactggctggaaggaagtcattttggaccagagccaacccataacacaatgcagaggtattgctttttttgataagttaagaattgcccattacaaaggtcaaaatcttttttttttcctttgccaaaagtcaaatgctgttatatttatattgtccctttaaaattatgattaaacatttttatttrtaccgtctttagctgttactcaacatctgggtaaaatgtcagagtcactttttatctttcttaaatgct

SEQ ID NO: 498070 - DNA, 588 bp, Homo sapiens
ctgctattaatcaagagtatctgttttaaatgatgtctcctcatgaaaacctcctagtatctcccattgtaaaaatgtaatgcacaggaatattaaagacaaagtgatttggcttttataattgtgtcaaattttaccatgtttttgtcccttccgatatgaaaatactgaatttggaagccagaagtttcattctcaaaagaaatgtggatagtaaaacaaacaaacaaaggaaaaacaccaaaaaaacagggcagaaacaaggaaacaaatagtctactaaaataaattgagagggtccacatcatcccactggtcattggaaccagcaagttctttgagcttaaaagtccaaaaatattgaagctgtcctcaacttttatgttgtctcatcttgcatgtaataaaaaggctaatgtggagaaatatgtgtgatttattatttgctgttgtaataatttawatatcataaaattttatatgtgaaaaactcctagaaattattttttagtatcctgattttaccaaatatgtaatggaggcctagagaagttaaaagattgttacaataatctgtatgttttctgg

SEQ ID NO: 498071 - DNA, 652 bp, Homo sapiens
tcaaaccatccccacactaaggtaagacagaatggtttctctttcttcccaataccaataaaaatccccattctacaaataattgattaatgctatttatttagaccttaaaaatcccatcaaatagataaattcaataaggctttattaaataaccacctacagtaaacctgcagtgagggtgtatatcaaaaagaatctcccttcctggcctaactgttggacattttcctttttctattccaaacaagtttgtatagcttccccatgtacacactattatggactaaatgtttatgtttcccacaaaacttttatgccagaactctaatccataatgtaatggtatttggaggtggggccttggggagacaattaggtcctaggggtggaaccctctccatgggatcagtccttctatatgaacagccacatgacagcttgcttccttcctccctcyatgccatgtgaggacacagcaagaaggcagctgtttataagtcaggaagtaagacctcaccagaatccaaccatgctggcaccctgatctcagatttccagcctccagaactgtgagaaataaatgcttgttatttaaaccacccaggctatggcattttgttacagcagctagggcagactaagacacata

SEQ ID NO: 498072 - DNA, 640 bp, Homo sapiens
ctgtaggattgactacatggaagaaaatccattcatcattgactaatttggcatctattaatcacatctcatttctcagccctatgaagaaattaaatctaattcccttttttggaatcaacagccacaactaaaagcatggccagttttcactacatctctattccttcmagaaaaaattctcccaactacaaagtagggtctaaaaaggaagcctgacctggagggactcaattcattcattcaacaaatacgtgtcggacgcctcctatgtgccaggcactattctagatttggggacagagtagcagaagaaacacagatgaagatcctcactctggagattagatccaagcagaggggagaacaggattgtgtagtaaaaataatgttggaaggtaaaaagtgatatggggcagggagaaagaataggagaggttaagggggattgagagtgggtgtatgaaaactctgcattgttaactagaatcgttaagataggccctattgaataggtaagcaaagacttgaagaagatgagggagttaggaaagtagtagccctccagctaagggctaatatcagttcagatgtttcccctaggacctctatgacaaagcaatgagggtgcaataaagtt

SEQ ID NO: 498073 - DNA, 554 bp, Homo sapiens
ctatataatcctccatgtaataattaccccacataaacccagggcctcatacctccttagctcttcccagacagtccaatgaataagcaacaacaatgactgaacattttcacaaygaacaagccacatgattaggaaattaccaacatggctattttcaaataatttccagaagatcaccagggaaacccctagaaaaactaagctcatttaacttaaatccgaaagagcacccagcagtctaaggaaaaacatttagatgtttgttctggcctatttctatgacagcaataagaatgtccctaatattcctacctagtgttgtgtaaagtaatcagagaaagtggattcagtcttggcctggtggctcacacccgtaatcccagcactttgggaggccaaggtggatggatcacttaaggtcaagagttcaagaccagcctggccaacatggcaaggctgtttttatttttgtaaaaacacaaaaaaaatttgtatttttagtctctactaaaaatacaaacattagctggctgtggtgggtgcctgtaatt

SEQ ID NO: 498074 - DNA, 382 bp, Homo sapiens
tctaatcctcattggattttgagcaagaaattacttttgattaatatctgtcttcccatctaggcagtaagttccctgaaggcaggaaccctgtctgttytgtagactgcttttattagtcagggaaattcatgttagcttctgtaacaaatttcttcaaatcagtagctgaaaacaataaaaggatcaattctggccaggtgtggtgattcatgtctgtaatcccagcactttgggaagctgaggcaagaggactgcttgaggccaggagtttgagtccagcctgggcaacatactgagacctttacaaaaaatatggtatgtgcttgttgtcccagctacttgggaggctaaggtggaaggatcacttgagcccagatgc

SEQ ID NO: 498075 - DNA, 382 bp, Homo sapiens
tctaatcctcattggattttgagcaagaaattacttttgattaatatctgtcttcccatctaggcagtaagttccctgaaggcaggaaccctgtctgttttgtagactgcttttattagtcagggaaattcatgttagcttctgtaacaaatttcttcaaatcagtagctgaaaacaataaaaggatcaattctggccaggtgtggtgattcatgtctgtaatcccagcactttsggaagctgaggcaagaggactgcttgaggccaggagtttgagtccagcctgggcaacatactgagacctttacaaaaaatatggtatgtgcttgttgtcccagctacttgggaggctaaggtggaaggatcacttgagcccagatgc

SEQ ID NO: 498076 - DNA, 382 bp, Homo sapiens
tctaatcctcattggattttgagcaagaaattacttttgattaatatctgtcttcccatctaggcagtaagttccctgaaggcaggaaccctgtctgttttgtagactgcttttattagtcagggaaattcatgttagcttctgtaacaaatttcttcaaatcagtagctgaaaacaataaaaggatcaattctggccaggtgtggtgattcatgtctgtaatcccagcactttgggaagctgaggcaagaggactgcttgaggccaggagtttgagtccagcctgggcaacatactgagacctttacaaaaaatatggtatgtgcttgttgtcccagctacttgggaggctaaggyggaaggatcacttgagcccagatgc

SEQ ID NO: 498077 - DNA, 586 bp, Homo sapiens
gatcctgggcaagtgaaaatgatgaagtcattgtcaccatcaaagtgagtgtagacatgcctctctgcctgtagacatgctcttctgcctttaagacacacttaagttattctttatttattaactatacacccccctgacaaccacacacacatacacatgcttaaaccaattgttatgatttgtctgtgtcctcacccaaatctcaccttgaattgtaataatcctcgtatgtcaagggtggagccaggtagagataatcaaatgatagaggtggttccccccgtactgttctcgtggtagtgaataagcctcagacatctgatggttttataaagggggattccactgcacaagctctcttgcttgctgccatgtaagacgtgtcttgcttcccttcaccttctgccatgattgtgaggtctccccagccatgtggaactgtgagtccattaaatctctttcctttataaattacccagtcttgggtaygtctttattagcagtgtgagagcagactaatacaccagtgttggggctcagaaagcaatatccgaagtatagcattttgacatgaggaactgaa

SEQ ID NO: 498078 - DNA, 589 bp, Homo sapiens
ggcaggtttcctattgaaatctgtctcctggaggactctggagcacgtctctatctgaaaagcctcgtaactgtgaccttgacaaacatcccttgcaggaccttgagagatggtagaaaatttagagttttgtgatttacatrctgcagaatagatacctattgatcttttttttccttctaagaaaatgttcctttgatacattctggctgaagaattggaaaatatgggttttattttgtttcgatttgatttggtttttccaaaggagagataatcggtgaattccactggggatgggtggttgtttagccaagtgtaatgttccataaattatctgggccttgaactattgccatgtatgatacatgagtgatacacacaacccaaaaaggatttattctttattttcccacccagtttcagagggagaaaataaccaggagccaggaaatagtgataataaacttcactataccttaaaaaccaatgttattctcattttcattaaaggacaatgaagctcatgaaaataatccacatactgatactattcatcatcttcctcatcacaaattaaaaatgatgc

SEQ ID NO: 498079 - DNA, 589 bp, Homo sapiens
ggcaggtttcctattgaaatctgtctcctggaggactctggagcacgtctctatctgaaaagcctcgtaactgtgaccttgacaaacatcccttgcaggaccttgagagatggtagaaaatttagagttttgtgatttacatgctgcagaatagatacctattkatcttttttttccttctaagaaaatgttcctttgatacattctggctgaagaattggaaaatatgggttttattttgtttcgatttgatttggtttttccaaaggagagataatcggtgaattccactggggatgggtggttgtttagccaagtgtaatgttccataaattatctgggccttgaactattgccatgtatgatacatgagtgatacacacaacccaaaaaggatttattctttattttcccacccagtttcagagggagaaaataaccaggagccaggaaatagtgataataaacttcactataccttaaaaaccaatgttattctcattttcattaaaggacaatgaagctcatgaaaataatccacatactgatactattcatcatcttcctcatcacaaattaaaaatgatgc

SEQ ID NO: 498080 - DNA, 563 bp, Homo sapiens
tttatgaaatgataagagaatgtggagactgtggatctgatgatcaggcttagagacagtgaagtgatttaagataataacatctttcctaacacaatgaaaatggaaagatttacccaaacccagacgaagtatttagaatgttggaaggaaacaaaaggtcatttgttttcttacacttgtactctatccacttcaagatcrgaaacaaaaatgataaagagatattgctatgttgggtcatggagtctaaccccaaattacacactatctttgtcctgaacatgattcccttgttacggaactaaattcctaccggaagccaaatcacccttcagtagtaaattaagcactgaggaatacacatattttgttttacatcctggaagaatcccatgcccattgtgtgtatcgggggtgtgtttacatagtgggcttcaagcaaactctacaagattctgctcagctctgctccagatccttaccagacacccgagacccaacctgaagagctgcccgcatggtaggcctcaggccatacccacggcctctctagttttact

SEQ ID NO: 498081 - DNA, 562 bp, Homo sapiens
tgattgccatattgaattggtcacggagttgaaattaaaactcatgactagtgatttatacattttgcttaaatcaccaaatacaagcaactctttgaattgaactgttttatcccttctactataaattcctaaattatacaaattccttcatttccttcttccttcccttcctttctcttttccttcctyccttctttcccccctccctccctctctctctctctttctttctttccttccttccttccttctttcttttgtctctctctctctccttctccctctttccacttagccatgctataaatagtaagaggtaaaagaaataaaaacagaaataattacaggcccaaatgtattattatcttcaaaggaaattacaaagagaagaaacaagagggatttccctccatcgtgtttctatacacgcacgatattctaactaaagcatgttacaagtgatctatgttatttttacaaaccaagtgagtggtttaaagaaaatggaaagatgtgtcctctaagaaaaccacagttacgtgagtggtaaatggaaaca

SEQ ID NO: 498082 - DNA, 479 bp, Homo sapiens
atcaactctgaaatcatcacctcacatgacctaaagcaagcgaatgcatggagaatagctgtgaaaaactgatctaggtgctaaaaacctacccccggggctaagacagatagatgatgagatagataaatagatagatcaatagatcaatagatagatctggtggataatttccagtggataatggtcccagttaagacagtatagagtcactgtacagatttagttcatacttagaatcttaaatatttagataataatgaaaaatgatcaattctcagactttaaaaayggtgcgtttaaatgtctacacaattgaaattatcccatcataaaaagaattattaaaataatatattgccatgtaaatttggaaagatatgttatgatggaagcaaaaataaaacaattaccagaatattagtagatacaaatggagatgtgtacattgttagggatatacattttgggttaaataa

SEQ ID NO: 498083 - DNA, 637 bp, Homo sapiens
aaaaattaaaatagaaatttataggatgcaaataccttttcttttcatgtgcacaagtattttgtttttctacaaagtttcataagtatctaatgcaatagataattaaaattccctgacacactctttatcaatagaagagacttaacgttatgcggggaagggttatctttacttgctggtgttgaggagcccagaatcagctccccatcaccttcgtgtatccatttccctgtggatggcaattgctcagagtaatattgacctcttgtcttcctgagatcccaatctaaaatctaggggaataagatcataagacacatttcagcatttccytaatgaaggatttttcattaatcatgacaattgttattaaaacaactaatgacactgaacatggaaaactgtccactatggcccagatttggggtaacacccggctaacttctctggatgctgtccccttgcctcggccatacctaactcacctccccacttagctgttggttattcttaagttctaaaggatgggatgcaggctatactctaacaaataaaactatttgttcctggttgggcttctgccctcaaatcctatctggtcaccaaatgttggttgaactggttgactgtgaaa

SEQ ID NO: 498084 - DNA, 637 bp, Homo sapiens
aaaaattaaaatagaaatttataggatgcaaataccttttcttttcatgtgcacaagtattttgtttttctacaaagtttcataagtatctaatgcaatagataattaaaattccctgacacactctttatcaatagaagagacttaacgttatgcggggaagggttatctttacttgctggtgttgaggagcccagaatcagctccccatcaccttcgtgtatccatttccctgtggatggcaattgctcagagtaatattgacctcttgtcttcctgagatcccaatctaaaatctaggggaataagatcataagacacatttcagcatttccttaatgaaggatttttcattaatcatgacaattgttattaaaacaactaatgacactgaacatggaaaactgtccactatggcccagatttggggtaacaccckgctaacttctctggatgctgtccccttgcctcggccatacctaactcacctccccacttagctgttggttattcttaagttctaaaggatgggatgcaggctatactctaacaaataaaactatttgttcctggttgggcttctgccctcaaatcctatctggtcaccaaatgttggttgaactggttgactgtgaaa

SEQ ID NO: 498085 - DNA, 627 bp, Homo sapiens
atgcagaaaaatacagaagcttaaaatatatttaatacaaatggaaaagatgtttcatttaagcaatatatatttttgtcttgaaattattcaatctaattttaggtgcagatctgagagctgttaaattttccaaaggataattgacagtcaggataaagtgcagtcaatccccaagcttcagactttccgtcttcatttggaactctttccaggcatccattttcaatgtctatccgttttccacattctccctggacctgtcttctccctctctcagtggctcataccccttgaagagacarctggtttggagagcaaaacagaagcagcaaacatgatggttagtttcaaggcggatggtgccagggccaccaggcctgaatgtgagccaagggaggacagggaaggcgctgaaccctggtcaggtcggtgatggcatctcacagaatttgggctcagaggcagagctaggggctgaggtgcagaggagtcaggaagagacaggacactgcatctgggactcagcaacttgcttttctttccaccctgagtatgttttctaattgagatgagattggtttaaagggtcagaactagggtggactgaacattttgctatgttta

SEQ ID NO: 498086 - DNA, 627 bp, Homo sapiens
atgcagaaaaatacagaagcttaaaatatatttaatacaaatggaaaagatgtttcatttaagcaatatatatttttgtcttgaaattattcaatctaattttaggtgcagatctgagagctgttaaattttccaaaggataattgacagtcaggataaagtgcagtcaatccccaagcttcagactttccgtcttcatttggaactctttccaggcatccattttcaatgtctatccgttttccacattctccctggacctgtcttctccctctctcagtggctcataccccttgaagagacaactggtttggagagcaaaacagaagcagcaaacatgatggttagtttcaaggcggatggtgccagggccaccaggcctgaatgtgagccaagggaggacagggaaggcgctgaaccctggtcaggtcggtgatggcatctcacagaatttgggctcagaggcagagctaggggctgaggtgcagaggagtcaggaagagacaggacacwgcatctgggactcagcaacttgcttttctttccaccctgagtatgttttctaattgagatgagattggtttaaagggtcagaactagggtggactgaacattttgctatgttta

SEQ ID NO: 498087 - DNA, 618 bp, Homo sapiens
ctcaccgagaccctcacggtctccctccagccaagactgaggcagcctcctccccwctttcctgactcctagaccaccccaaaccctctttccccaggaatgccaaaggtgcattcttaaaaagagttatccaagctgcaggtcctgctgcattggattgtggaatcaatttagcaaggcatagcatgatctttaaaaactaaacatggaatgggatggggtgcagtggaataggtggaatggggtagaatagaatagaatagagacatggaatgggtggaatggaatcaaatagaatggaaaagtgggatgggatgggtggaatgggatgggatgggatgggatgggatagggtagggtagggtagggtagggtagggtagggtagggtaggataggatagggtagggtaggatagggtagagagatgggattgaacggctggaatgggatggaaacaaacaggtgagagttagggaatagaatggcaaacacatttataagtgaggaacttgcatcagctccattttacagacaagaaaactgagagtgaagattgctccatgaccaagtacctaagacacgatttgaacacagaagtttctcccatggccctcca

SEQ ID NO: 498088 - DNA, 605 bp, Homo sapiens
ggtgactcagtccctccaaagggaatgagcatgaactgggagggtgtgttggacccaggagactttcactgcaataaccacatcttccccttgccctttcagcctccttcagtgggacccacttcccttccctgcaccgaaagggagtggctcgtgagtatttttagatgaggaacctctgcccatgcagtcccaggcaatgagctgcgctctcagtgtagctttccacttcactcccctctaagctgcaccctgctgtgggctgaggctttasgaggggccggaccagggtcctctgtcagcgccctgctcagcccttcataggctggttgtggttttgctccccacagcaggcaatgctggcaccagggaagaggggtaaagagacagggctgggctcgcttggcagggctgtggtgcttgtgtgggctgtggtggttggcaggctgaggtggttgtgtgggctgtggtggttgtgtgggctgtggtgtttggctttaggtgtcagcttggctaggcatggcacccaattatgtaaacacacatgaatctcagtgctcccgggaaggtattctgtggacatggtggatgtgtcccgtcacctg

SEQ ID NO: 498089 - DNA, 605 bp, Homo sapiens
ggtgactcagtccctccaaagggaatgagcatgaactgggagggtgtgttggacccaggagactttcactgcaataaccacatcttccccttgccctttcagcctccttcagtgggacccacttcccttccctgcaccgaaagggagtggctcgtgagtatttttagatgaggaacctctgcccatgcagtcccaggcaatgagctgcgctctcagtgtagctttccacttcactcccctctaagctgcaccctgctgtgggctgaggctttacsaggggccggaccagggtcctctgtcagcgccctgctcagcccttcataggctggttgtggttttgctccccacagcaggcaatgctggcaccagggaagaggggtaaagagacagggctgggctcgcttggcagggctgtggtgcttgtgtgggctgtggtggttggcaggctgaggtggttgtgtgggctgtggtggttgtgtgggctgtggtgtttggctttaggtgtcagcttggctaggcatggcacccaattatgtaaacacacatgaatctcagtgctcccgggaaggtattctgtggacatggtggatgtgtcccgtcacctg

SEQ ID NO: 498090 - DNA, 605 bp, Homo sapiens
ggtgactcagtccctccaaagggaatgagcatgaactgggagggtgtgttggacccaggagactttcactgcaataaccacatcttccccttgccctttcagcctccttcagtgggacccacttcccttccctgcaccgaaagggagtggctcgtgagtatttttagatgaggaacctctgcccatgcagtcccaggcaatgagctgcgctctcagtgtagctttccacttcactcccctctaagctgcaccctgctgtgggctgaggctttacgaggggccggaccagggtcctctgtcagcgccctgctcagcccttcataggctggttgtggttttgctccccacagcaggcaatgctggcaccagggaagaggggtaaagagacagggctgggctcgcttggcagggctgtggtgcttgtgtgggctgtggtggttggcaggctgaggtggttgtgtgggctgtggtggttgtgtgggctgtggtgkttggctttaggtgtcagcttggctaggcatggcacccaattatgtaaacacacatgaatctcagtgctcccgggaaggtattctgtggacatggtggatgtgtcccgtcacctg

SEQ ID NO: 498091 - DNA, 289 bp, Homo sapiens
ctgtggatgcggctgctttgtctctgtggcaactgttttcttaaaaaccttgggtcaatagaatctgtgtcaatcaaatcccattttctccttgacctacgtgaccccttaagagctgtgtaaggtgctgctgaagagcggcctcggggacttaaggcctggaaatccagcttgtaggaatgatccgcacacaatggcacctgtagggcgttgctgctggggcatcctgcrgagagtgcttttgtgagatggagaccattcaggccccgtggaggatcccagacagcag

SEQ ID NO: 498092 - DNA, 574 bp, Homo sapiens
tgtagaaaagaatgacagaatttctttcacagcagcttggatggagcgggaggccattcttctaagtgaaataactcaggaatggaaaacaaggascacgtgttctcacatatcagtgggtgctaagctctgggtatgcaaaggtcgacagggtgatagagtggacactggcgactcaggaaggggaggctttgcagggagggaggaaaaactactcattgggtacaatgtacactacttggatgacaggtgtgctacaatctccgacttcaccgatatacaattcatccatgtaaccccaaaccacttgtaccttgaaagctatagaaataaaaaaaaatgtataaaaacggagagaagtcaccaccaccagacctgccctgcaagaaacattaaaagaagttcttgcgggaaaagaaaaacagtatgtcagaaactcagatctatagaaacaagagtgttggggagggaatacgaggtggtaaggtctttgatttttcttactcttaattgatctaaaatagaatgtcttgcttggcatcataatagtaataatgcattggatgattctaga

SEQ ID NO: 498093 - DNA, 574 bp, Homo sapiens
tgtagaaaagaatgacagaatttctttcacagcagcttggatggagcgggaggccattcttctaagtgaaataactcaggaatggaaaacaaggaccacgtgttctcacatatcagtgggtgctaagctctgggtatgcaaaggtcgacagggtgatagagtggacactggcgactcaggaaggggaggctttgcagggagggaggaaaaactactcattgggtacaatgtacactacttggatgacaggtgtgctacaatctccgacttcaccgatatacaattcatccatgtaaccccaaaccacttgtaccttgaaagctatagaaataaaaaaaaatgtataaaaacrgagagaagtcaccaccaccagacctgccctgcaagaaacattaaaagaagttcttgcgggaaaagaaaaacagtatgtcagaaactcagatctatagaaacaagagtgttggggagggaatacgaggtggtaaggtctttgatttttcttactcttaattgatctaaaatagaatgtcttgcttggcatcataatagtaataatgcattggatgattctaga

SEQ ID NO: 498094 - DNA, 523 bp, Homo sapiens
ctcttcagtatcttcatatgctgtgcaaaaccatacggcattcattaaatgcttaaaaaatcagataattcgtgtttaaaatttttatatatgtaaaacaatagtctttggtggctagttgtataggtgtttacaagtgttttgaaagattcttagataaattggttggaatttttgggtgggatggggacacattatttttccmatttaaaacaatagagtgggctgggcacagttgttcatacctgtaatcccagcactttgggaggccgaaataggatgatcacctgaggtcagaagttggagaccagcctggccaacatggtgaaaccctgtatctactaaaaatacaaaaatttgccaggtgtggtggtgggcacctctaatcccagctactctggaggctggggcagaagaatcgtttgaacctgggaggcggaggttgcaatgagccaagatcgcatcactccagcctgggcaacagaatgagactgtttcaaaaataaataagtaaacaaacaaa

SEQ ID NO: 498095 - DNA, 523 bp, Homo sapiens
ctcttcagtatcttcatatgctgtgcaaaaccatacggcattcattaaatgcttaaaaaatcagataattcgtgtttaaaatttttatatatgtaaaacaatagtctttggtggctagttgtataggtgtttacaagtgttttgaaagattcttagataaattggttggaatttttgggtgggatggggacacattatttttccaatttaaaacaatagagtgggctgggcacagttgttcatacctgtaatcccagcactttgggaggccgaaataggatgatcacctgaggtcagaagttggagaccagcctggccaacatggtgaaaccctgtatytactaaaaatacaaaaatttgccaggtgtggtggtgggcacctctaatcccagctactctggaggctggggcagaagaatcgtttgaacctgggaggcggaggttgcaatgagccaagatcgcatcactccagcctgggcaacagaatgagactgtttcaaaaataaataagtaaacaaacaaa

SEQ ID NO: 498096 - DNA, 523 bp, Homo sapiens
ctcttcagtatcttcatatgctgtgcaaaaccatacggcattcattaaatgcttaaaaaatcagataattcgtgtttaaaatttttatatatgtaaaacaatagtctttggtggctagttgtataggtgtttacaagtgttttgaaagattcttagataaattggttggaatttttgggtgggatggggacacattatttttccaatttaaaacaatagagtgggctgggcacagttgttcatacctgtaatcccagcactttgggaggccgaaataggatgatcacctgaggtcagaagttggagaccagcctggccaacatggtgaaaccctgtatctactaaaaawacaaaaatttgccaggtgtggtggtgggcacctctaatcccagctactctggaggctggggcagaagaatcgtttgaacctgggaggcggaggttgcaatgagccaagatcgcatcactccagcctgggcaacagaatgagactgtttcaaaaataaataagtaaacaaacaaa

SEQ ID NO: 498097 - DNA, 635 bp, Homo sapiens
tgtctagcctctaccagattcaacaattgttaacatttgccatgtttaacttacaaaccaatctttctatttttctttctgaaccatttgaaagttggtttcagaaatcatgacacttcagccctaaaagcttccccgtgcatctctgaagattgtaggacatttcctgcatgaccacattagcattatcagagctgagaaaattaacaataattcccttgctattatcaattatccaattcataatcatagtcatttcttaactgttctccaattatctcttatagctgttttttaaaaaaagaagtatccgcattgtrttggtagtaatgtctctttaatcactggtaatctggaacatctccccaacaccttaatttttccccaccatgtttaatttttaaggaatcactagtttttgaacagttgaattgctttctgttctgaagggtctcaagtggtctttaactctcaaccaacccttagcaagatggtggctccagaatctctacatgggaagggcttgaggagagatgcaatctggttaaggagtcccggtgaaggccttttgcataagaaacatatgttttaaaaaacttagattgttgaatgtttttttttttgacatggctgct

SEQ ID NO: 498098 - DNA, 635 bp, Homo sapiens
tgtctagcctctaccagattcaacaattgttaacatttgccatgtttaacttacaaaccaatctttctatttttctttctgaaccatttgaaagttggtttcagaaatcatgacacttcagccctaaaagcttccccgtgcatctctgaagattgtaggacatttcctgcatgaccacattagcattatcagagctgagaaaattaacaataattcccttgctattatcaattatccaattcataatcatagtcatttcttaactgttctccaattatctcttatagctgttttttaaaaaaagaagtatccgcattgtgttsgtagtaatgtctctttaatcactggtaatctggaacatctccccaacaccttaatttttccccaccatgtttaatttttaaggaatcactagtttttgaacagttgaattgctttctgttctgaagggtctcaagtggtctttaactctcaaccaacccttagcaagatggtggctccagaatctctacatgggaagggcttgaggagagatgcaatctggttaaggagtcccggtgaaggccttttgcataagaaacatatgttttaaaaaacttagattgttgaatgtttttttttttgacatggctgct

SEQ ID NO: 498099 - DNA, 537 bp, Homo sapiens
agagtacaatgatgttggaatacaactccagtagttgaaaactccccactccccttagttaaggaagacttacaagaaactaatttaccaagtgccagaagatgtttagggccatattttgcccagaaaagcagtctgcatgattcagtagagttcagtctcagacttactcactctaggctcagaagtgcaaagaaaatgtagctctataattttatggtctttaaatgtttgctaaccgcccacgaccacgtgactaatgagagattctgtaaactgaattttagaccaatctggtatactcaggctattccagtaagcagtctctttggagtgagtcagtttttccaatttacaatattcttcctggttctctctaagatggtatctgggaatgtggaaggaaggcactttgggccagtgggggagagggaggcccctcaaattgtgctagtgcatagctgtgagctagctggcatttgtsggggtgattagactgctattcacacaggctgttcagaggaagtgtcctgctga

SEQ ID NO: 498100 - DNA, 610 bp, Homo sapiens
  misc_feature (1)...(610): n = A,T,C or G
taaggcaatttcaggtcagatagggttggatggagcaggcactctgctcaaatacagacagacwggagttccatctttctcagaacagggatcctgagggtgctgtattagtctgtactcacactgctataaaaaatacctaaaactgggtaatttattttaaaaagtggtttaattagctcacggttctgtgggatatacaggcttctgnnctcctggggaggcctcannggaaacttacattgatggtggaaggtgaaggggaagcaagcaccatcttcacatgaccagtaggagagagagagtgccaaggggtagtgctacacactttcaaacaaccagatcttataagaatgctatcatgagacagcactaagggggatggtgccaaataattagaaaccacccaatgatcaaatcacctcccaccaagccccacctccaacactgagaataaaaattcaacacgagatttgggtgaggacacagagccaaatcgtatcagatggtctgttcattgacattgaactggcaaaggggagacagcctgggggaatgcacaggagaagtttatataggccaggcctagaggttatataggccaggccta

SEQ ID NO: 498101 - DNA, 588 bp, Homo sapiens
gtaaattaaatctcacccatcaattttgcttcaagagaatgcctcactgagcaagcaagatggtttatcactgagcattcaaatggtttatcatagcttattattactaagatttgttgtctttttcattttctgaaaatgtggttttatattcaacaggacaaaattggttcattcagatatttagttttgatttttgtaataaaccattcatgcattatttaacttttttccagacaattaccctggtcggaggaatacattgtgtgtgactctaacacgatcaagtttgcctggtagctgtactcataaggccagcgccagctttatgtggagaaacagtagatatctgcctaaagagccatgactgaaatgtttcacatagtcctctcagtcccagagcatttccttcatcagctttcatgggatacctgtggatttkcctatgcagaaattcccatcattataccagtattcattgtttagacaacaaaatcaaggacatattctctagaattgtgttggccaattgaaatagctactagccaggtatggctagttaactttaaattaattaaatataattac

SEQ ID NO: 498102 - DNA, 383 bp, Homo sapiens
tgttcagaaattaaatagcctgcaatttaagaatcatagatttcctgctaaagaaatagttgatacaaaaactaaaatgtccttatagctcactacctccagaccttcttgagagagggagctggtcttcaattatcactgttttgtaggtatagaaaataatctaaaaaatagtaacaaggcttcataaatgtttctttcattgattttatttcttaatataacatagtctgataataaggtggattaatctgtacaagttctcaaatgatctaaggttrgaggcactgaatatagaaaatgaacccacaggttagaactcaataacattcatttaccctttaaacaactggagaaatccatgatcactctgtttaagatga

SEQ ID NO: 498103 - DNA, 559 bp, Homo sapiens
tgtattccattggatgtaagtgcttttcaaatcctctagtgtcgttactccttggatgtgtgattgatcattgatatggatttgatatttgtcctgcccaaatctcatgctaaaatggaatccccagtgttggaggtgggcctgttaggaggtgtttgggtcataggagtagatccttcatggcttggttctgtcctcacaatgcaatagtgagttcttgagggatctggttgtttaaaattctgtggcatcttcccccttctcttgctcctgctcttgccatgtaatgtacctgctcctaccttgccttccaccatgagtaaaagcttcctggagcctcccgagaaactgagcagatgccggcaccatggctatgtagcctgcagaactgtgagccaataaagcctcttttcttaattgaaatacctaatctctactgtttctttatagcaatacaaaaayggtctagcacaatcttttaaatttctgtctcttttagtgtaccttccatgcaccaaattcttctcaggaaaatgctggatcaataatgtgaatttta

SEQ ID NO: 498104 - DNA, 650 bp, Homo sapiens
tgtagatcttgcaaatattttgttagatttacacctaagtgtttcgtttttatgggtgccaatgtaaattataatatgyctttaacttcaaagtttacttgcttattgctagtatataggaaagcagttgacttttgtatattagctttgtatcctgcaaccttaatataattgcttattagttcctggattttttgttgatattttcagattttccacatagacaatcatgtcatcttcaaatactttttaatgttttccttcccaatatgaatgccttttatcttttttcttattttcttattcttttcttttttttttcattacctcaagccatttttaccagacagtttgtagtatctaatgaaatgatatgggaaatggcttttaaaacaacgaagtgtggagtctttatgttaggatgggaaattgccaatagttactgcatctccctcttctaattttatataaaagtattcaggcaggcacacagaaccacacaagatcatgacaactctgaataccaagactattgactttttaatgactaatgtagtagaacaaaattaatatttgttgaactaagtaatgattaataactagtaagatcttgtgtaaaattaccgttaaccacattgatctctgaaaca

SEQ ID NO: 498105 - DNA, 520 bp, Homo sapiens
acagcctcgccttcccacagcrggcagcctgttcccaaaaatggtccttccagctttatccttgtactacccaaccccgtggggtcttccagaagcaacccatctgctccctcctctgattccctcaagggtcacggaacctgctgctctgagcagctcgcctccgaagctggtgtgaggctgggccaatgtgtctcacattcaggtgagcctccctacaaaaatgccactatctaaaagtctgatctcagagacaaatgaatttggagatgatcattctcattttaaagaggtctcttgtttccaggttccagcaagctcgccagcagccctgaggatttctcaaagtacggtcgctgtggccccagccttggaaccatgcagagagtaggttaaaaatgaggcttccaggccacactgcacagtcccacggagtcagaatctagcaatgctagaaacgggctcacactccccagggatttttatccacactgacctctgacagtcagtttacaaaacc

SEQ ID NO: 498106 - DNA, 636 bp, Homo sapiens
ttgctacggaagacctgatttccttcttttttatggctcttgcagcattgtttgtcatagagaacaggctggatcttcctccctgtactttcagtatgatttcaggatgtgcaatgggtcaagcacacaygtgtgtcctttctaccccttttggccatgaagaaagcccccgggtccctcaagcagcacctgtccacagacctttgctggtcccgtagcgggcccagtgggaaaccgcctctgttcccttcccccatgtgtttcagaaggggaacacggccctgcacatcgctgctctagccgggcaggatgaggtggtccgggagcttgtcaactatggagccaacgtcaacgcccagtcacaggtaatggctctctggtctggactagagggtgttgcctttccacaggtggttcctctttgctgctccctcgtgggtccattggcagccgtgtaacacacacactactgtggggcagggcctagatttctcaggagcatgtctctgagcagtggtgaaggtgtcctttattatttcgcatgcatagaccgcgtgtcctaagcatgacggggttgaattgttttggacctaagccaaatagtatgtccagttgtagcctaggtggagagagaaa

SEQ ID NO: 498107 - DNA, 636 bp, Homo sapiens
ttgctacggaagacctgatttccttcttttttatggctcttgcagcattgtttgtcatagagaacaggctggatcttcctccctgtactttcagtatgatttcaggatgtgcaatgggtcaagcacacacgtgtgtcctttctaccccttttggccatgaagaaagcccccgggtccctcaagcagcacctgtccacagacctttgctggtcccgtagcrggcccagtgggaaaccgcctctgttcccttcccccatgtgtttcagaaggggaacacggccctgcacatcgctgctctagccgggcaggatgaggtggtccgggagcttgtcaactatggagccaacgtcaacgcccagtcacaggtaatggctctctggtctggactagagggtgttgcctttccacaggtggttcctctttgctgctccctcgtgggtccattggcagccgtgtaacacacacactactgtggggcagggcctagatttctcaggagcatgtctctgagcagtggtgaaggtgtcctttattatttcgcatgcatagaccgcgtgtcctaagcatgacggggttgaattgttttggacctaagccaaatagtatgtccagttgtagcctaggtggagagagaaa

SEQ ID NO: 498108 - DNA, 422 bp, Homo sapiens
agaggaagatcacttgagctagaaaaagtagctcaaggtaggccaggcacgatctaggcttaataaatatttgttgcgtaacagaagagaaggcaakgtgaagaaggaggcacagactggagtgatgcagccacaaaccaagaaactccaaggattagccaacagccaccagaaactggaaaaggccaggaatggcttctcccctagagactattgagggagcatggctctgtagacacttatttcagctcactgatactgatttttggacttctggcctccagaacgaggagggaataatatctactgtttcaagccaccaagtttgtggtcatacattatggcagccacaggaagctaacacaggaagaaaactagtaatgtgtgtgttaccaagcagctcactgctgtgggaaagtgaa

SEQ ID NO: 498109 - DNA, 602 bp, Homo sapiens
ggagctgggaaatgtatgcactgactcccatcagtcgctggttkaagggtgttcctgcgggaggagggggtattcaactttctgtctcgtgtgtgagccaagcaggtgccagcagccagagagagctctcaggaagagttgcagccgctgcagttacacctctgcatgagtccatgtgcataaaaatgaggagtgctgagggcatttgggcagggcaacaatgatgtctgctacacacacaaaaataaacggaaaagctccaaagcggatacccaaactggggcaaaaaggttaagcctactacgtgaaaacctttttcaatgaataaaccaggaagatgatagatgaagctgaaaactaacccatagcttcaacattacctattcaatcagcctagaaaggaaagaagaattagcactggttgaatatctgtatcagtcaaatgcttgcatccatcttttcatttacgaggccataattctatttggagtagtgcattagtttcctagggctgctgtaaaaaaaaaaaagaagaccacaacctgtgtggctcaaaacaacagaaatgtattcttgcagagttctggaggccagaagtctca

SEQ ID NO: 498110 - DNA, 635 bp, Homo sapiens
tgtcagggaacgcctcctgcctccctgggctggctccagacacagccgtctctctgctcagatggatgcaaagacacccagaatttgttgttttcatataacgcgtgtcaggtgttgctctcagcgcctttcacgcattaacaaagttcatscttggccaggcgcagtggcttttgcctgtaatcccagcactttgggaggccgagacgggcggatcacctgagatcaggagttcaagaccagtctggccaacatggtgaaacccggactctactaaaaatacaaaaataagccaggcatggtggcacatgcctgtaatcccagctattcaggaggttgaggcaggagaatcgcttgaacctgggagacggaggttgcagtgagcagagatcacaccactgccctccagccctggtgacagagcaagactctgcctcaaagaaaaaaaaaattcatcctcaattcagttacatccctgtgtacagtggataaaatgagtcacaggaaggctaagaacatagcccaaggacacaaagctataagtgcccaacagattctccttgcctgctgcctagacagagccaacttatccagacaggggaattgcaatagagaaagagtaattcacacagagc

SEQ ID NO: 498111 - DNA, 635 bp, Homo sapiens
tgtcagggaacgcctcctgcctccctgggctggctccagacacagccgtctctctgctcagatggatgcaaagacacccagaatttgttgttttcatataacgcgtgtcaggtgttgctctcagcgcctttcacgcattaacaaagttcatccttggccaggcgcagtggcttttgcctgtaatcccagcactttgggaggccgagacgggcggatcacctgagatcaggagttcaagaccagtctggccaacatggtgaaacccggactctactaaaaatacaaaaataagccaggcatggtggcacatgcctgtaatcccagctattcaggaggttgaggcaggagaatcgcttgaacctgggagacggaggttgcagtgagcagagatcacaccactgccctccagccctggtgacagagcaagactctgcctcaaagaaaaaaaraattcatcctcaattcagttacatccctgtgtacagtggataaaatgagtcacaggaaggctaagaacatagcccaaggacacaaagctataagtgcccaacagattctccttgcctgctgcctagacagagccaacttatccagacaggggaattgcaatagagaaagagtaattcacacagagc

SEQ ID NO: 498112 - DNA, 677 bp, Homo sapiens
ggcttgaactggaatgggctgtacacaggactgccttgccagacagcggctcagaagtcttcaaaaacgtttgaagatgccccgttaaaagcgtttggttatctgttggtaacagtgctggtctgctcagcctgccttaacagaataccacagactgggtggcctaagcaagagaaattcactttctcacagtgctggacactggaagtctgagatcaaggtgccagcagggttggtttctggtgaggctcttctaccttccttgcaggtggccacctcctggctgtgtcctcaaatggcctttacttccatgcacgtgaacctggtgtctcttcctcttcttacaaggacaccagtgctgtgggatcaggtccccaccctcatggtcttatttaaaattgcctccttaagattcctcaaataaataaaaattgagctaccatttgacccagcaatcccactactkggtgtctacacaaaggaaaacgaatcattgtactaaaaagatacccacgcccttatgttcatggcagcgctagtcacaaagcgaagatggaatcaatctaggtgcccatcaacggtggattggataaagaaaatgtggcatatatacaccatggaataccacacagccataaaaaggaacaaaatcgtgtcctttgcagcaacatggatac

SEQ ID NO: 498113 - DNA, 711 bp, Homo sapiens
gtgtttgcggggataccggcactgcagccctgggtctggactccagggtccaacctctgatctgctccagaccttagtcatcacggcaaaggtagtcctagctcatatgccgcattttctcattttatgcttggtgtaactgacaatactgaaaataaccagtattgatatcctgatttcattagagaaatgactctcagagagcttaggtgacgggaagcctgtctaaggtcacacggctagcacagatcagtagtcatgcctcaaacccatgccttcatgggctccaacccaaaagayggaatgctgctggaggcgctgcctgcaaagcagatagtgcagggcctggccaagagggaatggaaagtgtttttttgttttttttgtttttttttttttttcccttttttggagacagagtctcactctgttgcccaggctagagtgcagtggggcaatctcagctcactgcaacctctgcctcctaggttcatgcgattctcctgcctcagcatcccgagtagctggaattacaggcgcctgccccatttttgtatttttagtagagatggggttctcacatggctgccaggctggtctcagactcctgatctcaagcgatccggctgcctccgcctcccaaagtgctgggattacaggtgtgagccaccgtgcctaaaggcggtttttaaaatggattcgaagaggctc

SEQ ID NO: 498114 - DNA, 550 bp, Homo sapiens
actgggaaattataagcaaggtcttgttcactgtaaagattgttgtataaaagggaagaaatactggatatagttctatgtttgcatttatttatttattagaataaataaaggcacagagacaagaaatagtgcagatccaagagtggaaaatagattactaagtgaatatagatgaatttaaatgtacarttatagggaacatggtcacaaaggtaacactgatgaataactgtaatgctaagaggtttagttcttttaagaaaaatcagcatataagtatgggccttaaggttaaattcagttgagggcttttcttgcctttggtactgtgccaatcaggttacgttatgctacagtaacaacccccagatttcagtggctgacaattaagatttatttctagaatatattacatatctgtatttggttggctgcaagtctcttccatatcatttcctctgtttagccctggctgattgggcaggctgcattttgaacattgccagttctcatggcagagcaaaatggtggcacatgctggctctta

SEQ ID NO: 498115 - DNA, 529 bp, Homo sapiens
aattggattagataatctttaaactcattctgagaagaaaatttttgtgattcaacatattaacttaaaaggaactcttttacaaggaaaggtatcaagataagattttgtaactacaatccaaaaacaatgttcagagwgtcagtccgcagttatatataatattgtctgtgtttgcttttgtgcactcagagagagggtccatggtattcagattctggaaggggtctgtcaccacaaaattgcaggacaaatacgacaggagcacaaattaagagtcaagagcaaatatttgaaaggaatttaaaaggaatgatctgcagagttttttatttctcaaataaaatattttaacatatgtttctaaaattttaacaatgattagcttccctgaacacaacatatactctacacatacacatgcacactggggataatgtgtcctatgcttggctaatgctatgaattactttttgtaattgaattataaacaaaatcaaaccagtttttaaaatgctactttagaggc

SEQ ID NO: 498116 - DNA, 627 bp, Homo sapiens
gaaaaaatagccaggagacttgcattctaatagcaaccctggtacttattaactatgtatccttggagaaatcatcttttctctatggactttaaagaaattggattagataatctttaaactcattctgagaagaaaatttttgtgattcaacatattaacttaaaaggaactcttttacaaggaaaggtatcaagataagattttgtaactacaatccaaaaacaatgttcagagagtcagtccgcagttatatataatattgtctgtgtttgcttttgtgcactcagagagagggtccatggtattcagattctggaaggggtctgtcaccacaaaattgcaggacaaatacgacaggagcacaaattaagagtcaagagcaaatatttgaaaggaatttaaaaggaatgatctgcagagttttttatttctcaaataaaatattttaacatatgtttctaaaattttaacaatgaytagcttccctgaacacaacatatactctacacatacacatgcacactggggataatgtgtcctatgcttggctaatgctatgaattactttttgtaattgaattataaacaaaatcaaaccagtttttaaaatgctactttagaggc

SEQ ID NO: 498117 - DNA, 599 bp, Homo sapiens
aaggcttttgtacagagtctgtggcttcttcctcacctaccctgcttaactctccaagcttttaacattgtctctcatcctcctgttttcttttgtcttttactttttttaatgcagtcatgatttcctcctgattctgactttcttttcagggcaattctatttctctattttggcattatctggagagtgttctctaacttgcaccccctccttatttgatttgtccctttcaaccctattcgtgagcaatacatggtctactgatccatccttattactctccaaaatataaaccatttctgtttttcacaggcttagataaatttgctgatctctgcctagggtcattcaattctgatggagatatataccagatgcccccaaaactttcatggggcaacgaagatgaagaaaatccatcattaagcaattaaacattgaaaaaaaaccacttctgttcctcttgcagtaaagaatagtatattaatttataaggcagtgggtctgtgggaactatgaaaaaartaaaataacatatctaattgctaaactttctggtacaataattgtattcatcttttatttcaagtcattaa

SEQ ID NO: 498118 - DNA, 480 bp, Homo sapiens
gaaaaaataaagagagtccaggcaaaattgttggtagaatgtaatttgactcctgtgtggggccaatcctcttatctgtggcttgcacactgttagtggtttggggacaactactgttgtactttaccatccttacccatgaatgtgaggacttctaatgatccttttaagaaaagaataattattgccaatattgactgagcccttattctgtgctgggcactcttctaagtgcttcacatgacccagcttatcaaatggtcacaatcaccctttgaggtaggtgctgttattcctagtttgcgcatrtactatgttctagtttacaaaaataaactcaggggtaaagaacattcttatgatattatcaaaatatagcatttataagataatttgtgtttgtactatttaaacattttatgaataagtgaagatactgagtgttcttgtttgaacttttttgcttaaaacacatgaaca

SEQ ID NO: 498119 - DNA, 373 bp, Homo sapiens
aacaaggtggatcagaggctcctgctgtcggggcctcccagtgccagccctgactccagctctgagcctgatgctactttctggcccttgatcccatgcttgtttggtcactcagccctcatcttcagataaatcmaggagtaaggagagaaagagagactgggaccgcaggaggtactcaatgatctttgcagtaggcccagatctttgcagccaacttcttggttcctcagtgctgctcagcctgaaactctctaaatagcctctctccccccacagccaccccagcatacacagatacacaccccacacatggaacagctagagcacatgtggcctcccacaccgccgcttctgtgggtgtgagggcgta

SEQ ID NO: 498120 - DNA, 601 bp, Homo sapiens
ctgagtcttttctgtcaacctgtggagccgttgttggttctgttcaccactggatccttaacacttagttcaggggctgggacctggtaggtgattaatatttggtgaggccttggggtgacttgggtgctgaagtccttctgttttgtattctgattattatggttgtagcaaatattttcagacattgatttaaattcctaaacttgaaactttttgaaacagtgttttgtttttgttttttgaacaacattcttgcttcacactgaatgatgagtaaaaattacctaagtgaaggaataaatgttggagtcacatgcagtggcaaatgtgaaagagaatatatttcagattgtgacaggaaatttgttatcaggctgccttaaaaagcaattacaataacaagcatgtttacataaaaatatcactttctatgacyacatgtgactttccagaaagtgactgagtgtatattgagcgcaaaagaagaagaagaagaaaaaaacccaaacagcagaataagtaggcagaaacaaagggtaaagatttagaattcatggaaatattaaaatgaaagaaaacaaattatgggtcttggaac

SEQ ID NO: 498121 - DNA, 608 bp, Homo sapiens
ggcctgttgtggggtggggggagaggggagggatagcattaggagatatacctaatgtaaatgacgagttaatgggtgcagcacaccaacatggcacatgtatacatctataacaaacctgcagattgtgcacatgtaccttagaacttaaagtataataataattaaaaaagatacacctagtttgaattygtgatatacacatgaatatttaaatatcaaccagatagtacattatagagtaactgtagctgtttgatccaaaaagtaagtttagaattacatgtgtgtccaactatctacttttatattcctttagcctgcatacagatgaattgacatcaataacctatgatagaaccaccaatgaaatgtgagttgtaaaatatatatatacaaatatgtaaagaaatatatatgcagatatactacttttgtctatctagactcacaagcacagggagagagagaaagggagagagagagaaaagaaagagagaaacaacagagagaaagatgaagattatgtgctttactctcaggatcatccatagccatacagaatgtcttttacatggtttataaatctcatcactataggccctgca

SEQ ID NO: 498122 - DNA, 666 bp, Homo sapiens
tcttaaagagcatatctcctatgaggggtactttctcaatcccatttttccatctttttatagaccacatagaaagagacttkcagaactggtatggctttttctagaggccattccataacttattagtgatagcaacaacctggcccacaaatctaagacctgcattttgatcactaggtctctcaaaaatagccaccaattgaggaagagtaagtcaccatccttgaagacccaaaagagggatatactcctcccactttgaagatgtaagtaaatatcactcccataggggaaaaagaaaacaaatttcttctttccctgagctttccaatattttgtcctcctttccccaaaacatctgcctgaatggctcccacctgcatctatctgaagggagcagtagaaaaggttcttaacctatcatgctcattgactgttcttttggcatctctattccttgaaaattaggctgttgttcatttccttctgtaaactgtctaaaatgagataggcaaaatccagaaaactttgccatgtgtctttatcttcctatcctttccctttactttcttttcattcctacaagctgttcctcaacagttcatctgggcaattatagttcatccatggaacttctatatgcaaccacagctcttgtgccaa

SEQ ID NO: 498123 - DNA, 443 bp, Homo sapiens
gcctcttaaggctccagctaaattaatccagcagaattcaagacacatggggtggagggaggatgggcgagaaatatgctcatattagatgttactaggaaaatatcattagcaaggaggttgttgtaaacaagaagatggaggccaaatacccagcacacatcataggtctccaccagccacaaaaacattcaggggaggagctgggtgggaagcaatttgcaaagtgtctgagcacaaaaagaacsacccaccaactttgggaagtctaaagaaggaaagaattactatatggaaaatcattgctttagagaagggggataaaaaagccttcaatcgcaaattcaagagaggcctgattacaagaaaataaagacagaagaaaagatggctaagaataacgtgtcagcatccagaggcctgcgagatccagatggacagcc

SEQ ID NO: 498124 - DNA, 339 bp, Homo sapiens
ataaaatgtttcattcactcactcaacaagtatttcctggaaagagtatatactagacactctaaatctctacggtggttattaggacccacgtyttacacatgagtaggcaaaacattaggaaggttagtgactacccccaagaggtcaaagaaccagttagttcagtggcaaaaccatgattcttactcagatctctgaataagcacagtattcttttcagttccccacagccctgtattgtgtaatagtaaaagtacaaagagaaaggagaataaagaggagggggattgttaaaagagctggtgggacagacaaaatatttggacaaaaagagaa

SEQ ID NO: 498125 - DNA, 516 bp, Homo sapiens
ttggtatttttcttattcaagtaacaaggaaaaaaaaaataactccaccaagagtaaaacagaaaaaaggaacaaaactgatagcatgactgaaaaggcctggggtggtacctcacttcaggcatagctggatacaggcacttatacaagataagtctctctaatstctcggtgcttgcttccctttgattacttcattctcatgcaattctttccacatagtggcctgagcagctcctaactcacatctgcgcaagaaagcagaggctgttccccaatagttccagccaaagtcccaggactgactttcactggacccgtttggccacatgcccctgcctgagccaaccaccacatccagcctggccagacctggctttcaggaagccccttcaggaagcagttggggtcatcccctccagaaggacatggggaaaaccagaaagtgggaggagggatgcttccttctgaaaaatagggatgcaattaccacaggaggtgtcagatacagggctg

SEQ ID NO: 498126 - DNA, 516 bp, Homo sapiens
ttggtatttttcttattcaagtaacaaggaaaaaaaaaataactccaccaagagtaaaacagaaaaaaggaacaaaactgatagcatgactgaaaaggcctggggtggtacctcacttcaggcatagctggatacaggcacttatacaagataagtctctctaatgtctcgstgcttgcttccctttgattacttcattctcatgcaattctttccacatagtggcctgagcagctcctaactcacatctgcgcaagaaagcagaggctgttccccaatagttccagccaaagtcccaggactgactttcactggacccgtttggccacatgcccctgcctgagccaaccaccacatccagcctggccagacctggctttcaggaagccccttcaggaagcagttggggtcatcccctccagaaggacatggggaaaaccagaaagtgggaggagggatgcttccttctgaaaaatagggatgcaattaccacaggaggtgtcagatacagggctg

SEQ ID NO: 498127 - DNA, 516 bp, Homo sapiens
ttggtatttttcttattcaagtaacaaggaaaaaaaaaataactccaccaagagtaaaacagaaaaaaggaacaaaactgatagcatgactgaaaaggcctggggtggtacctcacttcaggcatagctggatacaggcacttatacaagataagtctctctaatgtctcggtgcttgcttccctttgattacttcattctcaygcaattctttccacatagtggcctgagcagctcctaactcacatctgcgcaagaaagcagaggctgttccccaatagttccagccaaagtcccaggactgactttcactggacccgtttggccacatgcccctgcctgagccaaccaccacatccagcctggccagacctggctttcaggaagccccttcaggaagcagttggggtcatcccctccagaaggacatggggaaaaccagaaagtgggaggagggatgcttccttctgaaaaatagggatgcaattaccacaggaggtgtcagatacagggctg

SEQ ID NO: 498128 - DNA, 575 bp, Homo sapiens
gtgaagcaatcttactcttttactcctaggtaacttctgaaaagaaatgaaaacatatgtacgtgcaaaaacttatatgtgaatgtccataggggctttatttataacagttcaaaactggaaacaaccagaatgctcagctggtgaatcaataaactgtgggatatccaaataatggaatacttattaagcaataagaagagagaaactattaattcacacaacacctaacaatatacatgaatctgcaaagaataacactaagtgaatgaagccaaacacaaagcagtcccatgattccatttattgcaattttagaaaaggcaaaagtatagggcccaaagacagataatsatctgtcataaccgtcataggatgggagtaatacgagaagcaattactgccaaaagtacagttaaacttttctgggtaatggaaatgttatttattttaattgtgttgatgattatataactatacatttttcaaaactcaaactatatactctaaattggtgaattttagtttttgtaaattattagaaaccatgcacattctggattgtaaggctgaat

SEQ ID NO: 498129 - DNA, 526 bp, Homo sapiens
ttaaatttaatttcttttactttctccaaagcagccacaatactggctttgatgaagggtcacactataaccacttgagtcaactcctgactttttgactcagttagaaagataaaaaagcaaaacaaaatattccctttgccttctctccatacagcctgccttgtaattcttttcacacataaatctgaactattcattttctttgtatttcataaacttttgcctgctctagctcccttacgaacattaaattctctgcggtgagacttggtaaatagaacacaaaaaatgctccataggattagactaaatgctgaagctggctcagtgggactggtgatggccagcttccaagacggcacccagcggcctgcctctgggactcatgtgcttgtgtattgcctcccacttctgtccaagggtttaacagtctttcttcaagcacattcggcrgaaatggaattagtttcaccctgccctagtgagcccttgaagctctgactgtatcttacctcctggagca

SEQ ID NO: 498130 - DNA, 632 bp, Homo sapiens
ctgcttttataaatcttaagaattcactttctacccaaaagtcatgaagttactgtcccacatgttcttctaaaaatcttagaaccttgtttctcaaatttttatctttaayctacgtgaaactggtttttgtgttagaactgaggtggggaatacacacacacacacacacacacacacacacacttctcaacataaattacggaagaatttttgcttctaattatctgacttactttctatatcatccatcaaatttttataaacactggagactgctgcttctgggttctcttttccaacccatcatcctatctgtatgtcttattatcttggaaaatgtcaacatggccctactgtacttctcccccttaatgtatgaggaagtttggtataaggctacagggagctgtgaaaactatggtcaaccagaaaatgcctacatccaggcaattcagtgtttaaacagcactgtgttggccaagtaaaagaaatgttcaggcttcactgtccctagcttgagacctccagttatctaaatacatgctacacagtgacagactgtcccaactacacaaaaaatgcagaatttaaacatttcataagcatattttctcatcggaattgctttt

SEQ ID NO: 498131 - DNA, 618 bp, Homo sapiens
gcgggtatggcatcagtgaggtggtagaggtgtgggttttgtgaagagaagaagaaagaaatacatgaaggagaagccgcgtcccactcctgttgtgtcatctctaactcccaaggycgtactgcattcttgctcccctccatttatgagtagactgtatttgaacacattcttttggggaaggtgtactgaagcaggtgtttgagaacttccatgcagtatttgaacattgtagagaaaatgctggtccatgctgtcattcctggcaagcttagtgtaatatccttttcagaatccagggaaaggaaaaagaaaactctatgcaataatgataggagtcgaaagagaaaaaaatatatatatatttgcattttaaagatagtcactgccgaagatcagggagtttcgtagcatcatgataacctgaagttgaccataaggagcttctgtgtgggaatatgtatggtgacaagctattctgcaacctgttgttagatcatgcctggcttagagcttagggattgcgtccagcttagagtctaataggagatttttggaaaatattttttatttactcatccatagtgaagcagagaccaagagtagctgtgcaagatg

SEQ ID NO: 498132 - DNA, 605 bp, Homo sapiens
ctgtccattttctgttgttcgtaaattatgtagaactatatttatatttaaaacagcatcgaattattttattcctctggttgtcataatctcctcaagaggttaccagtgtggagtgagaagcaggaaacatgcattcttaaccacttgtttatgcaaattacttatcccttcagaacatttgtaagccatatttagtatgtgtgtatcattttcacttgttgatagactagtgctctatatatccaacctgaaggtgtagaatattagaaaaactcctaggacatattgtggcccatggtctcatattatgtttctattatggctcaaaagatgtttttgaaagagctatcttgtattggctaaggatggcatatgtttacttcaaaacccgaaaggtctatactggattcacccacagtgacctgctaaaggctccatatataaaacttatctgactcttacatytcaagcactattgtgtctcctcagtcatctggtccaattgtcagaaaagcgtatatgacatcacagacataatgcatattgttctcttgctctcgcattccactcaaaactggaagcctttcagtgaggtacgtatg

SEQ ID NO: 498133 - DNA, 570 bp, Homo sapiens
tgtctaagttgtttgttaggtaaacccatatgtaatttatcaataatattgttcatgttccctcatctaattctttttgttactgtcattagtctaaattatcatacaacttcaggtgttgtaaatcaggcatacttgaaccaggtagacataactgtccatctggytatgatttggagccaagacaggaactacatggtaggccagttagagaggcacacatgaggaaaagcactccccaaacaagcagtgttctctgtcaggtaactgaacttcgtgaaatggaatacaaacatatacaattatattttggttagctagaatgttctccaaaatggcatgtaaataaacatggttattttttgattgattctggaaaggcttgctctaactataagtgtattcattagcttttttatatttcttaactaaagccatacatatatgtgcaaaaaattgaaaagtaggtatgctttgctcatgaaagatactcagtggcatcataatcattaaatacattttttgaaaattgactgcattggtggttaaaatgaccaaaattaatatttc

SEQ ID NO: 498134 - DNA, 656 bp, Homo sapiens
tgatggtcacttatgaattgtgcagtcttggggatgttgcttaatttatgtaagatttgtttcctcatctatgaaatatgactaagtaagacgtatttcatgggccaattttgaggaatgactaagatcacatagataaagcacttggcatagtatctaagatatattaagtaggcagcaaatatatatgtaattattctacttttttctctgagctgatcatctgaccaagtggctgcacgtacaagttcgacaagttaagtttatgtggaccttgcagtgtaacactgctataaaaattcaacaaacaatgcgaaattctaatagtaagtcagacattaatattattttccttcttgccacaacrgcaatatcaaccaaacatgtccattctccttgttccatgtgttctcttgactttctcattcttttgttattcaatcaacaaatatatattgagatcttactgtgggccaatcactattttaggcattgtaaatacaacaatgaaaaatactcctgtcctcatggattttactttcttatagagggtagaaaatataaaagataagtaaataaattatatagtatatacagataatatatatgtcaaaagataaaagataaagcataagtgggagtaggaaatgtcaagg

SEQ ID NO: 498135 - DNA, 629 bp, Homo sapiens
tgaacttttattcacattctgaaatctgtacatcaaagttaataatggagataacgctaaacttataattgacttcaaaacatatgacattaatttaaaatattacttcaactcaggaaaactcgtactactttttaaaggattcaagactcagaaagagaatataacatggtcttcattctgatctgctttaaggatcatcaatgcgttcatgttcacttcaaaactgtaccttctttattaatctattcaaaaataatatttcattatcactttttaatcaattcaatggtgcacttttcagtgttttaacatttttgaactaggmatgaacagaaaaaattgacaatatgtcatagttaaattgatagagctaattaaattttattgtgaaagaaaataatggtgcgtgcagctcacaagtttaattgacagagcttattaaatcttattgtgaaagaaaattataatatatgcagctcagaatatatgaaggtcttagaagcttgaagacatgaggttaagtacctagaatttgactattttttccactgtcaagccaagttgtgatcattaaactaaaaagaaaattccaatattctctattccagtatcacagaatataatac

SEQ ID NO: 498136 - DNA, 656 bp, Homo sapiens
tactgctcacattatggacacagagcagggatatttgataggggttggaggagacagaatatcagagatcccctcagaaaaggaattatttgtggtcattcttcacatgcaagcaacartagttacctaaaagaaggagacacacatgaagggtatcatttacttaggcaatagtaggagtgaagagtttgtatatattcggcatttctcaagaagtttgatgctgcttgatcaaaactaatgaggtggaatttgttgtcagacagacatgagagataaacaagggtcagttcagggtggatttttcatgtcatagagagatacttagtttattacttatgtagcctacaaaaagaaatgaaagagttgtattcaggctgaattcagacacagattttttttgtgggctggttggaggatggggtaaggctgagtaagaaagtttcaagtgctgatacaaacctgtgagtttaattttgccaatgtccatttagaggtacagagagatctttagctagatgtgaacattactaaagtaatatttccaggtttaaaatatttaattttctagcaaatatggcaagagtgcattactaaaacgtcgacaagaagattaatcaaagtaatgtctttgaaaactctaaacagtcctcaag

SEQ ID NO: 498137 - DNA, 493 bp, Homo sapiens
acaggctgtttttaagtttataagttcatttcacttaactagcacatttaccattttgtcattatgattagcaggtgtttcatcaattgtaggagctattaattttattaaaacaattattaacataaaaccaggcatgtatttatttatgttcaccagctgctggttcatatgttgtgaactttttacatatcaagtaatatttaatcttattcaaaarcagggtactatttcatttaatagatgtggtaaatttcattcctgtgataactgtggaagtcaaattgctaggtcagagaatactatggtatttagagccaattttctctgaagaaaagtttttctaatatatacttccacaagatgagtgtaagaaagattgttttcagatatccctgatggtattattaactatctttctttaagatttatcaatttgatatttaaatttcttcctgttattttagcaggacatgtaaacttcttcctccta

SEQ ID NO: 498138 - DNA, 656 bp, Homo sapiens
ctgctggttcatatgttgtgaactttttacatatcaagtaatatttaatcttattcaaaagcagggtactatttcatttaatagatgtggtaaatttcattcctgtgataactgtggaagtcaaattgctaggtcagagaatactatggtatttagagccaattttctctgaagaaaagtttttctaatatatayttccacaagatgagtgtaagaaagattgttttcagatatccctgatggtattattaactatctttctttaagatttatcaatttgatatttaaatttcttcctgttattttagcaggacatgtaaacttcttcctcctattttagcaggacatataaacacataaatagcctctctgaaaattgccaaaaatgtttgattgttatgaaattgaacaagttttcagagaggctatttatatgttttagatgttagtaaattctctatagtacttatggatttgtaaaagtgtttattaattttcttattgatttgtaaaagtcctttatttattacccatcacctattttggtaatgctttcccctgagttttatgttatctttcctctcgatcttctgcgtgtctctatcaaaatatatttgaaatttttcaagttcaaatatgttaattggtcaggtata

SEQ ID NO: 498139 - DNA, 632 bp, Homo sapiens
gtctgtctaatgacatcttcttgcagatgggttaccatcatctgcactgggagttgcagtttccttatggttggtgtgtattaggtcgtcaaacaatgtagggcacttgagagatgcccagggaattcatgcccaattgatgttcagcatgttctggactgtgggcttatatgctgactggggtgcttgggcagccaaaatctctcctagtctattgactcacagttgtatcatccagctctaattagttacacccacagtcatctcatacattaaatcatgggttatgtatattgtttataacttttggagaacttatctcttttggccaaggtagccacttgtttataacagtgctagtaaacaagttctcatgaataaattataattatcagtagatgggcgtgtgggtttgcaattttgcaggctttttaaggaaaacatgattttcaattctttggagaaagacattaatgagaaatttgggaaaacatgtttacaagcaaaagaacactgtgggcaagaaattgttatgatatcaagcacagcaaagatgtttatattcacttttataaakgatgacacatctttacataaatttatttcacatatcagagagatatatctaaaag

SEQ ID NO: 498140 - DNA, 603 bp, Homo sapiens
ggtctgattttctctttaatttcccaaacaccatgtatggggtggagatggggatgragaaaacacgaaagatggaataaagaaatagcagtcaataaattcacttttactatcttcccaccttcaataagtgacattttatattcaagaaaacttaagtattacttcttaaagtttaaaaaccctagtctaaaatgtgaaaaagaataggactataagggtcattaattgatgtctctgaaactattgtgcttcaaaagttattttatacaatcattaataataacagtacagaagaaaatgtgagccaaagagaatacaggcaatgttgtgtaagtgaaaagtacatgggactaggttccactacctattagttttatgccttaaacaagtcattttcacattctgaactttaatgtctttatccttcagttgagaatatttaacacatctgccttttatgtctcatgccattgatggtgggctcaaaggaggtggcatatttaaaaatgctaaacttccataaaagctactcaaatgttagttgttattatcagtagcgtgactatcacatgcaaattgggtttgatgaagcagtaattt

SEQ ID NO: 498141 - DNA, 478 bp, Homo sapiens
cagaatggagatgtaaaatttataatttttcaaagttagtagaccatggaaccatttcctcaaatagcagcccaagactgttgttctgcaagacacattttgagaaactcttgattgaaatgctccaatttaatagtgtttagatggtattgtttctttctgtataaactttaccattgtgaaaaacgacactgaaaacacatgggtatagagaaacgtggcagcggggtaggtagaatcatggagttacagtcaactttcaatttctcattattttcagctgagtattattgaacactgtaatgtcatctgagataaatcaaaatgaagatatgaccatgcattgagttattaaggaattacsatagatatgcatatttgtgtctgtgtcaggaaacctgtttgtcatcataaaagctattagtagacttggctacacttaacgatagatttcataattaaagacctcagatgtgag

SEQ ID NO: 498142 - DNA, 478 bp, Homo sapiens
cagaatggagatgtaaaatttataatttttcaaagttagtagaccatggaaccatttcctcaaatagcagcccaagactgttgttctgcaagacacattttgagaaactcttgattgaaatgctccaatttaatagtgtttagatggtattgtttctttctgtataaactttaccattgtgaaaaacgacactgaaaacacatgggtatagagaaacgtggcagcggggtaggtagaatcatggagttacagtcaactttcaatttctcattattttcagctgagtattattgaacactgtaatgtcatctgagataaatcaaaatgaagatatgaccatgcattgagttattaaggaattaccatagatatgcatatttgtgtctgtgtsaggaaacctgtttgtcatcataaaagctattagtagacttggctacacttaacgatagatttcataattaaagacctcagatgtgag

SEQ ID NO: 498143 - DNA, 640 bp, Homo sapiens
tttgacacttaatggaaaataactacggagctttgctatgagattcactgaagagttaaaggtcctatggacattattgttacagtactattcatacccagatctctttcatcatggtgagtcagaaaaggcctttttatatttcaattcagcacttacctaattcagtataccagttgactaatatttaggggatagtcatctgttcaatgcataacaatctgctcagtgctttaggggaatccctttaaaattatcagccagttacatgaatgttcacagaatgagtacatctgtaagtgatttccttcatagaatcattaaagaagtgaaacttattctgatgatactagaatagctaaaaatataktcaaactattcacttgaaattataacccaatatacaagacatgcaatactcaatctcatgtttgcatagttgtagctaatagaggtcattacatacaaagatctatcatcctacagcaatttagagtaggacaaaatcatttagttagggattgggcaaagaatgacaggagtacctcatctatgcacagcagcctactcagtgctttaagaaatatcttaaaatgataaggtaatatcttaaaagtatttttctcattataaaattgtt

SEQ ID NO: 498144 - DNA, 640 bp, Homo sapiens
tttgacacttaatggaaaataactacggagctttgctatgagattcactgaagagttaaaggtcctatggacattattgttacagtactattcatacccagatctctttcatcatggtgagtcagaaaaggcctttttatatttcaattcagcacttacctaattcagtataccagttgactaatatttaggggatagtcatctgttcaatgcataacaatctgctcagtgctttaggggaatccctttaaaattatcagccagttacatgaatgttcacagaatgagtacatctgtaagtgatttccttcatagaatcattaaagaagtgaaacttattctgatgatactagaatagctaaaaatatagtcaaactattcacttgaaattataacccaatatacaagwcatgcaatactcaatctcatgtttgcatagttgtagctaatagaggtcattacatacaaagatctatcatcctacagcaatttagagtaggacaaaatcatttagttagggattgggcaaagaatgacaggagtacctcatctatgcacagcagcctactcagtgctttaagaaatatcttaaaatgataaggtaatatcttaaaagtatttttctcattataaaattgtt

SEQ ID NO: 498145 - DNA, 524 bp, Homo sapiens
gctggcgaggtggccgaccacggtccacaagcagctctcccgcctctctactgggccctgcacccaatgcctcactgaggggtgggagaacctgtgtgtaggggctttcctcccttctttagctccagacactgagctggcacctgccttcccacttccttcctagggatgcagttcctgggattctcagtccctccctgtgtagacagatccaaaggcccaagaagtaacacggtactcggagccgccgcctggtgggggtcgttccactctttctattcagaagatgttttcccgggctcctcctggtgttaaatcattcctccaaattagcaggaacactcattaccaacccaaccacctccattaggcaggaaatgtgtctttcttgtggcagctccccccagacccggggccatcccccagcactccctggatgggggtgggtgggaggctggctggaagcagggggtggagcatgcaccactcctaactggagsggggcgtcggggggcgcagagcct

SEQ ID NO: 498146 - DNA, 654 bp, Homo sapiens
caggtgaccaaaatcttgtgagcagaggatctcaggaacctaactctgcatttccctgggagcaatgcttccataccrgtgaattcagtgttcccgggaatgtcacagaacattactgccaggcatgagagccggtcatatatgcagtcatacagatgccaccttttgagtccggtttctgtcacttagcatgacgctgctgagattcatccctgttgttctttttgttgctgaggagtattccattgtggggctacgccagcttctccattcactcagcagttgatggagcatttgggttctttccagtttttggtgatcatgaacaaagctgctgtgaactttcgtgtacaaatccatgtgtggacatatgttttcatttccattctaagtgtcagcttaggagcacatacatttattacttgcttaatgcttgcagtagccctgcaaagcagcctcattttatgcataaggagctgggctcggagcagagctatggtggcctgctgaatatcacatggctcacagcaactggcactggcgcacaatctcttccctgggggaggcctgggggtccctattcagagtggccccatggtgggtgggagggccttggctctgtcattgcctctccaggggcctagaggtcctcag

SEQ ID NO: 498147 - DNA, 551 bp, Homo sapiens
atgtaatcatcatcatcataytttataatcgagcacttgctcgttgcctgatcctgagtcatcattcctttctgacattatcagattaagtcttcagttcatattatttgccttactttacaggtgagaaaacagacatgcagagaggttaggttaattgcctttggtcttataactaataagagggaagggttttttattgtggggggttttctagaacctgtgccccccttgcttgttagtccccgtttccctctggaaagttccccaccaagtgtggtctttgaggagagcagtgatggtgctacctctcacagtggaagctctagggcagcttgtcccaggctgtggggccagaagtaaactcagctgagaccctcaaccagtcttcagtccttggtgctctcagatttggtcccccagcctccgtggattcagataaccccaaatttaccttccctttttgcttaatatgggcagagtctctctgtagcttgcaaccccaggactctgcttgcaacaaaatgagtaataataataatataccaaaa

SEQ ID NO: 498148 - DNA, 551 bp, Homo sapiens
atgtaatcatcatcatcatactttataatcgagcacttgctcgttgcctgatcctgagtcatcattcctttctgacattatcagattaagtcttcagttcatattatttgccttactttacaggtgagaaaacagacatgcagagaggttaggttaattgcctttggtcttataactaataagagggaagggttttttattgtggggggttttctagaacctgtgccccccttgcttgttagtccccgtttccctctggaaagttccccaccaagtgtggtctttgaggagagcagtgatggtgctacctctcacagtggaagctctagggcagcttgtcccrggctgtggggccagaagtaaactcagctgagaccctcaaccagtcttcagtccttggtgctctcagatttggtcccccagcctccgtggattcagataaccccaaatttaccttccctttttgcttaatatgggcagagtctctctgtagcttgcaaccccaggactctgcttgcaacaaaatgagtaataataataatataccaaaa

SEQ ID NO: 498149 - DNA, 631 bp, Homo sapiens
gagataaagttaaaattacaggttgggatcaaaacaagggattacatgaatgctagtatagtgagtttgaatttcaccttgtaagcaaatggaaggctttgagtaacatgatcgcaagcaggctgcagggtgaaatgggagtagaagatgaggggagatacaggggcccaatgtctagttagtaagacaactacactagttatcagggcctgtattagagagacagcaataaatgtggaaaacaaggactggataaaaaaggcattgcaaatgaagtattgatagacatgggaggccatggacaaagattatttaaatgaccatgacactcaaacaactcagacaaaaagaagaaaaaacgmtgttcttggacaatttagaaatcattccctggaaaactaaatgatgagtctattgacaaacatagaagtagaacgtgtgcaatgcaataggaagagaatatttggccataaactagattgactttttttgagaaataaaaggaatcctagtatttgacagcatggatgattttatctgtgggtagatagaaaaatacatttttatgttactatctgtttctatagcatgacaatcagggagcatgtatgtgcatcatatttgggttgca

SEQ ID NO: 498150 - DNA, 573 bp, Homo sapiens
cagcatggattagtgaggacagaacctctactttttggtggtcccttggctatctgggggaaacctgcagggagaaatgtggcagggagctgggaggattttctttccccagttcgtgaattacctaactcatttcacctccttctgtgtgagacacataactggtggtgagaggtgaagctggctgggcttctgtgtggggtggggacttggagaacttttctgtctagctaaaggattgtaaacgcaccaatcagcactctgtgtctagctaaaggttggtaaatgcaccaatcaatcagtgctctgtgtctagctaattgggtggggacttggagaacttttctgtctagctaaaggattgtaaatgcaccaatcagtgctctctgtgtctagctaaaggtttgtaaatgcaccaatcagtactctgccaaaacagaccaatcagcactctataaaatggaccaatcagcactctgtaaaatggaccaatcagcaggatgtgggtggggccaaataagggaatraaagcaggccaccagcgcaggcagcagcaactggctttggtcacct

SEQ ID NO: 498151 - DNA, 504 bp, Homo sapiens
gtttgtcaaaatgagattggaccctggtaatactttgttgcctgtgcattttgctgtgcctcttagatttaaaaatatttttttcttgaaaagagcagtatacaaatatcaggttaatggaaattcacatcactggggaccatcaggatcaataaagaaggagagtgacaaaaacaaaggccttgggaatcacagtttaccttggtaataattgcagagtgttgatagaatgatcatgatgaactgaaacaatcattgacataaaagtgaaaactatcaatcaaatgttagcrcgttagcaagttttttatcgagttcctatgttgtcagtgttctcataggtaattttccttgatgatagtcagaatcttacagctctctgaaatgtatggagaaatccaaattctgaagcaccataataatataaacctgctttttattaggactttgcattatagatatagatatttgtaatatgaatttttctcactttacttaatctta

SEQ ID NO: 498152 - DNA, 627 bp, Homo sapiens
caaaaaacgagcaatatatttaacagctaagtgtgagatttctgggtcagtgtgccataaatcctacagttccagaattgcaaagctttttcatgatttgaagctcaacacagagtgatttcaatgtaaatcctcccctccctgccctcctccatggctgtgtcacacaatgccctgatgtctggttccccccttttaaaggcaaactgaattgtttctcatattgaatttttctcccattggactggcttgcctcttggcatgagctgaaactattcttcatttcagtcgcctgctacaattattttaatctactaaaacactgatagtattaaatcttctaggaatagtaggcagaagcattattctgaagataaaattttagttttgcttgcatttaargaacttgtcttcgcagtctgaagaaacatctaacaaacaccagacactgccttgcttgcagcttttgatttcatgcccttaacagcttgttgggggccaggcaggatgcttcatagaaagggttttagaatccagattatggcaaatctctttatttaccacgatcatgagcttgctctctcctccctctgcccgcccctcaccccgcaactctccaagtgccaa

SEQ ID NO: 498153 - DNA, 648 bp, Homo sapiens
gttggttgttatatagcactagccaagtgatacaatattcaaacaaaaaagacatttttaattaaactcaaaccttgcttgactttctaatacaagataaactaagggattttttacttttggtggttgaattattactacacaggaagatatgttttactccactgaaggcctttawaaaaatcttgtcttcatttctttcttactttattcactatcctctttttcttttttattttgagacaggtcttgctctgctgccccaggctggggtgcagtggcacaatcacagctcactgcagcctcaacctccccagctcaagtgatcctcttacctcagcctcccaagtagttggaactacagggatataccactacacctggctaatttttaaatttttcataaagatggggcctctctatgttgtccagattggtctcaaactcctgggcttaagcaatcctcccacctcagcctcccaaagtgctggaattacagacatgagccatcatgtctggcccagtactctttcttgtctttcttgaccaacctttaaaagagatctaaatttctttacctcccattcactcctcaatccatctcattcttgctttcaagctctaacaaatcatttatcacttccattt

SEQ ID NO: 498154 - DNA, 602 bp, Homo sapiens
ccagcctgggcaacagagcgagactctgtcccaaaataaaacaaaaaacaaaaaaccttaaactgtagtagaatggaggcttactggctcttctcttaggagagcagtggctgtgggaggaggaacagtggggtgggtggagaaggctcagtgaaaaaaaacagcaggcaggaaaaactgggccactgcagacttcccctacttttgtttttctccctttcagattaatcagattttttttttcagcttggaaaaaaggtctccgcagacacacctgtgccttgtttataaatgggattcaggtctctytgatatataatctctagcgtcactgagtaaatagtcctgtgtctgcccgacctgcaggctgctccccaaagcagagctggggttctctgaggaggggctgggcgcttctgctatggggaggtggtttcatgttggggcagggctgcaggcagggagggctgtcccctaccatgggaatgtgtaagagccatgttttgtcgccatattcctgctccctgggattgagtccgcccctgggaagtcaaggcagagatggtgatgccccttcccctctggagccgtgttgctaacag

SEQ ID NO: 498155 - DNA, 352 bp, Homo sapiens
agctgctttcaggcccttctggtctccaaccgcaaccctcttcatcacaagtcactgccaacccttgcctcctcttttctcagaatatcctctaggggtgtgtgtgggagtgtgggtatgtatttgtgtgtgtgttttgttgtttgcctaatactctcaccaccctccaactctgtcttgagagccggtgcccgacacgaaagcacaaaggatcattttaaagggaagtacagttttccatcaggattaggtgagatagttaaggtaaacaaatttaaatagaacaatgaaggtaaatgcattcagtatgatatagggaagrtaggcattcttcgataaacatgatttttgc

SEQ ID NO: 498156 - DNA, 559 bp, Homo sapiens
aacaccaatgaattggatctcaaatatgatgggccatcacaggaaaattattattgatataattctaaaaataaggccttggatggggaatcttgctgaataagaaaatgtaggtttacagcattctgtcctaaaagagagacattggctataaaaagaaaagcttgatgttcctctctctaataggaatcatttggtatcatgccatgaatggtgagtttgcagaatgcacagtgtaaactaacacatagtattcccttgtcaggtgcaggttcatagccagaactcgagacttgatgaaaaatacccaaatgccatatatccaggaagtgtaatcagttattrtatttgacttgttctttgtcaatgtattattacacctgaaaaattgtaatgagctcaaattttttcttgcttcagggtttttacactgttcttccctctttctggaacactatttcttagattgctgcatatgtgtatccttctcatcactcagatctcagttcaaatgtcatcttcccaggaagcgattccatagccaccatatccagtttac

SEQ ID NO: 498157 - DNA, 451 bp, Homo sapiens
cctttactagaggagtatttgaggcttagtagtgcattaatagtgtttgtcctgaagcatggacaggactaggaagtctcttgaattcaaacattcttctgtaatgtacagtaatactgcttcttatggttggatcatattcttatctctttctctgcagcacctgaaggagatgasctcacgttacatccattgtcttagcaactcttctaggaaaatgtccagatttagaaacaaaagagtaataacaactccacattattgtgggagaagatctttgccttcaatctactgatcacaattttttccccatggacaatttatccctcagctagaatgtcactggatcctccagagatctctatgttcattcctgtattaccacctttttacagactcatcatacatgcatcctgctgagctggtacaggtgtgtttagcaggtacatca

SEQ ID NO: 498158 - DNA, 484 bp, Homo sapiens
tcatgcagatctgatgttcgatgttcaggtgttttctgattaattctataattctactttgttttccktgatcttcaattaaactccgctttgacaacttaagtgactaacaatgagaaaatgtagtgtggaagagggacaatgtattcaagttttggagcagctctcaatcatggcagggtggcagggtcagtctgagagagatcaagaactgagctagaagctaaaataatacttagggcagtaaacaagctacaccctcccccaccccaggagttatcaaaaacctgacaatgcactggacttcttacattttgtgcactgggagtctggagttcttttatttagataccaaatcaagggggtctcaggatgttagaggattcagtgacatttgggcaatgtaaataacacttatgagtgttccctattcattgctgtatttttattcatttactcttctgtaaacaggaatttaaatagc

SEQ ID NO: 498159 - DNA, 598 bp, Homo sapiens
tgcgtttcactcacagtgcctgagtgcaggcccagtaaggcccttcctccttcctcagacatctgtttctatgtcccagggatcacatggccattctccttctccgcctgagggagagagtgaagcaagcctttcagaagcctgtcacttgtcagattgttagcccaggccagggtgggggttctgtaccaatggcaggattttcttttcttttttctttttttttattttcataaagacacagtcttgttatgttatacatgctgatctcaaactcccaggctcaagtgatcctcttgcctcagcctcccaaaatgctgggattacaggaatgaggcactgtgcctggccagtgccatctgcccctactctgcagcttctgccatctggaactttacccccaagagtctgggaggaatgtggaattataccccgctcactcatctgagaatttaaaccctgggggtatatgaggatcaagcgtgtgtccatggtctgatagctgaacttcatctgcagcctcctctcctgggactgcctgacttacgctttactcactracaacttcaagctgctggtgattgctgcattgactcac

SEQ ID NO: 498160 - DNA, 296 bp, Homo sapiens
ccgctggagggttgccgccgcccgcccgaggagcccccrgtggccgcccaggtcgcagcccaagtcgcggcgccggtcgctctcccgtccccgccgactccctccgatggcggcaccaagaggcccgggctgcgggcgctgaagaagatgggtcagtgacgggcaaggggcggtggggtgggcgcggaccgttcccagaggcccagtctggggcgctccagggagcagttcgtggattccccaggctgcacggggctgggaggctatggctaggggcggagggccagctccctcca

SEQ ID NO: 498161 - DNA, 627 bp, Homo sapiens
tctatgaaaaccaatgtaaccatttttattttaaaaaytgcattgcatttatatattaattcgactagaatttacatctttataatattgactttatctatagacataatttatttctccattgatttaagtgctcattaagtcattcaaaaatatttattgagccataatatgtgccagaaattattctagaaactgttaagcagcggagaataaaagcagaaaaaacactgggcttttaggactttatactctaaaaaagtataaaagtgggagaaacaaataattacaaaaaatatacatgttaagaggtgatgagtactgcgaagacgaaaatggtatagaaagggttaaagaacgacgaatactgttttatagaggggtcataataatggtcttcttaaaatcataagtttttttagatttatttatcagtacaatatagttttagatgctagcatagacattgtcttcttttaaagttatggtttttttggctggtgaataaaaatgctattggtttttgaaaattgattttatatccaggaaatttttatatttggttattaaattagtttgcagattctcataacgattgtcattttcaacgtaacacaatttttcttc

SEQ ID NO: 498162 - DNA, 499 bp, Homo sapiens
ttttgtaacaagaagactgtcatgaagtgaggactgaacatctgcttcctaaggtgtctcggggtgtccctggcccttccctgggccctcccactcctctgggcagagctgggactgctgatttgggaagaccaggccttcctccccgcaagggagggccaaggacagcatgaggacccacctgcagggacccctctcccccgatcctgtcccrgagggggctctgagctccccacccttctacagatgaagaaatgaagtgggcatgcagcagagccaagtccccacactgggtacctggacttgagaccacacgagtggtcagccagccaggggtgtggggtttcctttatggcaccccgtgttgagagggaggcccgggaagggaggatgccgccgcgcagtggagctggtggtagtccaggttgtctgcacctgcagccccaggagaggccttggggctacagggccctcccacggcccctccaagggtctagca

SEQ ID NO: 498163 - DNA, 499 bp, Homo sapiens
ttttgtaacaagaagactgtcatgaagtgaggactgaacatctgcttcctaaggtgtctcggggtgtccctggcccttccctgggccctcccactcctctgggcagagctgggactgctgatttgggaagaccaggccttcctccccgcaagggagggccaaggacagcatgaggacccacctgcagggacccctctcccccgatcctgtcccagagggggctctgagctccccacccttctacagatgaagaaatgaagtgggcatgcagcaragccaagtccccacactgggtacctggacttgagaccacacgagtggtcagccagccaggggtgtggggtttcctttatggcaccccgtgttgagagggaggcccgggaagggaggatgccgccgcgcagtggagctggtggtagtccaggttgtctgcacctgcagccccaggagaggccttggggctacagggccctcccacggcccctccaagggtctagca

SEQ ID NO: 498164 - DNA, 315 bp, Homo sapiens
  misc_feature (1)...(315): n = A,T,C or G
ggatctgtactggatgagcggctaccagcatcacctcaaccccgaggcgctcaacctgacgcccgaggacgcggtggaggcgctcatcggcagcggccaccacggccgcacggcgcgcaccatncggccgccagcctacgagctttccgcggccgggcttcgcgggcggcggtggagcggacgacaatgggcgccggccaccaccacggccggcaccacgccgcccaccaycaccacgccgcccaccaccaccaccaccaccaccaccaccatggcggcgcgggacacggcggtgcgcgggccaccacgtgcgcc

SEQ ID NO: 498165 - DNA, 549 bp, Homo sapiens
attcatggaactccaagtgttcagggggagtcgcctttttgtcattttcctcgctttgaatttcgtgaggatgtttgcagaagtttttacttttctgtgcacttaaatctgccagtctcttgagatttcatgtattgatgtgctgagaacagcctttcctacctaagatggcatgagttctggaagcttccctctggcycttcccactcatgtctaccccatgagcacctgcttttctgctctctgcctaccttgattggctttgcctgttcctgaacttcgtggtgatggggccgtgtagcgggtgctgttctgtgtctgagcttcgtggtgatggggccgtgtagcgggtgctgttctgtgtctgagcttcgtggtgatggggtcgtggagcgggtgctgttctgtgtgtgagcttcgtggtgatggggccgtgtagcgggtgctgttctgtgtgtgagcttcgtggtgatggggccgtgtagcgggtgctgttctgtgtgtgagcttcgtggtgatggggccgtgtagcgggtgctgttctgtgtc

SEQ ID NO: 498166 - DNA, 611 bp, Homo sapiens
ggtggcttgcggcccacaagataagatayattgcgttgaactataatttatgttgattgctgaatgatttagggcgggggggtgggcaccccctgaaattctgccctggaggagtggcctcaccctaaccctggccgtggctaataataaggcccacctcttagggccgtggagtgaaataagttttccaggtaatgcgcagtagagccctcagccctccgctgaagttgcgttaggaaggaggaagggagaggtaaatgctgagcccgcaggcggcagtctgtgcctcggagaggaactttatcccaaccttgctgggggccttgacgcccaccttgccccaagagcaccccggcagccacccctgccctctggggtcctgccaccccgagcccgaccttcccccttttcccccgcgccgggccaatagcctcctaactgcgtcgtgctcatcacctttgcgtcgtttcttcgctccacaaacgtttactgagcgccttccacacgccaggcgccagactcgcgcggggaaacagggataagcactgaggaggggtcccagccctcagcgatgggatttcagagcgggagataaagggttgcccagaagg

SEQ ID NO: 498167 - DNA, 611 bp, Homo sapiens
ggtggcttgcggcccacaagataagatacattgcgttgaactataatttatgttgattgctgaatgatttagggcgggggggtgggcaccccctgaaattctgccctggaggagtggcctcaccctaaccctggccgtggctaataataaggcccacctcttagggccgtggagtgaaataagttttccaggtaatgcgcagtagagccctcagccctccgctgaagttgcgttaggaaggaggaagggagaggtaaatgctgagcccgcaggcggcagtctgtgcctcggagagraactttatcccaaccttgctgggggccttgacgcccaccttgccccaagagcaccccggcagccacccctgccctctggggtcctgccaccccgagcccgaccttcccccttttcccccgcgccgggccaatagcctcctaactgcgtcgtgctcatcacctttgcgtcgtttcttcgctccacaaacgtttactgagcgccttccacacgccaggcgccagactcgcgcggggaaacagggataagcactgaggaggggtcccagccctcagcgatgggatttcagagcgggagataaagggttgcccagaagg

SEQ ID NO: 498168 - DNA, 611 bp, Homo sapiens
ggtggcttgcggcccacaagataagatacattgcgttgaactataatttatgttgattgctgaatgatttagggcgggggggtgggcaccccctgaaattctgccctggaggagtggcctcaccctaaccctggccgtggctaataataaggcccacctcttagggccgtggagtgaaataagttttccaggtaatgcgcagtagagccctcagccctccgctgaagttgcgttaggaaggaggaagggagaggtaaatgctgagcccgcaggcggcagtctgtgcctcggagaggaactttatcccaaccttgctgggggccttgacgcccaccttgccccaagagcaccccggcagycacccctgccctctggggtcctgccaccccgagcccgaccttcccccttttcccccgcgccgggccaatagcctcctaactgcgtcgtgctcatcacctttgcgtcgtttcttcgctccacaaacgtttactgagcgccttccacacgccaggcgccagactcgcgcggggaaacagggataagcactgaggaggggtcccagccctcagcgatgggatttcagagcgggagataaagggttgcccagaagg

SEQ ID NO: 498169 - DNA, 437 bp, Homo sapiens
agctgtggctggacaggttggaccagcaggctggagcagtcgccatcttggcagggatcattgaccctgatctatcgtcgggaggaggaagagctgatcttacgcagggagggcaggtggactatgtgtggactctggtgacctgtttgggtgccaggtgttactcccagggccacccgtaactgtgaatgtgcaggaaccctgacttgagaagggcctggcacggggggcttaggccctgggaatgagagtttggttccggtaccagggaaaccaccagcatcggcagaggtgatagctggggaggagcggggatttggacgagagacacaggatgagtaccgggggcagccctgtgatcaacaactgctgcaagaggggccgtttgttcgactcactagtcttctgyggctctatgcggtactaaagagcagaag

SEQ ID NO: 498170 - DNA, 627 bp, Homo sapiens
ccaaagtacaggcagccccagagaggaaagaacaaaaataatcacttggaatgcaaatatgcatgttgcagcaccctagctgaagacaactctgctgattttgctaatgttgggcagtctcttcaaatgaaatatactgccctagtcaaaggataggcttgagctgctcctccgttaggttcctgggttgaccagaattctycatcctcatgaagtgggccctgtctctaagatcatatgtgagatgaaggtagtgaacccgtaaccttgtctcattcatccttaacatgatctcaccttctcccattggctgctggagatgctgaccaggccagtcttctacatggtaaatctagcctcatggaattttcaacttagcctctttgttttataggcttacaaaaactctcatataaataaaatcctttgtttcttattgtcctatgccagtaagtccttgaagctacaactatttattgtcttgcactatgcctgctgttcagagttctttttcagtctggattccctagttctctgtcaacctggccatttccactaacctcagaggtgagggccattgcaaaaacagtaagaggcttaggaatttaatcagtaaaactgaagcag

SEQ ID NO: 498171 - DNA, 483 bp, Homo sapiens
ggcaaacaaaagtgtgtgctttgggataagagcaagagcctgggcagtttttctaactggtcttctgattgttcagggattttctctgtgttttatattaagcaacgtgagcacggtatatatgtgttttgctgataagaagagaaaaatgaattggcagacaccttttcccagacaagacaggagagcactatttgaacaaagtggaaattkgactgccttactggatgatcacagcactgatgttcaaagctttcagatcatgtaatagtcttaggttcaggtacacagcattgaaagaaggaagaaagcaaggctgatttgagggcatgtagaaaaatgaaaagcctttatctgagaaagcaaactggcggttataggttatctggtcacctttaaagggaaggaacactgaattaattataggagctgaagggcacttgttaataggtaccctcacacaacactttcttattttctgag

SEQ ID NO: 498172 - DNA, 672 bp, Homo sapiens
tatctttattgtgccaaatttattaaatgatataattgaattaaggttttgcttatgagattgtgccgtcatatcctgtaaatgaataacatcatatttctctttttttctgtctttctgcaagtaggtcaarctctgaaattactgtatcacatatttgattatatattctaacaatgttgatgttgatccacatggtgtattgttcaaattagaaaaaacagtgccttcgtcaggataggattaacctgtcatcaggacacttggcttggcaaacctagtgtgggtagaatttctgctcctaatcaaaccctggctgggtgcccttgtgcagtgaacaacctgaacaactgtatgcaatggccctgtcttcctgaatcctatagattaagcattgcaacaagaaatctaagaatgacatacctcatgatactttttcacggttttccctgaattgcatgtgcaggacctccagttgacagttccacagccacaatttcctccacagcgctgcacgaggaggcaacgtggaaagaagaccacattggccaacttcagctcttctcttatattgaccgagtaattcctgggagtgcaactgtaacgcttggcatcatcattgagcctatccaggtcaactgtaagcaaatacatgcactgtgtaagcaaaca

SEQ ID NO: 498173 - DNA, 672 bp, Homo sapiens
tatctttattgtgccaaatttattaaatgatataattgaattaaggttttgcttatgagattgtgccgtcatatcctgtaaatgaataacatcatatttctctttttttctgtctttctgcaagtaggtcaagctctgaaattactrtatcacatatttgattatatattctaacaatgttgatgttgatccacatggtgtattgttcaaattagaaaaaacagtgccttcgtcaggataggattaacctgtcatcaggacacttggcttggcaaacctagtgtgggtagaatttctgctcctaatcaaaccctggctgggtgcccttgtgcagtgaacaacctgaacaactgtatgcaatggccctgtcttcctgaatcctatagattaagcattgcaacaagaaatctaagaatgacatacctcatgatactttttcacggttttccctgaattgcatgtgcaggacctccagttgacagttccacagccacaatttcctccacagcgctgcacgaggaggcaacgtggaaagaagaccacattggccaacttcagctcttctcttatattgaccgagtaattcctgggagtgcaactgtaacgcttggcatcatcattgagcctatccaggtcaactgtaagcaaatacatgcactgtgtaagcaaaca

SEQ ID NO: 498174 - DNA, 599 bp, Homo sapiens
accagtagtgtcgttgttggtttcttttctgtgtaaacaaacatttttcaatagcaaaattgaagggattttctcttaatttataataggaacaatgatatcttcagaatgaaacccagtttgctgagggaagaaaatggacaatcgatagggatggtgttcttaaggttgcagggctgttttctttttttatgaacatttcaaaacatgaayattgtctttcaaaatggccacctgggtactctttctctcctaatgtccccacacagaaaattaactaacgaaacatgtaagctagaatgctgtttgtttgaagggtagtatggaattatgaaaacaaattaattaagatgtctctttttatgggacttaaatatgtttatattgatatgcaagtgtgaattgagagaaacactccagcctactgagttttttttaatggaattaagaagctcccagtagtttgttacaatacctcaagaccatgtgagtcacttacattttagaaagtgctttcccatatgtgatctcatttaatcctatggcatgcttgtaacatacaaagtgttttagaaatgtttgtagatttggcaaaatat

SEQ ID NO: 498175 - DNA, 618 bp, Homo sapiens
aaacttcttccatcctccttcctttcccaccccatttctcttttgggttgctgcttctaggatcaatcaccgggaaaggtctaggctctcctcttcttcctgagtccacctgctaagcacaatgtacytccttgctggctatcccacctaattgtgactgtttatgaccatttgtaaccagacttgtgatcttccatgcagtaggaagactgtgtaagtgtacccatgtttgtttatcaaccttgagccctcccaagcatccttgagtctgaatttgcatcatagttgttgtacacttaccctgtggcttttcattccacccaagttctccattctagttttactagaaagacttaagctttagtatttcttggactcacattaatgaaactgctacttttgagtccttttggcttcttgtatcttttgcctagtagctaaaataaagaaaggctagtaagtgattagcaccattaacctgcaacactctgaattaactcatcaggatactctgaaatgcctgctttttcaggcctttatgcaggcaacgccctcttcccgggatgctgttgcctccctgacacagcccagcaattcgctcctttgtgaggttaaatg

SEQ ID NO: 498176 - DNA, 641 bp, Homo sapiens
ttgcactttgggtgataggaggttttgctgaaaatgaatttgttagaatatttcaaggttcgtactcatttagatacttagacaaagaaatcccagcaggaagcaatcctgataatttacacacagcaccaggggttgtgaactaggtttcagatttccttgagagctgatatgtgctcagtgatgtattaagaaaatagaggatatgggagtagctgctcctgccacagaggaccctcatggcccacaccatgccagtgaaaagtagttttattctgatcctcctggcctttgcagcttctccaagacatgcttcatcctcacattttacttgcatttttgactgtctctgtgtcatagctgaagttttttctctcctcttccttgccttccctgctttcttttgtgaactcccttccttcagggttgttgattttcccctttctaccgcaccatctattttcccatgcctgatgtggcctccaatttgatctgccagattaccccaattatctcatccaactgaaagagttttcagctaggaagatcatttgagaaaataaaacttcccaagagtttgagctgcagaaaatgaaaatgggcttcctagacaggttgcraggtctagttcacagaatata

SEQ ID NO: 498177 - DNA, 173 bp, Homo sapiens
ctgtggattcttctcccacacgtgaagagagaatgaagctgctcatgagtgacctttagaatcaaagcactctgagtatgagagacgcmcttgaatgatgtgacccttcccttaaatacctgtaaagaagataactggtcagtcaaatcagtaaactgcactaagaaaaagca

SEQ ID NO: 498178 - DNA, 599 bp, Homo sapiens
taaaataaatattggcttatttgtccatctacaccattctgggaatttttattttctgcagtggtggtgagggatgtggtgcatttttataattttatgttggcttggcctctattttgagcacaggtttaactttctaacgccagaagcagggctcagtcatccctgacatagttttcagttctataccacatccaaatggctcaagccggtggctagagataagaacttagcagcatttttctcacctagctgactggttcccctttctttaaacagacactccaggcacttgtttgtgaacttaaagtgccccacaycctatttccttatgcatactgctaactgccaaaatattctctctctgtccacctgaccctccattcctgcttcctgtgacctgggaatggagaattaccctctggactccttgtgccctccctgctcaggatatgtaagtaaaagtcattgcgcttttttctatagtggtggtgtactgaatttataccttccatctgaaaaattagggacatctgtaggtcctggaaccagagtgatggtaaggtaggtataagctgggcatggatcagacaagagcc

SEQ ID NO: 498179 - DNA, 507 bp, Homo sapiens
gatggagacgccaggcagagccagtcctcatgcttggggcctgggcctaggaaaggaactaggtgaagaagggaggagccccaggctgtggatgtctctgggggaaccttggttcagcaacggccagaggagctcctgaggccaagtggtatctgtcgcctccctacctttgggcgtcttctggtcttcaatrtgctgcaagtcatggctccggaatcaaattgggctcaaattgtgcgagctccaacgcagtggagcctggcgctactcccacctcctcctcgtggatctcagagctgcaggatggctctgcccaccgcaccctaagctggccccgcttggggctggcattgggggacagcatgttctgggcgtctctgctcctttctgctggtgcctgtgcctttgctggccgacgactcatagatatcagagccacaggacggccccgcagaacccctgcgccggccctgctgggggctggctttggtgcacatgcgaccagtc

SEQ ID NO: 498180 - DNA, 568 bp, Homo sapiens
ctgtgtgagtacagcatcttcagcytgttcttcttcagtcagtccggcctcagcatcgtctgtgccatgatatctatacaggtaatttgtgttagacattcttagaagagtttcaaaagttttatgtttttatctgggttataaacagagtcctcaaatgcatacaaaggaaatcatgccatgattgaatttcagcaggaataagtttattttacctattcaaaattaaaatacttttgttgtgtttgaaaatgtgttttaaagatatgtttttgaaaaaagtttaagtaaatatttaatcatgtccccttttctatcccaagaaataatttcatatatagtttatttaaattttttaacaaaaatgtagcataatttttttaaattatatattttatttaacccaatatatatccaaaatattgggtcaatatgtaatcaatataaaaattattagagatagtttgcattcttttttcatatgaaatctttgaaatccattgtgtattttacattttaggatgtctcaactcaaatgtgaaattttcatggagaatatttgaactgt

SEQ ID NO: 498181 - DNA, 628 bp, Homo sapiens
gctgctgtgtgagtacagcatcttcagcttgttcttcttcagtcagtccggcctcagcatcgtctgtgccatgatatctatacaggtaatttgtgttagacattcttagaagagtttcaaaagttttatgtttttatctgggttataaacagagtcctcaaatgcatacaaaggaaatcatgccatgattgaatttcagcaggaataagtttattttacctattcaaaattaaaatacttttgttgtgtttgaaaatstgttttaaagatatgtttttgaaaaaagtttaagtaaatatttaatcatgtccccttttctatcccaagaaataatttcatatatagtttatttaaattttttaacaaaaatgtagcataatttttttaaattatatattttatttaacccaatatatatccaaaatattgggtcaatatgtaatcaatataaaaattattagagatagtttgcattcttttttcatatgaaatctttgaaatccattgtgtattttacattttaggatgtctcaactcaaatgtgaaattttcatggagaatatttgaactgtatttagattaatacaaattgcagttaaaaagtttaatatagatttaccagggggcg

SEQ ID NO: 498182 - DNA, 628 bp, Homo sapiens
gctgctgtgtgagtacagcatcttcagcttgttcttcttcagtcagtccggcctcagcatcgtctgtgccatgatatctatacaggtaatttgtgttagacattcttagaagagtttcaaaagttttatgtttttatctgggttataaacagagtcctcaaatgcatacaaaggaaatcatgccatgattgaatttcagcaggaataagtttattttacctattcaaaattaaaatacttttgttgtgtttgaaaatgtgttttaaagatatgtttttgaaaaaagtttaagtaaatatttaatcaygtccccttttctatcccaagaaataatttcatatatagtttatttaaattttttaacaaaaatgtagcataatttttttaaattatatattttatttaacccaatatatatccaaaatattgggtcaatatgtaatcaatataaaaattattagagatagtttgcattcttttttcatatgaaatctttgaaatccattgtgtattttacattttaggatgtctcaactcaaatgtgaaattttcatggagaatatttgaactgtatttagattaatacaaattgcagttaaaaagtttaatatagatttaccagggggcg

SEQ ID NO: 498183 - DNA, 628 bp, Homo sapiens
gctgctgtgtgagtacagcatcttcagcttgttcttcttcagtcagtccggcctcagcatcgtctgtgccatgatatctatacaggtaatttgtgttagacattcttagaagagtttcaaaagttttatgtttttatctgggttataaacagagtcctcaaatgcatacaaaggaaatcatgccatgattgaatttcagcaggaataagtttattttacctattcaaaattaaaatacttttgttgtgtttgaaaatgtgttttaaagatatgtttttgaaaaaagtttaagtaaatatttaatcatgtccccttttctatcccaagaaataatttcatatatagtttatttaaattttttaacaaaaatgtagcataatttttttaaattrtatattttatttaacccaatatatatccaaaatattgggtcaatatgtaatcaatataaaaattattagagatagtttgcattcttttttcatatgaaatctttgaaatccattgtgtattttacattttaggatgtctcaactcaaatgtgaaattttcatggagaatatttgaactgtatttagattaatacaaattgcagttaaaaagtttaatatagatttaccagggggcg

SEQ ID NO: 498184 - DNA, 642 bp, Homo sapiens
gctgtgtgagtacagcatcttcagcttgttcttcttcagtcagtccggcctcagcatcgtctgtgccatgatatctatacaggtaatttgtgttagacattcttagaagagtttcaaaagttttatgtttttatctgggttataaacagagtcctcaaatgcatacaaaggaaatcatgccatgattgaatttcagcaggaataagtttattttacctattcaaaattaaaatacttttgttgtgtttgaaaatgtgttttaaagatatgtttttgaaaaaagtttaagtaaatatttaatcatgtccccttttctatcccaagaaataatttcatatatagtttatttaaattttttaacaaaaatgtagcataatttttttaaattatatattttatttaacccaatatatatccaaaatattgggtcamtatgtaatcaatataaaaattattagagatagtttgcattcttttttcatatgaaatctttgaaatccattgtgtattttacattttaggatgtctcaactcaaatgtgaaattttcatggagaatatttgaactgtatttagattaatacaaattgcagttaaaaagtttaatatagatttaccagggggcgtgcagcccgcttgccaa

SEQ ID NO: 498185 - DNA, 570 bp, Homo sapiens
tgctgtgtgagtacagcatcttcagcttgttcttcttcagtcagtccggcctcagcatcgtctgtgccatgatatctatacaggtaatttgtgttagacattcttagaagagtttcaaaagttttatgtttttatctgggttataaacagagtcctcaaatgcatacaaaggaaatcatgccatgattgaatttcagcaggaataagtttattttacctattcaaaattaaaatacttttgttgtgtttgaaaatgtgttttaaagatatgtttttgaaaaaagtttaagtaaatatttaatcatgtccccttttctatcccaagaaataatttcatatatagtttatttaaattttttaacaaaaatgtagcataatttttttaaattatatattttatttaacccaatatatatccaaaatattgggtcaatatrtaatcaatataaaaattattagagatagtttgcattcttttttcatatgaaatctttgaaatccattgtgtattttacattttaggatgtctcaactcaaatgtgaaattttcatggagaatatttgaactgt

SEQ ID NO: 498186 - DNA, 368 bp, Homo sapiens
cctgggtacacatcctgtcttrccacaccttgaaatcactgtgatttccatgaactgactgacaaaaaccacgaggatgtaaggagggtcggaggctgtcttactgtctgtaaggctgagctcacatccacctcacaggagcattatggaaattcaagactacaacgcatgtgccggatgcatgcaatgaaaaaatataacacttcacttctctaactgtaagaaaatacctacattttagattgaaattgtttgagctttagatttgaaattatctgaaatcaagactattctaaaaagaaaatcaaacacatgactggaaatctaacatgaagcacatacagagaattgatagatgcttttaaatt

SEQ ID NO: 498187 - DNA, 368 bp, Homo sapiens
cctgggtacacatcctgtcttaccacaccttgaaatcactgtgatttccatgaactgactgacaaaaaccacgaggatgtaaggagggtcrgaggctgtcttactgtctgtaaggctgagctcacatccacctcacaggagcattatggaaattcaagactacaacgcatgtgccggatgcatgcaatgaaaaaatataacacttcacttctctaactgtaagaaaatacctacattttagattgaaattgtttgagctttagatttgaaattatctgaaatcaagactattctaaaaagaaaatcaaacacatgactggaaatctaacatgaagcacatacagagaattgatagatgcttttaaatt

SEQ ID NO: 498188 - DNA, 368 bp, Homo sapiens
cctgggtacacatcctgtcttaccacaccttgaaatcactgtgatttccatgaactgactgacaaaaaccacgaggatgtaaggagggtcggaggctgtcttactgtctgtaaggctgagctcacatccacctcacaggagcattatggaaattcaagactacaacgcatgtgccggatgcatgcaatgaaaaaatataacacttcacttctctaactgtaagaaaatacctacattttagattgaaattgtttgagctttagatttgaaattatctgaaatcaagactattctaaaaagaaaatcaaacayatgactggaaatctaacatgaagcacatacagagaattgatagatgcttttaaatt

SEQ ID NO: 498189 - DNA, 368 bp, Homo sapiens
cctgggtacacatcctgtcttaccacaccttgaaatcactgtgatttccatgaactgactgacaaaaaccacgaggatgtaaggagggtcggaggctgtcttactgtctgtaaggctgagctcacatccacctcacaggagcattatggaaattcaagactacaacgcatgtgccggatgcatgcaatgaaaaaatataacacttcacttctctaactgtaagaaaatacctacattttagattgaaattgtttgagctttagatttgaaattatctgaaatcaagactattctaaaaagaaaatcaaacacatgacyggaaatctaacatgaagcacatacagagaattgatagatgcttttaaatt

SEQ ID NO: 498190 - DNA, 518 bp, Homo sapiens
ctccttcccttagggctggtcctcaccaaagtttaggtctcctgggggatggggttcacctccctcttgtttcttggagctgatggagtactytctcaactgaccaagggagcaggctgagacacccagcaatgacacacacagaccagttccaggttgcaaagctgttcttggctgcaagtctcaccatccttgagaaacctctgctttagcaactctcttcccactacagtcctgcaagaggagagagcctaattccaacacttactgctggggcactttccacactcaacactcaattctggctgttgaggctgctcccctgctccagagaaagcactccaattcctagcccaagattaaagtgtctgcagtggccaccattgccaggcaccaaaaaatgattgactttgtatgagcccagattaaaaagggcatccttctctcagtcccaggtctggggaaatgcctgcagcttttctgagtgtctttcctctttccccatctctcagccactt

SEQ ID NO: 498191 - DNA, 518 bp, Homo sapiens
ctccttcccttagggctggtcctcaccaaagtttaggtctcctgggggatggggttcacctccctcttgtttcttggagctgatggagtactctctcaactgaccaagggagcaggctgagacacccagcaatgacacacacagaccagttccaggttgcaaagctgttcttggctgcaagtctcaccatccttgagaaacctctgctttagcaactctcttcccactacagtcctgcaagaggagagagcctaattccaacacttactgctggggcactttccacactcaacactcaattctggctgttgaggctgctcccctgctccagagaaagcactccaattcctagcccaagattaaagtgtctgcagtggccaccattgccaggcaccaaaaaatgattgactttgtatgagcccagattaaaaagggcatccttmtctcagtcccaggtctggggaaatgcctgcagcttttctgagtgtctttcctctttccccatctctcagccactt

SEQ ID NO: 498192 - DNA, 571 bp, Homo sapiens
tgcctgcacacagagggcgactgcagcttgggcgcccagtcggcggagcatggtctgggtggcckctggaatgcgtgcgctcgaggcctgagggacccgctgttggtgccacctgccctgctctgcgcctctccgcgcctgggccccctccgcgcctgcgcccctccgcgcctggccggcgctctgggcctctctgcctttgcgaagggcgctctgcctttgctagggcagagctgccttctcctcagcacagaccaggagagcatcgcgagggcggagctgagttctcctctgcacagacttcggagatacagcgaaggcggagcagtgtttgcctcagcacagacccaggcgggcgggccgggggtaccgcgagggcggagctgcgttctgctcagcacacacccgggggacaccgcgaaggcagagcagcgttctcgtcagcacagaccttgggggcactgcctcgctttgggacaactcggggccgcatcaacggtgaataaaatccttcctgtttgtagccctgaataatcagggtcagagaccagttagaagggttcagtgtgga

SEQ ID NO: 498193 - DNA, 571 bp, Homo sapiens
tgcctgcacacagagggcgactgcagcttgggcgcccagtcggcggagcatggtctgggtggcctctggaatgcgtgcgctcgaggcctgagggacccrctgttggtgccacctgccctgctctgcgcctctccgcgcctgggccccctccgcgcctgcgcccctccgcgcctggccggcgctctgggcctctctgcctttgcgaagggcgctctgcctttgctagggcagagctgccttctcctcagcacagaccaggagagcatcgcgagggcggagctgagttctcctctgcacagacttcggagatacagcgaaggcggagcagtgtttgcctcagcacagacccaggcgggcgggccgggggtaccgcgagggcggagctgcgttctgctcagcacacacccgggggacaccgcgaaggcagagcagcgttctcgtcagcacagaccttgggggcactgcctcgctttgggacaactcggggccgcatcaacggtgaataaaatccttcctgtttgtagccctgaataatcagggtcagagaccagttagaagggttcagtgtgga

SEQ ID NO: 498194 - DNA, 571 bp, Homo sapiens
tgcctgcacacagagggcgactgcagcttgggcgcccagtcggcggagcatggtctgggtggcctctggaatgcgtgcgctcgaggcctgagggacccgctsttggtgccacctgccctgctctgcgcctctccgcgcctgggccccctccgcgcctgcgcccctccgcgcctggccggcgctctgggcctctctgcctttgcgaagggcgctctgcctttgctagggcagagctgccttctcctcagcacagaccaggagagcatcgcgagggcggagctgagttctcctctgcacagacttcggagatacagcgaaggcggagcagtgtttgcctcagcacagacccaggcgggcgggccgggggtaccgcgagggcggagctgcgttctgctcagcacacacccgggggacaccgcgaaggcagagcagcgttctcgtcagcacagaccttgggggcactgcctcgctttgggacaactcggggccgcatcaacggtgaataaaatccttcctgtttgtagccctgaataatcagggtcagagaccagttagaagggttcagtgtgga

SEQ ID NO: 498195 - DNA, 360 bp, Homo sapiens
gcttcctctaatgggctaaagaaaatgtggaaacttcaaactgttraatgcacccaagttagttttggtaataggtctgaataaaaaagaaattcaaatatgtttgactcaaataggttttcttttttctctccacttactattttaattattcatattgttttgatttccaaagatactcttctggaactatacggaatgttttcaaatgcttatattagaaagagggacttgccaatggctggtaaatattaaggaatttaaaaaaatggaagagtcaaatgcaatggttccattcctttggaaaatgtttgagactagttagagtttggcctaagtgaatgaatgtcctaaaatcta

SEQ ID NO: 498196 - DNA, 360 bp, Homo sapiens
gcttcctctaatgggctaaagaaaatgtggaaacttcaaactgttgaaygcacccaagttagttttggtaataggtctgaataaaaaagaaattcaaatatgtttgactcaaataggttttcttttttctctccacttactattttaattattcatattgttttgatttccaaagatactcttctggaactatacggaatgttttcaaatgcttatattagaaagagggacttgccaatggctggtaaatattaaggaatttaaaaaaatggaagagtcaaatgcaatggttccattcctttggaaaatgtttgagactagttagagtttggcctaagtgaatgaatgtcctaaaatcta

SEQ ID NO: 498197 - DNA, 360 bp, Homo sapiens
gcttcctctaatgggctaaagaaaatgtggaaacttcaaactgttgaatgcacccargttagttttggtaataggtctgaataaaaaagaaattcaaatatgtttgactcaaataggttttcttttttctctccacttactattttaattattcatattgttttgatttccaaagatactcttctggaactatacggaatgttttcaaatgcttatattagaaagagggacttgccaatggctggtaaatattaaggaatttaaaaaaatggaagagtcaaatgcaatggttccattcctttggaaaatgtttgagactagttagagtttggcctaagtgaatgaatgtcctaaaatcta

SEQ ID NO: 498198 - DNA, 360 bp, Homo sapiens
gcttcctctaatgggctaaagaaaatgtggaaacttcaaactgttgaatgcacccaagttagttttggyaataggtctgaataaaaaagaaattcaaatatgtttgactcaaataggttttcttttttctctccacttactattttaattattcatattgttttgatttccaaagatactcttctggaactatacggaatgttttcaaatgcttatattagaaagagggacttgccaatggctggtaaatattaaggaatttaaaaaaatggaagagtcaaatgcaatggttccattcctttggaaaatgtttgagactagttagagtttggcctaagtgaatgaatgtcctaaaatcta

SEQ ID NO: 498199 - DNA, 601 bp, Homo sapiens
ccttgctttttctttacttgggtttctctatttctctgtctttttacacacacacacatacacacaccccacacacatatacacatatatatctatccttggatatccaaaaaaagattctcaataaattcacaacactaattgaattgagatgatataaagttgttgattatttttaataaagtctagagatctaacattagttgtagcttatttcttcactactaaataagaaattccaagttaagtcttttcatcttttcattaataaatagccaatatgtaatatctgccyatccatatatattatgaactatctgaactactccttataattatggggtaaccagtcaaataaaagtgttgaataaacagcttattgtatatgttatgaattacctgacttaaaattaggagtcaattagtcaaaatgccatgggctatatgactcattgtaacattaataaagtaaaatatgtcttcctataatccagttattggtattaaataatattgaagctattttccaagcaaaacttccgcataagtttgtttttgtcttggttgagaactggttcttttgagataaagccaccaactc

SEQ ID NO: 498200 - DNA, 656 bp, Homo sapiens
ggactttagatatatctccctgtgcttggaagactatgtctcctgtccctccttagacatcaaaaccctggctcaccagccctcaggcctatagcgagaaccaccctgtccctgaaccaccaccacattaactgaaacttattgcagagtcttcagttcctctgttcctttatcagaccttcagcattccatttcctttccttaaacttgatagatttttttaaattgttttacttatattttattcattatttttctgtgcctttaggtggtcattgatctatattagctgggttcattatgttttcaaaactggaagtttctaacatcagcttcctagcctataaaaaattattcaagttgcattatccacaatgctcttttaaccctatgactcatatcttaatatgaactaatacgaagaaaaacaagaattaataccaggtctcttgtcttctttccattttgatattaatcaattgtgtcatgttagacaagtcattaaactttcttgggctcaagcttccccakctataaaatcagcagttgaaactatatgccttagataaatgcattctcttctccaagctaagcaagtttaaatctgatgagcttttaggaaagatacaactttgtcctcagtactataatatttg

SEQ ID NO: 498201 - DNA, 656 bp, Homo sapiens
ggactttagatatatctccctgtgcttggaagactatgtctcctgtccctccttagacatcaaaaccctggctcaccagccctcaggcctatagcgagaaccaccctgtccctgaaccaccaccacattaactgaaacttattgcagagtcttcagttcctctgttcctttatcagaccttcagcattccatttcctttccttaaacttgatagatttttttaaattgttttacttatattttattcattatttttctgtgcctttaggtggtcattgatctatattagctgggttcattatgttttcaaaactggaagtttctaacatcagcttcctagcctataaaaaattattcaagttgcattatccacaatgctcttttaaccctatgactcatatcttaatatgaactaatacgaagaaaaacaagaattaataccaggtctcttgtcttctttccattttgatattaatcaattgtgtcatgttagacaagtcattaaactttcttgggctcaagcttccccatctataaaatcagmagttgaaactatatgccttagataaatgcattctcttctccaagctaagcaagtttaaatctgatgagcttttaggaaagatacaactttgtcctcagtactataatatttg

SEQ ID NO: 498202 - DNA, 524 bp, Homo sapiens
cttttaaaatttacattattgcaataaatgttttacccgaactggtttggtaaatattttatatgcatctgtatataaagaaccatcatatcttattatacctagaaatgaatgcaattatgtttgccattttaagggtctcaagagttaatattaacaaagtgcttgttgacgtattttttttttcacatgaccttctgaagccagcctgcactactgccttttacataagtaaattagggtacatttttaaccttttcatgtttaaactaagacacatagtagctcttcaaaattgcaaaacagtctttagaacatttagtacacaataacccttctaattgcacgtgaaatgaaggactgtaaacttcataagtcacccagaagaacacartgtaattccctttagagtatcctctttaaaagtggtctcagaatcagactccatgatttcagcaacacagtcaaagatgtactaacagatattacctaggttgccaatgaattgctgtcagttcatgttt

SEQ ID NO: 498203 - DNA, 411 bp, Homo sapiens
tggagtactaatggacctatataacacattgagaatgttgaaacaacccgaaacaagctagagaaattggagaagcttaaacctgaggattggtgccctgaaatggaagagaaacaacagtcaactttatatgaacaggatgaratagcatacaacaggatgatattaacatatctctgagcctgtgagggacagggaacagacttagagcaatccacccttgccgttaagatctattttgaagtgagacaggcgcttgtctcaaaggtcagggactaaatgtgtcttagagaagtcatcgtggttgttttaccttttcatccacctttgaaataaaagattagagataagatgaaatctaactagatccttgctaggagaatgaagttttaaaaggagagccatagtcac

SEQ ID NO: 498204 - DNA, 558 bp, Homo sapiens
caaatgtttgatgagtgaatgcatgagaatgtgagggagttatcaggaaaccatcttcatcatggaattttaatctgttcttaacctaaagtttctctactctgaatgctgctactgtggtcatcattattaagctttattagagatccctactctatttacttgttttgaaaagataccatttctgagcaatcccagctktgacttaagattgaacaaatcagctgtcacctgtcctacacagcagcgcattgacagcacaggtgtggtatttttgctccagtttggatgggttgccaacgatcaggttttccaaatgtgatttgtttagataaaactaaatattaataccacctcaagtgccatagtgtgtacaaccagaagagctctcatatataccttgcgtgattttcccagcaatacggttgttcagatagacaacaagaaacttgcagataagaagagggactcagaaggtttaggtgatttgtccaagtataccagctggaaactcaaactttctgatttcaacaccgtgctgggcattgcctcaatttg

SEQ ID NO: 498205 - DNA, 601 bp, Homo sapiens
attttctaaaattaaaacggtatgccagacaaggtaatacaagtctaggcttgatttttcctgagtgttgtgtttgcggtgggtgggccaattatttctgttccttttcaaaggatctcacttatcttcttgttttctgccccattggataaatcatctcatgtcatcatttatttaacttcaaacacaatttctaaatgttgaggaatacgagaacaaaaagagcatgtctgcatctgcatacatggtcttaggtattgggtgaaagaccatcaaaaacttatattagtactaggaagaacacaattattttaaaatacattaaatgcataataacttttaaaattaagggtcaggaagaaatctctaatagaaatcacaaaacgatagacattttctttgaccattcttgctttgcttctstaatgtatatttaatattaatataaataacagcagtaatgacaaccataatggccactaccatgtcatagaatgtactatatgcattcacgtgtttcatctgatttggtccacatatcataacatgaagttggtgaggctgaggctatatatgttattcagactcaagatagaaagga

SEQ ID NO: 498206 - DNA, 653 bp, Homo sapiens
tgcttagcctggtatgcagaatctggtgcaagctgagcacggtctaagttgcctcatcatctcagctctccatkcttctgtatttgtatacttccatacttagcaagtaactgttctccctccatggaatgtattattatcctctgccactgtcctcttaaacctggcaaatgcataactttcttttgagacctacctttgttaagacctagctctttgaagacttccctgattgtccaaggtaatgttgactttactttgtaactgtatgtatttttcttatgtcagcaaccactgctctgggttattactatatttttctctcccaaataagacaagaggttctgttagaagtggaaccttaatatccatttttatgtgatgaatttctaggcccatgtgtgggctgtattaaaggattaaagcaagcttgttcaacctgtggcccaggacagcttttattgtggcctgagacaaattcgtaaactttcttaaaacattatgagattgttttgtgatttttttttagctcaccagctatcattagtgtattttatgtatggcccaagacaactcttcttcccatgtggcccagggaagccaaaagactggacacccttgggtgaaagcttattagtaatgagtaaataaac

SEQ ID NO: 498207 - DNA, 606 bp, Homo sapiens
tgagtatacaattgagacaggatactaagaggggaaatgggcactacactagtgggggaactaatgaggacttctaaggccctttctgaattaaggaagattggcattttcctaaaagagaaagtgttccttcttggtttcagtttctcagcgataaggaggttctcaatgattgctgaacgaatagacaaggttatggagcagtatgtgttcctgtggactcatactctcctcaatccaaagggagaatcagtatactcccaactctttctattccttttatatgtaaggatggggtccatgaagtcattttgtcttactcaaaccaggcatgaaagccaactcaaatcaaattatctaaactctcagaatctgaaacagattataaggatataggatggarggagtattacaaagagaaaacgtgtaggttgggaagtagaaaaggagagtaacagggaatggtacaactgcattccttcctcctgctacatttcctcgctcccaaccaggtaattctaagagttcccactgggaggtttgcctagatttctttatgttctcctttggaaaaccattttttgtggcaagcagtgttccaaggag

SEQ ID NO: 498208 - DNA, 487 bp, Homo sapiens
aaaatgtgcatgatttttattaaaatccacattcttggagagttagaatctcaggcattaccttgaagcatctcttcagtttatcaatgtatgattcaaactcaagcttttagttcacagaaatatagcccaaaagcaacgccaacgttaaatggttatttacttataacttgctaatgtacttttctccctgagtattggcatttcttttttttttyattttaggattgggaaacatggattttgctactgccatagtagccttggtttcttttagccatggactagaaagaagaaagagtcctcattcgcaattcacacaaactgtaatgatgatacacatggggattttttttaaagtacattgaaagtttaagaaaaaacatgcaggttttctaaaaatgttttggtaagattaggtgaaagatcagtctccccaacagactcttatttttccttacattaatctgtaggaaaaagctcattt

SEQ ID NO: 498209 - DNA, 288 bp, Homo sapiens
tgtatttaacaaacacaaatgtatatgaacgcaaaatttaaatgaattttaaaagataaactacaagatgagaaaaaaatttcacagctccagtgttctactttggagctacttttgtatactattatgcttttcttctgacaacactttggaataactttttgagaggcaaagaagtaggtggccttctaggtycctagacagctatgcaggcatagaatatttttcaccaatatttttagctgatatccaaaagtgaccttctgaacagccagatactcaatattg

SEQ ID NO: 498210 - DNA, 638 bp, Homo sapiens
ggcaggaccccttttaaaatggaagtcttccaacccacaatcaggcaaggtaggtcagagaacattttaatgggaagaggggaagattagagtcctgccttggggagaaaaagaagcgggtgaaaggagggcaggagaaagtcagagagattcagtggcctaaagctctccaacattttaacaaaagactgtaataagggctgtaggagtcataagcgaggaaccgcggatgaacacgcatgctcacacacacatatatgtccatgtcaygtgcacatcacagatagtatagagaactgaccaggaatccatcagacaaagcattggcaaacactgctcaggtatgtctgggtttgaatcctacaaagtctggaggataataagatttttcttcagtaattctcagcctccgaggtgtgggaacagaggttgcagtgatccattcttggaggtttcaggccgggtgtggtggctcacacctgtaatcttagcactttgggaggccgaggtgggaggatcatttgaggccaggagttcaagaccaaacttgggagtttcctgggagggagagctggaggggcagcaggacaagggtccctctgagcctgtttcttctccgcctcttgcttttatgatgg

SEQ ID NO: 498211 - DNA, 631 bp, Homo sapiens
aggtgatcccacttcctgggacaggaaacacagggagagaaatggttttgctgccagtaggggcttatggaggtatgagtgtgatgtgaccgtgggacagctgagtgacaattctcagtagactttgtatacatcaatctgaagctcagagaagtctaggctggtgatatacaattagaagaccaaagcacagaaatgaggtttgaatccctggaagtagatgagacaatccagagagaaggggtagaattagaagagaaggcagcctggggcagagcacggaggcttggcacgccacacttaagggacacggagaggyagagaaacttgaagaggagcagacatggagcttagacacccagagtggggcccagagctaaggaggagtgtctcaaggtgttggggtggggagggcacagaatcaccaggcttcagatgctgctataaggtcaggcctacaaaggtttggattcagtgcacagaggttattagtgacctggacaaagcagttattttttgctgatgaagtatattaaaaggctttccaggcatcacatgtgccttagtccattcaggctgctataacagaatactgtagactaggtggcataaagaactaaaacaacggatt

SEQ ID NO: 498212 - DNA, 606 bp, Homo sapiens
tcaaatgaggtcataattcttcttttctttcttagactattattttctgtattggcatgattatgtagcatagatgtttcctggcagctccaggtttatgtggtccttagtgcctrggatcccaggagagagaccctctttcctgaagttcatatcatttatcaatacaacaagttgtattgttcaactgaagcaaattcagcactatgcttgtatcttccatgtgcttctctctgcccattgtatatctttaaactgtatacttattttattttattattttattttttcgagacaaagccttgctctgctgcccaggctgaagtgcagtggcacaatctcagctcactacaacctctgcctccaaggttcaagcagttctcctgcctcagccccctgagtagctgggactacaggtgtgtgccaccacacctggctaatttttatttttagtagagatggggttttgccatgttggccaggctggtctcaaactcctggcctcaagtgatccgccagccttgacctcccaaagtgctgggattacaggcatgagccaccgtgcccagcctatatacttattttacatgtatactctttttttgt

SEQ ID NO: 498213 - DNA, 606 bp, Homo sapiens
tcaaatgaggtcataattcttcttttctttcttagactattattttctgtattggcatgattatgtagcatagatgtttcctggcagctccaggtttatgtggtccttagtgcctgggatcccaggagagagaccctctttcctgaagttcatatcatttatcaatacaacaagttgtattgttcaactgaagcaaattcagcactatgcttgtatcttccatgtgcttctctctgcccattgtatatctttaaactgtatacttattttattttattattttattttttcgagacaaagccttgctctgytgcccaggctgaagtgcagtggcacaatctcagctcactacaacctctgcctccaaggttcaagcagttctcctgcctcagccccctgagtagctgggactacaggtgtgtgccaccacacctggctaatttttatttttagtagagatggggttttgccatgttggccaggctggtctcaaactcctggcctcaagtgatccgccagccttgacctcccaaagtgctgggattacaggcatgagccaccgtgcccagcctatatacttattttacatgtatactctttttttgt

SEQ ID NO: 498214 - DNA, 607 bp, Homo sapiens
gccctttgctctttaaaacaactaccaccccatcctatccctcaggttttctagccaaagcctggcacacagggggacacaagaatttctggctcctacttcctcactgcctccaaaggtgatcagtcaatataggaaattctcagcaggtgacaaacacagccatttggggagccagagagtttattaggaattctctgaaatccttacaggcactgctcctagactytcactctattcccttattgctatgggctcccaggaacaaagctgtctgctccatcctccccaaaaaatgtcatgcaaccaggcaggctgcagagacaatccaggcaggaagactggtgcttccttgagcacagtaggtaatgtccaccccagaggccccttaggctggatgctgttctaacttaaccaaatattttctatgcagatagtgggacagacccttctttttttgagtcagagggctgcactctgtggggatgggaaatgtgagcgggcagcagagcagagggctgtgcacccggggctgtagtttcatggttcagagaggaaagcagcaaggaggagagatggacacgagggatgtgactatgatagccag

SEQ ID NO: 498215 - DNA, 481 bp, Homo sapiens
gttccaatgcaactttatggtcgcagaaatctgaatttcatawaattttcataaaacattattcttgttttaattttttccaaccatttaaaaatgtaaaaaccattcttagctcatgggttgtacataaacaggtagtaggctagatttagcctgtgggccataatttgccaactgtggtacagaagcacctattcccaactgaactgaacttgaatgttcgtggaaagatgaaaacatctaagcctagcccctaggaaagttaaggcagaaagggagatatacgttcttaaagggtttcaggtgcttaccttaaatcccttctcttgctgaactcctctggtggaattgtccatggcaggccttgaggaagacattctagaacttctgaagagaaatcagagaaatccacgccatactctgttagtattccttctgtttcaggctcaatttcaccagcctgcccaagactcttagccag

SEQ ID NO: 498216 - DNA, 644 bp, Homo sapiens
ttatgggtgattctaaactaatttgcacatggtggcccagtgtcttcaggtttgcatcatcacatcaggccaaacccaactctctgagtctttgcagacagctcaagcaaagcactgagatatcctctgaatggattggcttgggtcatgtgtccatcatacataaataatcacatggctcagagaagtgggttattctgkgtgacctagggccgaatcacatgctccttcctaatagcacaagtaccgagtgagcgaaacattctggtctcatcaaggaaggataaaatggatgctagaagctaataacagatacactcaacaggctcacaggggaaattatatctaagctgagaaccatagagagatggctctggacatgtagacagaacagggaataaaggaagggccttatataaggagttttgactttcttaaaaagacaatagggaagcattgagggtttttaaccagacaacaatgtagacatatttctgtttttgaaacaggtcattgagatagcaatattgagaatgggttagaatggagccatggtagatttgcaaagaccaggttttaggctactgatataacagaaaacaattgaaatctggagcaagtagtagcagtgggaaggaaaagca

SEQ ID NO: 498217 - DNA, 576 bp, Homo sapiens
agactacacagtaagcttaaataccagttactgatttgtggggagggggcttagtgggaggagtttaaacattttctttttcatttgttaaaaaagtatgtattacttttgcactttttaaagtacgatagtactttaaaaaataaatttactgaacccatccttagaattctcagacccatcagactgcatgtgggaacagaatgcttattagtgctactttttcagtcacccatgagtttaaaaaaagaaaaggagaactttcatggtttcaacttggaaacttccaatcaggaaatgggcccctgtcaaattctagcacctaccatttattcaggggtttccctttcsctgtaatccagcctttcttatgccttcagcactcctgtctgcattggtggaaatgccatcctattgtgaatagcactggaggccccagcccttcctgaggatcacctgcaaacccagctcctaacactactccctcctctcactgcccactcctccttggagggcatggcttcactgccagttatttatttatttaacctcatctgatgcagtcctgactcacag

SEQ ID NO: 498218 - DNA, 482 bp, Homo sapiens
agcccaaccaatctgtgactgagaatcacagtcgccggatgatgtgagtgtcaggagccaccctgggctgagtggcctcatgctgtgctcctctggtctcagtgctttgctagaagcagtcgtagggggagcaccatgactaaaatgaggtttcagaggaggccaagagagcaattgggaagaaagcctggtttgggagtcgacagaacaggcaggatcacatccacttatgactacctggagaacgctgggccacttcccctctctgagccccaatttcctccctataaaagaacacagttgaggagagctgagtttcccaaatgtagccacacatcatagtcayctagattcctgggtctaccccagacctcctgaagcggaatctccaagcatgggcacaacacaaaaattgtgttcaagctccctaggtgattccgatgcagccagtacctgggacccttggaacagatcacctgtga

SEQ ID NO: 498219 - DNA, 654 bp, Homo sapiens
tatataattctatctcttttaaagaagcaaagagaagaaaaggaacaagtatacatttacagtttttgttatttaccatttatctatttaccattacaatttattatttaccagaaattttttatttataatttcttgttctcctcatttgttcctgtgggttcaaatttaacatctagagttaaactcctagatgttgattccttagcttaaaatacatttgctcctctccccccacttttgctgttattggcaaatatattgcatttccctatgttatagacccaacaatacgttacatacatattgtttcatatgattgctttttaaataagttagtagaagaaagaggataaatttgcatttacactttcttttatatttgtataattttcttttgtcagtgatctttatattttcatgagattcaaattactgtctgtagtcacttgctttyggtctgaagaattttctttagtattttttgtaaggcatgctagcaacaaattctttcagattttgttcatctgcaaatgtctttattttgttttcatttttgaaagacagctttgctagaagtaggattcttggttgataggtcttttttttctttgaaccctttgaatttgttatcccactaccttctgggtttca

SEQ ID NO: 498220 - DNA, 518 bp, Homo sapiens
atcggcagactagcgtcttaaaatccaagcttgttgagtgcacaatttctgtcccttttttttttttagcgctcacaatactaaaggtttcgcatgaaagggttgtgattgattgagcagtctagggtggtacmggacaggggctgcagctacatgcaccagtaatcagagtgaaacagaacagaatggaaaatttgttgtatgtccttccacacaatgtctggaatctatggataacatcagttgctaagtcatgggttgaattttaaccatcaggctaaggtcaggcaggcccaggcctggttttgggtctggttttgggtctggtgcctggcgccaggctgcctgcctttggtttcgcttccttgtttcttcttaaaacaggtactgagtataaaacagtatagaacaatatgggggggtctctttctttcttctctcagtgatactgccataatgatagacataaaaatcagtagaataggatcaaaaacccaaaaataagttcatacgtagct

SEQ ID NO: 498221 - DNA, 625 bp, Homo sapiens
ttttcaaataatgccagagacaaatcgctgatcaaaactgaggaggaagtgctcttgccatttcctgccycagaagtctgttgtagaactggcatcatgataaaaccttccctgtctcctggaccatcatctgtccaattgatgcctactgtagggtctcttttgttgttctctcctaaatcaaactttagtgcaagaatgtgtaattggcagaacctagatcaaatgcctgcactttgatttcaagggaggcaagggaatataattttttggattccattttgggaaaggtagcttttacaacttagtgaccaataaaaaagtagggaagatgtttaacacatggcagccatgaatgtttaaaagatggcagccacaaattatctctatgacttcgctattgtggacaccattttgggtatgtggcccactcacctctgtttcatgcttgtcatctgtaggaattattcccttattgtactaactggaagagaggtggggaatctgtctcatgttggatccatcagtgtcactttcccaggaattgcatatttagaacttagatattataaccttagtctgggtttgcttctagatgagattatataaactcttgaaatgaaga

SEQ ID NO: 498222 - DNA, 625 bp, Homo sapiens
ttttcaaataatgccagagacaaatcgctgatcaaaactgaggaggaagtgctcttgccatttcctgcctcagaagtctgttgtagaactggcatcatgataaaaccttccctgtctcctggaccatcatctgtccaattgatgcctactgtagggtctcttttgttgttctctcctaaatcaaactttagtgcaagaatgtgtaattggcagaacctagatcaaatgcctgcactttgatttcaagggaggcaagggaatataattttttggattccattttgggaaaggtagcttttacaacttagtgaccaataaaaaagtagggaagatgtttaacacatggcagccatgaatgtttaaaagatggcagccacaaattatctctatgacttcgctattgtggacaccattttgggtatgtggcccactcacctctgtttcatgcttgtcatctgtaggaattattcccttattgtactaactggaagagaggtggggaatctgtctcatgttggatccatcagtgtcactttcccaggaattgyatatttagaacttagatattataaccttagtctgggtttgcttctagatgagattatataaactcttgaaatgaaga

SEQ ID NO: 498223 - DNA, 526 bp, Homo sapiens
cctgcgctccggacgagtccgggccggcggcggcagcggcagcggcagcggcagcgacaggcaggggttgctcaggcgcggcgagcccgctcgctccctcccggctcccgcctgcccctccctccctcctctcccttcccccgccccgcgcccggctccgcgcgcagtttgacagctttgctccgcgcctctgctcgcctcctcccaccaactccagcgtccaggcgctagcctttgcttctcccgcctggctttattcagctcccgagggcgcggggatgcagccggacgccactcctggcctagagagactgggctctggccaccgcgagcgaccgggtacggagctgagcccagggaagtgcgcgcaccgcccggcgcacccctcaggctggcaaacgccctccctcgcccgctctttgtccagctccctcgcctcctcgcaaagttttctcgacacaaagaccaacacctggggacagcccccakcgcgcggcgagaaggcggtttcagccaggcagatgtt

SEQ ID NO: 498224 - DNA, 513 bp, Homo sapiens
aatggactctttggctggcaagatgaaagctactggtgaaacaaaagaagccactttcagaggcatggcggggacgaaactgtctgcaagtgattgagggagaatgagcataaaggacgaggaagtggagaagacagggaattggcatcccattcaaggacatttactatgaaaggggacagaggactgcaccactgccagggtcttggctgtttagaggaataaactcaatctcagagagtttctatgacttgaccaaggtctcagactagtaggtggcattgaaacccatttaccctgaggctgactgtcaccaagtcctgtgctctgtttcctcccccagatagacattccacaattgttcaagttgttcctttctctggatttgttttctgatacttattagaaagaaactaaattycctagttactccacaaagcgtcttttcaggaggtgacttttttcttattggaaaagagatgtaattaggcagaagcaggggtgaggccccag

SEQ ID NO: 498225 - DNA, 513 bp, Homo sapiens
aatggactctttggctggcaagatgaaagctactggtgaaacaaaagaagccactttcagaggcatggcggggacgaaactgtctgcaagtgattgagggagaatgagcataaaggacgaggaagtggagaagacagggaattggcatcccattcaaggacatttactatgaaaggggacagaggactgcaccactgccagggtcttggctgtttagaggaataaactcaatctcagagagtttctatgacttgaccaaggtctcagactagtaggtggcattgaaacccatttaccctgaggctgactgtcaccaagtcctgtgctctgtttcctcccccagatagacattccacaattgttcaagttgttcctttctctggatttgttttctgatacttattagaaagaaactaaatttcctagttactccacaaagcgtcttttcaggaggtgacttttttcttattggraaagagatgtaattaggcagaagcaggggtgaggccccag

SEQ ID NO: 498226 - DNA, 466 bp, Homo sapiens
gctacaatgacattgtcctggtatgagttcttgttttctcttttaagtttgtaagaccatcatttgatactttgttgctcatatacctgctccttgtagagtttcttatcaatagcttgaataagaaatattactcttctgacagtgactgccaggttttaccaggaaaaaaaaaatcactaggggcaggggragaagaataagtttatcaccctccttcctgtctccaacaatgtatgtaggttataccttagggacagagtatctgcattactgggagagaaatagacttccttctcttctcaggtaataactgcaattttgctcttctggagaagtttacattcaagcccgtgcaaaaacaaaactattagacttgtcgtcggcttgctaacacatcatgtctaccctctttctttttttttcccttccagagctgaagttgtaataaacggctcctcatcac

SEQ ID NO: 498227 - DNA, 536 bp, Homo sapiens
tttgcaggagattctagaaccaatccccagcagataccaagggataaccaaatatatatrctctataatgtatagtttagtatacccagtataagtggaattcaataactagtgtccatttgtagtagttgtagtactactagtagtaataatatgacagtactgtagaaaggataataatttgagttctgaaatcaagaagacctgattttgaatcctgaccccactgcctaatagtcctgtaagcatggataaaataacctttttgtacctcagttttctggcctgtaaaatggaaaaaaaaagattcataacagccagatttttataaggattaaattaattcatatatataaagtgttttgcataaagttattaatatcaccaagtaactttaaaaatatgtctgcagattctggattgaaataatgttttaccatttgttgaatatctggaactccctgaaatgtaggagatgatttgttaaatggttctttaattgatagatcatgtgtcatgaatcagatatggagcac

SEQ ID NO: 498228 - DNA, 639 bp, Homo sapiens
ggtagctgggaccacaggcatgcaccatacacctggctgattttttaatwttttttgtagagatgggttctttctatgttgcccaggctagtctcaaactcccagccttgagtgattctccttccttggcctcccaaagtgctgagattaccaacctgagcaacagcacctggcccattttttttaaatggttgaagaatagtccaatgtacagatgtcccatgtgccatgtgtgtgccccactgtatcagcccagtcccatgggtggttgccaggggctgcgaggagaggaatagacagtgaattctaatgaagtatggcattttctttggggatgatttagacatttttcaagagtaaaatatttttcactagatagacgtggtgattgtacaacattgtgtatgtactaaatgctactgaattgtacacttttatgtatttatttagttttgagaccgagtctccctctgttgcccaggctggagtccagtcatatgatgttggctcactgcaacctccacctcctgggttcaagcgatcctcccacctcagcctcccaagtagctgggactacaggcgtgcaccaccacacctaattttttatatttttagtagagacgtggtttcaccatgttg

SEQ ID NO: 498229 - DNA, 639 bp, Homo sapiens
ggtagctgggaccacaggcatgcaccatacacctggctgattttttaattttttttgtagagatgggttctttctatgttgcccaggctagtctcaaactcccagccttgagtgattctccttccttggcctcccaaagtgctgagattaccaacctgagcaacagcacctggcccattttttttaaatggttgaagaatagtccaatgtacagatgtcccatgtgccatgtgtgtgccccactgtatcagcccagtcccatgggtggttgccaggggctgcgaggagaggaatagacagtgaattctaatgaagtatggcattttctttggggatgatttagacatttttcaagagtaaaatatttttcactagatagacgtggtgattgtacaacattgtgtatgtactaaatgctactgaattgtacacttttatgtatttatttagttttgagaccgagtctccctctgttgcccaggctggagtccagtcatatgatgttggctcactgcaacctccacctcctgggttcaagcgatcctcccacctcagcctcccaagtagctgggactacaggcgtgcaccaycacacctaattttttatatttttagtagagacgtggtttcaccatgttg

SEQ ID NO: 498230 - DNA, 607 bp, Homo sapiens
ctgctccctccagccccaccaaggccagcctgtatggagccatcctcttcaccctccagcagacccgctggctcccagtgtccaaagccagcctcatcttcatcttcaccttgttcatggtgtcctgtaaggtaagcctttctcttcttgcagcrttcttgccttgaccaatgccaccctgccacctccaggttgggagtggggaaattggacactcccagccttatgtggctgggacaggcagcccagagaggggagatgcttgccagtaggtcactgggaagagagtttaaaaggcagtgtccagcagccaggacacagatgagaggaacaggccttctgtgtaaaggacccagcctgagccagggtcaaggtgggcccactctcttgggtacagagaccagagggacaagaagctgaaatggcagcatcaggtagccaggaactcagttggaccaggaatacttctagtctgacagtcatgccttgagttgacatcaccccacccaggaggggtcttcaggggctgggctctctccctctgcatgaagatcttagctcagggctgtgtcttccctgggcgaggactccagggctgtcaaaaggg

SEQ ID NO: 498231 - DNA, 607 bp, Homo sapiens
ctgctccctccagccccaccaaggccagcctgtatggagccatcctcttcaccctccagcagacccgctggctcccagtgtccaaagccagcctcatcttcatcttcaccttgttcatggtgtcctgtaaggtaagcctttctcttcttgcagcgttcttgccttgaccaatgccaccctgccacctccaggttgggagtggggaaattggacactcccagccttatgtggctgggacaggcagcccagagaggggagatgcttgccagtaggtcactgggaagagagtttaaawggcagtgtccagcagccaggacacagatgagaggaacaggccttctgtgtaaaggacccagcctgagccagggtcaaggtgggcccactctcttgggtacagagaccagagggacaagaagctgaaatggcagcatcaggtagccaggaactcagttggaccaggaatacttctagtctgacagtcatgccttgagttgacatcaccccacccaggaggggtcttcaggggctgggctctctccctctgcatgaagatcttagctcagggctgtgtcttccctgggcgaggactccagggctgtcaaaaggg

SEQ ID NO: 498232 - DNA, 661 bp, Homo sapiens
ggtccctggggtctctgacgtcagtgtagccctcactgctcactgccatggtgtctctgcctctctctgcttctctgtgtccctcatcttcctcccacttcattctgactggcaagccctgtcctgcacagcttcttccctcacacctaggccttccccagacactccctctaactaggctggctgttctgttcccttccttctaacactgtggcctagccaacctcccaggaaataggaaaggtgcagaaatcacctggagttgccactcctgccaggcttcatctcgagccaatgtccccaggtcactaagagaatgagcttccactgtattcccatcaagggctcttcccctttgtgaggctgacctgtggacaagaccatgggacagggataggaagtccctccaaccactcttatcattgtcagacaagttcttctggcctcctgcacacacacacaaaaaaattattgaaatggtgatttgtagtaaagaaagattttaatgactccaagtctgccaaacaggaggacagaggtttattattactcaaatcagcctccccagtggatcagggcttagagattttcaaggatagtttcaggggcacaggactraaaaatgagtactgctgattgtttggtgatggaatcatgcggg

SEQ ID NO: 498233 - DNA, 556 bp, Homo sapiens
  misc_feature (1)...(556): n = A,T,C or G
aatttatatcttttttcagaaaatggtatcacattgggtgaatatactaccatttgtttagtcaatgtcttgttgatgaacatttgagtacttcccagttttttgctaaagcttcattaatttttgcatataagccattccacttgttttaccctctttctttttcccaccaktttcttgcatatttatcaccctcaagactttagccaagccaagatgtattttccaaccatgaaaaccccattgtgacctttctccatttatttccccactgccaataacaacagtgatttctgttatctgaaaatgttatatcccntagtcacgtgctactttatttttttcttgggacagtgctccacaaactaggtggaaagtaagaacaaagcaaagggatcatcccctatttccttgtatataccatagcttctagcattgtgctatgtgccatatttgttaaatatacaaaatgttaactttaaccttcgtaagagctcaatagggtaaaaatatttgcaaatttcatcaacgccgttaattgagtgcttgctatgag

SEQ ID NO: 498234 - DNA, 556 bp, Homo sapiens
  misc_feature (1)...(556): n = A,T,C or G
aatttatatcttttttcagaaaatggtatcacattgggtgaatatactaccatttgtttagtcaatgtcttgttgatgaacatttgagtacttcccagttttttgctaaagcttcattaatttttgcatataagccattccacttgttttaccctctttctttttcccaccagtttcttgcatatttatcaccctcaagactttagccaagccaagatgtattttccaaccatgaaaaccccaytgtgacctttctccatttatttccccactgccaataacaacagtgatttctgttatctgaaaatgttatatcccntagtcacgtgctactttatttttttcttgggacagtgctccacaaactaggtggaaagtaagaacaaagcaaagggatcatcccctatttccttgtatataccatagcttctagcattgtgctatgtgccatatttgttaaatatacaaaatgttaactttaaccttcgtaagagctcaatagggtaaaaatatttgcaaatttcatcaacgccgttaattgagtgcttgctatgag

SEQ ID NO: 498235 - DNA, 323 bp, Homo sapiens
aaatctctgtctctgtctaaataaatgaaatcttaacttccctacttcaaaatgctgactccattcctttggagttggtgtttctgggtggtccgtcctcactgtttgagcttgaataaactctctttaaattagattctgaaccttttgattattttaggttgacaggagttttggagtactaggttttagcttcctgcttccctcacttcagattcccaaaaaaatgatatagtagaaatctccatcagcactgaaaattaagaaggttgctgcctatcakagggtgtaaatgagaagaaactgtcaaagtataatttttt

SEQ ID NO: 498236 - DNA, 597 bp, Homo sapiens
aagacagggattaccaaggaccttgaacaccatgctaaggagttggaactctgtttgtttgtttaaggcagggtcttactctgtcacccaggctggagtgcaatgatgcaatcttggctcactgcaacctctgactcccagactcaagcaatcattctgactcaacctcctgagtagctgggaccacaggcaggtgccaccatgcccagctaatttttgtattttttgtagagaagggrtttcatcatattgcccaggttggtcttgaactcctgggttcaagcgatccgcccgcctcagcctcccaaagtgctggaattataggcgtgagacactatgctcagccaggagttggaacttcgttctatagtaatgagacatcatctaaagtttagaagcaaagaaagagcatcactagatctgtgtttttgaaagataaaactcaggttgtagcatggagaatggaaggcagatgaggagaaataaactacccatagcaagagtagttaaaacttggatcacaatcccacattccacttcaattgcacacctcccttgtttttggtaatgcaatggaaaattactcttggaacaatt

SEQ ID NO: 498237 - DNA, 566 bp, Homo sapiens
tgcaatttttgagtgaacttttttctgtgggggaattgttttggcaggtggcgcgatcatcctgaatacccatttcatgatgaatactgactgcmgggagttcctgaacagatttttcactcccacgagtgccaagacggtgcaatgggtagtcccctagatgtgaaaatgaagagagagggttttaccatcctgagaagaaataatgatggaaacatgtttaatgtttgtgcagtgtaaatgactttgactcagtcacattgaagtaaaaatattaaaatctgttgaaataactcttaggaaattatcaactaattttttcagatcagtatcttctagattccagacagaaaaaaattacacttcagaaaagacatcaaaggcaacatatgacaacaagtaatttatgaatctgggtagtagcgttggtaatctgagttctttaagggttaacaggacaacgaagtgcatgtggcagtgtgctggcagtggccttgaggctttggaccattggttacaaaacagacacagccaagataagatccacacacacattattaacaagg

SEQ ID NO: 498238 - DNA, 566 bp, Homo sapiens
tgcaatttttgagtgaacttttttctgtgggggaattgttttggcaggtggcgcgatcatcctgaatacccatttcatgatgaatactgactgcagggagttcctgaacagatttttcactcccaygagtgccaagacggtgcaatgggtagtcccctagatgtgaaaatgaagagagagggttttaccatcctgagaagaaataatgatggaaacatgtttaatgtttgtgcagtgtaaatgactttgactcagtcacattgaagtaaaaatattaaaatctgttgaaataactcttaggaaattatcaactaattttttcagatcagtatcttctagattccagacagaaaaaaattacacttcagaaaagacatcaaaggcaacatatgacaacaagtaatttatgaatctgggtagtagcgttggtaatctgagttctttaagggttaacaggacaacgaagtgcatgtggcagtgtgctggcagtggccttgaggctttggaccattggttacaaaacagacacagccaagataagatccacacacacattattaacaagg

SEQ ID NO: 498239 - DNA, 608 bp, Homo sapiens
tggaaaaaaagactgaaaagcctgttgaaggaggtactgttgaagggactgggacttttttacctggaaaagagaagaattcagggtaatgtcatcatcttcaatacccaatgcaccaaatactcaaaagaccaaatgctaatttagcctaaacccatttactcttcataatgtaaagagtcaaaattttctaaaaggcaaaagattaaaaagtaatttaggaaaaattttgtatagattaattacaacttattacgtaaacttgaagagaacagagaatgtatataaaattttagttgtccaatttgctgcaggccaggaggtaagaaaatacttattgaatgtctacttagggtgctgccctgtgctggtattttactggttatctatttgatgcttataacaaccctatgaatttatgctgctttccctttttcatagatgagaaaactgaggttcaaagaagattatcattcctgtgaaacctccccccaaaatccatgttatcatccttttgaataatactggagtaatttstgtatccataaaatatggtgaatcctttttagataaattatttagttatgaaataaaggcaaagggattga

SEQ ID NO: 498240 - DNA, 555 bp, Homo sapiens
ccttgtcatggaggcctatacttattaaccacaggacagtagattgtggaaaggagttmggaaggaaaagaataatggtaaaaacaaacatcctattgttttatagattgtcaaatgcttttacatgatttcacgtgcacatcaaacttaccctatgaagttggttttgttttaagtcattttgcagttgtggaaatgaaacagagagagattctgtgactttccaaggccatataagccgtaggtggaagagctggatgtccatgatggcttcaggactatactgtttagaaaaatcaggggaagacatacatgggttagtaagcactggagttgtgttcattaaagtccccagtttcaatgcacataattgaataaatatgtttcagaattttcagaacaggagatctgggtgtggcttcatcttccacagtccacgtttgaggatgagatcagaaagaatcttgctttaatgacctggcagccagaaaatatgtcactaggccagaagttgaggaggaagagttatggagtgagaaaggaaaactggaaatg

SEQ ID NO: 498241 - DNA, 555 bp, Homo sapiens
ccttgtcatggaggcctatacttattaaccacaggacagtagattgtggaaaggagttcggaaggaaaagaataatggtaaaaacaaacatcctattgttttatagattgtcaaatgcttttacatgatttcacgtgcacatcaaacttaccctatgaagttggttttgttttaagtcattttgcagttgtggaaatgaaacagagagagattctgtgactttccaaggccatataagccgtaggtggaagagctggatgtccatgatggcttcaggactatactgtttagaaaaatcaggggaagacatacatgggttrgtaagcactggagttgtgttcattaaagtccccagtttcaatgcacataattgaataaatatgtttcagaattttcagaacaggagatctgggtgtggcttcatcttccacagtccacgtttgaggatgagatcagaaagaatcttgctttaatgacctggcagccagaaaatatgtcactaggccagaagttgaggaggaagagttatggagtgagaaaggaaaactggaaatg

SEQ ID NO: 498242 - DNA, 555 bp, Homo sapiens
ccttgtcatggaggcctatacttattaaccacaggacagtagattgtggaaaggagttcggaaggaaaagaataatggtaaaaacaaacatcctattgttttatagattgtcaaatgcttttacatgatttcacgtgcacatcaaacttaccctatgaagttggttttgttttaagtcattttgcagttgtggaaatgaaacagagagagattctgtgactttccaaggccatataagccgtaggtggaagagctggatgtccatgatggcttcaggactatactgtttagaaaaatcaggggaagacatacatgggttagtaagcactggagttgtgttcattaaagtccccagtttcaatgcacataattgaataaatatgtttcagaattttcagaacaggagatctgggtgtggcttcatcttccacagtccacktttgaggatgagatcagaaagaatcttgctttaatgacctggcagccagaaaatatgtcactaggccagaagttgaggaggaagagttatggagtgagaaaggaaaactggaaatg

SEQ ID NO: 498243 - DNA, 566 bp, Homo sapiens
tgtcactctctgtgaggttagtttagtagcatgggggcactggggtcaagctggggatgaaatgtgttaccacactgggagcccatgtgaatacttcactgagaaataaaaatcaggacataaaatggggaatgaagtgcataagacattaatagttgatgggccagtgtattcactgatatttttcaatccagcactagagaagacagaaattctgggggttagagggagtaagagagggagggagagcactgaggctctgttcttaactaggtggcccacaggatggtaatgagactctatgagctatttttgatgacttgaaaaatctcaaaggaattatacatttattcacaacaaccatgcacagactaattaaaatgtcaaatttctttgctttgggctgaggttatataactccattgtggtaatatatttatctcaatttatccagaggtctgattattggcrgctgtatttgttagattagtgaaaagaaaaaatgaattacttaatatctttcaaatcatgaggtccatgggagaaaatgataagaagccctttga

SEQ ID NO: 498244 - DNA, 476 bp, Homo sapiens
gcaaaggcatagaagtataaaattgcgtgatgggttctgggagctacaagtaggttgagatcgctgaaatgaaagaggaagaaaagggagttggggaagttcagggttttgtgtgccgtggtaaggagtttaggtttaatccagaggattctaaaagccatyggggggttttcagcaggacggtgagggaattgaggcattgtgtttagctaaaacatagcagcagtgtggatggagtgatgagggactgcagtagagacatcccataggaagaggaggaggagttcaggtgagagacaatggcccaaactacagcaggtccagtgacgatggaagagatttaggagataaagccaagaagctttgtcatttattggatggggagaggtcctcactgaaagtcattggtgccactcactgagggagaagtccaggaaggtgaaagaggggtgaggttgcaaagataatgagttcag

SEQ ID NO: 498245 - DNA, 631 bp, Homo sapiens
attttttttttttttgtttcattatttgtagagctggggagtctccttacgttgcccaggctggtctcgaactcctgggctcaagtgattctcccaccttggcctcccaaagtgttgggattataggcatgagccactgcacctggcttgtttttattttattttattattactattcttaaattttaaaatttctttctttccttccctcttccatattttttatgaactatttttatttttaaatgtttcttgtagagatggggtctcactatgttgcccaggctgtctcaaactcctggcctcaagcaatcmtcccgcctcagtctcccagattgctgggatcacaggcatgagtcactgtgcctggccgcttgtctttgactgtccagtctagtacagtgacaaaggacacagtgttagagcaatattgcaaaagcctctctactctagtttagtggactacaattttgtgaacaaacaagtgtgctactctccagaaaattgtagaaaaggactattcaggcaggtctcataatcagcgtttccatgccgataatatggtcaattccaagattagggtcccggaagagatagttaagatcaacaaggtaaatcacagatatccagc

SEQ ID NO: 498246 - DNA, 631 bp, Homo sapiens
ggcacactatctccctgtgaaagactttaatgtgtatagactatgaaatttactttaacatccataaagactctttatacccaatgactatggaagagcagacaagaagagaggaaagaatgtgaaaactgaggaaggcatcaatggagcagaaatctgggctggtcttgaaaagtaaaaaggtagagacacagaaagcgcatttcaggagagtaataaaaacaaatctcactaacctctaaacttatttttcttcasagaactcataattacctgaagtgttattaatctgattgtctaacagaatgttcctttcataatagcagggatttaccttgctccctttctgctgtattcccagtttttacaacccagcaggcagtcaaatacttgttgaataaggaaatgtatactaagctgaattaaacctgaaggcagttttttattggtaaatgtaagttacagtgaaaattacttacttaccaatataccagaggggccagtatgtcacattgtagtatgaactaatcaattttccagtcctgaaaaaaaattagaaaggctttccagtgaacctaaaaacaccaaaaatcaaaaacaaacacaaaaacctgtggaaccagccactggc

SEQ ID NO: 498247 - DNA, 510 bp, Homo sapiens
aaaaaaaaaaaaaaaaaattagaataccggtttcccaccccctccatatgtgactctttcctaagaagaaattgtatgcatttgatgtagttcatagtagttcataacgggcacatctgtgtttttccctcttaatctataagctgttgtgcatttattcaaggcttaaaaaagaacaccactgaccaaatgacagcattatgtattagggctgccataacgcaatatcacagacaggtggcttaaacaacagaaattatttttttcrtaattttggaggctggaagtctaagatcaaattgtcagcagggttggtttctcctgaggcgggtctccttgcagacggcccccttgtattgtgaccttgatttctgtgctcgtgaatccttgctgtcttcttgtaaggataccaattgtattggattagggcccttatgacctcatttaactttaattacctccttaaaggccctgtctccaaatagagtcacactggaggtgagggcttca

SEQ ID NO: 498248 - DNA, 510 bp, Homo sapiens
aaaaaaaaaaaaaaaaaattagaataccggtttcccaccccctccatatgtgactctttcctaagaagaaattgtatgcatttgatgtagttcatagtagttcataacgggcacatctgtgtttttccctcttaatctataagctgttgtgcatttattcaaggcttaaaaaagaacaccactgaccaaatgacagcattatgtattagggctgccataacgcaatatcacagacaggtggcttaaacaacagaaattatttttttcgtaattttggaggctggaagtctaagatcaaattgtcagcagggttggtttctcctgaggcgggtctccttgcagacggcccccttgtattgtgaccttgatttctgtgctcgtgaatccttgctgtcttcttgtaaggataccarttgtattggattagggcccttatgacctcatttaactttaattacctccttaaaggccctgtctccaaatagagtcacactggaggtgagggcttca

SEQ ID NO: 498249 - DNA, 605 bp, Homo sapiens
tgattgcaacctgctgaaggctcagatgagtgctagcattttttttagtaatgaagtatttttaaaattaagttatgtacattgcttttttagacaaaatgctattgcacgcttaagagactacagtatagtataaacttttatctgcacttagaaaccaaataattcttgtgattcactttattatgatatttgctttattgttgtagtttgaaactgaactcacaatatctctgatgtatgcctgaacctgaaaaggaaatcagtaagtgcaacaagcagtgatagagtatttaagagatctgctctgagccaaagacctaagtatgcagatggaaggatgtcactaagaaaaatcggagtcacacatgcatacacatggagacacaccctggcagaaacataaatttcaagtgtgaagaaaaacattcacaactacctacacagaaggaaaaaaaagtgttctttccatgggaagaaaaagtagactggcttcttttttataatacaatacttctcttataacaggatactgatctataaaatataagccaaatactgttaagaaaagttaaccaygaataagccaggtatggtggctcatg

SEQ ID NO: 498250 - DNA, 555 bp, Homo sapiens
tgtttccccctgtgctgtgattaaagctctgttaagattaatgaaaacagatttgtgttgctccttttctcattaaccttattataatgttttgtccccaagatacacaattcttaaaaaaatatatttgtaaaaggtaaaaaacttgttttaacctaggctggcttgataattatcaacatctgaatgcaaagtaggtgacttagtcaatcttcaaattatggatttgataggaggtgattgtccgttgtccaaccaacattttttcctgaatgaagagatggaaatttcagaaaataatagcatcaaacaattaaactcttactgtataaagtcagrcaccatgacttgtgtccaatattcttttttgttcatttgaacttcacaactctagtaggtagtgtatatgaatatgcctgtttcacagaaacagtgagtctcaaaaacttcgcatgtcttgcttaagtttgtatagctgataagtgaaagacttgaactttgattccagggatacaaagcctgtgctctaaaaccatgcctcttaaagcttaatgt

SEQ ID NO: 498251 - DNA, 517 bp, Homo sapiens
cacagaaaaagaaaatgtgaagggtaatgacaaacattcacagcttcaaaatgcttgtgtattcttggctacgggttagatatcagtggtattctggaggtcagaatacttagctttgactttgttctttagtgacattaggcaatcaagcctcggtttcctcatctgtagatgattatttgtgcaataacatatactctgcctactttacaaggagttcacatggatctaaacacaacatttaaagaagtgttttgtaaattgtaatgtatgtacaaatatgtagggttaattatttacatttatgaagtatcttgcatctataggcatttttttctgatctgggagaagagaaatyggtcagcagcattttcttgatgtcttaatccagtttgaaatctgattttgcccagttaattctaataatctgatgagacaatcaagcccctgcaggaatcaacaagcagcttccaggacagccccaagcatgctgcaggaggcactaggtgtgggaaca

SEQ ID NO: 498252 - DNA, 509 bp, Homo sapiens
ctgggccacaagagtgaaacaccgtctcaaaaaamaaaaatgttcatgcgtttgtttccaaagcatacagtataatgcttagatcacttattgagcccttgccgaatgccaaggacttttctaagtcctgtactttacatgttttaatgcatctaatcctcacaacaattctgtgaggaattgttatacaatcctcattttatactaggaaaccaaggcacagaaaggtccagtaatttgcctaaagacattaagagctggaatttaatctgaggcaatatggccagagttcagttttaaccattacaatataatgcttcccaatcactgaatgaaagaatatgtgtacagcccttggtctacaatgcgtctctgaattataacatcattcccagggaaacaatcaaagaagccctattctaagatactgtattgaatatcagcaatttgggtactgttgtacgatacaatagatagacagatagacagatagacagatagatagatag

SEQ ID NO: 498253 - DNA, 137 bp, Homo sapiens
gcccccaggctggcgtcacacagaacagcacctgccgcaggtgggtgggggtcaggcgctgggccccaagcgstgccggtgtcacctgcgtcccctctgccgcagctcgccctgcactgccagcaattctgggccat

SEQ ID NO: 498254 - DNA, 567 bp, Homo sapiens
tgtcctggctctgccccaggtctgggcaacctgccagctcagcctgtagttctgcagctccagaacttatactcactacagcccatctgtttgatgggctcatcagtgttcagaaattgttcttatttatcagtgttatcaggttacatgtctagaggataatattattcaaaagcaatatttacttggcttttcaatggaaaagagtctttcaaaatactttttctaatacctttataataatttcttaccaaatatcacttaatattttcattttccataataaactacatgcagttataaaagggtagagaaaaatagtctgtacaggtgttactgacatctaaagccaagaggatcttagaaaatatttctctgtcagaaggtgatacygatatccagtgaaattaagtaactagtatagttttaaactcagattgctcttttacccctagttcagggtttttactaaattctataaaacacaagagagggagccatggaatgacaaataggccctatcatgaggcaccaaactgctgaatcacataggcagtagagagctaa

SEQ ID NO: 498255 - DNA, 608 bp, Homo sapiens
agaagaaacttgttgagataaactgcagcaagatatattgaggtcagctacgagggaggatgtacacacttgagtgaggtaaggtcaaattcaccgggaggctcaagatagatggatagccaccatcaggaccagatttcagggttcacatctcaaagatagatagatggatgtgttgccttctcagtgacctacataatattgggggcttcatgctcctccaacaccccttgccccagtggtagcaggcagagcatatcaccacctacatgagttttggggtagatggaggagtggaaagatcctccaccctggggttttcccatgccccttctgtgccactaagctcaccagtgggtggragaaaaagggtgggtccccagggcagggcaaggacaagaaaggagagttccacagaagtgatttgacaagactgtgagcatttacaggagatatccagggaagtactagtgactctgtataccacaaatggtcctgagtagagaggtaaggagactttctagatggtgcagggcagtacctaggatgggaggttggaggtaggaaccttcaacttgtgtgtccaagtatcagactcaatagttgtt

SEQ ID NO: 498256 - DNA, 606 bp, Homo sapiens
ggctggaggtagaaatcatttggaggatccttcagacatatttcttgcacttggtctcagatgacattaaggttgagctcagctgggactgtcggccagaatgcccacacatggcctttctttgcagcttgaactacctcagtatgatggcctcaaggtagttaacacaatggagatggttcatcttcttagatactttcattgggtatactttgttactgagcaatgagctctctgcccartgcatatagcagtcaatgctatagcaccagcttttgagaaaaggagggcctttatagtgagttgactggcagggagacaggaggtaacactcaaatttgtctccccgagctgtggtcttggggcaggttttacaggcagagaataacaatgagagagataggaaaatgcaacaagatgtgatctgattggttaatgcaaagaggtggcgacggtttcctgtctcttaagtctgttctgcaacaaaacaaggcacccttcacttcataatttggtccccattctcaaaccaagtacttagattctgcttgtggttgacttttttgttccagctgactctggggttaccagtagggtacacttggt

SEQ ID NO: 498257 - DNA, 606 bp, Homo sapiens
ggctggaggtagaaatcatttggaggatccttcagacatatttcttgcacttggtctcagatgacattaaggttgagctcagctgggactgtcggccagaatgcccacacatggcctttctttgcagcttgaactacctcagtatgatggcctcaaggtagttaacacaatggagatggttcatcttcttagatactttcattgggtatactttgttactgagcaatgagctctctgcccagtgcatatagcagtcaatgctatagcaccagcttttgagaaaaggagggcctttatagtgagttgactggcarggagacaggaggtaacactcaaatttgtctccccgagctgtggtcttggggcaggttttacaggcagagaataacaatgagagagataggaaaatgcaacaagatgtgatctgattggttaatgcaaagaggtggcgacggtttcctgtctcttaagtctgttctgcaacaaaacaaggcacccttcacttcataatttggtccccattctcaaaccaagtacttagattctgcttgtggttgacttttttgttccagctgactctggggttaccagtagggtacacttggt

SEQ ID NO: 498258 - DNA, 614 bp, Homo sapiens
gggaaatctctgtgtaatcttgcatgagatttctttctctcgcttaacaaataggcttctaaatcttacgtacgcctgtatctttcccattccccatggggacttgagttttggagactcaaaagtcaaaagaatctcatttgtttctctactttctgttaacttacactgcctgggggtagtggaactcagaatagtctatctgagagacttgaaagatggtaagaacgagatcagagaaaatattacaggaaaacagtgactaatgcttcaaaagtatgtcctaccccataattattgattaattccctaagagaagtggctgggatggcatttggaacaaagacgaaamcttttgatatgtgctaaatggcatatagaagctgtaatataacacatgggagatcttaagaaaaaatattatttgtaacaaatagaaattatttaggatatgcgctagattatatggaggtccctctctctctactgtgacttggctgtagaacctgaggctccttgcttctccttctaagtaccggctttctcatttgttaagtggtgataataaccctgacttcacaagatttttgtgagaattaaattcaattaaatca

SEQ ID NO: 498259 - DNA, 602 bp, Homo sapiens
cccatagtctcatagtctgtatcccccaaaatagccattaggtgcttttggatgagacactcaaactttttctgggatcatgtgataaaacttggtttccaggggtgcccacrtttcacaggcatgagcctgggcagccttactcctctgttggtcaggaagaattaatctttcaaagataaacatttacgcttcatgggtgcctttcctctttccctctttcaatccacagtgaagtaaattgttttaaatttgcaaagattattttagagtatctaagggaacctggggtaacagctctgtacccactaggtaattatatgctgatacttggtctcatattattcactgggcactggttcagagcatgaatcactttttcagacactccatccttctggtgaaaggctggcttttcctgtaatccagtcattgaggtcattatccttgctggtttactctcattttctacctccagttttagattaaatcatttatcttactacaatcatcactggaaaaggagggttctttcctattgggaactcagggttctgtcttatcttaaagctccagcctttctcccatgatgcattgtttat

SEQ ID NO: 498260 - DNA, 521 bp, Homo sapiens
tagaaacttccatgatcgctcggaaagcagttaggtgaatgtggcttctcaatatatggtaagcagctcatggccagtgacaagaccatctgcttcccctacaagtcttgttcaagtaggcaatccacgatactggccaaaaagacaccggtaagcagtttagaatgcctgagtaaaagctcccacaaacagcagatttttcaacaattttataaacacttcttggccgggtacagtggctcacgcctgtaatcccaacactttgggagactgagaggcggatggatcamctgaggtcgggagctcgagaccagcctgactaagatggagaaaccctgtctctactaaaaatacaaaattagccgggtgtggtggtgcacgcttgtaatcccagctactcaggaggctgaggcaggaaaatcgctcgaatctgggaggcagatgttgcagtgagctgagatcacgccattgcactccagcctgcgccacagagcatgactccatctcaaaaccaaccaaca

SEQ ID NO: 498261 - DNA, 664 bp, Homo sapiens
ttttttttaacctttcagagggttttcaaacacattatatcaagagaagttgtttaataaatgatacattggtacattttsctggcatgcagaacacatagaaaagagtagggaaaggaaataaagaacatttttcatttggaactaagaaatcaaattttagtattttttcatggccacgaaagtcttatttttaaaattaaaatccttatgtagagaatatttgacatcttcattgtgagctctgaacatatcccttttctaatgcagccacgtaagcgaatcagacattaatggaccaaaaagttcatcaacacacaggcttgtcaatgaacaggaatggcacgagcaccagaatgtgttggtgttttctcaggaataagagttaaataaagctcgactctgtcagtggcacacggcgccagcaccctggcccacagacacttcacggtttggtagttcctgcttgtcagcacctgtgcttctctatgcttctttgcttgagctctgggcacaaaagtggagtttgatagttaagtattttagcaactgtctccatggtgactgggccaggaaatgagctttgacctgactctattttatgtattgggagcccggctccaggccctgagccttcttctgcaccttgcctggagaagctgca

SEQ ID NO: 498262 - DNA, 660 bp, Homo sapiens
ttagatgagttttagtaaaaaaattgagaattttaggctattgctataattgcctgtttggcttactcactagttagttctaagaaaaataaatgtagcccattaagatgtgcactgatgrattggattgaaaggtgctacctgagatattgttttttagggcaggctctcttggcctttttcaggatatgatatttttgataattttctgggacatacctacatagggaatatttccaaatctctctttcgtctcctattagttgactgtttattgcttctagttattttattgtttatgttaactaccaaaaatagcatcactgattttaaatgtcactttaatcattcatcaattaattatttagcaccatctatattttaagcataatgcttaaagatggccctataatggtgagtaagacagaaatggactgactctcttggagcttataatgatgttgcatatatatatacatgaaattataaaattatactgggctgtgatacagtctattggtagaggatagcctagagtattgtgggagtgcagagcagatcctcctactcaatttaaagagggttagaaagctttttaaaacacacagtcctcgtccccagaaagttttattctaataggtctggacaaaggaaggtttt

SEQ ID NO: 498263 - DNA, 606 bp, Homo sapiens
aacatttctttgaatcctcctaatctcactccctatatacgtatcatacaatataaatatgtttctgaatatatcaccttttttactgtaaatttcaaaggaagaaaagaatggtagatgatctttggcctacaatattttgcttctgatctttttagattaaacacaattcccaaatttaaatatcaactaaacctatatctttataayaataaagaattcgtgattgtataccacatttcttcagatttttacactttattatgaaattaatcaatgggataaataatattctgattcagattatattttttaagtgattagataccagcaacacgtaaataaataggtgtcaccacaattcacaattttccagccagacttctacatttggatttattcattttgaacctcactttgacatactgatgagtcatttgaaactcaagagatcatactatcaaaacccaagatctatagcaaattgttcctaaataatgacaaagatgtgattttagaaaatggaagattgtaaaaataatccttttataataattctattttgtccatgctgctgtagactccctttgtggcctgtcaccttac

SEQ ID NO: 498264 - DNA, 606 bp, Homo sapiens
aacatttctttgaatcctcctaatctcactccctatatacgtatcatacaatataaatatgtttctgaatatatcaccttttttactgtaaatttcaaaggaagaaaagaatggtagatgatctttggcctacaatattttgcttctgatctttttagattaaacacaattcccaaatttaaatatcaactaaacctatatctttataataataaagaattcrtgattgtataccacatttcttcagatttttacactttattatgaaattaatcaatgggataaataatattctgattcagattatattttttaagtgattagataccagcaacacgtaaataaataggtgtcaccacaattcacaattttccagccagacttctacatttggatttattcattttgaacctcactttgacatactgatgagtcatttgaaactcaagagatcatactatcaaaacccaagatctatagcaaattgttcctaaataatgacaaagatgtgattttagaaaatggaagattgtaaaaataatccttttataataattctattttgtccatgctgctgtagactccctttgtggcctgtcaccttac

SEQ ID NO: 498265 - DNA, 508 bp, Homo sapiens
gctgttcactgaccgtagctgccccctttttggtggaatttcccttggctaaacagtagccacctcaccagggacacttcatttcccaaaatgctgatgcaacctgccgccagctaatgaccaatggacatgggttatacaagttggttcccacttttcttgaggtggaatcaattctgggatataattcatcctccagaggtctgcaagggattaagctgttgctagactccaattgagacgacacctttacttaacttcttcccttggcctgccctgcatcccttgttccctttttttctacaaccatttcctcataagtggcatgtacccaaatccctgtgtcaggctctacttcaaagacgcccaacagaagaaacatgctgcccatgtttctattcccaacagtaactaaataaataagttgctatgtttttcatcatycttcaatggacaattggatttcatttaccgtgttatatatatattgaaaggtttgttgtggtgg

SEQ ID NO: 498266 - DNA, 482 bp, Homo sapiens
aggtcgtgtaacatcttataatcatcaaataaatatggcagaaaaataaatatacatcgaccaaataaatctttttcttcacggtcataatggcaatgcttataatctataattacctacatacctaggcatagccccataaaggmatatatggtgttcctgtattttttcttggttctcaaagaacttatgtaattttatcccaatttttgtttttaaagtgcttgtttgaaaatggtattaatatgaataattgtcaacagttttctaaatctttttttgagagtgccctctgtcctttggctaaaatgcaaaaacagagcatgctttttctatttttacccctgctgtgacccctcacaaggtgaaacagctgcaaagagctcccaggaattatgtcaacacaacccctgggtagctcaggctgcttacgttctagtattaaattcagctcttcagtttaaaagacagtcagaggtaga

SEQ ID NO: 498267 - DNA, 636 bp, Homo sapiens
cagctgaagaataaaatatgaaaaagagaatacttttaatgctgaaatccacaatgaagacatgacaattttgcatatttatgagtcacattgtgtaggaagtaacttcataaaggaagacttacataggcataaatacacacttaataagacatcttaaaatatcaccatcagtccaaaacaggtcaattagaccacaaaaatgtgaacatggaataattaaacaacatactaatgaaggtaggtcttaaggctatatcatgattttaagccctaatatcagagactctacctttctccccgagtatcaatacacttcacaaaataaaaagaataaaaactttttctatttacagtgcaaaaaaagtagaaattaacaagaaaacatttataatgaccatatacatgaaaatgtaaatgatcattctgcttagaaaagaaattaacaaaaattacataattgtaaaaattaatgaaagccctgtacatggaggacaagccctaatagcccccaccttcatgctctgtataatctcctcccccytgtgaatgagcagaacccatgacttgcttttaacccctggaatttgtcaaggggaatggaatgcactcccttgataaggttaggttgcatga

SEQ ID NO: 498268 - DNA, 575 bp, Homo sapiens
aataaatattagctaatatgatgattttgctattttacctgaaatgatcactttccacatttaaataagatcgataatctacttggcttcccttgatgaataaggaaaaaaaacttggtagattaaaagtctctaaaacttcaatctctaataagatagattatgaatatgtaggtatagtaactatgtaggactttcactacagtcattycatgttacagtttttcaaagaatgatctaaaattgtagctaaaatcaataggtaacaagctgaaatctagagtatacagttggtctttttactttttgccagtattgaaactaatgccaaatcatgtgagtcctgttgagaggtgacagcgtgctggcagtccttacagccctcgctcgctctgggcgcctcctctgcctgggctcccactttggcggcacttgaggagcccttcggcccccccactgcactgtgagagcccctttctgggctggccaaggctggagcccactccctcagcttgcagggaggtgtggagggagaggcacgagcgggaaccggggctgcgtgccgcgcttgcggg

SEQ ID NO: 498269 - DNA, 662 bp, Homo sapiens
agtttaataatgaaaaaaatcaagatgcataatagatattgtatttttatttggtcagaagggtctttattatatttttatatggtccgaagggtttaattcttctatggttggaattcacaccaaaagacaacattgctcacccttcacaggaccccactgatagtagagatcgggtaaatggaatgactctaatgttatttgtatgaggctatttcacttgggcatgttgtacttgtccaattgttcagtatgattgtgaatggagtttcttgtctctaggtagtctcgttcagagcattaacatttgtggaacataattaaagtcaagagatttatagtggagggtatggataagaaagaagatgaagttatgactagtctagcaaggggaaatgatgttgtgatataatgattatctactccagtttttacatattgggagctctgcttattctagaaatttgccttgctttctgagttatctcatgtaaccrcaatacctgtaagtgttcaagattactatcagtccagcactccatggtttatttttctcagtctagcaagagaggggaaaaagcatatatggattttgaatcatttttatctcttctacaatatttgctgatatcaaaggcaccattttcttttgaacttaccat

SEQ ID NO: 498270 - DNA, 568 bp, Homo sapiens
aaaaatatttattgaattttgaatgctaaataatttagataacatcgaactaatratccttttcaatctgcagggcatctctacaacctttctaaaccctcttatttacactattgatcatgttggttgtaacaataatatgtaattattaaagattaattacaaaccataattaagggataatgcacttataaacattctactataaagacatttctatatatttctaatgaaattgctgggttataagacgtgtgcattctcagttttaggacaatgcaaattgctttccaagtgatcaacaaaggagtagatacatgaagtttatccatgcacaggaacgttgttcagtgtgagagtatatgcattaatgctatctgcagcaacgtagatgagtcttggaaaagttatgttaggtgaaataaagcaatcttctaaaggctatctatagccagtattcattataatatgttaatttagttaacaaaactaagtaatctctttcagtggtacacacatgtgtgataaagaatgataaatataaaatccagggtagtgtctaactagt

SEQ ID NO: 498271 - DNA, 608 bp, Homo sapiens
ctgctatcctcttgtatcccccaccygaagtcctctgggggctcatctccactcaggacctctcctgtttgtaccccagatacacactgcatcggtgtgcttgggtggagccttgagacatagtgtgttgctgtggaaaaagcagacagacctaggttccaactttggattcacagtgtcttcttcttctttttttttttttttttttctttttttttgagatggagtttcactctgttgcccaggctggagagcagtggtgtgatgtctgttcactgcaacctctgcccctgggttcacgcaattctcctgcctcagcatcccgaatagctgattttacaggcacctgctaccacgcctggctaatatttgtgtttttagtggaaacggggtttcaccatgttggccaggctggtctggaattcctgacctcaagtgatccactgcctcggcctcccaaagtgctgggattacaggcgtgagccactgtgcctggcccacagtgtgactttgctaagtcacttaacatctgtaacatctggagcctcaatttcctaagctgtgtgatgagaattacactatctgccttaagagctataggaaggagc

SEQ ID NO: 498272 - DNA, 491 bp, Homo sapiens
ctgacagggaaccctctgcctctgttgactccaaggttctgggcacygggatgctgattgtggggctcttggccatcctggacagacggaacaagggagtccctgcgggtctggagcctgtggtggtggggatgctgatcctggccctcgggttatccatgggtgccaactgcgggattccactcaaccctgcccgggacctgggcccacgtctcttcacctacgtggctggctggggtcctgaagtcttcaggtgggagacagactctcctggtgctggcctccactcaccttcctctgctaagggctctgtccctgggtccacagcactctgcctttaaaatagctctcttggcttcttaggacagtgttctttctccaagtcatattctccccctttctcccttgcttccctcccaacttttcactgaaacagtaagatttagaggttgtgttcttaggcatgccacattacttccatgcacattagt

SEQ ID NO: 498273 - DNA, 368 bp, Homo sapiens
ctgggggggcgggagcccgtggggagccgagccgagcgccccccgccccagcccccggcatgggcagtacggggccgccggggcgggcgccgagcgctgagcgctgaggtgaggcgaggcgaggcgaagcgggggcgcccgggagcgcggggccaggagggcagagggagatgcggccgcagccgcggggctggaggggccggggagcgggtgtagactggggagcaccgggggccaagatttgggagctgcggccagacggggcggggatggcggccgactggagacgaggggctgtcgggtkcccggggacggggcagagcgggggtctgcgtacaggatgggaggatggggtgccgaaggggcgc

SEQ ID NO: 498274 - DNA, 641 bp, Homo sapiens
gctgaacaacataaaaacagcaaatctaacatagaatgtgataatatgaaaaacaatagaaattatccagatatamtccctatattcctctcattggtaatcatggtttttagatagaaaatataaaatacaaaactattagtcattgtactgtgatattaaagtgaaaacacaggggttttatttccccattaatatcttccaggagggccaaacctcagagttcacagctctgttatttctcagagagacattaggtagacatgggcttcatctaaatggaattgccaatgttctagatctttgcaattaaatcattgctatatttactttgttttaaattactgggacaaacattagcacttttgaattactgactcactgtcaatactagtggcactttccattctatgacccaataaaacaggcaggattagaccatgcctcttctgattttcctctaaacaaagttaccttgttttcaggtacataatgaaactcacatgaaggtagaacagggtttggtatatggctgctgttaatgatgacatgcaggttttcctagttggtgaagtataactacatacttttaatagtcctataattaataggaaggtatatattttaaaactgcaaactcc

SEQ ID NO: 498275 - DNA, 641 bp, Homo sapiens
gctgaacaacataaaaacagcaaatctaacatagaatgtgataatatgaaaaacaatagaaattatccagatatactccctatattcctctcattggtaatmatggtttttagatagaaaatataaaatacaaaactattagtcattgtactgtgatattaaagtgaaaacacaggggttttatttccccattaatatcttccaggagggccaaacctcagagttcacagctctgttatttctcagagagacattaggtagacatgggcttcatctaaatggaattgccaatgttctagatctttgcaattaaatcattgctatatttactttgttttaaattactgggacaaacattagcacttttgaattactgactcactgtcaatactagtggcactttccattctatgacccaataaaacaggcaggattagaccatgcctcttctgattttcctctaaacaaagttaccttgttttcaggtacataatgaaactcacatgaaggtagaacagggtttggtatatggctgctgttaatgatgacatgcaggttttcctagttggtgaagtataactacatacttttaatagtcctataattaataggaaggtatatattttaaaactgcaaactcc

SEQ ID NO: 498276 - DNA, 448 bp, Homo sapiens
ccaaagtttaatatgtctatacactacaattctacttctggttaaatataaagttagaaataaaatgaaaacatgctgtataatgtgtayataaaatatatccacttttgcaccaaaatgcatgcataagaatttttatagcagtgtttttcataagagccaaaatttggaatttgaatatggctcaaagtccatcaagtctaaataataaatcgtgatatatatttatacaatagagtactttacatacaacaatgaaaatcaacatttcacagttagttatacacagaaacatggatgaaactcacagagaaactaagtgagccaaaaaagccaatgcaatagactattttatatacaggggttacctataagatagggattgccttttcagaaaaagggaaggataattatcaggaagaccaaaaggtagcttttagggttctgg

SEQ ID NO: 498277 - DNA, 528 bp, Homo sapiens
acttcgttggcgccattgattaaaactacagtttagaactgtccgtggtttacactgcccacttcacctcgacaggaagcaacatggagatgaatagcaagaatccttgatgtgcattttgccaattgatcaacacacatctcctgtgggactccctcggctaaatgcagcccttttgaaaacatgtcattttaataccacagtggaaagaacgtggtatttatgtttaaatagctggattggagtctaagtttgacacttactagatgagtaaacatggacatatcacttaacctctctgaacttmctttcaccatttaaaaaatagggataaaaataataatattgatccaattaatttactaaagttcttataataatgtcaatgaggtaacaatataataatgcacatgaatacactttataaactaaaatgcactgtatgattataataatcattaatcaggaaaataattaacactcctttaaataaccattaaaagaaatttgccagacatagagaataaa

SEQ ID NO: 498278 - DNA, 466 bp, Homo sapiens
tgccccacgcccccctcctccttaaggctggctgggagaatgagaccacaaaccaaagcgaaytggggacacaggcccccaaactgttagaatttcagctatcataaacctacttgaccttgtgtaattactggtggcagcagagacacacaagttcagaacccagacattttaactcctgctaattgcaggaggggaacagccattgccactacccagaaaccccacctggtgacctggcaccaagaaaaccaacttcacccagcatggcaggacatgccagggcctgtggctgaggacgaggatgtcagagctaggaggacacacagcgttaagagcctacaggtgttctgacatggctgggtagaatcatccaagcagagaatcatgctctgctcagctcagaccttctgaaacagacttgccaaggctgggtctgggaatctgaactttaaagatccctccc

SEQ ID NO: 498279 - DNA, 602 bp, Homo sapiens
aatcatccaagcagagaatcatgctctgctcagctcagaccttctgaaacagacttgccaaggctgggtctgggaatctgaactttaaagatccctcccaggagccgggcacggtggcttatgcctgtaatcccagcactttgggaagctgaggcaggaggatcacttcaggccagaagttcgagaccagcctgagcaacatagtgagaccccatctctacaaaaactaaaaaattagccaggtatggtgatgcatgcctgtagtctcagctactcaggaggctgaagtgggaggactgcttgaacccaggagtccgaggttgccgtaggctatgattgggccactgcactccagcctgggcgacagagtgagaccctgactccaataaataaacaaataagaaaaaaatataataaaattaaaatccctcccaggtgactgggctgctctcgaarctggagcagtccagcctgctgggtttatctgtgggagatgtgagaccatacggttgttagtggttcattcattccagggttgcgtatgtgtctggctctaagaagacacagctccagccctacagggatgcagaatgttctaagca

SEQ ID NO: 498280 - DNA, 602 bp, Homo sapiens
aatcatccaagcagagaatcatgctctgctcagctcagaccttctgaaacagacttgccaaggctgggtctgggaatctgaactttaaagatccctcccaggagccgggcacggtggcttatgcctgtaatcccagcactttgggaagctgaggcaggaggatcacttcaggccagaagttcgagaccagcctgagcaacatagtgagaccccatctctacaaaaactaaaaaattagccaggtatggtgatgcatgcctgtagtctcagctactcaggaggctgaagtgggaggactgcttgaacccaggagtccgaggttgccgtaggctatgattgggccactgcactccagcctgggcgacagagtgagaccctgactccaataaataaacaaataagaaaaaaatataataaaattaaaatccctcccaggtgactgggctgctctcgaaamtggagcagtccagcctgctgggtttatctgtgggagatgtgagaccatacggttgttagtggttcattcattccagggttgcgtatgtgtctggctctaagaagacacagctccagccctacagggatgcagaatgttctaagca

SEQ ID NO: 498281 - DNA, 495 bp, Homo sapiens
tttggagaattctgtgattaatgctgaacggcacatttgcagagtattacagaaacagttaaattggagttggtagatctgtagctgctctttctcatgatgcataagtggtggaaaaggcggggtcaacgggaggattccggggctcactctgtggatgctataattaaagtgggaagtctggcacagttgttagccctggtattgagtgcagatggctgacggccacatcaccaagagtaagagttaggccttttaaagtcttttttctttttcttttatgacccacactatgtattccaarcataggtatggatgcagtgaataattttctcattaaaagtaacagcttattcccacactcattcccagtcttgaaatgagaaaccagtttccttagagttgaggaattgcctatctgtcgtggcttaatagagcttgcggatgagggcgtctggagtagatgaattttataaccaatcagtgctcaaagtg

SEQ ID NO: 498282 - DNA, 623 bp, Homo sapiens
accacttttttgccctttctctcaaaaaagggtgactctttctgactgaactgttttctaagggcatgtggggggtgctttttctaagcagctcctttcattcataagaaggtagttgtatagaattgtgatcattttagctttatcagccataatttaagtaaaaatgacaagaaggaacttgactcatatttagtgacktctggcatctgattaatctcttggacagggttatgaatcaatgtaagtaaagggcttaggttgcattgaggcctctcaatgcataatcactgctaaagcaggattgtaaaagttgcggttacaatctaacaattttaagatacaaatatgtgtgtcagattcacacccacagttgctggcatggctattttaggctaaccagtgaggacttacacgtgcaactcagggagctcacattggtggtgtatatatgttctgggtaaatgctgggtagatgctaatgaaagatttgcacatccatgatacttggttcagctaagtaaagacgtggaagggatctttctttgagttacaaagtgaatttctaatatgtgctcttggtcctagcagatcttgtattacattcaagagttcagaatttt

SEQ ID NO: 498283 - DNA, 434 bp, Homo sapiens
agttatcaaagagcaaggccctgggggattggaacacaaggttgggagctttcaattgaaagaaggaaaaaaacayaggtgacagtgccctccaagcacagcccccatgagattgcctttaatccccatcatcatcccttattctcattttgtagacctagagactgggactcaccaactgaaacacagtcttaatgactggcatcaccatctgcccccatttccactgtggaacccagggggtctgctgagccaccctccctcatttctgcatccactctgcttcaaaccccctcctctcctgtctattccctatcttagctctccctgcacactgcaaacgagaagcttctaaatctcaaatatagttattccttcctcatcccatttcaaacccttgaaattgctatggtctgaatgtttgtgtctcacca

SEQ ID NO: 498284 - DNA, 564 bp, Homo sapiens
ctgctatggctacattgacaggtggcagtgagtaaactcctcaggcaaaatcaaagattggtgtggcttctgttttttgagtaatgtggggtgccttggatttactgggggttgctggtgtctttgatgacacatggtgtctaagawcaaaaattttacctttgaccaatgctagttaacatctttatcacttgtcactgagttagtagcctgtgctaactgggttaagaatcttgctgagaatctctcccctatgaattcacatctgagtgttagttcctttcccccaatcacctggccctctaggttttttctaaaaacaaacaatgcccaagttatttagcgattgtattgtttcatatcactctttaatgctgaaaattggttgaattgatgtaaataattactgatttaggtctaaaaaaagttaatgccaggtacacacacaaactccacactgtataagatcctcccaacattgccctggaatttaacatgggatgagtgggtggtggtggtggtgctacaaatcattcctctgtaacatcttacagttttccaagc

SEQ ID NO: 498285 - DNA, 564 bp, Homo sapiens
ctgctatggctacattgacaggtggcagtgagtaaactcctcaggcaaaatcaaagattggtgtggcttctgttttttgagtaatgtggggtgccttggatttactgggggttgctggtgtctttgatgacacatggtgtctaagaacaaaaattttacctttgaccaatgctagttaacatctttatcacttgtcactgagttagtagcctgtgctaactgggttaagaatcttgctgagaatctctcccctatgaattcacatctgagtgttagttcctttcccccaatcacctggccctctaggttttttctaaaaacaaacaatgcccaagttatttarcgattgtattgtttcatatcactctttaatgctgaaaattggttgaattgatgtaaataattactgatttaggtctaaaaaaagttaatgccaggtacacacacaaactccacactgtataagatcctcccaacattgccctggaatttaacatgggatgagtgggtggtggtggtggtgctacaaatcattcctctgtaacatcttacagttttccaagc

SEQ ID NO: 498286 - DNA, 623 bp, Homo sapiens
agctgcctagggttcttgcagtccccaacatctgtggggccctgccactggctttgctttgttttagaaataccagyattagaggagcaaagaccagcttcctcttacaggctctaactacaaaaaaaaaaaaaattgttgctttagttgaataagaactacgggggataagctaagcaggggggggagggaggagacataaaatttatttttgcagtcctgggcacagggggcccccataaaggggtttcccactgctccctcagcatattctgtcctcactgtccccaaggaatgaaatcataagaggcccaagaataggataagttagaggatgcaatgaaggggagagatggacacaaacacggcataagaacttttgcaatgagaaaattcaaatggggcccttgggattaaagaaaagaaatgcaagatcagtgagcttggctccctggcctctttctggaagggaccttgcaccatctttcacatttatacatgctacaactgccttaacagggttaattccaaagtgtgtgctgggaaacagacatagtgatggacatggtacacagtactcctgccctcctgactccacctcttcctatgtatagagttgaggg

SEQ ID NO: 498287 - DNA, 623 bp, Homo sapiens
agctgcctagggttcttgcagtccccaacatctgtggggccctgccactggctttgctttgttttagaaataccagcattagaggagcaaagaccagcttcctcttacaggctctaactacaaaaaaaaaaaaaattgttgctttagttgaataagaactacgggggataagctaagcaggkgggggagggaggagacataaaatttatttttgcagtcctgggcacagggggcccccataaaggggtttcccactgctccctcagcatattctgtcctcactgtccccaaggaatgaaatcataagaggcccaagaataggataagttagaggatgcaatgaaggggagagatggacacaaacacggcataagaacttttgcaatgagaaaattcaaatggggcccttgggattaaagaaaagaaatgcaagatcagtgagcttggctccctggcctctttctggaagggaccttgcaccatctttcacatttatacatgctacaactgccttaacagggttaattccaaagtgtgtgctgggaaacagacatagtgatggacatggtacacagtactcctgccctcctgactccacctcttcctatgtatagagttgaggg

SEQ ID NO: 498288 - DNA, 623 bp, Homo sapiens
agctgcctagggttcttgcagtccccaacatctgtggggccctgccactggctttgctttgttttagaaataccagcattagaggagcaaagaccagcttcctcttacaggctctaactacaaaaaaaaaaaaaattgttgctttagttgaataagaactacgggggataagctaagcaggggggggagggaggagacataaaatttatttttgcagtcctgggcacagkgggcccccataaaggggtttcccactgctccctcagcatattctgtcctcactgtccccaaggaatgaaatcataagaggcccaagaataggataagttagaggatgcaatgaaggggagagatggacacaaacacggcataagaacttttgcaatgagaaaattcaaatggggcccttgggattaaagaaaagaaatgcaagatcagtgagcttggctccctggcctctttctggaagggaccttgcaccatctttcacatttatacatgctacaactgccttaacagggttaattccaaagtgtgtgctgggaaacagacatagtgatggacatggtacacagtactcctgccctcctgactccacctcttcctatgtatagagttgaggg

SEQ ID NO: 498289 - DNA, 623 bp, Homo sapiens
agctgcctagggttcttgcagtccccaacatctgtggggccctgccactggctttgctttgttttagaaataccagcattagaggagcaaagaccagcttcctcttacaggctctaactacaaaaaaaaaaaaaattgttgctttagttgaataagaactacgggggataagctaagcaggggggggagggaggagacataaaatttatttttgcagtcctgggcacagggggyccccataaaggggtttcccactgctccctcagcatattctgtcctcactgtccccaaggaatgaaatcataagaggcccaagaataggataagttagaggatgcaatgaaggggagagatggacacaaacacggcataagaacttttgcaatgagaaaattcaaatggggcccttgggattaaagaaaagaaatgcaagatcagtgagcttggctccctggcctctttctggaagggaccttgcaccatctttcacatttatacatgctacaactgccttaacagggttaattccaaagtgtgtgctgggaaacagacatagtgatggacatggtacacagtactcctgccctcctgactccacctcttcctatgtatagagttgaggg

SEQ ID NO: 498290 - DNA, 392 bp, Homo sapiens
ttttgtttaatctcctccagcaacttggcaggcctgcagccacccttcacatcctggcctgtccagcaggctgataaaatgcagatgtagctaccaccccgctcagagatccacccgcctctagcctcactgtcatgggtcccaaacatggattcttggctgaggggctgagggactgggataaggggtggcgggttgtgcgagacagcccatagaggtcagagggtccrgggaactttagaagtagctctaggttccttgcatgagcagtgtcagaattgcaggcaggctgggggataggccccaagttggtggatctccacttaacagattttttggtactattttttttaaataaaaaattttgatttcatagttcattcttgagcgtt

SEQ ID NO: 498291 - DNA, 670 bp, Homo sapiens
agagcaaacaggaaaactagataatattaatcaacatgaataaaagaagttggctggacatggtggctcaagcctgcaatcccagcgctttgagaggctgagacaggaggactgcttgagtccaggagttcaagatcagcctgggtaacccartgagaccttgtttctacaaaaaaattttaaaaatttagccgggcacggtggcatgtgtctgtagtcctagctactctagaggctgagtcagggggattgcttgagctcaggagtttgaggctgcagtgagctatgatcacctcactgcactccagcctgggtaacagacactgccctgtccagtcacctggggaagcccaggaggtccctgtctttgccaacaaaggaagagaggacccatctttcaagacatgactcgcaatagcagggctgatcagactgatccacacgtgtgaccatctcatcacccacatctgtactgatctgaatgtcatttttgtctcaaaaaaaaaagttattaatcaatagctttcctatatacaaaaaaaaagaagcatgaatacatgctggtgatccagctaacataaatgattattccagaaaaacattccttcttgtgctctgccacatttcctcttctctacttgtgtgaatgttggtggcatgcttgaaactc

SEQ ID NO: 498292 - DNA, 577 bp, Homo sapiens
catgtcctcactggggcccttctgcaggtgggtttggttatttggagcttggtacacactatgtatgtagagacaggtgaggccaaaytctttttggacacaatttcagtgaaactacatgcaacttcctgagggcctggtgcatagtaagtactcaatcagtacttaatgagtgaggggatgttaataagcaggtaatatcttccagtgcgaagactctcaagagcagagcactgggcacagaatgaagaatacagagggcatctccaagtatgagctgtgagtttcatgtcacaaaatgaccacctggactggtaaaataccattcgggtgcatgacgcccaagtttaggtaaggattcaagcaggtgtgcttaggagcaacagaggcaaagagaaagacaagggagagagacagagacagtgtgcacaggagaagaatattccagtggcgtggaggattcctcccactatttcgcttcctgaacatttgccccaggatgagtctgagccataactctgggatccttcttcagtctcaggcattgcattcctcaccactctgggtgtggttgagg

SEQ ID NO: 498293 - DNA, 577 bp, Homo sapiens
catgtcctcactggggcccttctgcaggtgggtttggttatttggagcttggtacacactatgtatgtagagacaggtgaggccaaactctttttggacacaatttcagtgaaactacatgcaacttcmtgagggcctggtgcatagtaagtactcaatcagtacttaatgagtgaggggatgttaataagcaggtaatatcttccagtgcgaagactctcaagagcagagcactgggcacagaatgaagaatacagagggcatctccaagtatgagctgtgagtttcatgtcacaaaatgaccacctggactggtaaaataccattcgggtgcatgacgcccaagtttaggtaaggattcaagcaggtgtgcttaggagcaacagaggcaaagagaaagacaagggagagagacagagacagtgtgcacaggagaagaatattccagtggcgtggaggattcctcccactatttcgcttcctgaacatttgccccaggatgagtctgagccataactctgggatccttcttcagtctcaggcattgcattcctcaccactctgggtgtggttgagg

SEQ ID NO: 498294 - DNA, 616 bp, Homo sapiens
gattccaggataccacatatcactctgattccaggatgggaaaatggccagtgctcagctgagattgcagtggccacagtaatccaggcaccacctccttgattcacaaatctctcacaactcagtgtcctaagtccggttgacaacccagttccccttatagscacaaaatgcttcgggaggtgggcagcctagagctggttagaccccttgctttttcagaggaggaaattgaggtacagagaggtgcccaggcttgcccaagctctcaggattaagaaatggtggatctggcagggcacggtggctcatgcctgttatcccagcactttgggaggccgaggcaggcggatcacggggtcaggagtttgagaccatgctggctaacacggtgaaaccccgtctctattaaaaaatacaaaaaattagccgggcgtggtggtgggcgcctgtagtcccagcaactcgggaggctgaggcaggagaatgacgtgaacccgggaggcggagcttgcagtgagcggagatcgcgctactgcactccagcccgggaggcagagcgagactccatctcaaaaaaaaaaaaaaaaaaaaaggaaacggtggatctgtgggt

SEQ ID NO: 498295 - DNA, 616 bp, Homo sapiens
gattccaggataccacatatcactctgattccaggatgggaaaatggccagtgctcagctgagattgcagtggccacagtaatccaggcaccacctccttgattcacaaatctctcacaactcagtgtcctaagtccggttgacaacccagttccccttatagccacaaaatgcttcgggaggtgggcagcctagagctggttagaccccttgctttttcagaggaggaaattgaggtacagagaggtgcccaggcttgcccaagctctcaggattaagaaatggtggatctggcagggcacggtggctcatgcctgttatcccagcactttgggaggccgaggcaggcggatcacggggtcaggagtttgagaccatgctggctaacacggtgaaaccccgtctctattaaaaaatacaaaaaattagccgggcgtggtggtgggcgcctgtagtcccagcaactcgggaggctgaggcaggagaatgacgtgaacccgggaggcggagcttgcagtgagcggagatcgcgctactgcactccagccygggaggcagagcgagactccatctcaaaaaaaaaaaaaaaaaaaaaggaaacggtggatctgtgggt

SEQ ID NO: 498296 - DNA, 544 bp, Homo sapiens
aaccatgtgaatagctttaaaaaaaaaagctggaccaggctcagtggcccatgcctataattccagcactttgggaggccaagacaggaacatcgcttgaggccatgagttcaagaccagcctgagcaacaaagtgagacccaccccatctctacaaaaaaataaataaaaaaatagccaggcatagtggtgcccatctgtagtcccagctactcaggaggctgaggcaggaggatagcttgagcccgagagttcagtgctgcagtgagctatgatcgtaccactgaactccagcctgggcgacaaagcaagcgctgtccccccyccaaaaaaaaaaaaaaaaaaagaaaaaggaaaataaatcaagttaatagtagtagaggctgtaagtcaaaaatcatggtagttccctgcagccggaggtttggaatgcacaaatatggaagtgggaagactccatgtggaaagtcacccaggccaatgactccaaagacttggggatggttggagtttggcaactgggaagccatctgcgaacttagag

SEQ ID NO: 498297 - DNA, 631 bp, Homo sapiens
cttatgcatcgaggagccatgtcagaaaccagcacggattccttcatccactagttactatgtgcatactcaatctagggccatggggaggtctctggagtgtacagtccggtgagaaagaaaacagtaatgcaatcatcacacaaatacttataaagcatcaacaagatcggaataagggtcagataggagagccagtgccacagatttcacagagagtctcccttaaaaagttatgtttgatctgagagccaatagatgaatgtgagttaactagaaaggtagttaaatagaggaaatagcatgtacaaagatcctgaagtgagagagatgtggcctacatgaaacaaacagacagacagtccggygtgacttgagctcaaaaacaatggacaaagagaatagaattcagtgtgaaaagacagggagctaggaaggaatgacactgtctactagaccatagataacctattcgttatggccaacctttattgagcatctaatatgtgccagaaactgtgctaagtcttttacatgtgctaactcccttaaccataagtagcctacctgatgggtgggattgttcttattttgtggataaggaaataaagaaggcttagaaaagcaacca

SEQ ID NO: 498298 - DNA, 610 bp, Homo sapiens
tgaaggaattttttttaaaattcttttggtatcatttgacaccatttataattgatagttcctccaacaggtctcaaagaagccttgatccatgccctgaacagtcttcagacctaggagacatgggcataattcatttcctgggtaccgaagttaataaaagcactctcattgcagaccaaggacatcagattcattttgcctcggatccattctggcatctaggagggcttttataaaaactatgaaccccctggcrttgcaaataaaatgtggcatatatgttcatttcttgggtgactgtacataactttcaacaatgcttgaggcaatctatgctcccaaaaaccaaagggaatttggttatgttagaaagcatgattttttaaaactattgtatttaggtacatatacataaaataaaattatatataaaatataatttaccatttaaaccattttttaagcacacaattctgtggaattgattacatttacaatattgtgcaactttcaccactatttacttcgaaaatgtttcattattgcaaacagaaacagaggatgcagttattaataatgatagcaatacaaggggcaagtcaatcag

SEQ ID NO: 498299 - DNA, 610 bp, Homo sapiens
tgaaggaattttttttaaaattcttttggtatcatttgacaccatttataattgatagttcctccaacaggtctcaaagaagccttgatccatgccctgaacagtcttcagacctaggagacatgggcataattcatttcctgggtaccgaagttaataaaagcactctcattgcagaccaaggacatcagattcattttgcctcggatccattctggcatctaggagggcttttataaaaactatgaaccccctggcattgcaaataaaatgtggcatatatgttcatttcttgggtgactgtacataactttcaacaatgcttgaggcaatctatgctcccaaaaaccaaagggaatttggttatgttagaaagcatgattttttaaaactattgtawttaggtacatatacataaaataaaattatatataaaatataatttaccatttaaaccattttttaagcacacaattctgtggaattgattacatttacaatattgtgcaactttcaccactatttacttcgaaaatgtttcattattgcaaacagaaacagaggatgcagttattaataatgatagcaatacaaggggcaagtcaatcag

SEQ ID NO: 498300 - DNA, 605 bp, Homo sapiens
gtagcttgtcctctagacacttacttaatatccctactcgggtgtctaggagacttctcaaactaacacattctgggtgccggtaaggttcagtgccttgatctgtgaagtgcttatgtgaacatgttcactcagtaaaaattcatcactgatgatggctgttgcttttctatacatagctaaggtttatacttttaattaaaagccttactttyaaacattaacattcccgaacagtgctgccaattgctttttctgaaaacttgctcctctaaaatcccccaaagaaaccaaaaatcccaacgttattctttttttaaaaaaaaaattatttccataggttttggggaacaggaggtatttggttacatgagtaagttctttagtggtgattagtgagattttggtgcacccatcacttgagccgtatacactgaactcaatttgtagtcttttatccctcactcccaacccatcctttcccctgagtccccaaagttcattgtatcattcttatgtctttgcatccaacattattcttgattcttcttgttccacatctaatccaattgtatgtcccgccttctctattgccaatcaaatcc

SEQ ID NO: 498301 - DNA, 605 bp, Homo sapiens
gtagcttgtcctctagacacttacttaatatccctactcgggtgtctaggagacttctcaaactaacacattctgggtgccggtaaggttcagtgccttgatctgtgaagtgcttatgtgaacatgttcactcagtaaaaattcatcactgatgatggctgttgcttttctatacatagctaaggtttatacttttaattaaaagccttacttttaaacattaacattcccgaacagtgctgccaattgctttttctgaaaacttgctcctctaaaatcccccaaagaaaccmaaaatcccaacgttattctttttttaaaaaaaaaattatttccataggttttggggaacaggaggtatttggttacatgagtaagttctttagtggtgattagtgagattttggtgcacccatcacttgagccgtatacactgaactcaatttgtagtcttttatccctcactcccaacccatcctttcccctgagtccccaaagttcattgtatcattcttatgtctttgcatccaacattattcttgattcttcttgttccacatctaatccaattgtatgtcccgccttctctattgccaatcaaatcc

SEQ ID NO: 498302 - DNA, 631 bp, Homo sapiens
  misc_feature (1)...(631): n = A,T,C or G
ggtcacggttcgattaagtatggacccaattaatgacggttaattggatgaacataaacttgacctccacacagcagttttgaacctggcatatttttcctgcnggtaggagtgtgtttgcttanncagcctattaattctaaaagctttgtttcagtcgctttctttacattctgaatttctttaggcgaagtaggtctttttttttaaagctcatcttggcccggcgtggaagctcatgccctatcctcccatctctttgggaggctgaggtgggaggattgctcgcgcccaggggttcaggaatggccagggcaacttgatgagatcccatcgctacaaaagaaaaaaagaaagaaatttaacttagccaggcatgatggtgcaygcctgtagtcccagctactcaggaggctgaggtgagaggatcacttgagcttaggagttggaggctgtagtgaactatgctggtgccactgcattccagcctgggtgacagtgacagagcaagaccccttctctgggggaaaaaaaaaacaagcccatcttctcctcccaccttgacaaacagggccctttattgaatatggagccagcatatggctgagaaagtcactttttaatacatggc

SEQ ID NO: 498303 - DNA, 590 bp, Homo sapiens
ggtgctgccctgagaaatgtcaggaatgaatgtgtcctgcctagagtgacctgtttgcctacttgttcatcaagggcattttgagttgtgtattcattggtgaacttcagggaaaggatcccttttccatctactaattgcctgcctcatgggataatttttttttccaaatacatttgatgatattcatcagcttgtgataaagaatatgccaaaattatgcggaagtgaaagaatattattggcactaatgttcagttgtgcygcatgctggtcttgatttgagtggcagtaggaagcaaggacagcttttgactgtggaagagtctctggaagtttcttttaagtcattagttctcagagtagggtcctggcccagcaacagcatctgggaacgtgtttgttagaaatgcactttctcaggccccgccccagagctactgaatcagaaacgctggggtggggcccagcaatttgtttcacaagggctccaggtgggtttggcgcaagttcacgtttaggagcctatgttctgtattaaatcaaaaatgctggaagagggaggactgctaggtgacctaagccttctg

SEQ ID NO: 498304 - DNA, 546 bp, Homo sapiens
gctaataacccttaggcaagtcacttactttctggagcgcttacggtgggagggctacccttcctgtcccatgtcatcctaattttttctaatctcttcttcacacagyagccaactcccatgatcatgtctctaaggtacaaacagaaggaaaaacaaacaaacaaacaaaaaaaacccttaatcttgtggattctccaccctcctcttaaatcatctcaaaatcaaagtcttttttttttttttttttggtgatgaaagtacctaaaaatctactctcttggcaaatgtccagtatgtgacacactattattagccatagttaatactaaaaaaatgaaaaaaggtaactataacatgatggatatgttaatttgcttgactgtagtaatcacttcattacacatatgtacaggtgttccttaacttacgatggagttacatcttaaacccattttaagtcaaaaatgcatttaatatttctaacctactgaacattgtagcttatcctagcctcccttaaatatgttcagaacactttcatca

SEQ ID NO: 498305 - DNA, 636 bp, Homo sapiens
ctgttggggttgggagtgtgaatcagaytgagactctgtctaggggtgctggtttgagttttttaagtcaattgcctcatctacgtaaagcatgcagttagaacaggcttttcttacaccccagactgaagcattttttagtcgagaagtcaatttaagggaggcaatatattcttttgcagcctgtgccataagaataaaagtccaggctgccacttattacagtttaactgaatgatggattctagcctgttttaattaaattacatattcaattatttttgtttgaaattaaaagcttgattatattaccgaatgctatgtaattttacacgcgttgttcgcttatttaacagtgaggcgtgggatatgattaacaatgtggctgccagtagaaagaagcaaaataattatttgttcaatatacaagtcctcatcatgattcagaaatcaatatgcatccacggaggatttgctcgcactgtggattatggaactcagtgtggccttccctcatttccctatgaatgtaaaacctggagactttggttcaccaggcaggtttttatttccctctctctctttttttttttaaagactgatgtttaactacagccgttgggacttaaatcagag

SEQ ID NO: 498306 - DNA, 636 bp, Homo sapiens
ctgttggggttgggagtgtgaatcagactgagactctgtctaggggtgctggtttgagttttttaagtcaattgcctcatctaygtaaagcatgcagttagaacaggcttttcttacaccccagactgaagcattttttagtcgagaagtcaatttaagggaggcaatatattcttttgcagcctgtgccataagaataaaagtccaggctgccacttattacagtttaactgaatgatggattctagcctgttttaattaaattacatattcaattatttttgtttgaaattaaaagcttgattatattaccgaatgctatgtaattttacacgcgttgttcgcttatttaacagtgaggcgtgggatatgattaacaatgtggctgccagtagaaagaagcaaaataattatttgttcaatatacaagtcctcatcatgattcagaaatcaatatgcatccacggaggatttgctcgcactgtggattatggaactcagtgtggccttccctcatttccctatgaatgtaaaacctggagactttggttcaccaggcaggtttttatttccctctctctctttttttttttaaagactgatgtttaactacagccgttgggacttaaatcagag

SEQ ID NO: 498307 - DNA, 636 bp, Homo sapiens
ctgttggggttgggagtgtgaatcagactgagactctgtctaggggtgctggtttgagttttttaagtcaattgcctcatctacgtaaagcatgcagttagaacaggcttttyttacaccccagactgaagcattttttagtcgagaagtcaatttaagggaggcaatatattcttttgcagcctgtgccataagaataaaagtccaggctgccacttattacagtttaactgaatgatggattctagcctgttttaattaaattacatattcaattatttttgtttgaaattaaaagcttgattatattaccgaatgctatgtaattttacacgcgttgttcgcttatttaacagtgaggcgtgggatatgattaacaatgtggctgccagtagaaagaagcaaaataattatttgttcaatatacaagtcctcatcatgattcagaaatcaatatgcatccacggaggatttgctcgcactgtggattatggaactcagtgtggccttccctcatttccctatgaatgtaaaacctggagactttggttcaccaggcaggtttttatttccctctctctctttttttttttaaagactgatgtttaactacagccgttgggacttaaatcagag

SEQ ID NO: 498308 - DNA, 636 bp, Homo sapiens
ctgttggggttgggagtgtgaatcagactgagactctgtctaggggtgctggtttgagttttttaagtcaattgcctcatctacgtaaagcatgcagttagaacaggcttttcttacaccccagactgaagcattttttagtcgagaagtcaatttaagggaggcaatatattcttttgcagcctgtgccataagaataaaagtccaggctgccacttattacagtttaactgaatgatggattctagcctgttttaattaaattacatattcaattatttttgtttgaaattaaaagcttgattatattaccgaatgctatgtaattttacacrcgttgttcgcttatttaacagtgaggcgtgggatatgattaacaatgtggctgccagtagaaagaagcaaaataattatttgttcaatatacaagtcctcatcatgattcagaaatcaatatgcatccacggaggatttgctcgcactgtggattatggaactcagtgtggccttccctcatttccctatgaatgtaaaacctggagactttggttcaccaggcaggtttttatttccctctctctctttttttttttaaagactgatgtttaactacagccgttgggacttaaatcagag

SEQ ID NO: 498309 - DNA, 531 bp, Homo sapiens
aagtaaggccatttctgtggactgttcaggaattaacagcgaattctttcttctttctttgttttttttttttgtttttttttttttttttttgagaygaagtctcactctgtctctaggctagagtgcagtggctagatctcggctcactgcaacctccgcctcccggcttcaagtgattcttctgcctcagcctcccaagtagctgggactacaggtgcacaccatcacacccagctaatttttgtgtttttagtagagacagggtttcaccatgttggccaggatggtcttgatctcttgacctcatgatctgcctgccttggcctcccaaagtgctgggattacaggcatgagctaccacacctggccaacagcaagttctttctagcctgactgctggaaagggaaagtggcatactttctccaacctgtttctcttgcccccatactccatttcttccttgtattcaatggcagagtgtcagtttgcttgtagtccatttcctatgtcatttatcactgtacaaa

SEQ ID NO: 498310 - DNA, 591 bp, Homo sapiens
ctgtggcacatctaaagtttaattacaccagacgctgagctatacaagggatggaactagggttcagcatcatccctagcaaacattaaaagtgaaaatgtaaaaaagaaaggaagaaaactaaaatctactgagcatttaccattaatgctgcaagycagccacttcactgagtaactctgtatgagtaatttctcattagtcttcacaacaatcgtaggtggttagaagaaaaaatgaagacttgggaagaatcttgccaggtcacaatggcatgtgctaaagaagctgagctgggatttgaaattaggcagtctgatcccagattcccctcctgtgctgaatctcacatggtaggtgcttatttacgggtgatgaaagagaaggatgtttttggttgtcagagggcatttctaataggttgaactcccactggcagtatatggagacagaagagaggtgggaagaagaaaatgtgtgtgctagatatgatccttactactggaaaagctatgatatttagggcatatctatatttatgtagaatgcaagaggaaaaggagctagcaggcattaccagagggatctggg

SEQ ID NO: 498311 - DNA, 531 bp, Homo sapiens
aagtaaggccatttctgtggactgttcaggaattaacagcgaattctttcttctttctttgttttttttttttgtttttttttttttttttttgagacgaagtctcactctgtctctaggctagagtgcagtggctagatctcggctcactgcaacctccgcctcccggcttcaagtgattcttctgcctcagcctcccaagtagctgggactacaggtgcacaccaycacacccagctaatttttgtgtttttagtagagacagggtttcaccatgttggccaggatggtcttgatctcttgacctcatgatctgcctgccttggcctcccaaagtgctgggattacaggcatgagctaccacacctggccaacagcaagttctttctagcctgactgctggaaagggaaagtggcatactttctccaacctgtttctcttgcccccatactccatttcttccttgtattcaatggcagagtgtcagtttgcttgtagtccatttcctatgtcatttatcactgtacaaa

SEQ ID NO: 498312 - DNA, 558 bp, Homo sapiens
attgcctgtaatcccagctactcgggaggcagaggttgcagtgaacckagatcgtgccactgcactccagcctgggagacagagtgagattctgtctcaaaaaaaaaaaaaaaaaaagtgatatcttgcccaagccaaacagctagttactgtatcagaaagaactcttttcacactgaaaatcatttttctatgggacctgttaaactcgtgtctggtccagcaagcaggtggaccagctaaatctacctgaccctcctacacaggtgtcctactgcactgaaggtagctgagatggatgaaagagtttcaccctgaaaaaaaaaaatcatggatattaaagacttccccagatgtagtgtagggttggaggtctgtttaatgtaagggttggatagtttcctgacttaacagcaaatcattgggcagactgcattttgatgactcttggaggaagccctagaaatattttcccccaaggtaatgtcatttttaaaaaaacataaatgaacatgaaaggaaacttctaaggcatgtgttggctgctcttgcctgcag

SEQ ID NO: 498313 - DNA, 531 bp, Homo sapiens
aagtaaggccatttctgtggactgttcaggaattaacagcgaattctttcttctttctttgttttttttttttgtttttttttttttttttttgagacgaagtctcactctgtctctaggctagagtgcagtggctagatctcggctcactgcaacctccgcctcccggcttcaagtgattcttctgcctcagcctcccaagtagctgggactacaggtgcacaccatcacacccagctaatttttgtgtttttagtagagacagggtttcaccatgttggccaggatggtcttgatctcttgacctcatgatctgcctgccttggcctcccaaagtgctgggattacaggcrtgagctaccacacctggccaacagcaagttctttctagcctgactgctggaaagggaaagtggcatactttctccaacctgtttctcttgcccccatactccatttcttccttgtattcaatggcagagtgtcagtttgcttgtagtccatttcctatgtcatttatcactgtacaaa

SEQ ID NO: 498314 - DNA, 617 bp, Homo sapiens
atccaagactgtggacaatccaggaattatctgtctcacttttagcatgcatttctgtttgttcattggagactgctttgtcagagatgacattctgagttaagaagatggatcttggaaccagagagacccggaatytatattttttgcttcctagttatgtgtcctggagcaagatacttcctcttgctgagccttggttttctcctctgcctaatgggtataataatagtctttatagctaacatttaattagtgcctactgtgtgccaggcactgttctaaatgctttgtcatttaatctataatacaaccccatgaggtgtatcaaggtataataatgatggtgcctgcataatagaatatgatccattattaagcaagatagttcatgaaaaacatttcacatgctgtctgatacattataagaactcaataaatatatggtatcaatggtagttactgtagttatctattgcgtgtaacagattggcctaatatttagtgcttaaaaaaaaccgattgtctcacacaatttctgagggtcataaacctggaagacacttagctgggtagtcccatgaggttgcagtcaagctgtctactggtactgcagt

SEQ ID NO: 498315 - DNA, 605 bp, Homo sapiens
ctgcttaataggcccccagtaaagcacccaattctctaccatggtccaagttaccttcttagggacagttcgagatacatacactgtcatccacgtctcgaaaactcctttggggccttgtatccacttcagtgatattgttattgttattagwaaatcagtcatctaaaattgtttatgaaaacttaattttaagtgtcttcacctagaccatagaatactcctgtgggcacttttcctaccagatctgagagtgaattgcatttctaaattacttgaggctctttttaaaaagtaattcttctattctaaacaagaagagctatattagacttcctcctagtatctttcataaattgatggagttgcctgttaagatcctcttttaacaataaaggtctgtttcttactccactgattcactgattcaacccctataggtaagagtgccagaaagatctactttttggtaaattctgctctaggagaatattatagtagtgtgccatcatacagcatggtgatcttctgaagaaattctggggaatatctgtttacaaaaatggaccattaaggggaaaaaatgttcaggatgtgcattcctg

SEQ ID NO: 498316 - DNA, 472 bp, Homo sapiens
tgggcatcaggtaataaacaatgatccctgagatatggaaacaaacatatgagccctgcagttgccccagcttgctkcccttagagtgtccccagtttgcagcatgtgaggggaaactgaagtagaatctggaagagtctctgagctgaagagacagagctggtggctgaggaagcatgaggaatctggagctgatgggaaagggtacaaagcaaggagaggaccctgaagatctggaaagggcctcctggaatgttgagtggattgctggtctgcacgtgtgtggagaaccttcctgtacctggagaaagaaccattcaaaaggatgatggggagcagtgcctggtgttcactcaaaggtgaaaatagtacctgttcccaacactcagaccagaaaacttcataatccatggggcattgagtagagtgctccagaaggtcttccctccatagtaggaaagaattagctcta

SEQ ID NO: 498317 - DNA, 472 bp, Homo sapiens
tgggcatcaggtaataaacaatgatccctgagatatggaaacaaacatatgagccctgcagttgccccagcttgcttcccttagagtgtccccagtttgcagcatgtgaggggaaactgaagtagaatctggaagagtctctgagctgaagagacagagctggtggctgaggaagcatgaggaatctggagctgatgggaaagggtacaaagcaaggagaggaccctgaagatctggaaagggcctcctggaatgttgagtggattgctggtctgcacgtgtgtggagaaccttcctgtacctggagaaagaaccattcaaaaggatgakggggagcagtgcctggtgttcactcaaaggtgaaaatagtacctgttcccaacactcagaccagaaaacttcataatccatggggcattgagtagagtgctccagaaggtcttccctccatagtaggaaagaattagctcta

SEQ ID NO: 498318 - DNA, 431 bp, Homo sapiens
cccaaattacatccaagctgttgcaaggcagacactcctattgccatcattagcactggtatggtagttcctactgccaccgtagagcacaggacgctcatccaagtacatctgctgctgctgcagcccctgaaagtcarggatctctcacccccacccctgccaaatggattctaattagcacatcccacttcatatcaccatcttccctatcaatgacttccatgggttgtcttaagagtaaaatctggaatatttttctgacaataccttgaagaacaaaagtgtccatgaagtaggaaattttccaaacttaacaacctcattaacatatattggatgttaaacacagaattatcatatgacccatcaattttactcctaggtacacaccccaaaaataaaaacagatgttcaagaagaagtgaact

SEQ ID NO: 498319 - DNA, 593 bp, Homo sapiens
ggaaaatgcccaaattacatccaagctgttgcaaggcagacactcctattgccatcattagcactggtatggtagttcctactgccaccgtagagcacaggacgctcatccaagtacatctgctgctgctgcagcccctgaaagtcagggatctctcacccccacccctgccaaatggattcyaattagcacatcccacttcatatcaccatcttccctatcaatgacttccatgggttgtcttaagagtaaaatctggaatatttttctgacaataccttgaagaacaaaagtgtccatgaagtaggaaattttccaaacttaacaacctcattaacatatattggatgttaaacacagaattatcatatgacccatcaattttactcctaggtacacaccccaaaaataaaaacagatgttcaagaagaagtgaacttgcatgtgcatagcagcatgattcacaattttttaaaaaaggaaaaagcacaaatatccgtcaatgggtgagtgggtacagaaaagtggcatatccataaaaaggaatattatttagccacaaaaaggaatgaagcatgctacatttcacaatg

SEQ ID NO: 498320 - DNA, 593 bp, Homo sapiens
ggaaaatgcccaaattacatccaagctgttgcaaggcagacactcctattgccatcattagcactggtatggtagttcctactgccaccgtagagcacaggacgctcatccaagtacatctgctgctgctgcagcccctgaaagtcagggatctctcacccccacccctgccaaatggattctaattagcacatcccacttcatatcaccatcttccctatcaatgacttccatgggttgtcytaagagtaaaatctggaatatttttctgacaataccttgaagaacaaaagtgtccatgaagtaggaaattttccaaacttaacaacctcattaacatatattggatgttaaacacagaattatcatatgacccatcaattttactcctaggtacacaccccaaaaataaaaacagatgttcaagaagaagtgaacttgcatgtgcatagcagcatgattcacaattttttaaaaaaggaaaaagcacaaatatccgtcaatgggtgagtgggtacagaaaagtggcatatccataaaaaggaatattatttagccacaaaaaggaatgaagcatgctacatttcacaatg

SEQ ID NO: 498321 - DNA, 593 bp, Homo sapiens
ggaaaatgcccaaattacatccaagctgttgcaaggcagacactcctattgccatcattagcactggtatggtagttcctactgccaccgtagagcacaggacgctcatccaagtacatctgctgctgctgcagcccctgaaagtcagggatctctcacccccacccctgccaaatggattctaattagcacatcccacttcatatcaccatcttccctatcaatgacttccatgggttgtcttaagagtaaaatctggaatatttttctgacaataccttgaagaacaaaagtgtccatgaagtaggaaattttccaaacttaacaacctcattaacatatattggatgttaaacacagaattatcatatgacccatcaattttactcctaggtacacaccccaaaaataaaaacagatgttcaagaagaagtgaacttgcatgtgcatagcagcatgattcacaattttttaaaaaaggaaaaagcacaaatatccrtcaatgggtgagtgggtacagaaaagtggcatatccataaaaaggaatattatttagccacaaaaaggaatgaagcatgctacatttcacaatg

SEQ ID NO: 498322 - DNA, 593 bp, Homo sapiens
ggaaaatgcccaaattacatccaagctgttgcaaggcagacactcctattgccatcattagcactggtatggtagttcctactgccaccgtagagcacaggacgctcatccaagtacatctgctgctgctgcagcccctgaaagtcagggatctctcacccccacccctgccaaatggattctaattagcacatcccacttcatatcaccatcttccctatcaatgacttccatgggttgtcttaagagtaaaatctggaatatttttctgacaataccttgaagaacaaaagtgtccatgaagtaggaaattttccaaacttaacaacctcattaacatatattggatgttaaacacagaattatcatatgacccatcaattttactcctaggtacacaccccaaaaataaaaacagatgttcaagaagaagtgaacttgcatgtgcatagcagcatgattcacaattttttaaaaaaggaaaaagcacaaatatccgtcaatgggtgagtgggtacagaaragtggcatatccataaaaaggaatattatttagccacaaaaaggaatgaagcatgctacatttcacaatg

SEQ ID NO: 498323 - DNA, 638 bp, Homo sapiens
ggggctgtggctaaacagcacacatgtaggttagcccgctggagttcaaattccaactccactgaccacgacgttaactgagaaagtgagctaaatatgctgtctgtgaaacagggttgtggtgaatattaaatgaaagaatctctgtaacatcccccaagctcgtgcgtgggtacagtgaggactcggtgtacagcggtgaccctattatcctgcaaaggacatgaggtggcttctctagcctgctcccacttttgatgtcygaagaaaggaatgttcctatagggtatcaatcatggcctgggtggcttggcttactttttctgggaaaaaaacaagcccaggtgagccagaatgagctaatatgcattaaagttcatgcctggtgatgtggaagcaaagtgtgctacaggaagatgggcagaggccagcatggcagagaataggtgcaggggatggccagtgagaggtctgtgtagtctgtgtgtgtgtgtgtgtctgtgtgtgtgtgtgtgcgtgtgtgcatgtgatcatgagagaggcatgttttttcccagaccagaaatgagatggagggagaggcatatgctcccggagcaatctcttatgcctagggtgcttgctgatttgcaaatgtc

SEQ ID NO: 498324 - DNA, 638 bp, Homo sapiens
ggggctgtggctaaacagcacacatgtaggttagcccgctggagttcaaattccaactccactgaccacgacgttaactgagaaagtgagctaaatatgctgtctgtgaaacagggttgtggtgaatattaaatgaaagaatctctgtaacatcccccaagctcgtgcgtgggtacagtgaggactcggtgtacagcggtgaccctattatcctgcaaaggacatgaggtggcttctctagcctgctcccacttttgatgtctgaagaaaggaatgttcctatagggtatcaatcatggcctgggtggcttggcttactttttctgggaaraaaacaagcccaggtgagccagaatgagctaatatgcattaaagttcatgcctggtgatgtggaagcaaagtgtgctacaggaagatgggcagaggccagcatggcagagaataggtgcaggggatggccagtgagaggtctgtgtagtctgtgtgtgtgtgtgtgtctgtgtgtgtgtgtgtgcgtgtgtgcatgtgatcatgagagaggcatgttttttcccagaccagaaatgagatggagggagaggcatatgctcccggagcaatctcttatgcctagggtgcttgctgatttgcaaatgtc

SEQ ID NO: 498325 - DNA, 638 bp, Homo sapiens
ggggctgtggctaaacagcacacatgtaggttagcccgctggagttcaaattccaactccactgaccacgacgttaactgagaaagtgagctaaatatgctgtctgtgaaacagggttgtggtgaatattaaatgaaagaatctctgtaacatcccccaagctcgtgcgtgggtacagtgaggactcggtgtacagcggtgaccctattatcctgcaaaggacatgaggtggcttctctagcctgctcccacttttgatgtctgaagaaaggaatgttcctatagggtatcaatcatggcctgggtggcttggcttactttttctgggaaaaaaacaagcccaggtgagccagaatgagctaatatgcattaaagttcatgcctggtgatgtggaagcaaagtgtgctacaggaagatgggcagaggccagcatggcagagaataggtgcaggggatggccagtgagaggtctgtgtagtctgtgtgtgtgtgtgtgtstgtgtgtgtgtgtgtgcgtgtgtgcatgtgatcatgagagaggcatgttttttcccagaccagaaatgagatggagggagaggcatatgctcccggagcaatctcttatgcctagggtgcttgctgatttgcaaatgtc

SEQ ID NO: 498326 - DNA, 638 bp, Homo sapiens
ggggctgtggctaaacagcacacatgtaggttagcccgctggagttcaaattccaactccactgaccacgacgttaactgagaaagtgagctaaatatgctgtctgtgaaacagggttgtggtgaatattaaatgaaagaatctctgtaacatcccccaagctcgtgcgtgggtacagtgaggactcggtgtacagcggtgaccctattatcctgcaaaggacatgaggtggcttctctagcctgctcccacttttgatgtctgaagaaaggaatgttcctatagggtatcaatcatggcctgggtggcttggcttactttttctgggaaaaaaacaagcccaggtgagccagaatgagctaatatgcattaaagttcatgcctggtgatgtggaagcaaagtgtgctacaggaagatgggcagaggccagcatggcagagaataggtgcaggggatggccagtgagaggtctgtgtagtctgtgtgtgtgtgtgtgtctgtgtgtgtgtgtgtgcgtgygtgcatgtgatcatgagagaggcatgttttttcccagaccagaaatgagatggagggagaggcatatgctcccggagcaatctcttatgcctagggtgcttgctgatttgcaaatgtc

SEQ ID NO: 498327 - DNA, 460 bp, Homo sapiens
caaatgaagtctcctttagttttgggaacaaagggattgaaagaaatttacaggttttgttgtgggatgggtggcggagaagaacaaaatgtacccagtcatgcaatccttccatgactagggctttagaaattgagggcacgagattttgcaggagtgagacaaaagygggatccgaggagggacaggcatgactggctgcaaatagactgccttttctcaaggaagcctgtctgatgtattacggagaagccgaagtgaggttagtggaggcaaagattaaaaacgaagcttcacattttatgacattttggtgctcaggctgaaagggatcagaaatgataaattctttgtgacatctgggtgtttggatcattcccttctcacctgcagcctctcttcgctcacgagtcagatgtgggtttctgcacgcagcccagcaagcttcataaacacccct

SEQ ID NO: 498328 - DNA, 460 bp, Homo sapiens
caaatgaagtctcctttagttttgggaacaaagggattgaaagaaatttacaggttttgttgtgggatgggtggcggagaagaacaaaatgtacccagtcatgcaatccttccatgactagggctttagaaattgagggcacgagattttgcaggagtgagacaaaagcgggatccgaggagggacaggcatgactggctgcaaatagactgccttttctcaaggaagcctgtctgatgtattacggagaagccgaagtgaggttagtggaggcaaagattaaaaacgaagcttcacattttatgacattttggtgctcaggctgaaagggatcagaaatgataaattctttgtgacatctgggtgtttggatcattcccttctcacctgcagcctctcttcrctcacgagtcagatgtgggtttctgcacgcagcccagcaagcttcataaacacccct

SEQ ID NO: 498329 - DNA, 566 bp, Homo sapiens
gtttacaagtgtgttttattgataatctgcatgttttcccattggattaaggtttttctctgcaaccaagcaacagtgatggcagttggraaaaaatcctattagaaaataattactccactctggggagttagttcccactgaacttctcagtgatagggtaattcattttactgcccagctcattcaaaatatttgtaatatttggcacatatttcaacttttccattgtgcctatcactcctagtcctcaagactggtggaatggaccaatagaataattaaaacacaattggctaagtttgtagaggcttttcaccgcccccagcccaaagaacctccctcgtgctacttacagtcatattcacaccttttggaaaacatcaactacccctttataaaattataacaggaaggcccatgtgtatgggaactaaaattatggaaccaacctttctcaagagagatccaccgcaatattgtaaaggacttattcatcatctttcaaaaagctatgttttggtaacagattctattcacagtatgctccctaaagacacagtttc

SEQ ID NO: 498330 - DNA, 480 bp, Homo sapiens
ttacaagtgtgttttattgataatctgcatgttttcccattggattaaggtttttctctgcaaccaagcaacagtgatggcagttgggaaaaaatcctattagaaaataattactccactctggggagttagttcccwctgaacttctcagtgatagggtaattcattttactgcccagctcattcaaaatatttgtaatatttggcacatatttcaacttttccattgtgcctatcactcctagtcctcaagactggtggaatggaccaatagaataattaaaacacaattggctaagtttgtagaggcttttcaccgcccccagcccaaagaacctccctcgtgctacttacagtcatattcacaccttttggaaaacatcaactacccctttataaaattataacaggaaggcccatgtgtatgggaactaaaattatggaaccaacctttctcaagagagatccaccgcaatattg

SEQ ID NO: 498331 - DNA, 480 bp, Homo sapiens
ttacaagtgtgttttattgataatctgcatgttttcccattggattaaggtttttctctgcaaccaagcaacagtgatggcagttgggaaaaaatcctattagaaaataattactccactctggggagttagttcccactgaacttctcagtgatagggtaattcattttactgcccagctcattcaaaatatttgtaatatttggcacatatttcaacttttccattgtgcctatcactcctagtcctcaagactggtggaatggaccaatagaataattaaaacacaattggctaagtttgtagaggcttttcaccgcccccagcccaaagaacctccctcgtgctacttacagtcatattcacaccttttggaaaacatcaactacccctttataaaattataacaggaaggcccatgtgyatgggaactaaaattatggaaccaacctttctcaagagagatccaccgcaatattg

SEQ ID NO: 498332 - DNA, 462 bp, Homo sapiens
gccactattttatcaatttgaatgatatgctgaactatcacctgtcttttcatctttaatcctcctccatttataataactatcttaaatatttcctctacatagatttagagccacatcagatggtgttatawaataaaacatgatttagaaaactcaaaaagagaaggaaaatttattgtgttcactcatatttttactgtttgtattgtacttttcccctttctgatttccaagattcttttatcattctcttcctgtttaaaaaacatcttttaggataggtctttaggcaacaaattctcttaattgtacttcatctatgaatgacttgattttctttttttctaagggatatattttattaaatataggattatgagtttgcagattttttttctttcagtgcctgaacatattatgccacttcaattttaccttcatagtttggaagataaattt

SEQ ID NO: 498333 - DNA, 422 bp, Homo sapiens
tgtcagtcagacgagacctgatgggcaccaggactgaaggcagcagcacaggaggtaggagaggaaggaatcctgagcaaatagccaygctgtttacttgccaatgacatccccactttgcaaagacatgatatggttattgatctctcactgaacctgtaagaatcaaacacaacaactcagttttattcatttcataaatggtttccaagtgcagtcagacatttaatttgtggaacactgagcgaagaggtgatttctgctggtttaggtaagagagaaacggtctagtgtaatactcaagaatgagctagatctcctggatttaaggcttattctacagcttattagctctgctatgttgggccagtgacttgacatctccatgcttcagtctcttcatctgtaaaatggaaatacaa

SEQ ID NO: 498334 - DNA, 588 bp, Homo sapiens
tcagtcagacgagacctgatgggcaccaggactgaaggcagcagcacaggaggtaggagaggaaggaatcctgagcaaatagccatgctgtttacttgccaatgacatccccactttgcaaagacatgatatggttattgatctctcactgaacctgtaagaatcaaacacaacaactcagttttattcatttcataaatggtttccaagtgcagtcagacatttaatttgtggaacactgagcgaagaggtgatttctgctggtttaggtaagagagaaacggtctagtgtaatactcaagaatgagctagatctcctggatttaaggcttattctacagcttattagctctgctatgttgggccagtgacttgacatctccatgcttcagtctctycatctgtaaaatggaaatacaaagcgggtgggaggtgttgtgaggattgagtagattaatgcatgtaaagtgcttgcaacgttgcctgacatgtcactgtctgttagctgttagcagtagttgggctttttatagagggctggtgacttgtgcttgtctgaatgcaggaaaccaggcctgtgtagccttc

SEQ ID NO: 498335 - DNA, 569 bp, Homo sapiens
taccagagctttgcaaacaattccactaagaaattttttgtaggaggaaagcatctctatggcagagtaccaaagaacttaactttatttttgctaaactgtttagcaagaataaaatttacctctgaaacttgaatgtgtaaatgaatcactgagagaacttttaaatgyagattctgattcagttagttgaggacagcgctaagactctgcatttccagtaagttcccaggggatgctgatgactgctggtctgcgggcacacttagaataacgaggtgacaagttattctttatgtaacatgccaacaaaatttttaaaggtacagaaaatgatggcaagatctttgaactctgcaatatgaagcatatatgtgagtgcttagctttcactctctttctgtgtgtgtgtgtgtgtatacagatactaagacacagatacattcacatatatacatctaaatatatatacagtacagtccatattcagatttcttcaaggttaatgggtctattgtttaaattcggaatccagtcaaggacaacacattaaaattgattgttttgcc

SEQ ID NO: 498336 - DNA, 569 bp, Homo sapiens
taccagagctttgcaaacaattccactaagaaattttttgtaggaggaaagcatctctatggcagagtaccaaagaacttaactttatttttgctaaactgtttagcaagaataaaatttacctctgaaacttgaatgtgtaaatgaatcactgagagaacttttaaatgtrgattctgattcagttagttgaggacagcgctaagactctgcatttccagtaagttcccaggggatgctgatgactgctggtctgcgggcacacttagaataacgaggtgacaagttattctttatgtaacatgccaacaaaatttttaaaggtacagaaaatgatggcaagatctttgaactctgcaatatgaagcatatatgtgagtgcttagctttcactctctttctgtgtgtgtgtgtgtgtatacagatactaagacacagatacattcacatatatacatctaaatatatatacagtacagtccatattcagatttcttcaaggttaatgggtctattgtttaaattcggaatccagtcaaggacaacacattaaaattgattgttttgcc

SEQ ID NO: 498337 - DNA, 532 bp, Homo sapiens
ctttttctctttacactttctctcctcttgctcctyaaccccttgaacttcaactagatctctatacaggtgatttcctcttgttttcaccactccagtcatagtttagctccctctgtccttcattaagcctgtttgacctgcctggaatgtttatccctcaactcttcttacctcgctgtttctgttcatcttcatcttaaacatcacttccttggaggagcctaacttgatcctcaaaccagattagactcaccagttacacatttctatgtcaccctatatttatccttatgcacttgcgcattgtttaattatttgcagtaattgatttaatatctatctttcccaccagatttaaattccatgagagcaggacctatgtctgtcttgatcaaatgtccacagcatgaagcacagtgactgatacatgacagacactctaaattactggctgacagaataacccacccacatttttgctttgacttatttttcctaagcaagaatctcaaacatttagctgaaattt

SEQ ID NO: 498338 - DNA, 630 bp, Homo sapiens
tgtcagagttggaaggagtccctgagactaaaccggcccctctagagccatttcctatctgtcaaggttgcacttctcagactaaggagagaaatttgtgctgtggctgcactagtggcaccttcttgggaaacagaagatttggttctgcacttgccaaccaattcctgttatcagcctttaacttacattatattttaagsagagaggtccttatttagacaagctaaataaaacttttgtgagagaatgattccaggctggtccccagagggatggatggaatgtatagcttgattgttcccctgcctctctgattgcagtgatcatttcaacagaagcagcaagtcgacttttagcaatgtggactttccatggcaagaggattacagaggtttccttcaaagggtcgttttggaggctaacgttgggggagaagaataacctcagatcaattttcaagattcttactttgtgcctaataattaactgtattgctgagatgactcatcacccatagctacatccaccaaacagatgggtgacgccacatagctgggagtaaagtgaagctgtagagactgagagcaaaacaaaactgaaaacatttactacaaacttaccctctga

SEQ ID NO: 498339 - DNA, 630 bp, Homo sapiens
tgtcagagttggaaggagtccctgagactaaaccggcccctctagagccatttcctatctgtcaaggttgcacttctcagactaaggagagaaatttgtgctgtggctgcactagtggcaccttcttgggaaacagaagatttggttctgcacttgccaaccaattcctgttatcagcctttaacttacattatattttaagcagagaggtcsttatttagacaagctaaataaaacttttgtgagagaatgattccaggctggtccccagagggatggatggaatgtatagcttgattgttcccctgcctctctgattgcagtgatcatttcaacagaagcagcaagtcgacttttagcaatgtggactttccatggcaagaggattacagaggtttccttcaaagggtcgttttggaggctaacgttgggggagaagaataacctcagatcaattttcaagattcttactttgtgcctaataattaactgtattgctgagatgactcatcacccatagctacatccaccaaacagatgggtgacgccacatagctgggagtaaagtgaagctgtagagactgagagcaaaacaaaactgaaaacatttactacaaacttaccctctga

SEQ ID NO: 498340 - DNA, 519 bp, Homo sapiens
ccataacaaaataccagagactgggtggattatgtacatggtgtttgtccaaaaggcagatagtgaagggttggaaggtgtgtgagttaataaccaacaaaaaccaaacgttttgttgtattaatttttttttaagtccccacattactttataaaataagacaaaaacagaacaaaagaaagcatactctgcagccaaagaatgaggctgaggcttcaccaccagaatttgcatgcacctttttataactctaaaagcagagacccacaggcrggaactttatagccaattagggtaaaccaaagacacaatttataaatttttattaatcttttcacatataacaacatattgtaactttataaaatgtttaatgtttcccaaagtgaaaactaattcaatccttagtaatcctaacatgtttttcttttttttttccattacgttagtggggtacaggtggtttttggttacatgagtaagttccttagtggtgatttttgagattttggtgcacc

SEQ ID NO: 498341 - DNA, 667 bp, Homo sapiens
tatattttttgtttgctcatacatatgtgtgtatatttatagagaragagagaaatgaactgaatttattataatctttttttctgacatcatgacccataactcctacagattccagcatatactttccccaaacaagaacattcttctgtattaccatgtaatacctttccagtctgaaaatctgcatcaaccaacactaccttccaatccggtaatcccattcaagtttctccaacagtcccaataccatgtttttccttgttccaggaatatttattgtctcattgttctccttcagtctggaacagttcctcgttctttctctggctctggatctgcgtccctgacagtcttaaagaggacagacctttcattcatgaggatgaccctcaacttggcccagtccatgtttcctcagactcaagccttgcattcctggcagaaagactgaagaaatgatgctgtgctcttctcagtgcttcgcgtcaggaggctctactctctcaaccggccccactattggtaatgttaaccttggtcacttagccaaatttgtgtctgccattgtgaagtcatcatttttcctttgtatttgattagtactttctggggacatatttcaatgtcacaccaatatcctattcctcatcaaaccttcacccag

SEQ ID NO: 498342 - DNA, 594 bp, Homo sapiens
cactcatccaaaagcatctttcttttttgggggtgtgctgtctttgaattttatccttttcctggtgctagagggactgtgttcttccttctgtacacaccagcctttcagaagaggtgggggtcaagtgtatcttggacatctccccactctccccaccacaatgatactaatatacatmttctcttctttgtcttcaacccaaactttctcttaggggaattaatagcttcaaagccaaataccgacatgattagaaaagattgttcattctaaatagagtggtatgtttccagtcaaaataatctctggagtcttctttgtggttttccttactgcacttccttaatcagacacacctccactggagatcctccattttctcaggtgtggaatgggaagagaatatactgtataatattttggtgaagattaaatgagatattaacacaggtgaatcacttgcacatagagagccagcaatactaattcacttcagttgacaatgaattatatcctggttttcctaatgtttattgatgttttcatgcatttatgtactctttaaattatttagaacttgaatgttgtagt

SEQ ID NO: 498343 - DNA, 594 bp, Homo sapiens
cactcatccaaaagcatctttcttttttgggggtgtgctgtctttgaattttatccttttcctggtgctagagggactgtgttcttccttctgtacacaccagcctttcagaagaggtgggggtcaagtgtatcttggacatctccccactctccccaccacaatgatactaatatacatcttctcttctttgtcttcaacccaaactttctcttaggggaattaatagcttcaaagccaaataccgacatgattagaaaagattgttcattctaaatagagtggtatgtttccagtcaaaataatctctggagtcttctttgtggttttccttactgcacttccttaatcagacacacctccactggagatcctccattttctcaggtgtggaatgggaagagaatatactgtataatattttggtgaagattaaatgagatattaacacaggtgaatcacttgcacatagagagccagcaatactaattcacttcagttgacaatgaattatatcctgsttttcctaatgtttattgatgttttcatgcatttatgtactctttaaattatttagaacttgaatgttgtagt

SEQ ID NO: 498344 - DNA, 578 bp, Homo sapiens
  misc_feature (1)...(578): n = A,T,C or G
atttattcagtgatatattcacttgcatctgcatcctatatgtgccagacacacagtactaacttctttaatgtctacttcagattttagctccctcacctgagaaatcttagtaaaatctctcatccaaagtctagattgatatacrccaccacccattagattttttttcatcacactgctatcccacagaatcctccaactcaatgtaacanaaattgagcttaccaaccccaaacctgctcctcctgttttcccccttctttaagggagagaaagatctcattctccaagccagaaacccagggatcatccttgactcttctctttccctcactttctacactccaacaccaagtgttgctgattcctcttcatgaatagctcccacctccattttctactcttcagtcctgcttacccgattcaggctcacgattctctttctgcatcatagcaacagctacaggggtcttgggcttccctccaggtccatcccaatcattcaacacactacatccagaataacttttctaattatgttgctccctttgctagtcttccaacgactccccact

SEQ ID NO: 498345 - DNA, 487 bp, Homo sapiens
gttctagtcttggcattaccaccatccctgtacaagacttataatttcttcatccatgaaattaaaggtttaggctttatcattttcaaaaattttactttgaaaattctctaagttggccaaactttctctgagtatttagtcgtgtatttttcttattattttaatcctytgtgatcacactttcctttcatttaaccaaatttctttcacttcttaacttaaactttgtgaaggttgaattctgatactggtagagttaaagcataatctggatcaggctttaaatcccatagtaagtactgacttactagcacctccctatagtgcctcctgttccctttttctgcagaggatcatggtgaatgctacagtgtttctacttttgttgctctcattttgcaagtacttttatattcatcattcagaatagtgataactttatatgggaggctcattgaaggctgtcttacttatctctgaagtt

SEQ ID NO: 498346 - DNA, 602 bp, Homo sapiens
ttagcacagattctagcttgccctcctgaactactaagtctgtaaaactacaagttaccttttaaaactcttgagaagctagaagtccacaggtaaactaagttttaccacacagacaatcccacatttcttagagggagagagagaaaattgaagcagtgctccacacgagaagttccactttttggaaaacaggtgtctggttactctggaccatagggaacactgtaagatccaggccttcrtattatattgctgagtggtagatggtagcagcagtgatatttctaggagacagcttcatgatatggtttgttttatttcactgcattgttcttcactgagtagcatctaagcctgaatccctgtgaaatacttaatatcatttcatagctctttctgatcaatagctatagtggattctgtgtcagtgactaagaaccttgagcaaaagtactccatcaaggtattcttaccagaatgaaaaagaaccactgaattagaatttaaccaaatatttgtaaagcttcaaaaagaggtattatttttataaaattagttccatgtaatatttctaatattatgatgttgagagatagagt

SEQ ID NO: 498347 - DNA, 533 bp, Homo sapiens
gttaagggaggggccctccataattatcyagctcttgtctcttattttcattgagggaatcattaacagagaaagtgatcatttgtctggggtcacactgctttttgcttgtaccgcatgctccacattacttcccaaatgtccacatggattgaagctagaattactataagggacaaggtgtcctggacatgactgcaccttggttcttcatcatcatgcctgtttatttgctttctttgttccatcagattaaatgaggaatacaaacagcaatatattaacaagcaagtgagtttcccaagggccatttgtttattaaatggagatacacagaggttagaattgtttatttttcaagtaccagtagctagcaattacatttatgaaggataggggccttccagtactcttataactctactttccggggaagtcatcaccacacagtgccacctcaaacttgtatcttccatttgcttcagagaactatttggttggcagtgagctgggcctggactttaaggaattaa

SEQ ID NO: 498348 - DNA, 597 bp, Homo sapiens
cttagccaaaactccacgctgaactatgtggaaaaggtctgaccctgacaaaaccaatctacaaagtctaaagaagtaatcacttcctcaagtgtacagtacagttgcaggatacaaaatcaacatacaaaaattagcagcatttctatttacaaacaacaaacaatgaaaaaaggaaagaacacaatctcatttacaattagcaacagaaaaaataaaatacacaggaataaacttaaccaaaatggtgaaagacacgtccactgaaaattataatatgttgacaaaggaaatgaaagaggaaacacataaattgaaagacatctatgttcgtggtatggaaggattaatattgttaaaatgtttataacacccaaagttatctacagagtcaatgccatctctatcaaaattccaagggcatttttcgatatgagtgccaagaatacaaaattgggaaaggctcgtttctttaataaatgktgttggtaaaactacatccacatctgaaaaaaatgaagttggacccttatctttcatcatacacaaaaatcaactcaaaacgaatcaaagttctgactatgagatctgaaacca

SEQ ID NO: 498349 - DNA, 561 bp, Homo sapiens
ttcaattgagaggcagacagatttgggcaaatgagataaaatatttgttttgtattgataaatggttggattggcagatattgccttgtattgagtatggtcgtaaagacatcactaatatttaacttatctacctatttattttccctcactttgaagtgtggttagaatttggaggaagcaatttcatgaaggtagaaataagattgccctcataaaatatrttatgtcctcataaaataaatatttatatattatatataaaatatataaatttattatctgatccttcccaagagagattccgcacctctggttgcccttaggcttaatcattaagccagaaccataaagagaacaaaaaacattacctgtgcccaacgttttatggcctttgtcactcctcaagtagtctctccaaaggaggaatgtctgacgtggtaagtaagtttgagaggaaactggattttgttggatccaccccttctgaagtctcttgttgtcttcctccctcaagagatgtctgccctattttccacttgtttggaaactatctcccct

SEQ ID NO: 498350 - DNA, 379 bp, Homo sapiens
aatttggaggaagcaatttcatgaaggtagaaataagattgccctcataaaatatgttatgtcctcataaaataaatatttatatattatatataaaatatataaatttattatctgatccttcccaagagagattccgcacctctggttgcccttaggcttaatcattaagccagaaccataaagagaacaaaaaacattacctgtgcccracgttttatggcctttgtcactcctcaagtagtctctccaaaggaggaatgtctgacgtggtaagtaagtttgagaggaaactggattttgttggatccaccccttctgaagtctcttgttgtcttcctccctcaagagatgtctgccctattttccacttgtttgg

SEQ ID NO: 498351 - DNA, 477 bp, Homo sapiens
ctgcctaatcataggcatcgcatcaatagcttggctgactttcttaaaaacatgttgatggtaggaaaagagaactgagtagatgttataaatagttaagtacaaatctatcactacttcttgcaaaaatgctctggctgccatactgataatgaatagatagctcgttctttccaaactgagtgcagtagagtgytgcagtgctcagttgggtaggacagttgttggataatcggaattatacatatctccatggttaccctcaaataatattacctctaaataaaatctctatacttgcttcattgggatgtatgccttgagaataccgattgagaaaatgctacaaaatataggagcagaacttttcgtcattgcttctattttgttgaaagggaatggttcctacttggttgtcaattgaacacagaaaataagttggattctgcaaagatgatatttagccacccctgcaaa

SEQ ID NO: 498352 - DNA, 515 bp, Homo sapiens
ggccttgtgggtgtatctgggcaaggggttaggggggttgaacccctgtgcagcagccctacagggaaacacccaacaaaaattattttttaaaaaggctcatccaggaaatgcatataagggctggtcacctggcgttttgagtcctctcacaggtcrtagacctctggagagagaaactgaaacacttaagagggtgaaaatgactcaatggtaacacactgtggagtcttgagtgcaagcagcacacatcaccacacaaaaacgctaggccacagctcagttattttaagaaaaaaaatgagaaaataataatctaagaatgaggagaaaacaaggagaatgatcccctttcaagcactccataggttttatggcacctccacttgccagagtttatgtgaaatggaagtaatatggtatttgtgcatatatatgttaatgaaaaagagcactaaggtcaacctgcaaactatagagttcctaagttctcttttttccctattttcctttct

SEQ ID NO: 498353 - DNA, 655 bp, Homo sapiens
ttttgtgaccaaatgctgacggacacactatctcatagggttgttgtacaaattgtgtggggggtttcaaacaaatgcttggactagtgctttccactgaaatttgcagctcataagtgcttgttacttagttctcacctcaactttaagaggtgttggtgggtaggaaagtagtgagagtgtagtttctagggtcggtgtatctaggtttggaaattacagttaatttacttatgagctacatggttggacaaatttatacatacatcggggatagaagtagcacttgcttgatatgattgttgagaagatggagagttaataacacataaagtaaaagtacctgctacagagtaagacactatgcttattagcatgttgacaacttgttgagaagactgggttctcagagatcaggtttccgttcatctctctggaagtgacggtggrgggggcggttgcctctgcagaccatgcctcggtttcccataaatgatcccggaattgcctcttgctggtgtttgccttcctatcagactggcctccagtctttcctgttgccacctgctctgcattcactgggcctccctgctggtgagtggccttgccctgatgatctgccattgcatgctcccgatttctggctcttctggtc

SEQ ID NO: 498354 - DNA, 508 bp, Homo sapiens
aataatcttgtccattttacccaaataaagatggaacattattggagaaaaattaaaatgccctacagcagcacaacgatccctggtttgttgtcatcattttcaacttgcagtctgcatctcaacagcaaatggctaactgactgaccagtttataaacactcttgatttcacaagtagattttatggggcaagagctctctttggagttaacttgctctttgcataggttaatttaaatagcagtgaaaatttagcttgaaaggataattacaatatttcacctccttttatctcaggttatgtaaatgaggctttaatcttctcacggttcatattatattaataccgggaataaaaagatctcaatatattgtgtgctgtcaatcacgttagaacatgctcacacaatcgtagtgggtacaaattgaactaattcccataatcatgkgctgtgcatattatcaacaagtaaacagatggacttgtagcttggcagagttctcac

SEQ ID NO: 498355 - DNA, 508 bp, Homo sapiens
tcactgctagttagttagttagttttcatttatcttagacaagtcttttgaactcctggtttactcatctgtaaaacagaggtaataatggcactcttgaacatttacaatacaataaagaacaatactacatgaaaacatgataattcaaaatagaaaatgctaagaaacatacaatagatatagagagtttgggagcttcagaacggtgtctacttccagttggctctcttgccatacattgcaatatataactatttatgtcctcatcattttcagtcataagtgatggcagaatcttgaaggaatgagccygtaaggcactttaatgtagtaataggaaagtcatgtcacagtatgccaatcatggctcaggcagcaggaggcctggagaaatatgtcttattcctcccaaaggccagtgttaagggatatcagagagaaaacataaagttgctcaggaccactatcaccatgtgactctgcaggaaagcagaaactgttcata

SEQ ID NO: 498356 - DNA, 338 bp, Homo sapiens
atttgtgtaaagacccttaagctcttgattttaagcagtggcagggcccaggaggagccactgttggacagtgcttagggcatcaaytggccatatgctagccctgttaaatatccataggagtttacaacctctctatctccggtatcatgataaccactttcccatagatatgtgagcctgactcctcatgcctggagatagaattgcattgatgattttcatagggtcaagtttgcatgacctctcagcattacccagcctaacctcctattggaggtctaaatcctatttcttcttttggtggccctataagtctttctgctgccctttttgct

SEQ ID NO: 498357 - DNA, 487 bp, Homo sapiens
gctgaattcagatatttacttagcagaaagagagttaaatgtaaggggcagtgaatgggggttgtggatttggtgaacagaaatgcattaagaaaggtgcagagatagcatrtgaaaggagaaattgatggcaatattaaatgaactactgatccaataattagttttcctagaagacaggttccctaaaacaagtagttacagaacagttcacttaaaaaaaaattgccaatactaaatattggaatactaaataatactaaatattatcagaagttagcctcatgacaccaaacaacagctcaatttaggcaattggcagtaaattgactgtaaattggcagtcttctctgtattctataataagaacccaaaatacagaagtacccaatgaataaacaaataaccatttcatccatactttttgatgttgatcaccaatccacattgaacctaattccctatagaagagcaacagaaaatgcaa

SEQ ID NO: 498358 - DNA, 496 bp, Homo sapiens
tctctatttctctatctgtattaaggataagtttcatttcaaaataatcaaggtataagaggaaacagcatctgttacaaagaaaactgcaaaggcagaacaaaagttacacatactggatttctactggaatcatttttgtattaattaatgcaggactacaaataaaaatcsatgtgtcccttgagttcaatgagattatagtttctggattaagacagtacaaaaaatactccaattggtgtacattaatttaacactcactaatggcttaggtactttcacatagttgtcttaaagtgaatattctccacactttacagatgaaaaaatatgaattgcccatatggtgaccatatgttttcttttttgccctggccagttccaagttacatctgctttcttagtataattttcaacagcatcctgcttcattctccaacgttacccagttttgattacaaattttatggtcactccaattgtgacagtaata

SEQ ID NO: 498359 - DNA, 635 bp, Homo sapiens
cagtgtataggtctttgttcttatyactgagctataattaaaatctagtagtatttctgaatatttgtattgtttaaaatggattaaaatgtagaaatactccctttcccacatataactttttgttatattttattgaagaaaaaattgtgatggtctgtaaagcagaataatgtattatctaagtaagaataatgtatctgtttaattttttaattttatagaaaatttaggcaaactgaaaggaggttaaaatataatttgtgaagaattgaccagaaagattggcagcattaacattgctgaacgtttctctgaccttaaacatcatgctggggtggatctgagctcagtgaaatcttcttgaacaaaattcctgaaaactttcattatgtaaaaatctttctcaacaactaagcgtacatttctccctcctatagaatattttggaaatgttgagcaaagatggaaaagaaaatgacaggcattgggattggctactcatcaaacacttctatatatttggctctgagttgtatagaatttgatttgtggttgttctcacaatgaggtgctttcccccagagagcatctgggagcaatgcaccacttaacacttgaagaagattgactga

SEQ ID NO: 498360 - DNA, 635 bp, Homo sapiens
cagtgtataggtctttgttcttatcactgagctataattaaaatctagtagtatttctgaatatttgtattgtttaaaatggattaaaatgtagaaatactccctttcccacatataactttttgttatattttattgaagaaaaaattgtgatggtctgtaaagcagaataatgtattatctaagtaagaataatgtatctgtttaattttttaattttatagaaaatttaggcaaactraaaggaggttaaaatataatttgtgaagaattgaccagaaagattggcagcattaacattgctgaacgtttctctgaccttaaacatcatgctggggtggatctgagctcagtgaaatcttcttgaacaaaattcctgaaaactttcattatgtaaaaatctttctcaacaactaagcgtacatttctccctcctatagaatattttggaaatgttgagcaaagatggaaaagaaaatgacaggcattgggattggctactcatcaaacacttctatatatttggctctgagttgtatagaatttgatttgtggttgttctcacaatgaggtgctttcccccagagagcatctgggagcaatgcaccacttaacacttgaagaagattgactga

SEQ ID NO: 498361 - DNA, 659 bp, Homo sapiens
aaggtcatataggtggtgttagtggctaaaccaggctttgacctccaccctgtttgattgaaaagcttgtattctgtcactgcaccagatcactctgcatgtctaatggagatatctatgcttagcttctgaacttgctaaggaaaacaaagactacagtgaatctccaaacagaagctactataccttgggcccccttgatttcttcttctggggtatgctaacgattgatttattaaaaatcagaaacacaaaccctctaggtatggtatcacrgatgcaagtgcaggtactgatagaaatgcagcaacagttgacattcactgtgattttgtagaatgctctgaaacactgctaataaagaacaacccatgaaatatactatgtcttgtaatggagtattggtaaaccatttaatatgtaccttcacctgtgcatacagacttgatggctatgcttagaatgtgctatcacaagaccatttcctaaggtttttcttggttaccatcctttcctgagctttatgtttatactgcattttccattctaaaattcattcacaaagccttctaggctgaggagcattaagcatttcccccagagcctcagcatgacctattgcattcctctctttgcactttttgtctgaagacatcagc

SEQ ID NO: 498362 - DNA, 609 bp, Homo sapiens
tttatgaaatctcttacgctgtctgtccctaatctgcctatacattagcaaggtgtagagaagcaccatgcttctgtccaacrtaacagggttagaaggtcacttttctgcatgtttctacattattttcaaaactgccattcatctgcgttttcaaataaatatcaacaaaattacttttgttagcctgtagttactttgctatcctacagccttagtcacatgtaagcagattactagagcagcatgtgtttcaaatctcttcctgggaaggagtcaacaggtggaaaaacaaatgctaagcaaaccatctagaagactccttctcaaggctttaaatgcaaaacaatgtggataggacacatggatatatcgtgccatcttctgctttagaaaatgattactttgcacctgtgacccatttactaaacctcaaaactcttggtttaagatatgttgttttgtaattaagcttttgaaatgcacatttgttggcttttgtcctgtgcttgttattatctgaactatgaccaattataaatactaagctatttagagtcttaaaaacaaatggatatctatacttcgtgatttacacaaatattaact

SEQ ID NO: 498363 - DNA, 608 bp, Homo sapiens
ttatgaaatctcttacgctgtctgtccctaatctgcctatacattagcaaggtgtagagaagcaccatgcttctgtccaacataacagggttagaaggtcacttttctgcatgtttctacattattttcaaaactgccattcatctgcgttttcaaataaatatcaacaaaattacttttgttarcctgtagttactttgctatcctacagccttagtcacatgtaagcagattactagagcagcatgtgtttcaaatctcttcctgggaaggagtcaacaggtggaaaaacaaatgctaagcaaaccatctagaagactccttctcaaggctttaaatgcaaaacaatgtggataggacacatggatatatcgtgccatcttctgctttagaaaatgattactttgcacctgtgacccatttactaaacctcaaaactcttggtttaagatatgttgttttgtaattaagcttttgaaatgcacatttgttggcttttgtcctgtgcttgttattatctgaactatgaccaattataaatactaagctatttagagtcttaaaaacaaatggatatctatacttcgtgatttacacaaatattaact

SEQ ID NO: 498364 - DNA, 435 bp, Homo sapiens
gctgccattgcttttaatgtgtctgacacatccaatttcaatagctcaatgaaaatgtcatgcgataaaacagagagaggcagacagagaaggtgatgagagtcgatgtgcagacacacccttggaaagcaagcaacaaaaacacttgttcaggtgggattcaggaaagggtcttcctgccagtagtttgggaaattaattatattacatagaaayatctctttttatatattcatttttaaaatgttaattctccatatttgttatttttaccaatagaatctactcactctccccgctatttcacatcaagtagaacctgcctggctagtgttcttaatttttcatttccaccagaaatatttactcaggatgtagtcatgttatttgataaggtaaataattctataatgttagatgtgtggcatccattca

SEQ ID NO: 498365 - DNA, 466 bp, Homo sapiens
gagtcttgaataaattagctgacttccttaaggatgcagtttgtgactgaaaggcagrgcattaaaactaaggtctgctgaactaattccccaccagaagtccaaactaaaacccccaccaggccgtcctccaaacaagatcaatgaactgacaacacaaacgtctgatgcggttgtattgaagttgacgaatggggagagcattacctcccttggattccctataaagagttggctcctgcttcacctatcagtgcaagcaaaggggaaggtgcatggaaggagaaacaatcaggaagcagaccatggtgaagaagagcaatgcagaacttctctgcactcatttgttcagctaccatttatgcagtccctcctctgtgccaggcattctgctgggtaaacatatatcttggtgtttgttatcgagactgaggcatgaccacatatggcaatgcaaagagaggca

SEQ ID NO: 498366 - DNA, 640 bp, Homo sapiens
ctattaatctattcttgagggcagagccaacattaatttattcatgaaggaagagggatcaaattttcaacacatgaacttttggggacacattcaaaccacagcaatctaattctaaattttcagccccttgaaggcaaaatatttttttctgattggtcttggtctcttttgcagcacaaggaaggcattcaataaatgataattgaatagacagctggaatgacaaaaggactaataaatacatacatgaaaaacattgtactctctgctaatattctcttggggcagataaatactacaggcatgatttgacccacccagagcagagaataaagggtagaaacctagkgttagaacagttgccagtgggagaaaccaatggcagaggacataggccttgcacatagtatatgttcagaaaattatgtttgaattttatctgaattgcagagtttcagactaggtttgggattttctgcacacatatacaaggacaacagattgccaaaaaaaagccaagaaattaatgtatgagacagggccctccattccatggctatacagtagccctatctcacttttgcctcctgatgtctaaaaccttttcaaaagatgatggtgaaagataaatattgaa

SEQ ID NO: 498367 - DNA, 575 bp, Homo sapiens
ttaagcacatttttagatgaccactggggacaggtcaatgacagatattaagagtcactccaactccacaggtacatctgaacacagagggctagcttgtctacctttggtattgagtaatgttccattggcttcattaagctcatgttgactcaataatttttctagtgaactcagagccaaaaataggtactttatattatctgttagagttcaagataattgcrtaattattgtggtatctgaaagccattgaataattgtagccatgttattttaacatgaaaaaataggaaagtcttaaaacaaatgtgcaaatgaataatacttttttttgttttgtttgtctgtttttgagacggagtcttgctctgtcaccaggctgagtgcagtggtgtgatctcagttcactgcaacctctgcctcctgggtttaagcgattctcctgcctcagcctcccgagtacctgggactgcaggtgcatgtcaccacgcacagctaatttttgtatttttagtagagacagggtttcaccatgtcggccaggatgatcttggtgtcttgaccttgtgata

SEQ ID NO: 498368 - DNA, 575 bp, Homo sapiens
ttaagcacatttttagatgaccactggggacaggtcaatgacagatattaagagtcactccaactccacaggtacatctgaacacagagggctagcttgtctacctttggtattgagtaatgttccattggcttcattaagctcatgttgactcaataatttttctagtgaactcagagccaaaaataggtactttatattatctgttagagttcaagataattgcataattattgtggtatctgaaagccattgaataattgtagccatgttattttaacatgaaaaaataggaaagtcttaaaacaaatgtgcaaatgaataatacttttttttgttttgtttgtytgtttttgagacggagtcttgctctgtcaccaggctgagtgcagtggtgtgatctcagttcactgcaacctctgcctcctgggtttaagcgattctcctgcctcagcctcccgagtacctgggactgcaggtgcatgtcaccacgcacagctaatttttgtatttttagtagagacagggtttcaccatgtcggccaggatgatcttggtgtcttgaccttgtgata

SEQ ID NO: 498369 - DNA, 575 bp, Homo sapiens
ttaagcacatttttagatgaccactggggacaggtcaatgacagatattaagagtcactccaactccacaggtacatctgaacacagagggctagcttgtctacctttggtattgagtaatgttccattggcttcattaagctcatgttgactcaataatttttctagtgaactcagagccaaaaataggtactttatattatctgttagagttcaagataattgcataattattgtggtatctgaaagccattgaataattgtagccatgttattttaacatgaaaaaataggaaagtcttaaaacaaatgtgcaaatgaataatacttttttttgttttgtttgtctgtttttgagacggagtcttgctctgtcaccaggctgagtgcagtggtgtsatctcagttcactgcaacctctgcctcctgggtttaagcgattctcctgcctcagcctcccgagtacctgggactgcaggtgcatgtcaccacgcacagctaatttttgtatttttagtagagacagggtttcaccatgtcggccaggatgatcttggtgtcttgaccttgtgata

SEQ ID NO: 498370 - DNA, 640 bp, Homo sapiens
cctgttttagcatcttgtggaaggtttaacttgcaagtggtaaaactagatatttgtcttcaggaatgtctaagtaaagtgctaacacagtggactggctcttcctgacggcttatggtaaaattcaaattcaagatggaaatgttaagcaaaaaggaaccagaaattaaagatttggaaaattctcaggctatctatattgaaaagaatgagaaaagcctttgcagaaaggtcactccaaaagaccaatcagccaacacaacagaagctcaggactattgttcaagacaatgaaagaataactctaaagacctgtcactcattccttctttcctatttttcccttttagaatggaagtggcacttccattcctgtttccccattgtattttggaagcacacaatgtttggtttcacaggttcacaactggagtaaaaatttgcctcagggtaaatcataccttgagttttcactcacatctgatttagaagacayttaaatgagatactgaactttcgatttttgagttgactttggaaaaagttaaatttggccaggactgttggaatgaaatgaatgtttttttaatgctttttgcatatgagaaataaattaattttggggggccaggatagaatg

SEQ ID NO: 498371 - DNA, 607 bp, Homo sapiens
ctgcttgggaggctgaggcctggagaatcgcttgaactcgggaggcggaggttgcagtgagccgaggtggcgcccttgcactccagcctgggcgacagagcaagactctgtctcaaaaaaaaaaaaagaaaaaaagaaaagagaaaaatatgtaaccccagagaaaaattctattaagaattaatattcaaatctaattatctctgggttatatataaaattaaaacctcttttcctctatttttcatatttatgttttctaatttttctactttttttttgtgagttcagaagcagtatatatattcagcatggagatagattctgtaattaaactgtctggctataaacccaagctttatrccttagtggctatacattgatggacaagtaattttaccctttagtgttttgggttattttatctgtaatatggagataatagtaatattaaacccacttacaacaatacttggcatgtaataagctttcaataaatgttagcaattactaattgcaaaactttttaactattgtttatgcatagttagtctatgggctttatatgtattatctcattttattttcacattaacctagtgatata

SEQ ID NO: 498372 - DNA, 636 bp, Homo sapiens
taatttgggtcaaatgtctacccctgctgattcaggtacactcagaatacaaagcattgagtacagatgtagccactaagtaatgggctatatccagttatgaaagaaattattgtgaatcaagaaatcacctctgtttgtgatttctaaaagcatgttactaaatgtccttttgcctataggagaaagataacatgctcactttcttgtctttatgcttgagagaatatttcttacctgataaatacctttttgtcttaacccctttaccatgcattaaagaaaatcaatttgggaatagagagttggagagctatatgtttccaaattayttcattttatgacttcctggtaggaattttctttcaatataccatcttcttttaccaacttctcttagtttcttccttttgtaaaatttgagcttattacaagaaaaataaacaacacaaataagtaagttaaaccaccctgatttagtgttaggaaagtcagaaggaaacagaatttcaaggatgagtagtcaaaactgttaaatatcatacagaatgtataaaaaatatgaaatggagaaaaagacattttattttgtaattataaccgatgaccttcagaaatgcagcttcattaatatag

SEQ ID NO: 498373 - DNA, 606 bp, Homo sapiens
catgacagaaagtggactgagggagacgtttgggtcaggagactaactgagccaacaggtcctctgtggaggcctggacttgcgtagcccccactcctgccctgaatcacaaagaggcgacagcttaagatccatgcacctgccagaagggacaggaatgggggattcaagccaaatagagtgagtgaggcagattcctagaggtctttcccactccctctggcccacagattcccttttagcaaagtcactttaaagtctttcctggggactgtgatggggtgtgagggaactgagcccaaggccaaaagaccagccacagtgcacctcccctactcaaccagaggggaagatgcctctttgtgggtgtgtgcrcacacacacacacacacacacacacacacacacatatacacaaaacctcccccacacagagacggagcagggcctccctgggcctgggagaccttgaacctccagtcaccactctctctgtgtggcccctggcttcctcgtacccctcccagctcagcgacagcctcctgaacttcctggcgggcttccaggcctcagagaaagccgctgtctctgccacaccattactgt

SEQ ID NO: 498374 - DNA, 611 bp, Homo sapiens
ggtgctgtggcttgcacctgtaatccgagcaattcagaagggtgaggtggaagggttgcttgaggccgggagtttgaaaccagcctgggcracatagcgaggctttgtctctggtacaaaaaaaaaaaaaaaaaaaaaaaaaaaaacagaagtctttttagctgggcaatgtggtgtgtgcctatagccccagctactcaggaggctgagacaggaggatcgcttgagcctaggagtttgaggttgcagtgagctatgatcatgcttctgcactccagcctggggagcagagtgagaccctgtcttaaaaaaaaaaaagaagaagaagaaaaggtagcaggtgttaattatggaatctaggtgaggtaggcatatgggtgttcattgtataattgtttctacttttatggatgtttgaaattcttcctaataaaatgttgggaaaatctgcatatgaaaatcactgtggctgcagtaatatgaatagattggatggatacacaaatggatgtagagagaccaacttaaggctcatataatctgcttccagccacaacatactagtgctaccagactggacctttcaccataaacaactacaaaagactggg

SEQ ID NO: 498375 - DNA, 667 bp, Homo sapiens
tatgaagtgacttcttaagtagcagtatttgaaacctgtcatgaagatatgtgatgatattggtttggctcatgtgattaagtgatctgtttcgttcagagagagtgatggcagaaaagagagcccatggttttgaagaatacctctttttttttttttkggggggagatggagtcttgctcttggagtacaatggcgcgatctcagctcactgcaacttccgcctcctgggttcaagagattctcctgcctcagcctcccaagtagttgggattacaggtgcacaccactacgcctggctaatttttgtatttttagtagaaatggggtttccctatgttggccaggctggtgttgagctcctgacctcaggtgatctgcccgtctcggcctcccaattgaagaatacctcttaaaacatgtttaagttttaaaaagattgaaacaaagtctgtaacttttagcatgcaaccttcatggattctcatcattgggaaaaattttctactggaagcattggcatgtcttttgtagccatggaaactaacccttcaaagagagagaagctcttctatcctcaaacaaggagatacagtgaaaggaaggcatatttcatactcagatgcctgaaatactttatttctgtgtgagggtgtgtgtgtgtata

SEQ ID NO: 498376 - DNA, 559 bp, Homo sapiens
cacccctaggggtgagtgctgttccagtctcttcggtatagaggaggaaactgagtttgtgggctgcactacctagagccatggagcctggaggtggcagaccaggtatgtttggttctggagctcaagctcttcaccaccatactgtctgctcatctggtagctagagggggaggccgggcctcaaggaggccatgastgggtagaggctgagcaaaggctgagggagccacagcccagtgcccctgccagcccttactccacaggcctggttcaccagctgccaagagcttgatttccttctctgcctcagtccagagaacagctggacacctggtcagtgtagatggtggagggtgggcctgaatgactgaaaaggggttgtgcatgggtgtgtctggagggctatgacgaataccatcttttctccagaagtcaggggctgtggtcctgctctgcaccaccattctaggtctgagccatgcacagggaccactaggaggttgcttagggagtcccagcatcaggccacatctccctggcaggctggactttggga

SEQ ID NO: 498377 - DNA, 559 bp, Homo sapiens
cacccctaggggtgagtgctgttccagtctcttcggtatagaggaggaaactgagtttgtgggctgcactacctagagccatggagcctggaggtggcagaccaggtatgtttggttctggagctcaagctcttcaccaccatactgtctgctcatctggtagctagagggggaggccgggcctcaaggaggccatgactgggtagaggctgagcaaaggctgagggagccacagcccagtgcccctgccagcccttactccacaggcctggttcaccagctgccaagagcttgatttccttctctgcctcagtccagagaacagctggacacctggtcagtgtagatggtggagggtgggcctgaatgactgaaaaggggttgtgcatgggtgtgtctggagggctatgacgaataccatcttttctccagaagtcaggggctgtgstcctgctctgcaccaccattctaggtctgagccatgcacagggaccactaggaggttgcttagggagtcccagcatcaggccacatctccctggcaggctggactttggga

SEQ ID NO: 498378 - DNA, 513 bp, Homo sapiens
tgtgataggaaagggccacaaggtgtttgcctgcacccacagtacattctccagccctcacctgcctcatggctaaaggtgcatcytcccatggacccaccaggcctgcccagggagaggggtagagcccaagtggttgaagctaggattaccttaagtctgctctggtagtccatgatttcagcactcagctggaacttgagggtgttgagctcctggtgtgcagcctcttggaggctctgggcccgctgctctgcctgggcgagctgggcctgcaggccaggcagtgagccggctgctgccttggccgccttcagcttctcctgcaagctctccttctcttgctgcagcccagctacttggcgctccaggccctctcgctcccttgaggctgcctctttggcgtcctggagctcctggacagcacaggccagtgcctcctccactcgctccttttccacggtcagtgcgcaaacctggatgcccagctcagctgtgtctgtgttggcccgg

SEQ ID NO: 498379 - DNA, 459 bp, Homo sapiens
atacccaagtcttcccacagcctccaactggttttgttctcttcctcctgcaacatctcatcatttggcagctcctgaggggcacttggccatgtctgtcctgtccctcccattcctgctgctgctgcagggtgcgggccccctcctcctctctctctctcactctctgagaattgcctcctagctgacaccgcgaccttcaagggctattcatggtaactgaatttagcaaaaatgactmctttctcctcattcctgtcctttaagggttttgattactaactgcgacacacgaagaatgtgtaaaaatacttttaagggaccttgcccttaaaagtatctacaggtattctagaaaaccagtatagctaaagcctgccctggcttgagtgctactggggaaggaagagctcagcctcacacccttcacccccttgcagaagggagtgagtctgccac

SEQ ID NO: 498380 - DNA, 661 bp, Homo sapiens
ctgcttggccagtggccgatagaggccccctacattgcttgccagtggtgtcatttagcttgttcctctctcccttgtatttcctggaagttacatctacatattgattagacccaagttaaacatctttggctagactgcgtcacaggggatgctgtgacatcggaattcatgaccccaggagacatggaataactggttgtcccactattcctgatgctaggatcaacctttaggtgagggtgatggtggtctgatccatccattgtacaattctgtttttctcctgaagaccagaaccacatcatcatactgttattttggcaccatacagatgtccaagtcccatcaaccactcccctgaggtcctcaagcacaggttgatagtccttgcctggatctacattctcattaggaattgcaagattatgactttcatccctctcattaggaattgcaagattatgactttcatccctctacatttagctggcattcttcaagctttatgttgtcaactggagctatttgyttaccttgaaatatagttcctacctgaaggacattagacgcacttttctttcagttacacaatgtcaaaataagacattggtattagctgcctcgaatgagtttcttctggcagtattctttttgagta

SEQ ID NO: 498381 - DNA, 497 bp, Homo sapiens
ttctggaaaccagccctaactggagtctggcacaagggaaacaatgtctgcaaacccaaacagcatcataagcctgaacacagatggcaacacactcctttaagacttcttggtgctttggtgacactgcccttgtgtsagcccaaggcaggagaccttctctgtctgaccttgggagtgtgctcttggctggtgtcaagttcccaggtcgtggggtgagctgttcccagccactcattacacaagctgatttttcaaagagcctgtgtcgccaccagcataatgagccctaagaaactgcctgccaggcctgtggggtgtggtgggcttccccactctggctctgggtcatcacctcacagggattcaggaagtaaatcagagcttccatagagaacatggtcaccatggggatgctattttcaggaactcagcatcttgccctccttgctcctccgtctcggtctgaggtcattactaaccaacaaaaggcacag

SEQ ID NO: 498382 - DNA, 499 bp, Homo sapiens
aaaaattctatttctctgatttttcaattttcctttattgagcataaattatttgtatgttgaataaaataatgcacttaaaacaccatgtagaaattgtgaacattatgttgtaattattgtaaaaatattgtgagctattattcccagagtgaatagaataatataattcagggatggatgaagtgtgtctactccacactgcctacctagcctctctttataaacagacctctggtgtcctgagagctcaggtgaytgctgtcagacatgggtacaaatctcttaacccagcttgtgaggccctttacagatgggctgcctgacctcgatagggataggcccatcttcttgtccctcctccttcccttcttcccctctgcctatgttcaggcatccctgcgatgcccttctgtggctgggccctgcctccagggtttgaatgctctgctccctctgccaaggccatgccctgcccagctcatgctccctacacctt

SEQ ID NO: 498383 - DNA, 518 bp, Homo sapiens
ctgtggagtttttcagttcccgtgtctttgcctgctcttggtccagtccacctggaatccagtgtgttgaggtcaagcactctgtagagtccacttggacctggaggacaacactttgtgccaaacgtgcctccttgtttstgggtaagtgaatctgacagaggttggcatgttcttgaaggtggtgagtggcttcagtggcatgatgaagaaggcatctggtatcgatatgaagacgtaactgttattcagagagatgagccatcaaggggctgccccttttaaaaaaaaaaaaaaagagtgatctgggatcccaaggacgcttccttctggctgatttctagtgtaattcagtctagccagggctaccacctgcagcagtggttcttcaattgctatttgcatttctttaaagtaccccagtccttaattctcagtaaagttgggaatctgattaatatcagaataaagctatttataaaagccactcttaaatatgccaagatgttttgtagctg

SEQ ID NO: 498384 - DNA, 518 bp, Homo sapiens
ctgtggagtttttcagttcccgtgtctttgcctgctcttggtccagtccacctggaatccagtgtgttgaggtcaagcactctgtagagtccacttggacctggaggacaacactttgtgccaaacgtgcctccttgtttgtgggtaagtgaatctgacagaggttggcatgttcttgaaggtggtgagtggcttcagtggcatgatgaagaaggcatctggtatcgatatgaagacgtaactgttattcagagagatgagccatcaaggggctgccccttttaaaaaaaaaaaaaaagagtgatctgggatcccaaggacgcttccttctggctgatttctagtgtaattcagtctagccagggcyaccacctgcagcagtggttcttcaattgctatttgcatttctttaaagtaccccagtccttaattctcagtaaagttgggaatctgattaatatcagaataaagctatttataaaagccactcttaaatatgccaagatgttttgtagctg

SEQ ID NO: 498385 - DNA, 518 bp, Homo sapiens
ctgtggagtttttcagttcccgtgtctttgcctgctcttggtccagtccacctggaatccagtgtgttgaggtcaagcactctgtagagtccacttggacctggaggacaacactttgtgccaaacgtgcctccttgtttgtgggtaagtgaatctgacagaggttggcatgttcttgaaggtggtgagtggcttcagtggcatgatgaagaaggcatctggtatcgatatgaagacgtaactgttattcagagagatgagccatcaaggggctgccccttttaaaaaaaaaaaaaaagagtgatctgggatcccaaggacgcttccttctggctgatttctagtgtaattcagtctagccagggctaccacctgcagcagtggttcttcaattgctatttgcatttctttaaagtacccyagtccttaattctcagtaaagttgggaatctgattaatatcagaataaagctatttataaaagccactcttaaatatgccaagatgttttgtagctg

SEQ ID NO: 498386 - DNA, 670 bp, Homo sapiens
caataaaaaaattaacaaagttattttgaaaaaagaacatgaggtgtgggaggaatattataaaggggcaacttcctagggtgagggaactgttctatatcttaattgcggtagtgatcacactgtataattaatgaaaattcaagcactgtatacttgcttgaatcttaatgtatataagctatgcctgaaaaaaaagaataaacgaagccccactggtattaagttagagcccccgaggtggtccccagcgccggcactggagaggccagtgctcctcccaaygccacacctggggagggcccaggcagcagttgccacttacatcagttctccagacttcagcaggcagatttccgaatcctgccccacgggcatgtcttcagtgtcctcaggcgttagcgaggttgatgtagtatccctgaaatgtcacaaatgagaacacagtcatttagctatcaacacacagggtctcacatcctggggtccgcagtcttggagtcacaggcagccaaatccagatgcatgggggatcctttaatcatagaggccatgacagagaccctggcagattttgtgggtagagggagggctgcaggggccagggccaagcaggtggacaaggagaagacaatagggctacagcagtttccctggagcagctgtaggg

SEQ ID NO: 498387 - DNA, 501 bp, Homo sapiens
tgggatttggaggataagttagaagtttaccaggtagaaaagagctaaaggcattctagacatatgcaaaggaaaacaggctgcagtagtagtctctcaactttttaaaaaatcctaacccaaaatgtatacacatacacatccaatacacacacacacacacacacacacacacacacacaygcacacacacagttggaaccttatgcataatgccctctgttattttctgatctatttctttttgtaaatgctagtggcaacccactaatttgttgtgatatgtgcacaagtgtttggggaaagtggaggctgtaaaggtaattttgagctagaccataaagatctctggatgttaggctggtaagatggaaccctttttagttctgcctctccttccttccctgtgaagccaaacactacaaattccttttccttctctcactgtctgatgaactccctgcctctcaggcttgtctttgtcacctttagtccctccat

SEQ ID NO: 498388 - DNA, 501 bp, Homo sapiens
tgggatttggaggataagttagaagtttaccaggtagaaaagagctaaaggcattctagacatatgcaaaggaaaacaggctgcagtagtagtctctcaactttttaaaaaatcctaacccaaaatgtatacacatacacatccaatacacacacacacacacacacacacacacacacacacgcacacacacagttggaaccttatgcataatgccctctgttattttctgatctatttctttttgtaaatgctagtggcaacccactaatttgttgtgatatgtgcacaagtgtttggggaaagtggaggctgtaaaggtaattttgagctagaccataaagatctctggatgttaggctggtaagatggaaccctttttagttctgcctctccttccttccctgtgaagccaaacactacaaattccttttccttctctcactgtctgatgaactccctgcctctcaggcttgtctttgtyacctttagtccctccat

SEQ ID NO: 498389 - DNA, 483 bp, Homo sapiens
tacagatgagtgaagaagctaaactcctctatgagaaagaaattcactggttggattgagaaacaaaatagaacaatctccttcccacgtcaccctattccacctgcaagccccatggagatcagatcttttcagtatatgtggcttttctccattctgagtttgtatgctttctcatccctcatgccctgaacatttaagagctgaatactgtatgaaaattacctctaactgaaaactcctactgactcttcaagaagcagcccaaacagccccacttctgcgtcatctttcccagatgcagggggttgcatcatggttaagtttcgtgattctctgtgttctggtagccctctttttatgattctcaagggccagtgacctctgcatctgctacgtgtctgctgcccatgcatctggaytgtccccaatgcacagtgagctgctgcttcactttttagatccacagccctaagagcagtc

SEQ ID NO: 498390 - DNA, 575 bp, Homo sapiens
ttttacctccaattctgaccacaacagacaactcctccagtccacagctcctcgaaggctctccctcccttctctactggccttcaaattggcctatttataagcaatgcttaagattcccccaaagcaaggtcataaactcaaatcccaatcagggccaggtggatgacttatgtggaagaagtgagccgggtgaggatttctacttcgagaaaycttgctcgaagcgctttcatgattctctcctacacaacaaaccctgaactcttagaagcagctcttggcacaggagcctccaacccgtttttcagccggctttctctacttgtttctcattccatgatcacagaaaacagctccattaagactcttttcaggtctaccaaagagctagtgattggtacgttctgcttaacctctaaatctaaaaaaccagtgactttgccagcctctacaattagggcaactaagataggaatagcagccagtaaattttcctgcattattgattttcactaagcgtgtggcacattgtattttctccaatcgagtggagatacttgtttcctcagcac

SEQ ID NO: 498391 - DNA, 575 bp, Homo sapiens
ttttacctccaattctgaccacaacagacaactcctccagtccacagctcctcgaaggctctccctcccttctctactggccttcaaattggcctatttataagcaatgcttaagattcccccaaagcaaggtcataaactcaaatcccaatcagggccaggtggatgacttatgtggaagaagtgagccgggtgaggatttctacttcgagaaatcttgctcgaagcgctttcatsattctctcctacacaacaaaccctgaactcttagaagcagctcttggcacaggagcctccaacccgtttttcagccggctttctctacttgtttctcattccatgatcacagaaaacagctccattaagactcttttcaggtctaccaaagagctagtgattggtacgttctgcttaacctctaaatctaaaaaaccagtgactttgccagcctctacaattagggcaactaagataggaatagcagccagtaaattttcctgcattattgattttcactaagcgtgtggcacattgtattttctccaatcgagtggagatacttgtttcctcagcac

SEQ ID NO: 498392 - DNA, 575 bp, Homo sapiens
ttttacctccaattctgaccacaacagacaactcctccagtccacagctcctcgaaggctctccctcccttctctactggccttcaaattggcctatttataagcaatgcttaagattcccccaaagcaaggtcataaactcaaatcccaatcagggccaggtggatgacttatgtggaagaagtgagccgggtgaggatttctacttcgagaaatcttgctcgaagcgctttcatgattctctcctacacaacaaaccctgaactcttagaagcagctcttggcacaggagcctccaacccgtttttcagccggctttctctacttgtttctcattccatgatcacagaaaacagctccattaagactcttttcaggtctaccaaagagctagtgattggtaygttctgcttaacctctaaatctaaaaaaccagtgactttgccagcctctacaattagggcaactaagataggaatagcagccagtaaattttcctgcattattgattttcactaagcgtgtggcacattgtattttctccaatcgagtggagatacttgtttcctcagcac

SEQ ID NO: 498393 - DNA, 637 bp, Homo sapiens
gtacttatcccccctcccccagttgcgatttttttctaaaatggctgctgaatggcaccatgtatcaggagacaatcttgatcagctaatcccattaggagatggcccctttgctggacaatctcatcagaaattcccctggaggaaaaattagtattaaatttggttgagggaatcctaattacatacaaagacagcccctataaaatatgtcctttgtgtgataagaccgaaaagacccaggcattcatccttattttgctagtgctcacttcttagagattttatttttaccatagaaacaataaatacagcaagtgtcttccattttcagtgtgggatagaatccttactgaaattaggagcattgggagcctctgagactaataagtctacagaacatctggaagaggggcaaataaaatgtttcttgcaggatttttagggagaaacaaatgggacttggggagtaggaggtaggtgactgmaagtgctttgtttcacatgaaagataaaacatgattaggccaggaggttcccaaggaaccctgaataatacaaaccaaagcctattaggcatcacgtacttcatgtgtgaggggttgtttgccagtccagggcctatttgcctctgatc

SEQ ID NO: 498394 - DNA, 375 bp, Homo sapiens
tcccaacctcgctactaagggaacatgaactttactgcagtgttcaacaccagttttcattttactgcacaagcaaacttgtattccaccaggaagatgaaagatttcgggttctgaggctgtcagacatttccacttaygaatttagtgaaactcctaaatcatggctgaggcacagcttccgaaatctctcccctcattttcaggttttctaatagttccctgctcttgtggtatcttggtgcaatcacgctaataggaacaatttaacggagtcctggggaggcaaaggtttggaggattacatttcaacactcagctccttatcacagagaaacacccttccttaatagactccctggattctagacctgc

SEQ ID NO: 498395 - DNA, 597 bp, Homo sapiens
tttggtgttatttaatagtgtttattaaataaaaactaagtagaaaattatcctaaggaaaaatgttcactgcaacattgttttaaaagggaaaaaaaaaaagacattgccaacaagagattaattagaattgcagagtagttaaaaacacagactcggaaaccagactgtccacgttcaaatcctagtcctgctactcactagctggatgactttggacaagtgacttaatttctgtatrtctcatttctccccatctataaaatggagaaataatagtacctactacatagttgtttaaggacttctaaaactctcagaacagtacctagagtgcgataagcactataattaagtgttccctcttgtagtagtgatgtggatacggtggtggcagtagtagtacctccatatatgataatagatgtcttccacacattgctaactgaaaagatcaaattatgaaacagcagaggtgccgcctatatttgaacagcttgaatcttgcacaaacccagggaggcagatgagagctgtatacaccaggaagagggcgcctttttataatttgcacaaaaagcacacagcacgtgacag

SEQ ID NO: 498396 - DNA, 619 bp, Homo sapiens
attgcaatcccggtttcatcacttactagctgggtgatattaagcaagccactatcctaaaaacctcctcacctgcaaatgagaatatttctagaatattctagaagaatattgtgaggattaaagggaataatccatacaaagcattgagcatcataccagacacgcagcaaacacacagmcaacatctaagagggctgtctcttatcatcccagttattttggaaagaatttgccttagagggaattcagatataatagtttatgtgggtaaattcctggcctcttcctcaatttgtggaactataagttatgattaaaaaataaaaggcaacaatagtcagaccacagaggaccaatgtaggtttactctcagaacagttagacaagttgcaatgtcctcttcaacccaagagcagattcaaacatttttaccatttcttgtggcctgtttcttttatgggtttaaaatgatttgatctatttacaaatgagattatccatagcttgggcttgccaagaattaagtaactagacaatacagtatggcattaatttctcttctgctgtggtcaggagtaggccacagggcatctccatgtctgccaaaagccatttg

SEQ ID NO: 498397 - DNA, 619 bp, Homo sapiens
attgcaatcccggtttcatcacttactagctgggtgatattaagcaagccactatcctaaaaacctcctcacctgcaaatgagaatatttctagaatattctagaagaatattgtgaggattaaagggaataatccatacaaagcattgagcatcataccagacacgcagcaaacacacagacaacatctaagagggctgtctcttatcatcccagttattttggaaagaatttgccttagagggaattcagatataatagtttatgtgggtaaattcctggcctcttcctcaatttgtggaactataagttatgattaaaaaataaaaggcaacratagtcagaccacagaggaccaatgtaggtttactctcagaacagttagacaagttgcaatgtcctcttcaacccaagagcagattcaaacatttttaccatttcttgtggcctgtttcttttatgggtttaaaatgatttgatctatttacaaatgagattatccatagcttgggcttgccaagaattaagtaactagacaatacagtatggcattaatttctcttctgctgtggtcaggagtaggccacagggcatctccatgtctgccaaaagccatttg

SEQ ID NO: 498398 - DNA, 612 bp, Homo sapiens
cacacttcggctatggactccagcgcctgcattctttaccatgtcataaaatgaccatacattttctcttccaacaggacacttttaagagtgaaagaagaagctattaataagtattccaggacaataagtacaaactgcaactgtcctaggcaaatcaagatgtcccaggcaaagctctaccactaggctatgctgcccctctacaatgttgctacaagagtctgctggaccctgggaaccatcaggggatctcagtatagytgaaaggacaacactgttgtaggttcccaggtacctgttacatgacaaattatagacacttgcattttggtgctcccaaaatacacaccggcatctgactgctgaaactagccttgtgggctgacttggggaccccagagcagggaacgaataagagaaacccaagctcgtatttccatggtatgagggtggaaggttccatcttcagccactgagaacaaattcttgtcaatgagaacaaagacaagtctgggtcaatttcacaccaatcataattcatcatcacatgactccctgcacagtccctcacatattatttagaggaggcagaccgcattagggggagaa

SEQ ID NO: 498399 - DNA, 645 bp, Homo sapiens
actttagcttaatggactttggagactcagaagtaggctgggaaggggataagggacaaaaaactacatattgggtacaatgtatactatttgggtgacaggtgcactaaaatctcagattcaccactatacaattcatccatgtaaccaaaaaccacttgtactccaaaagctattaaaatatttaaactttagcttagagttcaggagatatggggtccaaaccaaagccaattcactactctgacaagtgactcctgacaagttaccccagggaacttctaaaacattgtaacatctcttaagccaatacytacgtaagccgggtttaagccttttaactcacttactcttcacaacaacttagtaacattgatgctgttatcatccccattttacagatgaggaaactgaagaaaagagagaatgactttgcatatagtcacacaatggaatactacacagcctttaaaaagaagggaactttctcatctgcaacaacatggatgaacctggaaaacatttatgctatgtgaaataagcccggcacagaaagacgaacaccacatgatctctcatatatgtgtgatatgatttggctccgtgtccccacccaaatctcatcttgaattgtaatccccacat

SEQ ID NO: 498400 - DNA, 582 bp, Homo sapiens
agggtgtaactctgggtggaaatgattctataagagcttttgaattttctttctatctccagtgtagtttagctttattaatgaaggaatattcattcaagttgcaggaagtataacttaagaaacaagtgataaattcagttcaggtatgagacacctagaggaaattgggtggcagttggaagtgaaggagtgtgcatgaaatttcagaaragaagattaagctcaacattctggttagaaaatcatcagtgtatacatggtaattgaggtcatggatgaaaataacttattttccccatggtagctttttaccagtaagtcattaatatgtacctttcttttaagacgttaatatttttattggaaacataattatccatagaaaaatataattaatgtttaaaatgcagaaaacagcagtgggaaatatatggagaaccagatttttatctctttaaaaataagattctatcataaagacagttgtattctcagccaatctttaaagatagacatctgcaagtatgacattgattaaatatattttcataaactaatccaccataatgatatttataa

SEQ ID NO: 498401 - DNA, 582 bp, Homo sapiens
agggtgtaactctgggtggaaatgattctataagagcttttgaattttctttctatctccagtgtagtttagctttattaatgaaggaatattcattcaagttgcaggaagtataacttaagaaacaagtgataaattcagttcaggtatgagacacctagaggaaattgggtggcagttggaagtgaaggagtgtgcatgaaatttcagaagagaagattaagctcaacattctggttagaaaatcatcagtgtatacatggtaattgaggtcatggatgaaaataacttattttccccatggtagctttttaccagtaagtcattaatatgtacctttcttttaagacrttaatatttttattggaaacataattatccatagaaaaatataattaatgtttaaaatgcagaaaacagcagtgggaaatatatggagaaccagatttttatctctttaaaaataagattctatcataaagacagttgtattctcagccaatctttaaagatagacatctgcaagtatgacattgattaaatatattttcataaactaatccaccataatgatatttataa

SEQ ID NO: 498402 - DNA, 600 bp, Homo sapiens
gaatattcaagggggaccttctgcgattttctggaggtaaagctttcttctctccactacactaaactccttartttttcctaactctcagctctatttccccaactcagaaagaccaatagactttgtctgagttcttctccctgctctgttatagaaacttactccaggaagtaactgcagggctcacaccatttgtttcctctctctcagtaattattttccatcattgtttaacatccagtgtctagaaaattatcatttcatttgttttgtctagtttttaaactctttcaactgggaggacaaatatgacccctcttgctccattttagtaataaacagaagttcagggtctgctatttttagtaaatactatttatgatatttaaatatctatgttattacatataaaactgcttttgtataaaataaataactgagaatagaccacaaaatcggattttaacaaaaaataataaatgataatgatttgtaatttttcaacaattgaaattatgagccaaagggacattttattatgtacttcttaatttttaattctatgaaaatatttttctctttctttaatattttatt

SEQ ID NO: 498403 - DNA, 649 bp, Homo sapiens
taaagtcaattgtggctgtgttttcataaatgcaaacacaatgtctttatcacagcaaacatctttagagtgtttcagttttttctttgttggtattactgttatttatgtaaaacagaaaaattatatggggccctaggggaagacagagagaatcttttaaaatatcaagttcactgtaattatttagtacttccaggccaaagaaaaagtaagtcaataagttcagaattgctttcagataaagatctattagacacagggaagtttcattgaggtcatttatttctcctataacacttattgctctaaatttcccccctacttctttatattttgccaattattattatagaaaacttgtagctgtcttatttagattagttttaatcttarcattcattggtttaacaaatatttatagaacacctatgctgtattaggcattggttacatcctgaggatacaatggtaagaagatagaaactcagaacagaaaaaaagggttctataaaagtcatatgttttgcatgtctgtgttattggcctgtgattcttatctcctacaaagttgatgtgagtttgagattgctctctctgtctgcaatattaactgattaaaactagacagcctcgtgatctttaggga

SEQ ID NO: 498404 - DNA, 649 bp, Homo sapiens
taaagtcaattgtggctgtgttttcataaatgcaaacacaatgtctttatcacagcaaacatctttagagtgtttcagttttttctttgttggtattactgttatttatgtaaaacagaaaaattatatggggccctaggggaagacagagagaatcttttaaaatatcaagttcactgtaattatttagtacttccaggccaaagaaaaagtaagtcaataagttcagaattgctttcagataaagatctattagacacagggaagtttcattgaggtcatttatttctcctataacacttattgctctaaatttcccccctacttctttatattttgccaattattattatagaaaacttgtagctgtcttatttagattagttttaatcttaacattcattggtttracaaatatttatagaacacctatgctgtattaggcattggttacatcctgaggatacaatggtaagaagatagaaactcagaacagaaaaaaagggttctataaaagtcatatgttttgcatgtctgtgttattggcctgtgattcttatctcctacaaagttgatgtgagtttgagattgctctctctgtctgcaatattaactgattaaaactagacagcctcgtgatctttaggga

SEQ ID NO: 498405 - DNA, 649 bp, Homo sapiens
taaagtcaattgtggctgtgttttcataaatgcaaacacaatgtctttatcacagcaaacatctttagagtgtttcagttttttctttgttggtattactgttatttatgtaaaacagaaaaattatatggggccctaggggaagacagagagaatcttttaaaatatcaagttcactgtaattatttagtacttccaggccaaagaaaaagtaagtcaataagttcagaattgctttcagataaagatctattagacacagggaagtttcattgaggtcatttatttctcctataacacttattgctctaaatttcccccctacttctttatattttgccaattattattatagaaaacttgtagctgtcttatttagattagttttaatcttaacattcattggtttaacaaatatttatagaacacctatgctgtattaggcattggttacatcctgaggatacaatggtaaraagatagaaactcagaacagaaaaaaagggttctataaaagtcatatgttttgcatgtctgtgttattggcctgtgattcttatctcctacaaagttgatgtgagtttgagattgctctctctgtctgcaatattaactgattaaaactagacagcctcgtgatctttaggga

SEQ ID NO: 498406 - DNA, 426 bp, Homo sapiens
gctgctggtttagagagcatacacggtctcacattactctttaaataaaggccagaacctctaacatggccaaggaagccctcacatctggcccataactatctctgaaggccaaccgtccttgactttccaccttgctctctatccttctgccattctggccttttaaaccctttaaatatcttcacattgcttcttggcacaatggtctttacctgyacagtttcttctacctggaatgctccttcctttacccttcaccttcacctatttgccctctatttattcttaaacctcagctcaaaaattgattcagcagggaattcttctctgtccctacagtctaaagcagcttcttgtgttatatgtttatatatttcagagcatgtccctcagtttataacggcatatttattagcatgacaa

SEQ ID NO: 498407 - DNA, 601 bp, Homo sapiens
agctggccaggaggtcatgttgaagacactataaaattctgcccctactgatgtaggttctacttggaggttcccaacaattgttagcaaacctttatttccagtggtaccacatgcacccttgggactgtacttcttgtatggaagccagacattaacttccctccctcyccaaaacactgcgacttgcaccttagtggtggtcataagagattttccagtgttaaaggaaaccccagcagtggattataatgtagtccttagatgaccatgactacctctctaaaatgaaactacacgtgattacttggaggagctacctggataattggagctacctggagggataattgacttcttatttttgtgctctgtaagcagttgtccctacagtgtggtcattcaattagaaaaggtggtatgaaatttgtttcttactttagctgaagtggtcaatgacaccactttagtcctagaagtcatcaggtcagctcaatttactggccagggttgttatggatagataggtgcaaaccaatatgaggtctgtgcaattgcttttgtaactgtattaatgtcccaggtcaaatggagccatcaa

SEQ ID NO: 498408 - DNA, 601 bp, Homo sapiens
agctggccaggaggtcatgttgaagacactataaaattctgcccctactgatgtaggttctacttggaggttcccaacaattgttagcaaacctttatttccagtggtaccacatgcacccttgggactgtacttcttgtatggaagccagacattaacttccctccctcccyaaaacactgcgacttgcaccttagtggtggtcataagagattttccagtgttaaaggaaaccccagcagtggattataatgtagtccttagatgaccatgactacctctctaaaatgaaactacacgtgattacttggaggagctacctggataattggagctacctggagggataattgacttcttatttttgtgctctgtaagcagttgtccctacagtgtggtcattcaattagaaaaggtggtatgaaatttgtttcttactttagctgaagtggtcaatgacaccactttagtcctagaagtcatcaggtcagctcaatttactggccagggttgttatggatagataggtgcaaaccaatatgaggtctgtgcaattgcttttgtaactgtattaatgtcccaggtcaaatggagccatcaa

SEQ ID NO: 498409 - DNA, 601 bp, Homo sapiens
agctggccaggaggtcatgttgaagacactataaaattctgcccctactgatgtaggttctacttggaggttcccaacaattgttagcaaacctttatttccagtggtaccacatgcacccttgggactgtacttcttgtatggaagccagacattaacttccctccctccccaaaacactgcgacttgcaccttagtggtggtcataagagattttccagtgttaaaggaaaccccagcagtggattataatgtagtccttagatgaccatgactacctctctaaaatgaaactacaygtgattacttggaggagctacctggataattggagctacctggagggataattgacttcttatttttgtgctctgtaagcagttgtccctacagtgtggtcattcaattagaaaaggtggtatgaaatttgtttcttactttagctgaagtggtcaatgacaccactttagtcctagaagtcatcaggtcagctcaatttactggccagggttgttatggatagataggtgcaaaccaatatgaggtctgtgcaattgcttttgtaactgtattaatgtcccaggtcaaatggagccatcaa

SEQ ID NO: 498410 - DNA, 566 bp, Homo sapiens
caggaggtcatgttgaagacactataaaattctgcccctactgatgtaggttctacttggaggttcccaacaattgttagcaaacctttatttccagtggtaccacatgcacccttgggactgtacttcttgtatggaagccagacattaacttccctccctccccaaaacactgcgacttgcaccttagtggtggtcataagagattttccagtgttaaaggaaaccccagcagtggattataatgtagtccttagatgaccatgactacctctctaaaatgaaactacacgtgattacttggaggagctacctggataattggagctacctggagggataattgacttsttatttttgtgctctgtaagcagttgtccctacagtgtggtcattcaattagaaaaggtggtatgaaatttgtttcttactttagctgaagtggtcaatgacaccactttagtcctagaagtcatcaggtcagctcaatttactggccagggttgttatggatagataggtgcaaaccaatatgaggtctgtgcaattgcttttgtaactgtatt

SEQ ID NO: 498411 - DNA, 566 bp, Homo sapiens
caggaggtcatgttgaagacactataaaattctgcccctactgatgtaggttctacttggaggttcccaacaattgttagcaaacctttatttccagtggtaccacatgcacccttgggactgtacttcttgtatggaagccagacattaacttccctccctccccaaaacactgcgacttgcaccttagtggtggtcataagagattttccagtgttaaaggaaaccccagcagtggattataatgtagtccttagatgaccatgactacctctctaaaatgaaactacacgtgattacttggaggagctacctggataattggagctacctggagggataattgacttcttatttttktgctctgtaagcagttgtccctacagtgtggtcattcaattagaaaaggtggtatgaaatttgtttcttactttagctgaagtggtcaatgacaccactttagtcctagaagtcatcaggtcagctcaatttactggccagggttgttatggatagataggtgcaaaccaatatgaggtctgtgcaattgcttttgtaactgtatt

SEQ ID NO: 498412 - DNA, 627 bp, Homo sapiens
acttgataatttacctttagcattatcatggtggaaagcattactgtcaatagtaaaagtgggtggctactacagacataaggtttattctgtgctggcataaataatttcatagacattaacatctagaaagtgggaagggtttgtgactgtgccacagtagtaataaattatgaaatakattagtaggagacatacagaaagaaataaccaaaacctatctctaaaaggtgccaagatctaattaaagatagaaaaatattttttttcactttttacaccaagttctgcttttcttaatgttaaaaaccactttttatacaattggcacagatgagtcctttggaagtgggcaaacatcaatataaatgtgatgataaacagcaaaaaaagcactgaacaaaataagctgctctcagcctatcctttaaaacttcatagaaaacatgcaaaggactagagaaattatgtcaacaggcttgttaaaaggtagaacatttctaggcaaactgcccccgacacacacacatcaaacaaatcaccaaagcctacctctaaaattatagctcaggaatatttcccagtatagtcctccttctctccacccaccaccactgccttagttca

SEQ ID NO: 498413 - DNA, 579 bp, Homo sapiens
gaaaaggtcagcttgcttccagtttaaaaaaatcaattgatcttcaaaaaaatgtttacattctgttttgttgtcttatttcaggaagagagtcaaaattacggtgatcatcattgaaatatatgccagtgtagtgaggaaagagtttcaactgcttctacttgctttgaataacgcttttgcaagcagcaatcaggaagcagtgctatcaccttgctgctgcctaatggccctgaaaggcagttgtaacatccttggaagccccattagagcaattcctgagtttataataaagaggrctgggtcttttatcctaaatgtagcaaggaataaaatttatttctgaaagaggtagtgcttctgcctttttgtcccctaagtcttatatatcttgctggaggataaacaaggactgaatcccaaggggagtataaagcaccaagagaaagcaaaatgcaacttatggcaatattttccttatgcctggtccaatttatgagggacgcgtttggaaaatgctctgaaaagccagagtccctacagagatacattaggatttcaaacattagacaaattaac

SEQ ID NO: 498414 - DNA, 623 bp, Homo sapiens
ctgtgcttggtgctgggatgtaaagatgtgatgtatttctgctccaagtagcttgtatttttataagaaagtcagatatgaataaatcattgcaatacagtgaaggaacaagttcctggtaatatacaaagtgagatgtaattacctcaggtcattaatttaaagagggctaaaaagtggataataattttctggttaaaaaagaaaagaaaagaaaaaaatagcatgccaggcagaaggattcaaatgcatgaaggcttaaatgtgtgacatagcaagacccattgarggagctgaaattagtctaatgtagcagaagaataatctatcgatggaaaaatccttctagagttagtatgagattgcaggcagggacatagtaagagactatgccagtggtccaagcaggaaatggtggacaatgaaaagaaggttggggaggagagggttgattttagagacatttaaaaggaagaatagtcaggaacttatttgcattaattgggaggaattgcagaaatatccctaacagtatagctgaaaataactagtatatttaaatgataaagaaaagagaaagaatacataggaaaaacagtgattcgtatgttctacttgctctt

SEQ ID NO: 498415 - DNA, 623 bp, Homo sapiens
ctgtgcttggtgctgggatgtaaagatgtgatgtatttctgctccaagtagcttgtatttttataagaaagtcagatatgaataaatcattgcaatacagtgaaggaacaagttcctggtaatatacaaagtgagatgtaattacctcaggtcattaatttaaagagggctaaaaagtggataataattttctggttaaaaaagaaaagaaaagaaaaaaatagcatgccaggcagaaggattcaaatgcatgaaggcttaaatgtgtgacatagcaagacccattgagggagctgaaattagtctaatgtagcagaagaataatctatygatggaaaaatccttctagagttagtatgagattgcaggcagggacatagtaagagactatgccagtggtccaagcaggaaatggtggacaatgaaaagaaggttggggaggagagggttgattttagagacatttaaaaggaagaatagtcaggaacttatttgcattaattgggaggaattgcagaaatatccctaacagtatagctgaaaataactagtatatttaaatgataaagaaaagagaaagaatacataggaaaaacagtgattcgtatgttctacttgctctt

SEQ ID NO: 498416 - DNA, 652 bp, Homo sapiens
ttcaaccaattgccaatcagaaaatcttagaatctgcctatgatctggggcccccacttcctattgtcccatytttctggattaaaccaatatacatcttacattaattgattgacgtcttatgtctccctaaaatatataaaaccaagttgtagttcaaccactttgggcacatgttctcaggatctcctgagagctgtgtcatgggtcattggtcattcttattgggctcagaataaatctcttcaaatattttactgtttttcttgacaaaagggttaagaagaaagaaatttagtcaactgacaagtttttatagagaacagaggcccaattaaaaagtatatatgcatatgtatcttaaatatcagcttttaattaaatcgacttttgactatagagatcttaaaaaaaaaacttcaagtctcttatcatatttcagccagaacagtcaatattcctgcttttgtaccatttcccccctcttttaaaccaaaggtatctttgcaagtgactcaccaaaaccaataagctttaaccaatgttatgatgtaatcaatacattgatcaacgagccttctccaaagagatgcaggacagttctcacaagattccagattcatgccaaagaaagttcaaagagagaaaagtt

SEQ ID NO: 498417 - DNA, 652 bp, Homo sapiens
ttcaaccaattgccaatcagaaaatcttagaatctgcctatgatctggggcccccacttcctattgtcccatttttctggattaaaccaatatacatcttacattaattgattgacgtcttatgtctccctaaaatatataaaaccaagttgtagttcaaccactttgggcacatgttctcaggatctcctgagagctgtgtcatgggtcattggtcattcttattgggctcagaataaatctcttcaaatattttactgtttttcttgacaaaagggttaagaagaaagaaatttagtcaactgacaagtttttatagagaacagaggcccaattaaaaagtatatatgcatatgtatcttaaatatcagcttttaattaaatcgacttttgactatagagatcttaaaaaaaaaacttcaagtctcttatcatatttcagccagaacagtcaatattcctgcttttgtaccatttcccccctcttttaaaccaaaggtatctttgcaagtgactcaccaaaaccaataagctttaaccaatgttatgatrtaatcaatacattgatcaacgagccttctccaaagagatgcaggacagttctcacaagattccagattcatgccaaagaaagttcaaagagagaaaagtt

SEQ ID NO: 498418 - DNA, 547 bp, Homo sapiens
gttgggaggagttttaaattattactgttcagaacatgtttattggtctgcagaatttttgttaccagtagtaattcatttttggcaaaggagcagttttcytgagaagtacagtgccggtaatatggacagccttaaaaaacatactaaattacgtcctgagctagtgatacttcattgattcacatgtataactcagttttgggcttgggctaatgcagggtttttcagtttaggtattttcacatttcgggcttggtaattctttgttgtggggctgtgctaggcactgtaaaatgttcagcagcatccctggcccctacccacttagatgccagtagcacctctccatttcggttgtgacaaccaaaaacctgtccagagacattgcctggtgtccactgggggcagcagcaccatagtcgagaaccactgggttacagtatatgaagatgttaatgtcaggctctctgcggctctgcccttgggggaaatacaaaacaaaaagtgtctttccatgtgtctttatgctgaaagtaaagctaga

SEQ ID NO: 498419 - DNA, 547 bp, Homo sapiens
gttgggaggagttttaaattattactgttcagaacatgtttattggtctgcagaatttttgttaccagtagtaattcatttttggcaaaggagcagttttcctgagaagtacagtgccggtaatatggacagccttaaaaaacatactaaattacgtcctgagctagtgatacttcattgattcacatgtataactcagttttgggcttgggctaatgcagggtttttcagtttaggtattttcacatttcgggcttggtaattctttgttgtggggctgtgctaggcactgtaaaatgttcagcagcatccctggcccctacccacttagatgccagtagcacctctccatttcggttgtgacaaccaaaaacctgtccagagacattgcctggtgtccactgggggcagcagcaccatartcgagaaccactgggttacagtatatgaagatgttaatgtcaggctctctgcggctctgcccttgggggaaatacaaaacaaaaagtgtctttccatgtgtctttatgctgaaagtaaagctaga

SEQ ID NO: 498420 - DNA, 573 bp, Homo sapiens
tgccctgagagcagctccttgcagacagcagcatcagggatggcaaatgggttttcatctcaccccacactgggtcatagaatttatctggggcactgtattgagaagggttcttggaaacccaggctgacttggaaagaatgacatttgacgagtcatgaatgaaagaggtgtctgtgtgcagagccatggccctccctgcctagtcccatgtcccaagggcacattccctgcattggtggctgctcagccatgtaaaaacacaacagcctgtctagatcrgatacttcacctttcctaattcctgctggaactgcctacagacaaggtgacaggacctcttctccctgtagatagaaacagtgtgtttcttgtcatctctggagggagggaaagagggaccacgtaaagaagctctgtcttaagttgagaactctgcaactagctgttcacccacaagttaatcttgtttaaacataatagatcatatatttccctctccccttttggtcttcccctttctcctttcactggagatgggagtatccccctcaaagctggggccaggctgat

SEQ ID NO: 498421 - DNA, 573 bp, Homo sapiens
tgccctgagagcagctccttgcagacagcagcatcagggatggcaaatgggttttcatctcaccccacactgggtcatagaatttatctggggcactgtattgagaagggttcttggaaacccaggctgacttggaaagaatgacatttgacgagtcatgaatgaaagaggtgtctgtgtgcagagccatggccctccctgcctagtcccatgtcccaagggcacattccctgcattggtggctgctcagccatgtaaaaacacaacagcctgtctagatcagatacttcacctttcctaattcctgctggaactgcctacagacaaggtgacaggacctcttctccctgtagatagaaacagtgtgtttcttgtcatctctggagggagggaaagagggaccacgtaaagaagctctgtcttaagttgagaactctgcaactagctgttcacccacaagttaatcttgtttaaacataatagatcatatatttccctctccccttttggtcttcccctytctcctttcactggagatgggagtatccccctcaaagctggggccaggctgat

SEQ ID NO: 498422 - DNA, 231 bp, Homo sapiens
attctggaatttcacagtttggaatgtttacaaaagcattatttgagttattttttttttagtctgacaataaaagcatttttattgcaattatgtttctggtccaagakgaaacttttcttttaaaagttccaaacgaagacattttgggagcttttttctggagggtggggtaggcgtgggggtggggctgggcatttatgagttgtaagaaaagaggttggtggagaa

SEQ ID NO: 498423 - DNA, 621 bp, Homo sapiens
ctgattataactctcatagatcactcctaaaggggaaggaatgtttctatgtttcagcttagcatagtgacaagtgcataatagacasttatgtttgttgcattgtattgaacctaatgcagcagcttattttcaaatgaagatccttctgggtttacagaggaatgacgtattgtctaaggagtattacacagttaagtagcaggaaatgtagaactggatttccctatcccccaagctaggggacaatgaccttcaaaagcagggcttctcaaccttttcactattgacatttggggccatctctaatctctacacactagatcccagatatgtaaaaaccaaaaacgtctccagacattgccagatataccaagtagagcaaaattgtccgtagttgggaaccaatgaacaactacaacacttttgactagataatttttaactgctaaaacatatgcttaaaagaatgcagactggataaaatataagggtaactgatatcttactcatataagttttgttacgagtatttaagacactggaaatcatagttatgagttaactaaagaccaacttggaacctaaattaaccaccttcatcaactacagagtggagca

SEQ ID NO: 498424 - DNA, 556 bp, Homo sapiens
tgacatgcagaaaaagaattagcccaatactgtgtggctccatggggattaggcagaagttatagggatgcagattttggttacagcatctgttcacaagtgaagagcatggycttgggttagaaagtgccttgtcatattccagcgcaggcagatgtgcatctgtcagggcacatgacataatgcagaaaacacttagcacagtacctgggcacgtcacaagtgctcagccaatggaacaaaatagttggacaggggattcttctgtctttggggaatatgtgatagatcattctagaattctaaagaacaggaactcttgcccatatttttatccctcctctccatcactgagcttggcatatggttggtggtctttaaatgtctaataaatgaatgagaggtttgtatcatctccaaagtgtacattaataattatgatactaaaagaatcataagccttcactgttccagaaaagagggaagatggcagaaaaacagaaaaactactcaaaaagtacacaaaaacaaaggcttttgtgtcacaagaaactgg

SEQ ID NO: 498425 - DNA, 593 bp, Homo sapiens
ccagcatggactgtcagctatgtgaatcttggaccttccagccttctcagcaccctagctgcactacgtgagcggaagaaccatccaggtaacctacagaagcatgagaaacaataatttgctgcaatagattctaaaacagagtatgtaggaattcagttttggacatgtacatgaaatgttgtggggcactcagatgaagatgactgttaaggagttggttataaatatctagagctgagaagtgagatctgggtcagagatatacatttgaaagttgctagtgcttaaatcatatttgtaaccatgggagttgctaaaaatctgttgagactgtagagtgaatagaaaagcaatatagaattaggacygggactgaactttgaagaattctagctttgaatggccgtgttgcgaggaggtgccctcattggagattaagaaggagcaaccacagttttcttgttatcacagaagccaagagaggagaggagactacttccagaaggagtgtgtgctccatagtagtatcagaggcaagtgagaagttacagaacatgagtttgaaaagtttccattattgattaagaaac

SEQ ID NO: 498426 - DNA, 585 bp, Homo sapiens
ctttcaatggcaaaaaccacaattacttttgcaccaacctaatagcagctacaaggaaggattctttcctagagtcttcagagagagagagagasagagagaaagagctcggcccccctgacatgtgatttcagatttccaccctccagaactgcgagataacacatttctgtagtttcagccacctagtttttggtgctttgtttcagcagtgcagggaaatgaatacagccttgttctcagagctggacagggcagcttccttagtcactaattcaccacagattttaagctatcactggaatgatttagaaattatagtgccagttcactcaggtttcctcacatggggtgagctgtcctcactgaagtactgaagtgtctctaatggaaagaaaataatatgaataatataaaacatcacttgtcattgacgaactaatgctgtatttttgtgatgcacacacaagttgtatagtgactacctataaagtagctactattattatcttattttatagctcaggaaatgagagtcagagaaattcaatgatttgcctgacttacccttggtctcacacccag

SEQ ID NO: 498427 - DNA, 514 bp, Homo sapiens
agagtcttcagagagagagagagacagagagaaagagctcggcccccctgacatgtgatttcagatttccaccctccagaactgcgagataacacatttctgtagtttcarccacctagtttttggtgctttgtttcagcagtgcagggaaatgaatacagccttgttctcagagctggacagggcagcttccttagtcactaattcaccacagattttaagctatcactggaatgatttagaaattatagtgccagttcactcaggtttcctcacatggggtgagctgtcctcactgaagtactgaagtgtctctaatggaaagaaaataatatgaataatataaaacatcacttgtcattgacgaactaatgctgtatttttgtgatgcacacacaagttgtatagtgactacctataaagtagctactattattatcttattttatagctcaggaaatgagagtcagagaaattcaatgatttgcctgacttacccttggtctcacaccca

SEQ ID NO: 498428 - DNA, 514 bp, Homo sapiens
agagtcttcagagagagagagagacagagagaaagagctcggcccccctgacatgtgatttcagatttccaccctccagaactgcgagataacacatttctgtagtttcagccacctagtttttggtgctttgtttcagcagtgcagggaaatgaatacagccttgttctcagagctggacagggcagcttccttagtcactaattcaccacagattttaagctatcactggaatgatttagaaattatagtgccagttcactcaggtttcctcacatggggtgagctgtcctyactgaagtactgaagtgtctctaatggaaagaaaataatatgaataatataaaacatcacttgtcattgacgaactaatgctgtatttttgtgatgcacacacaagttgtatagtgactacctataaagtagctactattattatcttattttatagctcaggaaatgagagtcagagaaattcaatgatttgcctgacttacccttggtctcacaccca

SEQ ID NO: 498429 - DNA, 514 bp, Homo sapiens
agagtcttcagagagagagagagacagagagaaagagctcggcccccctgacatgtgatttcagatttccaccctccagaactgcgagataacacatttctgtagtttcagccacctagtttttggtgctttgtttcagcagtgcagggaaatgaatacagccttgttctcagagctggacagggcagcttccttagtcactaattcaccacagattttaagctatcactggaatgatttagaaattatagtgccagttcactcaggtttcctcacatggggtgagctgtcctcactgaagtactgaagtgtctctaatggaaagaaaataatatgaataatataaaacatcacttgtcattgacgaactaatgctgtatttttgtgatgcacacacaagttgtatagtgactacctataaagtagctaytattattatcttattttatagctcaggaaatgagagtcagagaaattcaatgatttgcctgacttacccttggtctcacaccca

SEQ ID NO: 498430 - DNA, 514 bp, Homo sapiens
agagtcttcagagagagagagagacagagagaaagagctcggcccccctgacatgtgatttcagatttccaccctccagaactgcgagataacacatttctgtagtttcagccacctagtttttggtgctttgtttcagcagtgcagggaaatgaatacagccttgttctcagagctggacagggcagcttccttagtcactaattcaccacagattttaagctatcactggaatgatttagaaattatagtgccagttcactcaggtttcctcacatggggtgagctgtcctcactgaagtactgaagtgtctctaatggaaagaaaataatatgaataatataaaacatcacttgtcattgacgaactaatgctgtatttttgtgatgcacacacaagttgtatagtgactacctataaagtagctactattattatctyattttatagctcaggaaatgagagtcagagaaattcaatgatttgcctgacttacccttggtctcacaccca

SEQ ID NO: 498431 - DNA, 608 bp, Homo sapiens
tgtgaatataagatgcttgtgaatacaacgaacaagatccctgctttcctggaatttacattctagtggaaggcaatataaaggttcacagatgcatatgattatttcaaacagtgaaaagtgcttgaagaaagtaaatagactgctggagccaattaacagttttcagagaatatcttcagtgtagagggaatgtcaagtgcaaagaccctgaggtggaagaaagaaggtagatgcactcacaggacagaaaagaagtctcatgtgaactggagcattgtgaacagagaaagtaaggttgagaggtcaaagtggtaggcaggactcacatcatgtagagccttgaagccttgaggtaaaacaaagtctggggttttattttataagtgatgrgaaaccatcagagggctgatgcagaggagtgacatgatatgctacgtatttttaaagcattaatctggtagctagatgttcaatgggttgattgtagggtgggaggtggggtggagacagatggaagagtgggcccatttgtgcttccaaaagtcggagaaaactagtagaagaaatgtcattatctattaaatggaacaaacagaacctggagt

SEQ ID NO: 498432 - DNA, 515 bp, Homo sapiens
tgcagagccaggagtcttgaaggagaaactgaacgcaaagatgaggaaagcaggttaagaggagacatgggaaacacatatgaaaaatcttgtagttctgatgggttgcctttgattagtttgagccaggtttatgtggcgcacctgaacttgctttagactctggcttctgactaaaagggaggaaaaaaaaattagaagacaccttcacagatattcactttctacttcctttatcttctatttttaaatgaaaatattttgactaggaacagaaaatgcatttgaaaaaggggccatgcgatatgactcaatgctccttctggtacaataaaattaatttctctgtggagtacctaccatgcgccagggactgtcttaagtaactttaataaaattatttttaaagtagtttcaacttttattttatattcaggaggtacatgcacaggcttgttacatagctttactgtgggakgctgatgtttggagtatgtacaattgatgccatcacc

SEQ ID NO: 498433 - DNA, 384 bp, Homo sapiens
atgtaccacctggctaattctttaatttttttctagagacagggtcttgctttgttgcccaggctggtattgaaatcctgaactcaagtgatcctcctgtctcagtcccccaaagtgctgggattaaagacgtgagccaccaatcctggcctgctacaaaatcatatacagcataatcagaaaataaaatggaaataaggggagaagaaattggaacaaaaggagaaggaggttggaactgttggctaaggtcttgtaattactgcagctctacagatccagtgaacgacggtagasccacgaagtagaaagagcacaggacctggcatcagaaggtaggaatctgagccccagctaagtgagaaacaagaaggcagctcctga

SEQ ID NO: 498434 - DNA, 468 bp, Homo sapiens
ctagattcttgaatgttcatttctgttattattaatgatagctaacatttattgagcactaggyatgtgctatgcattattctatgtacttaatgtgcatcatctcatttaaatgccacaacaggccaggcaccatggctcatgcctgtaatccccgtactttgggaggccaaggtgtgtggatcacttgaggtcaggagttcaagaccagctcggctaacatggtgaaaccctgtctctactaaaaatgcaaaaattagccaggcgtggtggcacacacctgtaatctcagctacttgggaggctgaggcaggagaatcgcttaaacccaggaggcggaggatgcagtgcacagatcacgccactgtactccagcctggatggcagaatgagactctatctcaaaaaaataaaaaataaaaaataaaataaatgatacaacaattctataaaatagatagcccccat

SEQ ID NO: 498435 - DNA, 587 bp, Homo sapiens
tgccttcctccctctgtaaaggcagcaatgatgggtggagttgttctctgatttgcataaatccgatctactcttcaccttcttatttctgcttataagaacccttctgattgcattggtcccacttgaatccagtataatctccccatctcaagatcagctaattagtaacttctattccatctgagttctgggtattaggatctggacatctgtggggaactattattctgcctagcacagggttgaagcagactaaaggaagggaagaatgagttcagggactgggctgagtgggaggcaggtcatgtagggccttgtaaacaatgtggacagggagataggaagtcttaaggaggattgattcaccttggttgctgtgtggctagtagactcaatggcaaacaagagtggaagcaggagagcagttaatatgccactgcagaattccaagacaaagatgatggtgrtttagaccagtgaaggtggtgaggtgcggtcagatccgggatgttgtttggagctagagtgagggatatctgctaaggtgttggacgtagggtataagagaatgtgaggattcacga

SEQ ID NO: 498436 - DNA, 631 bp, Homo sapiens
ctgcatttctcttccagctttttaacttccgtaaattcacatctttacatgttctcgttatatagattaagttccacaaagcaacagaaatgcaatttgtttttaaaatttcgaagcaattttaatgtggacaaagccgtatctaagataatcacattgagaagtttgtttcctatgttttattatctacaaagacttttttccttaatgtagtagcatcactattctcatctcaccatctttgttcattttcactcctttttctgtaaaattaggacttttcttttgaggctcacttccttggaaatctgacctactctttcctgtggaygacccttaattctgtacactcaaatctggcctttctcctagatgttaattagacctttctaacttctgccaggcatttctgcttggctatcccatctttccatcaaatgtaccagaaggacgccatattacacacaacactctgttcttttcccatctttcaaatagctcctgtcctttaagtgatcaatgtcacttagagcttctgctccacaaaaccagagacaccagaattatcctggcatccttctgcctgttattatcatttccagtcagtcattgaagacctcttaatttgccc

SEQ ID NO: 498437 - DNA, 656 bp, Homo sapiens
gggtttccagaaaacccttcagctcccctaagaaactttggaaaacagcaccagacctgccccagtgaaacctggtgccatgcaagcccccatggtcccagtctccaggctggaaattgtggacaaaacttttaagatgctccaacacccagtctattctgtgtcctcaggcatcaggctgaccccagtgccttcagattttgagcctgtttgttctgacactttagctctctgataagttcaaagaaagttctgaatttgaagttaactcagttactttcattgtaagtgtaagagtgatgtctcttctatctctctatagagtggtaagtcctttytttccatttttaatggctaaactgtatttcattaaatgaatatgtaatttactttatttaaccaatcccaatcacttattattgtgcctttagggaattttccactttttgctattataaaccaagttaattgacccttgtaagcatctttgagttgctataaagggatacctgaggttgggtaatttataaagaaaaaagtttatttggcttttggttctgcaggctgtacaagaatcatggtgccagcatctgcttctgttgaggacttcaggttgcttctactcatggtggaaggcaaaggggaactgctgtatg

SEQ ID NO: 498438 - DNA, 555 bp, Homo sapiens
cttttttttatccccaaagttctatttctttatgaagtcattaagaaccacaacctatccaaaatgaagaacagaaaatccagtctcagcatttatttttaaataacacatctagtcatattatggggagtcataaatacatataaattaaaaatccaggcatttaaaaacatgtgtgtagccttctaaaatccarggaaacattgagagctatttgtttttgaatatgagtattatttgggtggcaatctttgaaggttttcttttactggtaaaagacagtgatatatcttgccccgatgaaggcaaacccaagacagccttgtaaggtagagtcagggagacttattagccaagacttttcagaagccaattcattttaataaatgatttttatcaaatgtcttctgaagaaactgtgatgtccaccctgaaattttcctttgcaggcacctattgcaaagagtgcatctgattctagataatagtttctgatttgagtgaaggctactgtccttttgcatttgctttcctattgatttccacagctatgtt

SEQ ID NO: 498439 - DNA, 555 bp, Homo sapiens
cttttttttatccccaaagttctatttctttatgaagtcattaagaaccacaacctatccaaaatgaagaacagaaaatccagtctcagcatttatttttaaataacacatctagtcatattatggggagtcataaatacatataaattaaaaatccaggcatttaaaaacatgtgtgtagccttctaaaatccagggaaacattgagagctatttgtttttgaatatgagtattatttgggtggcaatctttgaaggttttcttttactggtaaaagacagtgatatatcttgccccgatgaaggcaaacccaagacagccttgtaaggtagagtcagggagacttattagccaagacttttcagaagccaattcattttaataaatgatttttatcaaatgtcttytgaagaaactgtgatgtccaccctgaaattttcctttgcaggcacctattgcaaagagtgcatctgattctagataatagtttctgatttgagtgaaggctactgtccttttgcatttgctttcctattgatttccacagctatgtt

SEQ ID NO: 498440 - DNA, 621 bp, Homo sapiens
actgcaaaactatctttgcaatatatactgcaaaatagtttgagggtaggtgaggctatagaggaaacaaaattggacatggagagttttgaagttgggtgatggtacatggttgcttattatactatactctttacttttgtgtagtttaaatttttccaaataaaagtttgggccaggcgaggtggctggccaggcgcagtggctcatgcctgtaatcctagcactttgagaggccaaggcaggtrgatcacctgaggtcaggagttcgagaccagcctggccaacatggtgaaacctcatctctactaaaaatacaaaaattagccaggcgtggtaatgggcacctgtaatcccacctgctctggaggctgaggcatgagaattgcttgaacccaggaggcagaggttgcagtgagctgagatcgtgccactgcactccagcctgggtgacagagcaaaactccgtctcaaaaaaaaaaaaaaaaaaaggtggtttttttaaccctttttagagacccatgtgatggaattgttctgtattttgactgtggtggtggtcacatgaatctacatatgtgatgaaattacaaacattaattatacacatgcatacacaca

SEQ ID NO: 498441 - DNA, 621 bp, Homo sapiens
actgcaaaactatctttgcaatatatactgcaaaatagtttgagggtaggtgaggctatagaggaaacaaaattggacatggagagttttgaagttgggtgatggtacatggttgcttattatactatactctttacttttgtgtagtttaaatttttccaaataaaagtttgggccaggcgaggtggctggccaggcgcagtggctcatgcctgtaatcctagcactttgagaggccaaggcaggtggatcacctgaggtcaggagttcgagaccagcctggccaacatggtgaaacctcatctctactaaaaatacaaaaattagccaggygtggtaatgggcacctgtaatcccacctgctctggaggctgaggcatgagaattgcttgaacccaggaggcagaggttgcagtgagctgagatcgtgccactgcactccagcctgggtgacagagcaaaactccgtctcaaaaaaaaaaaaaaaaaaaggtggtttttttaaccctttttagagacccatgtgatggaattgttctgtattttgactgtggtggtggtcacatgaatctacatatgtgatgaaattacaaacattaattatacacatgcatacacaca

SEQ ID NO: 498442 - DNA, 626 bp, Homo sapiens
gcacagagctttgtgtacagcactacatgtactatagcatacaagagttctccccataaatcccctgcacatctgctgtctcagtgtctgtgtcttaaaggatctgaactggcgccccagccattgcaatagcactgtgagctgggaacccgagtctgtttctaccgtgccatccaaggcgccctgcttcccacggtaaggaggtgagaccttgcccagccccctcctccagtrctcacagccagcagtggagaaatgcagtctctggctagtgcccttgtaccttcacagatttttcttttccatttctccaccttgaccagttaactcaagaaaatatcattctctctctctctctctctctctctccctctctctcccccaccatccctctgggtctcaacctttgagagtttctcgccaactcttacgtcctccccctcacccacatttaactctcccatccaaaatcagccttataaacatgagtttcatccatggcataagctaaatcgagaagagatataacaagaattacacgacatgtgaagctcttgaatgtatccagacattgtcatctgcatcttcacaaatgtctggcctccactaattaaatttgcctttct

SEQ ID NO: 498443 - DNA, 626 bp, Homo sapiens
gcacagagctttgtgtacagcactacatgtactatagcatacaagagttctccccataaatcccctgcacatctgctgtctcagtgtctgtgtcttaaaggatctgaactggcgccccagccattgcaatagcactgtgagctgggaacccgagtctgtttctaccgtgccatccaaggcgccctgcttcccacggtaaggaggtgagaccttgcccagccccctcctccagtgctcacagccagcagtggagaaatgcagtctctggctagtgcccttgtaccttcacagatttttcttttccatttctccrccttgaccagttaactcaagaaaatatcattctctctctctctctctctctctctccctctctctcccccaccatccctctgggtctcaacctttgagagtttctcgccaactcttacgtcctccccctcacccacatttaactctcccatccaaaatcagccttataaacatgagtttcatccatggcataagctaaatcgagaagagatataacaagaattacacgacatgtgaagctcttgaatgtatccagacattgtcatctgcatcttcacaaatgtctggcctccactaattaaatttgcctttct

SEQ ID NO: 498444 - DNA, 626 bp, Homo sapiens
gcacagagctttgtgtacagcactacatgtactatagcatacaagagttctccccataaatcccctgcacatctgctgtctcagtgtctgtgtcttaaaggatctgaactggcgccccagccattgcaatagcactgtgagctgggaacccgagtctgtttctaccgtgccatccaaggcgccctgcttcccacggtaaggaggtgagaccttgcccagccccctcctccagtgctcacagccagcagtggagaaatgcagtctctggctagtgcccttgtaccttcacagatttttcttttccatttctccaccttgaccagttaactcaagaaaatatcattctctctctctctctctctctctctccctctctctcccccaccatccctctgggtctcaacctttgagagtttctcgccaactcttacgtcctccccctcacccacatttaactctcccatccaaaatcagccttataaacatgagtttcatccatggcataagctaaatcgagaagagatrtaacaagaattacacgacatgtgaagctcttgaatgtatccagacattgtcatctgcatcttcacaaatgtctggcctccactaattaaatttgcctttct

SEQ ID NO: 498445 - DNA, 472 bp, Homo sapiens
tgcttcccacctgtctgatcttgggaagacttactagctgtatactctgaacaaactccttcatctctttgttttctcatttgcaaaacgggatgacaacagtacctaccwcatgggattgtgaggaatcggtgcattatttatgtaaagctcttaaatcaagcctgacacacagtatgcagtaagcatggggctgttacttttctgctgcagcctgtatgttgttagtaagttgattgtgcccttctgctccccaacccctcatacagcctggggtacctcctgatctgtcagttccaaatgccacagcaaaacaacccacaccctgcttaccaggggcttgaaatcatgtctaacatgttgtttctaagatgctgatttttctaaaagtgctgatcaccatgggtttagcaggcctaaaactagcccaggaagtgaaactttggggaggaattccaaataaccaagcctt

SEQ ID NO: 498446 - DNA, 500 bp, Homo sapiens
tgtgtactgctgatgaaacctgcttctatttgtaggtcttccctgggggtaggctcaagtgctagttttggactttcttcagacttctgctcagtctatgatactgtactgaccttgcaaagccctcgtagttccctgcatgaacatttcaagggcaaagtcataaatggccattttaatgggctggtcatcatctcgaattgtgatcctgggaatcagattcttggttttctagatcagtgctgcataatatatgatatgagctatayatgtaatttttaatttcctagtagctatattaaaaaaggaaaaagcaggtaaaataaattctaataatctattttatttaacacaaatatccaaaatattaccacttcaacatgtaatcactatacaaattaagatattttgcttttttttgtactaagtctttgaaattcaatgtgttaacatctatttcacatctcagaactagccacatcttacgtgcctaaatggct

SEQ ID NO: 498447 - DNA, 600 bp, Homo sapiens
tttgggaccctcatcgcaggtaggggaggcaccctcagcgaggcaggaactgagagccagcctctcttccccccctggctcttgggacccccatcgaagggggtggaggcacccccggtgaggcggggaatgagagccagtgcctcttccccccctggcttaggacccccatcgcggattctaagatccttaggacccacctggaggactgtgggtattaggtgtctaagaagaaagctcagatctgcggaaggcaagtaccttacttgggatttactatcccacaggggtctgaacgcagcccaggatcmgaaagaaagcaggtcatttgcaatctatcggagcctaagggaagaaggcaggtgagagaattcttaagagctgtggggttttgtagactgtggatcccaaactttgcagtattagccaagcctttgtatgaggtcacaaagggggcggggaccgggaacctttgcaagggggatcccaacaacagcaagtctttcatgagttaagggaaacacttccagcagccccagccctggggctacccgatctgacaaagccttttccgttgtatgcatcagagagagaaaagat

SEQ ID NO: 498448 - DNA, 600 bp, Homo sapiens
tttgggaccctcatcgcaggtaggggaggcaccctcagcgaggcaggaactgagagccagcctctcttccccccctggctcttgggacccccatcgaagggggtggaggcacccccggtgaggcggggaatgagagccagtgcctcttccccccctggcttaggacccccatcgcggattctaagatccttaggacccacctggaggactgtgggtattaggtgtctaagaagaaagctcagatctgcggaaggcaagtaccttacttgggatttactatcccacaggggtctgaacgcagcccaggatccgaaagaaagcaggtcatttgcaatctatcggagcctaagggaagaaggcaggtgagagaattcttaagagctgtggggttttgtagactgtggatcccaaactttgcagtattagccaagcctttgtatgaggtcacaaagggggcggggaccgggaacctttgcaagggggatcccaacaacagcaagtctttcatgagttaagggaaamacttccagcagccccagccctggggctacccgatctgacaaagccttttccgttgtatgcatcagagagagaaaagat

SEQ ID NO: 498449 - DNA, 526 bp, Homo sapiens
atagagagaggttggtcaaagtgtacattttcagttgtaagacaaatgagttctggagatctaatgtatagcatagtgactatagttaataatactgtattgcatacttgatatttgctacgaatasatcttaagtattcttaccacatgcaaaaaaatgttaactgtgaggtcattgatttgttattaacttgattgtgataatcatttcattatatatgcacatcaaatcatcacattgtacaacttaaatatatacaattttttgtcaattatatctcaataaattataaattttatctcaataaagctagaggggaggaagagcattaaaccaagcatgggacctctgagtgtggcctccatgctatgcacaggttacatgaagccatcctgcccaggagctttcttctcaccatctatcccacctcaagaactatccatttcacatcctagatgttgcttgaagtcatctgctccctccatctccatgtcactgctacagtctaagctgccacccacatac

SEQ ID NO: 498450 - DNA, 582 bp, Homo sapiens
cactggacttcctgacccaattggtcaccaatcctatatttaccgcttttcacaatatcccagaatgaagaagtaaaaatatactggagtgaaattacaagtccaggagaaaaaacaagccactcactgcccagggcagcagtgggttcagggtggtagaagtacgtgtaggaggccagggtgttgtctgatggctgagtcccctatcatcttccatcatggaggccactctccaccccactgaagccaccccaaggagkggagggatacaaactgataggtaccttatacacaaacatacgccatcacctaggagcagagcacttatgccagcacagcctgagcctcaggctgcagccctggccctggctggtgggtcacgccgtggatggctgggagcagctcctctggctggagctgcgatggctcaggacaaaggaggacgagttgctctttttgctggcactcgtctctcccaggcgtctgcccttcaggtagctggcggagcagcacaggaagcgctgcacgagttcgtggaagaggtggcccgtgaacagcatgtagatccaggggttgcagcag

SEQ ID NO: 498451 - DNA, 569 bp, Homo sapiens
gagtgagttctcgtgatatctgcttgttaaaaagtgtgtggcacctccccttcttctctctcttcctcctgctcctgccatgtaagacgtctgctccccctttgccttccaccatgattgtaagttccttgaggcctccccagaagctgctgctgctatgcttcctgtacagcctgcagaaccatgggccaattaaacctcttttctttataaattacccagtctccggtatttctttacagcagtgcaagaaccaactaataacaatastaactaatacctggactccccgccactgttataagtactttacattcgttaactcatggggttactcccttaatcctgtgacttgggaaacaatcaccccattttacagaggaggaaagtgacacatggtgagattaagtaacttgcctgaagtcacactgagtaagtaaaagctaggaggaatccaaatttatacgacccaatgtatacctcatcttttcaaaaacacaaatctcaagattttctgtgtttaatgtaaatatgatggccttaaatatcaattcaaaagtattcagaat

SEQ ID NO: 498452 - DNA, 535 bp, Homo sapiens
gtcatgaattagttgagaagcttctggaaggtgcacattctgattcagcaggtatgggagtctgcatttctcatgagtactcaggtgattttggtgctggtccttggacacagctctgaatagcaagggaatagccttcctttaragaactctggaaaaagaaccattggagagcaatttaaaaaataacagaatccagggaaagcattaatttccttttatttctgagcatgattctagccacagaggaaggagaatgagatgaaaacagagagattacaggtgtatactactgctgaatacagatgaaaaaagtggtcagtggtcacaattatccataaaaagcagttaggaagggaagcatcaggatgacagttctaaaaatcaatttttcaaaggaagagggattgtgaaagcacacggagggaggaaagaaagacatttgctggggtcttgggagttgaagccaagtaaacttgagacaactcacttccagttgcttcagcatatgcccagtctcacaaaagaggttatt

SEQ ID NO: 498453 - DNA, 535 bp, Homo sapiens
gtcatgaattagttgagaagcttctggaaggtgcacattctgattcagcaggtatgggagtctgcatttctcatgagtactcaggtgattttggtgctggtccttggacacagctctgaatagcaagggaatagccttcctttaaagaactctggaaaaagaaccattggagagcaatttaaaaaataacagaatccagggaaagcattaatttccttttatttctgagcatgattctagccacagrggaaggagaatgagatgaaaacagagagattacaggtgtatactactgctgaatacagatgaaaaaagtggtcagtggtcacaattatccataaaaagcagttaggaagggaagcatcaggatgacagttctaaaaatcaatttttcaaaggaagagggattgtgaaagcacacggagggaggaaagaaagacatttgctggggtcttgggagttgaagccaagtaaacttgagacaactcacttccagttgcttcagcatatgcccagtctcacaaaagaggttatt

SEQ ID NO: 498454 - DNA, 535 bp, Homo sapiens
gtcatgaattagttgagaagcttctggaaggtgcacattctgattcagcaggtatgggagtctgcatttctcatgagtactcaggtgattttggtgctggtccttggacacagctctgaatagcaagggaatagccttcctttaaagaactctggaaaaagaaccattggagagcaatttaaaaaataacagaatccagggaaagcattaatttccttttatttctgagcatgattctagccacagaggaaggagaatgagatgaaaacagagagattacaggtgtatactactgctgaatacagatgaaaaaagtggtcagtggtcacaattatccataaaaagcagttaggaagggaagcatcaggatgacagttctaaaaatcamtttttcaaaggaagagggattgtgaaagcacacggagggaggaaagaaagacatttgctggggtcttgggagttgaagccaagtaaacttgagacaactcacttccagttgcttcagcatatgcccagtctcacaaaagaggttatt

SEQ ID NO: 498455 - DNA, 208 bp, Homo sapiens
gaggagtaactagatatttacagagcctcaaartatctccccacaaaatacggttcaactacaaaaagaaaattgtcacattagcatggacaagcctggcaggtactccttaactcccctaagcagtaaaagctgtaaaatgcaaagaagccttcgatgacctttactaaagtatcaatgatgacttggttgtttggctgtttaaaca

SEQ ID NO: 498456 - DNA, 589 bp, Homo sapiens
ctgtgttatatttttaatcttcattcaaatcaaatggcaaatcgcatttttcttcaggatttttttttcttttcttttttaatattagtgtgtgtaaaggtggtttcagtaacttcaaaaaccttctgaaacatgctgcggtatatttggaaacatatttcaaacgttactctagagtgagtaacccttgtatttctgtaggacacagaaggcaaaactctttggagaaggactgattggttagcttgctttggcatgagggaacttccaactatattgagctgtttaactaaggaaaccaaaacctattttgctcggtttgcctttctttctgtactccatgtgtggcatttaccataagagaaagtaaaaaccacacatgaagcttgtgtccttctcattccttcctatttccatgctgggggagaagggctatttttgtgatacccagacttccccacacttttatgtgtaagacaaygagctgggacatatgtagctgatatataattagccaaatggtatctttttcaccccagcacaaacacgttccctctgattttcctcattgacttttaggtttaggcac

SEQ ID NO: 498457 - DNA, 581 bp, Homo sapiens
gctgactggccatgttgaaactataatagacaactgaaactggaataggcaaggaaaaagaagctggagtcagtttgacaggatacagctagcagctttgttttcaactgtgctccaaatattgttgcaacttccacaacttttcctttccactggacgtgcttactttcacctccaaacccattaatatatcttyatccttcacagcctagttcaggcagtctggcaccagtgtggacacagttgaaacagaatggaatgtggagcttcaaaaactggagttcaaaaatctgcctttgtaatttagtagttgtctgagcaacgtatataacctctttgagcctcaattttgtcatcaataataacaaaatgttttaaatgtataaagtgtttaaagtattgccattatccaaggagagtaattctgttatttacagcagaggaaactgaggggcaagggttaagtaaataacccatgattatttctaaattgtagaaatgtgaaaatgctagcacttgcaggatttgaactcgagcaatatggcaactcatgtatttaaccccacataccttgcaggatg

SEQ ID NO: 498458 - DNA, 591 bp, Homo sapiens
gactggatggggagctggttatgaaaggcacggagaagcagcagaggtggttgaccagagacttaagatcaaggctgccttaatttttttgttaaaataaagttcacacagtatgaaatttccttatttaaactgtataatttaatggttattagtatattcacaaaattgtgcaaccatcaccactatctaattacacaaccttttcgttaccctctcaaaaatcctgtgcctactggcagtcactccccattcccgcctcgcctagcccttgacaaccactaataatatgttttctacttacttkgaaataaatggaataataaaagatgtagcctttttgtctcactatttttacttagtctaacattttcaagattcaacaatgttgtagcatgtatcattatgtcattctttctattgatggataagatttcattgtatggttatacattacttttaatccattcatcagttgttagactttttgtttgtttccactttgggttattatgaataatgctgctacaaacatttgtatacagttggccctctgaatccacaagttccacatgtgcatattcaaccaac

SEQ ID NO: 498459 - DNA, 594 bp, Homo sapiens
ttcattccattggtaggcaagattcaacactgttggatccctcaggataagtatccatgatacagacattgtttaagaatttgtaaaggtttttgagaaaaaatattttacatttagttttggaataatacaggtctgagaggctcacagagtccacttcccatttattttgccattattcctgtaacacaagtactagctaactagtgaaattttaacagaacaataaagggtaatttttttctctttgcactgtgtatgaaaaaaagagtacttgctaactaaaagaataatgtgaaaaaataaatagtttctaagtccttcaatctttgtatttgcttttgttttgcattttttattgatacatcatagttgtacatattttgggggtacatgtgatattttgatacatgtacacaatgtgtaatrattgaatcacagtagtatcagtttagagatatgatacacaaccaaccaaatattcttatctcttcattaaagcaggcaggtcccagatgtttaattacaagtttgagttataacatagcattggtgttctgtttcacttctgtaacaatgtcccaaatcagcagc

SEQ ID NO: 498460 - DNA, 595 bp, Homo sapiens
acttaatcagaatttccaaggtagacatctagtgatctgtgtatttaacaaacacatctaggtgcttcatatcatggagaaaaatggaaaacacagttctgaaacaattaattcatggagcatgacccagtatcattgtgggataagtttccttccscatcaatgtaggtctggatatttcccttatggaatcgtgtcattttcacaaccagcccaactgagaaacttatgatatgtccctctgctagaataccattccttaatttccttcaaggttatttgttagtttttacatctctccttgtttctcctccccacagaaataatgaggctcttagaaaatgataaataaaaatgaaatgaaggtttaggtcccaacttctcttcagcatcactctccatgtagacactaggagttttcttgtttattgtcaggaatgctaatgaacattatcactgtcatccccggctacatggctatttacttgcggccagcattccaaaatttttgtgcagttactaaatgagtgtcaagcatatactacacatcgctgtatcagtcttactaggtgggtaattttgcctatatatattt

SEQ ID NO: 498461 - DNA, 595 bp, Homo sapiens
acttaatcagaatttccaaggtagacatctagtgatctgtgtatttaacaaacacatctaggtgcttcatatcatggagaaaaatggaaaacacagttctgaaacaattaattcatggagcatgacccagtatcattgtgggataagtttccttccgcatcaatgtaggtctggatatttcccttatggaatcgtgtcattttcacaaccagcccaactgagaaacttatgatatktccctctgctagaataccattccttaatttccttcaaggttatttgttagtttttacatctctccttgtttctcctccccacagaaataatgaggctcttagaaaatgataaataaaaatgaaatgaaggtttaggtcccaacttctcttcagcatcactctccatgtagacactaggagttttcttgtttattgtcaggaatgctaatgaacattatcactgtcatccccggctacatggctatttacttgcggccagcattccaaaatttttgtgcagttactaaatgagtgtcaagcatatactacacatcgctgtatcagtcttactaggtgggtaattttgcctatatatattt

SEQ ID NO: 498462 - DNA, 657 bp, Homo sapiens
aacaattcaaagcacatttcatctatgacatcatgaatcatattactattttcattttctttactcactaggaagctttaagccacttccagtagctgaataggatggggctgctttcttgtccatggctctaatatttcccctcattagaacattcctgattattyactgtatccttttgtattatggttatttttataggccacttgaaatcctttctgcgggttgtggattatggaagagagcaaataatttaaaaagaaagctcaaaatacacttcttacccatattgggtcagtcatgtctttttttgatgcagacaaaatattttcaccctttaataaaattggtaactgaatatggtattagtcataatatgaaataatgttcctttttaaatgtgatgatcatcctgctttatttccccatctgcaagatgagaataataattatccctttgaaaatatcatatggtcaaattagttaatgttggacaagcatttcaaaatgaaactacctaataatttattagtggctccactggtgtgcaatttgagaatgaagtctgcgtttgaggaattggcatttgcattaattcatgttttcccttaaattcattacagaggtctagtctgaattctctcggctgggtgccag

SEQ ID NO: 498463 - DNA, 429 bp, Homo sapiens
cagttgctttaaacactcatgtaaacatttaagtcatattgaccaaagagctctgaagctaaaaataactacaatactctctcaagtacactgagtgtttattccatccattttccaaagaggtcctgaagtagtctctttgaatatttattctacatctccaataacacattaagatctgtaaaaaaatcttctttgtatccgtacaacctaacagagatacatcaaatacatgaagaagaagaaaaggagtacacagtattgttaagtagaaagaacactcaaacaatattatataaagttatttattgtgtcattgaacaagaaaatgtgaaaccacaaaaccactggaagggcagggatgtggtcasattctgacactatccataagcaaggattcaactgttgctgcatattttacctccattt

SEQ ID NO: 498464 - DNA, 553 bp, Homo sapiens
tctcttgtggatgaaaattgtagccctcaaattcatgtcatttagaaaaggaaagtttgtcgtttgaaccgaggcaccatctcatcaggagtcaataacatcttcaaagtaagaggatattatgattaatagctgatttgtttgctcatcatcaaggacaagaatatcctatcagtaaaagtcaataggttgaaaattcaggaggttaggctgtgggaaataagaggttaaaatagtggacaaacacaatcctattaaataattcttgcttttagcactggaagcaattcaattgtttaaaaattatattaagtcatcaagacgctacttaattaaactttaatattaagcattaagatttaagcaaaaaatatgattaatcaattagttcatcattacagcttakagtgagctttttggtgtaacaaaggcttctgatgaatacattaacattggatgaatttataaatacaactatttagatttttagaatattaatgttatgcctataatagaaaacaaaaataattactagagaacatctttgagaaac

SEQ ID NO: 498465 - DNA, 617 bp, Homo sapiens
tctctcccaggctggagtgcagtggcgccatctccgctcactgcaagctccgcctcccgggttcgcgccattctcctgcctcagcctaccgagtagctgggactacaggcgcagccaccacgcccagctaatttttcagtagagacggggtttcaccgtgttagccaggataaggcctcacctcatgtatttgggacttgaaaggaagcctgtgcaagcacatggttaatacaatttattacccacattccataccaccagccactctttctacctgctctgtattcctagaaatgcatatcctgagaagrgcacacagtgaattcatttctatatttattgatgacttttgattacgtatgcagagcagtctgttgtcttaataaaattggaaaaccagatattttttaatttgggtggtgagtcatctaccatattaagcagttaatatacataaccataacaagtaggattggtattatgcataccaaagtagagactaagctgcttatgccacggaagcagagagaagagagggatgaatgaagcccaaagaattgaagggagaaagataatagagctacaacgattgagaaagatgggtatttgtggcaggt

SEQ ID NO: 498466 - DNA, 559 bp, Homo sapiens
tgaggcaggaggatcacttgagcccaggagttggaggctgtagtgtgccatgatcacacctgtgaatagccactaccataatccagcctgggttacacagcaagacctcatttaaaaaaaaaaaaaaaaaaaaaaaaaaaaagacctgwttccagaacctgtgttcttcatagccagtaagaaagaaaggatgttggccgggcatgatggctcacgcctgtaatcccagcactttgggaggctgaggtaggcagatcacgaggtcaggagttccagaccaacctggccaatatggtgaaactctgtctctactaaaaaagtacagaaaattagccaggaatggtggtgtgcacctgtagtcccagctactcaggaggctgaggaaggagaatcacttgaacctgggaagcagaggttgcagtgagctgagatcgcgccactgcactctagcctggatgacagagtgagagtccatccaaaaaaaaaagaaagagagagagagagaaagaaagaaggaaggaaggaaggaaagaaagttagttttaattaaaaagaagcg

SEQ ID NO: 498467 - DNA, 539 bp, Homo sapiens
tttagagacagagggggttatacctctgaaagcaagacctatgctggagggaaaatgggctttgaaggtggagatgatggtcatccctgttgtactgagatgttggtgagacatccaagtaraaattgttgcagaatattgtatctttatgaatataagatcaattaaaatatgttaattctcaggcaaagtgaatttaactttaaatacatatttaatcaaaactttagaaatatttataaaatttcagaagtgctacagtcttgaattttactttttggtgacattaattttacttgcaaacacaaatggaataagacctcagaggctcctttttcatcatctaatttcacttccataaagcaattcttgtctgatgagagcataatgcaggcttctatataaaatattccctgtcatatttctgagaatgattttgcctctttttgattcttgtgtttaagactcagatagggcagagtttatcagtgtgtgcttaaaccctgtaaatggcttccattgcttttaagattaagaca

SEQ ID NO: 498468 - DNA, 539 bp, Homo sapiens
tttagagacagagggggttatacctctgaaagcaagacctatgctggagggaaaatgggctttgaaggtggagatgatggtcatccctgttgtactgagatgttggtgagacatccaagtagaaattgttgcagaatattgtatctttatgaatataagatcaattaaaatatgttaattctcaggcaaagtgaatttaactttaaatacatatttaatcaaaactttagaaatatttataaaatttcagaagtgctacagtcttgaattttactttttggtgacattaattttacttgcaaacacaaatggaataagacctcagaggctcctttttcatcatctaatttcacttccataaagcaattcttgtctgatgagagcataatgcaggcttctatataaaatattccctgtcrtatttctgagaatgattttgcctctttttgattcttgtgtttaagactcagatagggcagagtttatcagtgtgtgcttaaaccctgtaaatggcttccattgcttttaagattaagaca

SEQ ID NO: 498469 - DNA, 654 bp, Homo sapiens
accatagtttataggcaaggaagcaatcatgtgtttaattcttggatgatgaaagattttggaattgaaaaataaaaggaaaggataaattgttctcgaaaactagaaaagccatgcgtaaggtggagaaggtaagggcttgctagcactgacaaagaaggaccaaatgaaagtagatgagatgtgaaatcaaggagtcagactatcttctgtgacaatttcaaagcctacagaaaaaacagctttgactttataaaacacgcaaagtattattagcatacaaaattaagcgtttatgaaaactcttagcatataggtatacaattagttatcagaatgcctaaatacatggaagtttgatttagtcaacattttataaactaatagaacctaaagaagatagttaccagtacataagtattacatcttaaatattgttagaatcagtgcagtaataatccattaacttgctgcttggattccattaagtggtatcaattttattctgttgcctrgcatggcatctggcacagagcagacaatcaagagccatttcttgagttaacatataatttctagcccagggccatcatagaaaaattgatattatagacttaacgcccaggaaatatttcttatatacctactatgtgc

SEQ ID NO: 498470 - DNA, 608 bp, Homo sapiens
tctagccgcaatggccttcaagtakcgctttgaaaatgccatgaacccttgtgtcacacagcctttgcctctgcagttcattctatgtgatatgtccccgtccccttgtagcttcaggacttatctcacttacctcattcaggtctctgtttaaccgtcattttatcaaggagatcttctctgcctatcttattaaaatattcttgcccatctcaaattaatttttccacgttttatatttttatttttctttcatttattgtctttctgtctttcattgaaatgcatcatagtgcctggcacatagtagatgctcttaaaattttgatgaataagtaaatgaataaatggatcttcacaacaaccttatgatattaacattatcattaatgatggtaatattatcattgccattaaacattgatgaaaaatgtgaggaaaagggagattaagtaattttgtcatggtcatgcaggtattatgtgtgacagactctggatttgatgtggctgcagtgcctgcacaatgaaccttcccttattgtttctcatgtcttaatagatgagtgcagatttgaagtcacttatgaagataaagaaaaaaaagtt

SEQ ID NO: 498471 - DNA, 588 bp, Homo sapiens
tataggaaacaaataaacaaaacagaaacatatttcatcagcaagtaatatgtactgtgaagaaaataaaacattgtgatctccagagaggaagctggaaaatctacctctgattaggtgattaggaaagaatgctctaaaatgggaccactaatgcaactacctgagcagccatrcattccaagatctgatctggggacagaacgttctaggagtaaaggtcagaaaaaaacaagtttcttctcttgtaattagttagactttagaagacaggccagtggcactggagcatagtatatcaggaacagagaggtaagggatgaatttgaagaagtagggaaaatccagattatgtagagtctgtaggttgaggtaaagattctagtgaagagatataaataaacatacgatatttaagggaacaaaattgcttctgttatcttaaggctgggcaggagatcagagaaaactgttctcttcggagagaggatgcctgagctggattttaaatgaggatgagtcagttggccaagaagtgtggagggtcagtacatgcagaaaatatttagcagcacatcaatagcacag

SEQ ID NO: 498472 - DNA, 588 bp, Homo sapiens
tataggaaacaaataaacaaaacagaaacatatttcatcagcaagtaatatgtactgtgaagaaaataaaacattgtgatctccagagaggaagctggaaaatctacctctgattaggtgattaggaaagaatgctctaaaatgggaccactaatgcaactacctgagcagccatacattccaagatctgatctggggacagaacgttctaggagtaaaggtcagaaaaaaacaagtttcttctcttgtaattagttagactttagaagacaggccagtggcactggagcatagtatatcaggaacagagaggtaagggatgaatttgaagaagtagggaaaatccagattatgtagagtctgtaggttgaggtaaagattctagtgaagagatataaataaacatasgatatttaagggaacaaaattgcttctgttatcttaaggctgggcaggagatcagagaaaactgttctcttcggagagaggatgcctgagctggattttaaatgaggatgagtcagttggccaagaagtgtggagggtcagtacatgcagaaaatatttagcagcacatcaatagcacag

SEQ ID NO: 498473 - DNA, 614 bp, Homo sapiens
tgtgtgtgtggtgttaaatgatatgatgcacaagaaatataaattgttgcatacactgcctggcaaattcattcagctaaaaataatctctgaaatccagtttaggaaccaggaatacacagatgtattagacatggtctaagtccttaagagatttacagttgactgcaagaaaaaaagaattataagcatataaatataacacaatgagatgtttttaatgataatgacattacagaaacagagatgattagtatatctaaaatgcactttaggtgtactcaacctaaggaatgagtacacctaaagtgcattttaaaaaagagtaagataacagytatattcatagttgcaaaacactgttgacaaccaaagtgtcctaaaaggtgaatggataaaatgaactgtggttcatttatacaatggaatgttatttataataaaaataaatgagctataaagcaatgaaaagacagagaacccttaagtcaatattgctaagtgcactaagccagtgtgaaaagttacatactgtatgatttcaattatataacattctgggaaaggcaaaactatatacacaattcaaaaattcatggttaccgagtgttgag

SEQ ID NO: 498474 - DNA, 581 bp, Homo sapiens
ctgctgtattaaacagcacagctctataatgtgcagataatgctaacattgggggtgaccaaggatcacctcttactgaaggataatcttccccttaacagatagaagggatatttaacagatatttaaygtattttaatattttgggggggggggtgcaggttcaagtatggttgaaagagaaacagacaaatgtgctaacaggcagcctttcatgaaacaaaataagtgacagtgaccatcatttcacatgctggtcactggaaggagacggatgatctatctgcagagacaggcagttatacttgcagcgatagagaaaataagcttgtgcttagagaagtctgtttctaaatgaaaggcttggctatttttatctgtttaagcctagacatattactgaatattaataagctctgcggtctgaaatgaagtggttaaaggtgggagggagagacatatttttcttccttttaataagagacaagcaaacctgaaactttaagtctttatctatgcacaccagaaaaatatttcagtccttaaagcttcaagagttggctcaacagagagcaaggtgg

SEQ ID NO: 498475 - DNA, 637 bp, Homo sapiens
ccttcagctcttctcccccaaagctatgcagagccttctgaatagtcagagcctttccctgttgcttctcccaccactctgaccaatctcctacagatgtccctggagcatccctcaaccaatgatgaaaggcagttggtggataaataccccagttccttacaccttggttgggaaaactctgagatgtgttatgtgtagtgtcctagaggtcccctgtgggataagtcccagttgccacagaagtaaatggctcattatcacaccccgttattcttttttcttttctctatttcacttcacctctccctgacccttgattccttggctatgacatcaaataaattgctagtacttaaatctttgtcttgacaactgcttctgggagaaccaagtgaaacttatctgacctgggtgtcattacagcagaggcattccacctaartaacaattacatgcattcaaataaactgttcacagtagatttatgtgctacttaaatcatgtgcttccacataaagatgtaaggttatagcaacctgaaacataataaattaaaaaaatgtgatgtggaaaaagaaaacaatgggtgggtggatgggcgactagatggctgaggagatatgttgccatagca

SEQ ID NO: 498476 - DNA, 347 bp, Homo sapiens
tgatgggaatttccatcatggatatcacccatgatgatgtccactgaaagggtcttggctatccctagccatctgaaaaccacgctttgagaattactgcaacattcattcccctaggccatcactgaagtacctaatcctaaccataccaagtgttaggaaaggaacatcatatattgtagcattgcacatcatcagatttggactgaaacaaatgtctctctaaatttcatattctttatgttaagattgaagcactttttccttacytttctgcagttcccccgaagtgaccctgtttctaagcaggcatagagctgtggtgtgtaagacagttgcagcaaagc

SEQ ID NO: 498477 - DNA, 590 bp, Homo sapiens
tgctcatcctcccctttctccttgtggcagatgagtatatccatgactctraatcttcacctctccgtctatccatgtaatttttcagttgactttagagttctttccatacagagagtacatatttatccatcctatgcagtttgctttggccaacaaaatgaggtggaagtgttaatgtatctgttttgagcacaggtctcaagaagttctgttctactcgttactccatgagaacatgcctggcctatccagatggaggatgagaaccatgtagatcagagctgtgtcccctcagtcccatccctacctctctgttgaggccaacctagaagatgcaatagtcagccatcccctaaacatatgagtaagctcagtcaagatgagaagacctgacctccacttgatcccaggcatataagcaattgttgccacagaggttttatggttgtttgttatacagcattcctggtgtcttaggtaattgacacattgattaatagcataactccaatttaatttattattggaatgtacttagctaaaaggcatttctcagtttcctttgctgagtatgcccacttgcataa

SEQ ID NO: 498478 - DNA, 590 bp, Homo sapiens
tgctcatcctcccctttctccttgtggcagatgagtatatccatgactctaaatcttcacctctccgtctatccatgtaatttttcagttgactttagagttctttccatacagagagtacatatttatccatcctatgcagtttgctttggccaacaaaatgaggtggaagtgttaatgtwtctgttttgagcacaggtctcaagaagttctgttctactcgttactccatgagaacatgcctggcctatccagatggaggatgagaaccatgtagatcagagctgtgtcccctcagtcccatccctacctctctgttgaggccaacctagaagatgcaatagtcagccatcccctaaacatatgagtaagctcagtcaagatgagaagacctgacctccacttgatcccaggcatataagcaattgttgccacagaggttttatggttgtttgttatacagcattcctggtgtcttaggtaattgacacattgattaatagcataactccaatttaatttattattggaatgtacttagctaaaaggcatttctcagtttcctttgctgagtatgcccacttgcataa

SEQ ID NO: 498479 - DNA, 627 bp, Homo sapiens
agtgtctatcatttggtgacaagtgtaatgtgagattagatatttccttgtgtaagtaatttgcaagtaaaatggtctatacagatggaaaaaagtccccttcccaagatattaaagcatattaaaaagctagagtaattaagcaaatgtggcatctatgcaggaaaatgcaaatagattcaaagaataaagtctagagaagacttatgtatatattgacaggtagtttattgaagaaaaatacacataagcaatacactcatgaaaaggtaatatatatttctactaatctaataaatacaaataaaagccacaataagataacattttgttctcattaagcaaaaatgaaatatttgctatcaaatcttggtgaaagtacagggaaatgggttccatgatgcactgctgatgagggaataaactgggacaggcatgtggaaaggtaatttgttagggttatagcttttaatgtgtatatcctaagatcagtaattacttttttcatatctayacatgtacctaagaaggtatgaacaaatatattcattgcaacagtatctataagagcaaaatatttgaaatgactcacttgtaactcagtaggaaggtggttaaacaaaaggt

SEQ ID NO: 498480 - DNA, 485 bp, Homo sapiens
tgcggaaagttggggacgggctggcgaagaagacgggcgaggagggcggcgaacgctgggcggcggggcgcgcgcggggccaggggctcgggcaggaacgcctcgtcctcagccgccaccgccaccgggaaggccaccagttgcagctccgggatgcggccttaggcccgcggccgccatcgcggggcggcccctcggcgggcgctggggagtgcgccgcccaccccgccaggcccacgcaggccgcctgcccagcccgcgcccgcgggccccaccccgccctgtcgcctcggcccttccgsgttcgcgctgagaaagcccccagggcggggcgggtctggggcgccgcacggctctggtggggactctcccgcagaccccaaagccgcccgcgttggctctaatgtcctcacaatcgccggacgcgtccccacaaacaccagggacacccccaaatctgtggggacactcctgcaaactccccg

SEQ ID NO: 498481 - DNA, 485 bp, Homo sapiens
tgcggaaagttggggacgggctggcgaagaagacgggcgaggagggcggcgaacgctgggcggcggggcgcgcgcggggccaggggctcgggcaggaacgcctcgtcctcagccgccaccgccaccgggaaggccaccagttgcagctccgggatgcggccttaggcccgcggccgccatcgcggggcggcccctcggcgggcgctggggagtgcgccgcccaccccgccaggcccacgcaggccgcctgcccagcccgcgcccgcgggccccaccccgccctgtcgcctcggcccttccgcsttcgcgctgagaaagcccccagggcggggcgggtctggggcgccgcacggctctggtggggactctcccgcagaccccaaagccgcccgcgttggctctaatgtcctcacaatcgccggacgcgtccccacaaacaccagggacacccccaaatctgtggggacactcctgcaaactccccg

SEQ ID NO: 498482 - DNA, 574 bp, Homo sapiens
taattatgcagttattatagaaggaaaactggtgcttcataacatttaattcatactaaaatatgcttcttacctatrtttttctttttaattgttaactgtgtaatatatatgaagtatataatatgcatgtactagtagtaatgataataatataataaaactagcaccaaagttctcaccactcagattaagaaataagtattactgaaactggaaactcttttcatatccttccctaatcacttggctctcccttccttacagaaggaacaactatcttgaaatgtttaattcattttgttgcttttctttatagcctttcataaatatatgcatctttaaaattgtattttttatattgttttgaatatttataaataaaattacactgtatgtttttttctataattttgttttagatccagatttagattacatgtggaggcttgttacatgggtatactgcatttctatatgccagcaatgaacaatctgaaaaagatatcaataaagcaatcccattaataatagctacaaataaaattaaatacataggaattaaccaaagaag

SEQ ID NO: 498483 - DNA, 574 bp, Homo sapiens
taattatgcagttattatagaaggaaaactggtgcttcataacatttaattcatactaaaatatgcttcttacctatatttttctttttaattgttaactgtgtaatatatatgaagtatataatatgcatgtactagtagtaatgataataatataataaaactagcaccaaagttctcaccactcagattaagaaataagtattactgaaactggaaactcttttcatatccttccctaatcacttggctctcccttccttacagaaggaacaactatcttgaaatgtttaattcattttgttgcttttctttatagcctttcataaatatatgcatctttaaaattgtattttttatattgttttgaatatttataaataaaattacactgtatgtttttttctataattttgttttagatccagatttagattacatgtggaggcttgttacatgggtatactgcatttctatatgccagcaatgaacaatctgaaaaakatatcaataaagcaatcccattaataatagctacaaataaaattaaatacataggaattaaccaaagaag

SEQ ID NO: 498484 - DNA, 442 bp, Homo sapiens
tcattccatatatccagaagaaaataaacttttaaaaattatttgctgcaggaactggaaagaaggtacagaaaattacttggtatacacaaaaggatatatgttataatatttataaaataggggctgaaagtcgcaagaatagaaaagtcagaggaaaaaaagatttgaaatgaagaagcatggcagaagtgaaagtatcatagtaaaagcagttaaagacaaacagaaaacacattataaaacataaatcagtgatatggattgccarttcaagataatctccaaagctcagaggaaattgtaaagtgaaaacgaagagaggggagattaaaattgaataaaaagatgttattaaatccagtaattatgaatttaaaaccctcaaaaattgtcattgaagaagtattcaaagataccacagaaaacttatagagctgaa

SEQ ID NO: 498485 - DNA, 540 bp, Homo sapiens
ctgggtgtggtggcaggcgcctgtagtctcagctactggggaggctgacgcaggagaatggcgtgaaccccggaggcggaacttggcagtgagctgagatcgcrccactgcactccagcctggaagacagaacgagactccacctcaaaaaaaaaaaaaaaaaatcctttttgaactctatttcactggcaagtctttattcttcaagagattggggtgtctcatttgatgcttgaatatcacatatatatcaatgtttagaatttatttcccaaaaatcacatgtaagtttttaggcttagctgtatttaatataaagtaagaataatttttaaaattccttagaaaaaaatgattcatatttattttttccaattgtcacaaggatttcaagggtttaaagagcaatcttactggaatcaagaccctagggcataaatgtgcttgactgtgtgtacatatggaaaagaaagatggaaatataccttaggctgccagagattctactcctggaataatatcaccatataatctctcctt

SEQ ID NO: 498486 - DNA, 540 bp, Homo sapiens
ctgggtgtggtggcaggcgcctgtagtctcagctactggggaggctgacgcaggagaatggcgtgaaccccggaggcggaacttggcagtgagctgagatcgcgccactgcactccagcctggaagacagaacgagactccacctcaaaaaaaaaaaaaaaaaatcctttttgaactctatttcactggcaagtctttattcttcaagagaytggggtgtctcatttgatgcttgaatatcacatatatatcaatgtttagaatttatttcccaaaaatcacatgtaagtttttaggcttagctgtatttaatataaagtaagaataatttttaaaattccttagaaaaaaatgattcatatttattttttccaattgtcacaaggatttcaagggtttaaagagcaatcttactggaatcaagaccctagggcataaatgtgcttgactgtgtgtacatatggaaaagaaagatggaaatataccttaggctgccagagattctactcctggaataatatcaccatataatctctcctt

SEQ ID NO: 498487 - DNA, 625 bp, Homo sapiens
tgccttccagtaagctaaatatgctaaacaatgctactttctcactaatattttttgtttgggaaaatacagttatttttcataaagaaatatgtcatgaatgttaactttagtgagtttattgttgttattttgaaataagataaacaatttttaatattcttagttctaatttctaatttggtaaataataatacatggaaaccacataaacaaaagctcttcaaggttcccaataatcttttaagagtgtaaaggttgagaggtgcaggaaattgagagattttggttaaaaggtacaatctttcagttataagtgagtaagttcrggagttctaatgtacaagatggtaattatagttaatagcactatataatatactagaaatttgctaaaagagtagatgttaaatgttctcgccacatacaaaaaaatggtaactatatgaggtgatggacatattaactgacttgattctagtatcatttcacaatgtatacatatatatcaactcattatattgtacatctcaaattatacaattctatttgtcaattataccccaataaagttggggtggggggaagaatataatgttatccttaggccaaaatgtttgagaac

SEQ ID NO: 498488 - DNA, 433 bp, Homo sapiens
tcttacgcatgtgtgtgcatgcgagtgtagcacacagaaagggaaaatgaagaaggcctgtatttctaggcaataagttttcaaagactataataacatatctgaacatgcacctgtgtctacactctctaatcaaagcattttaatacataaattgagaaatgggctaaatcaattgacaagaacaatagatcaattgtctacctatctacctgtccctacctcataagtcgtggattatggaacacatagtgaacagtctgaatctaatagggggtgactgtggtgtggctttttttctgtagccactrccaataacgttctatgtcaaaccttccttcaccattttgtagcattttgtttaattccatcttgaccatatccactagcttttagaaatccattcagttttaaatcccaatcttacttcagc

SEQ ID NO: 498489 - DNA, 664 bp, Homo sapiens
gctggaaacacacacactacctttcataaaaaggatcgatgattcagtaagtagaaacaaaagcacaaaaagcagagcccggatcatgaggtcaggagayggagaccatcctggctgacacggtgaaaccccgtctctactaaaaacacaaaaattagccgggcgtggtggcgggtgcctgtggtcccagctacttgggaggctgaggcaggagaatggtgcgaacccgggaggcggagtttgcggtgagcggagattgtgccactgcactccagcctgggcaacagagcgagactccatctcaaaaaacaaaaaaaacaataaaacaaaaaaaaacaaaaaaaaagcagagccaagaatcgcagggattttattcccagtcttgaaatccaatcaagaagttcccaatattttcctgactgggtttcagagctgctttagcctagtgattcctttctaccttccattctccccttttgcaatggtcatgtttatagtagtttaggattattatcatatacgggccccaccacccactatctctctaggttctcaagctcacagatggggaggaatttttctctaggagaataattcacccagtagcctcatccatgccttgacttaatgtagacagaagatgagatgctggtctctagtcagt

SEQ ID NO: 498490 - DNA, 664 bp, Homo sapiens
gctggaaacacacacactacctttcataaaaaggatcgatgattcagtaagtagaaacaaaagcacaaaaagcagagcccggatcatgaggtcaggagatggagaccatcctggctgacacggtgaaaccccgtctctactaaaaacacaaaaattagccgggcgtggtggcgggtgcctgtggtcccagctactygggaggctgaggcaggagaatggtgcgaacccgggaggcggagtttgcggtgagcggagattgtgccactgcactccagcctgggcaacagagcgagactccatctcaaaaaacaaaaaaaacaataaaacaaaaaaaaacaaaaaaaaagcagagccaagaatcgcagggattttattcccagtcttgaaatccaatcaagaagttcccaatattttcctgactgggtttcagagctgctttagcctagtgattcctttctaccttccattctccccttttgcaatggtcatgtttatagtagtttaggattattatcatatacgggccccaccacccactatctctctaggttctcaagctcacagatggggaggaatttttctctaggagaataattcacccagtagcctcatccatgccttgacttaatgtagacagaagatgagatgctggtctctagtcagt

SEQ ID NO: 498491 - DNA, 554 bp, Homo sapiens
aatggtatctcctgggatgtagtatgggaaaagaagaggctaaggacaaacctctgggtggctagaacagtgtctggtacatggtagatcatgaataattttttgtcaaatgatgatgtagataaataygaatctaaatctattttatcttgaatgctagctttctttttttagtaacctcatcctctctctttttaaatttaaatttattttatattttagagacaaagtcttgtcctgtcacccagactggagtgcagtggcaagctgataactaactgcagcctcaaactccttggttcaagcaatcctcccacctcagcctcttgagtagttgagactacaagcataagccactgtgcctggctattttttatttttttgtggagatagagtttctgtatgttgctgaggttggtgtcaaactcctggcctcacactatcctcatgcctcaggctcccaaagggctgagattacaagtgtgccacatgctaggattacaaaccactatgccaggcctccattctgctcctgaactgcacatcattgcaat

SEQ ID NO: 498492 - DNA, 561 bp, Homo sapiens
tcctaatttaatattcagagttatagccttcctaatttttctgctgccaagaagcactgactgccctttttaaacaattgagcaccaaattcccccgagaggagataatgacactaaattgttagaagcagcagaaagggttttcaaggagaaaggaatacataatccaataaatgaataacaaaatggagaaaatatatgcatgttgtcatctggagaagatattttatataaagatgttttatagtcattagtattgttgacaagtaatctggtcctcctrtttctagacatatagtaggatttcatgtcacatggcaacatacgtttttgtcatgtgacataatcataaatgtgatgtatcatcatatttatattcccaaggattaagtttagaaatcttaggggaaatcctgggaatggggttaaaattctacctaccacatttgctcaacaagatatgaacaaacattatatgtttttcttccatgaagttagttttatgagccatgaaagttttgctatatctttttttttttttacttatctccagcaattagc

SEQ ID NO: 498493 - DNA, 624 bp, Homo sapiens
tcccagctgctcgggaggctgaggcaggagaatggcgtcaacccaggaggcggagcttgcagtgagccgagattgcgccactgcactccagcctgggcaacagagcgagactctatttcaaaaaaaaaaaaaaaaaaaaaaacttggcaaggcctatataagaaaggaagaggaaaattgcaagtcatttgtgaaacacagatacaaaaatctcaaataaactacaagtaaaacaaattaaagaatatatgaaaatgacactacctcatgcccaagttgggtttatccyaggaatgtaagtgtatttcaatatttgaaaatcaattaatttaactgatcacattaatagattaaagaagaaaaatgtaatcatttcaataggtgtaaagaagcatttgataaatgatcttataaaatgtatgaaaatgtaaataccgtaaagatataagacagacttaaagcagaagcatgtgttgggaggacttgttttaccagatatcaattatttatacaaagctgtcatacgtttagtattgatacaaggactagacaaataaactaatggaaagaattaagatctcagaaacagggtctcaaaaatgaggacactttataatgaaagtg

SEQ ID NO: 498494 - DNA, 632 bp, Homo sapiens
ggtccgttttgacagagagctgattggtccatttacaaacctttagctggacacagagtgctgattagtgtgtttacaatcctttagctagacagaaaagttctccaagtccctaccccattagctagatacaaagcactgattggtgcatttataaacctttagctagacacagagtgctgattggtgcatttacgatcctttagctagacagaaatgttctccaagtccccacacgtcccagaagcccatccagcttcaccattcactggcactcgcctccagactttgtggcacctagcctaggcactccggcagcccagagggagctcgtcccagacaaccaagaggaaaagrggggaagcgagaaagagatggagacctgccatcgtggccaatgaccccgtgaagaaggaacggtggtccacgcatgggacccagccttcaatcaagcccagcaggcctcggctcccaccggcgcctctgcctctacaccttcccactagcagagggagcagagggagccagccccagagaggggcccccacagcacagcggcaggctgaagggctcctcgagcacggccacagtggatgcagaggccgaggaggtgcccagagcgagcgagggct

SEQ ID NO: 498495 - DNA, 590 bp, Homo sapiens
actccagcctgggcagcagagcaagaccctgtctcaaaaaagaaaaaaaaaacagaaaaaacatgccctgtatgctattatttgtatgattataagcaccagtagtttcttttagaagccatgatgagtcctgtccaagttcaggacaaagatctttccttgggagaaaaatcttcagaggacagaagacgagtctatcaggttccaccttccaagcctcagccaaaatctgccgcttaagccctagatctaggtaatgttcagtaaggcacacaaaaacctacagcgccacctactaccaggatggagtttaaaaaaagaaagaggaaaaaaaaaagaaaaataaatcctatagctatagacaacattctacctcccctgaccttcactgcccttgactggtctctgaggctccacaggacagtttgaaaccaacaggtctatgggataagaagtyacacctcccatgaagtaacctcagtctctctcatcaccaattctgcctctatcttgggctgagcactcccatccatgcctatatcctgcaacagcctcctgacggtctccctgcttctaccctcaaaccactg

SEQ ID NO: 498496 - DNA, 539 bp, Homo sapiens
tgtcatagctcttatcttattggatcttcacagtcactctgtggggctgacaggacagtatgaataaagtttggttcatctcatgaaccagagcagaaccactcttcagtcartcaggacaagcagggaagtataggaaagcctggcagaggaggagccccaggttcaggtggtgaccctggatgggaatctggaggcagaaagaggtcaaaggcagcaatgaatgaggtggaggtccagatgcccctagaaggatctaaacaatgagctgagggggtaggatgagggcagggctgtgcagagcaggcgcaggctctgacttactttcatggcttttcatggcatagacgtcaacagaggggtcgaattccccaggaccaaagaaccgaggaaagctgaggaggttgccagggctgtccggaggtgtgccataggagcagagtaggttgccacccaccccatcattctcacactcctcgtcctctgcccgctcctccacctccatctcctcctgctctgcccggtccacgtcgtggatg

SEQ ID NO: 498497 - DNA, 539 bp, Homo sapiens
tgtcatagctcttatcttattggatcttcacagtcactctgtggggctgacaggacagtatgaataaagtttggttcatctcatgaaccagagcagaaccactcttcagtcaaycaggacaagcagggaagtataggaaagcctggcagaggaggagccccaggttcaggtggtgaccctggatgggaatctggaggcagaaagaggtcaaaggcagcaatgaatgaggtggaggtccagatgcccctagaaggatctaaacaatgagctgagggggtaggatgagggcagggctgtgcagagcaggcgcaggctctgacttactttcatggcttttcatggcatagacgtcaacagaggggtcgaattccccaggaccaaagaaccgaggaaagctgaggaggttgccagggctgtccggaggtgtgccataggagcagagtaggttgccacccaccccatcattctcacactcctcgtcctctgcccgctcctccacctccatctcctcctgctctgcccggtccacgtcgtggatg

SEQ ID NO: 498498 - DNA, 455 bp, Homo sapiens
aatctcctgttactgtcacctggacttcaaactgcctttggtccacaagaatcaggcatatccactccagagttccctgtccatgccaacacataggctccagcttcccaattacatggaagttggagtagtggccccttcgggctcagatagaggggaggcacagctccrgcaaacacagagccctttaccttgaggtcatacttgcgatgcacagtgagccgatggctgaacacgttcctggtaaccaccatgtaggtttccacaccatccacggtcaggcggtacatgcccaggaactgtggcaaaagcgtgttgccatgacactccactataaactagaatggaaaggaagaagagagaggactaaggaacaggcagtgccagggatggatggggctcaccccagactaaaatgctccctggctccctgggattctaacctctagaccagt

SEQ ID NO: 498499 - DNA, 620 bp, Homo sapiens
tgaggacttcaaccccctcgagtggggagggagcgctgagacaagcagaggcagagagcccaccctaacaggggattccaggggaactggcagcagaccaatcctctacctccacctgttttcagaaacctggggaagcaagccaggaaagagggacgtggcgaggttcttgacaacacagctccctagatacaaagcaggtgcacaaagtaggtgctcaataaatatttgttgaatgagcaaatgaggtcaccctgtttctcccccagctctaatcccagaagtcctctggagaagcaaatctcgacctccttcctcaaacactgtcatcagcaatacatatttatccagcttgcaaagcatgctgggtactgcaggttgggggcagggtggccttcagaggtgacaaggtttttacccacctatgcctttgggagataargctcagggaggagaaaaggctgaaaccaaggacacaccctgtgctttgggccacgtagtgggctgagtaccatgggggattgtagagaaacgggtgagtctaatttgactcttttgctgtaaatgggaggccttgggaagttggttagcaactatgggactgaagctgcctatgggac

SEQ ID NO: 498500 - DNA, 511 bp, Homo sapiens
caggacaattgcttgaatctgggaggtggaggttgcagtgagcagatcacgccactgaactgcagcctggttgacagagcaagactgtctcaaaaaaaaaacaaaacaattttctacctgaaggtgataagaaaaaattatcctgatgttttcttctaaatgttttattatttggcttttaatgattagctctttacctggagtttattatggaaaataggaatctaagatagataatcagttgtcccagcaccattgattgaataatccattcctcctggtttgtaattcgatctctgttgtaaatcaagtttccccatgttcctgggtcagtcaggtcyttctatttctgttccattggtctatttaactagcctggtgccaatactacaatatcttagttactatcacgtcataaaaaccttaacatctgataaaatgagtcctccacttccccctcaccccaatgtattaatgctatttccagagtgagctattagctatcttatat

SEQ ID NO: 498501 - DNA, 608 bp, Homo sapiens
agggtcttatgctatcagatattaaaacctattttttaaattatagtaattaaaataatgtggtattaacacacgaatagacaaaatgatcaatggcaaagaagacagtgtccagaaagagatctacacataaaagattccctgatttatgacaaaggcaacactacagttcagtggggaaaaaatgatctgttcagtaaatggtgccaggtcaactggacatccatacggggaaaaaaaartgttgatcttcacttgttaccatacaaaaatcagtaccagatggatgacagatctaaatgggaaaatgtcaaataaagcttttaaagaaaatatctttgtgaccttagagtaggcaaatatttttttaacagcactaatcacaaaagaataaggtttaattggattataataaggagcttctgttcattgaaagacacgattaaaagagtgcagaggccacatatagcccaaggtaagatatatgaggtatatacagttgtctctttattcatggggaattggtcacaggactagggcaaatacccagtccatggatgctcaagtcccttatataaaatggcatagtatttgcatataacatacac

SEQ ID NO: 498502 - DNA, 607 bp, Homo sapiens
tgttaacattttaccaaactgtctcatctattcytctcaccctcccccatcttttttcttggtgtattttaaagcaaataccatgtgactcccatttggcctgttataaataaataaataaaaataaagcaaatatcagacattacctaatttcacctgtaaatgtatcagtatgtatctctaacagacaagtacttgctgtgatttaggtgtggtttgtccctgccaaaactcatgttgaaatttaattgccatgctacgatgttgggaggtagaacctttaagaggtaggacctaatgggaggcatttaggtcacgaggctccactttcatggatggcttggtgccattctcacaatagtgagtgagttcttgctctctcaaaactgaattagttctcttgggaactgattaattcctgaaagagcaggttgttataaagtaaggactttcttagggcttggcccctttgcacatacccactcccgctttgaccttctaccatattatatctaggcagcagagcccttgctagaagccagtggcatgctcttgaacttcccagcctgcagaactatgagctaagtaagcttctttctttataaaa

SEQ ID NO: 498503 - DNA, 607 bp, Homo sapiens
tgttaacattttaccaaactgtctcatctattcctctcaccctcccccatcttttttcttggtgtattttaaagcaaataccatgtgactcccatttggcctgttataaataaataaataaaaataaagcaaatatcagacattacctaatttcacctgtaaatgtatcagtatgtatctctaacagacaagtacttgctgtgatttaggtgtggtttgtccctgccaaaactcatgttgaaatttaattgccatgctacgatgttgggaggtagaacctttaagaggtaggacctaatgggaggcatttaggtcacgaggctccactttcatggatggcttggtgccattctcacaatagtgagtgagttcttgctmtctcaaaactgaattagttctcttgggaactgattaattcctgaaagagcaggttgttataaagtaaggactttcttagggcttggcccctttgcacatacccactcccgctttgaccttctaccatattatatctaggcagcagagcccttgctagaagccagtggcatgctcttgaacttcccagcctgcagaactatgagctaagtaagcttctttctttataaaa

SEQ ID NO: 498504 - DNA, 656 bp, Homo sapiens
gcccagaccaacaggcgaggctgttcgaggaccttgttagccacctcagccccgcccgccgcgagccttctgctggcctcccgttctgcagggaccctccctagccagcccggccgcgtcccacatccgccgacacgccccttccggcctaatccccgcccctcaagcaccggccccgccccataggccccgtccgtggccccgcccgccgcgagctggcgccgggtcctctcagcgcccgccggcggccgcgtccacccccgacgctctgaggtcaccgactgggccggcccgcggggggcggagggacggagggaagatggcggcaggggccggatattggcgccgcctcccccaatcycggagccggcgcagatgaggcagttcggctggggccagcggcgctttggaacccgaggtggggggacctggcggtggggcctggtcctgctatatgccggcgcctcggctagagtgagcggcggcgacgcctctttcctccgtctctttccctgtcgctgcgagagcgagcgggcggcggaggcggcggcggcggcggggccgggatggaggacgttaactccaacgtgaacgcggaccaggaggtgcggaagctgcaggagctggtgaagaagctggagaagcagaacgaacag

SEQ ID NO: 498505 - DNA, 591 bp, Homo sapiens
ataggcaagggaattttagaagtcagcttggattaagaggaaagataatttggttggaaatcaagagacttttgtgctctatttctggttttgacaataagtagctgagtgagcctgaacagtgaaatttatctctctggatctttctcagtttcccatctataaaatgaaggagtcagagatggtgatctttaaggtctttccagagctaacattctaatatgaaggggaaaatctctgtgggcctaaatcattggaggagtagtctcagaaacaaggggttagaartgaccaggcatcatgaacatggggagtgtgtgtgtgtgtgcatgcacagttggaggtatggggaggcaggagagggattgtttttgagctctgcatgatagagtacagctctgtactcatctcagatatgatgacagagtccagtcactgtaaacttcagctccttgatgtggaacaactgcacagttaatcaagccaaaaaataaggagtcatttttgattcctcttgttccaatatataaccaaatccaagtctatcaagaatatagactcagatcacttgacttcaggcacccaataaat

SEQ ID NO: 498506 - DNA, 591 bp, Homo sapiens
ataggcaagggaattttagaagtcagcttggattaagaggaaagataatttggttggaaatcaagagacttttgtgctctatttctggttttgacaataagtagctgagtgagcctgaacagtgaaatttatctctctggatctttctcagtttcccatctataaaatgaaggagtcagagatggtgatctttaaggtctttccagagctaacattctaatatgaaggggaaaatctctgtgggcctaaatcattggaggagtagtctcagaaacaaggggttagaaatgaccaggcatcatgaacatggggwgtgtgtgtgtgtgtgcatgcacagttggaggtatggggaggcaggagagggattgtttttgagctctgcatgatagagtacagctctgtactcatctcagatatgatgacagagtccagtcactgtaaacttcagctccttgatgtggaacaactgcacagttaatcaagccaaaaaataaggagtcatttttgattcctcttgttccaatatataaccaaatccaagtctatcaagaatatagactcagatcacttgacttcaggcacccaataaat

SEQ ID NO: 498507 - DNA, 232 bp, Homo sapiens
gagttcttggggagacttattggagtaataattccagcccttctgcttggctaggtcttcattaactatctctactagtccatgcagcaggcagtaagaacctattgkgcaattacaagtcttttcctgtgatctctaggcttacaattcctgagtcttaatattcaacccaaatctctacccttagcaccagacttttacctcaacctgctaactggatgtccatttgctc

SEQ ID NO: 498508 - DNA, 597 bp, Homo sapiens
acaaaaaacatctgataatattttaagaaaattacaaattcttgatgggccgcattcaaagttgtcctgggccgcatgcgacccatgggccgtgggttggacaagcttggtctagagcctaacccagcmtcaggttagatggtggaggattggacaggaaggaatgatgaggaaggtactccaggaggcgagacctgctggggcagaagcatggaggctggaaaccctggggggaatccaaggaggagcacctctgtggttgaggctgacagcgggtccacggaggggcgttaggtagtgcccagcacagaggtggttttgtgggccaggcaccatgttagcagcttgccaggatcatttcacggactcctcatgctaactccatgaggcctatcacgatctgcattttgtagagcaaaacagcctccaagaggctaattccttgcccaagatccctcagtaagtggtgggtacaggcatcaagtctgtctgtcagtcagtctgtccacagggccactcaccttcccagtactccacactatcacccaggtaatgcgaaaagagtcatagagaatgaaggggaagctaatttggccc

SEQ ID NO: 498509 - DNA, 492 bp, Homo sapiens
cactaaaaaagaaaagaaatcacaaaaaacatctgataatattttaagaaaattacaaattcttgatgggccgcattcaaagttgtcctgggccgcatgcgacccatgggccgtgggttggacaagcttggtctagagcctaacccagcatyaggttagatggtggaggattggacaggaaggaatgatgaggaaggtactccaggaggcgagacctgctggggcagaagcatggaggctggaaaccctggggggaatccaaggaggagcacctctgtggttgaggctgacagcgggtccacggaggggcgttaggtagtgcccagcacagaggtggttttgtgggccaggcaccatgttagcagcttgccaggatcatttcacggactcctcatgctaactccatgaggcctatcacgatctgcattttgtagagcaaaacagcctccaagaggctaattccttgcccaagatccctcagtaagtggtggg

SEQ ID NO: 498510 - DNA, 597 bp, Homo sapiens
acaaaaaacatctgataatattttaagaaaattacaaattcttgatgggccgcattcaaagttgtcctgggccgcatgcgacccatgggccgtgggttggacaagcttggtctagagcctaacccagcatcaggttagatggtggaggattggacaggaaggaatgatgaggaaggtactccaggaggcgagacctgctggggcagaagcatggaggctggaaaccctrgggggaatccaaggaggagcacctctgtggttgaggctgacagcgggtccacggaggggcgttaggtagtgcccagcacagaggtggttttgtgggccaggcaccatgttagcagcttgccaggatcatttcacggactcctcatgctaactccatgaggcctatcacgatctgcattttgtagagcaaaacagcctccaagaggctaattccttgcccaagatccctcagtaagtggtgggtacaggcatcaagtctgtctgtcagtcagtctgtccacagggccactcaccttcccagtactccacactatcacccaggtaatgcgaaaagagtcatagagaatgaaggggaagctaatttggccc

SEQ ID NO: 498511 - DNA, 604 bp, Homo sapiens
gattggctttggttgttacactaaagaatttagctacgttgtctaggcataggggagccattcatagttcttgaggaaggctgtggcataatctacctggggtttcaggaagagcattccaggggcagtgtggaggatgaattcgaggggctgagaatggggcagagaccagctcagaggttctgcagaccagcggagagataaagggtagataaatctagataaaaattagataaacttattgaggacttactatgtgtcaacactttccatctcagtgttaggtgcccttgttcccattttgcagatgaggaaaccaaggtgcaaaggggttaaataacttgctcaaggtcacatagccagtgaatccaattaggattcagatcctggactatctgaattcaaaaccctgaaatttcccagcccctgatgtatacaggcagagaagscccagaaggggtgctgggaacaagagaaggatcagcaagattaagagatctggatggcatcttccttcctcagcgctcctgagctgagcatcttccatttgccccctccatggcagctctctctatctagctctgtaagctctggcaggtgctgg

SEQ ID NO: 498512 - DNA, 615 bp, Homo sapiens
gagccagcagtggccaagatgagcctgtctttatttgtaaattcaatctggggttttccagccatgctagattggattacggtttagcaaacatttactccccacctcttcccactctggtcggggtacattccctgcactgttgaagatgggcttgrccatgtgcattgctttgagcaagaaatattagctgacaagacagggcagaggattgagctgtgtttgtgtggatggacccactgatcccttgtgctccggtgataacactaagagggttcccctgcatggctgttgcccttcagctgggtggtacaatgaacttatacagtgtgagcccaacctgcagcctgcagcagagccgcccagctgagcccagcggagactaagagaatctggatcgatcttcaggcccacagatgggaaaacaggtgcttgttgatataagccactgagattttggatggtttgtttctcatttttgtggcaatagctgactgatacacagatctaaagctgaagcagaggaaggggccaagagctggtgttggaaagaagtaggctctccatatccctcccactgccacagccctgcaagggaaggatagatggagaaga

SEQ ID NO: 498513 - DNA, 615 bp, Homo sapiens
gagccagcagtggccaagatgagcctgtctttatttgtaaattcaatctggggttttccagccatgctagattggattacggtttagcaaacatttactccccacctcttcccactctggtcggggtacattccctgcactgttgaagatgggcttgaccatgtgcattgctttgagcaagaaatattagctgacaagacagggcagaggattgagctgtgtttgtgtggatggacccactgatcccttgtgctccggtgataacastaagagggttcccctgcatggctgttgcccttcagctgggtggtacaatgaacttatacagtgtgagcccaacctgcagcctgcagcagagccgcccagctgagcccagcggagactaagagaatctggatcgatcttcaggcccacagatgggaaaacaggtgcttgttgatataagccactgagattttggatggtttgtttctcatttttgtggcaatagctgactgatacacagatctaaagctgaagcagaggaaggggccaagagctggtgttggaaagaagtaggctctccatatccctcccactgccacagccctgcaagggaaggatagatggagaaga

SEQ ID NO: 498514 - DNA, 644 bp, Homo sapiens
cctgctgcctccaaagtgagcctgaggacccatggtgagacaatctcatgggggtggcttcctcactaccatgtggcatcacgcaggccgcttaccccctctccagccctgcacacattgtctgattcacattctgcaggataggaatgatgtcccctgcagttgtgcaaggcagtggtcctgcctcctgagagctagaggcctgaattgtccaaaagagcatgggaagaatggaaaggtcaacaggggcaggaaggatggctccagtgccaccagacacacttaggcagcccttggatgaaggcctttcattctcttgggctggagcagggcagggggtgaccaccttcccctcttcccyccaccaggcattggcgtccatgggttctaggctttgccaagggaaccaagcagccctgcttcctggtaaccctttccccgtctgctggcatggctgcttggctggatcgagcccctcaggtggcaagcatgaatccctcagaggcagccccagggatgcctggggaggactttgcttcagagctgggccccatctcgacttcagcccttacaggccttgtggcctaaggcaaggtgattggacctctggctccagtttgtctatctgtaaatgggggtcacag

SEQ ID NO: 498515 - DNA, 571 bp, Homo sapiens
ttgagggtttaattggattcttgtttttcctcctcctgccctctcccccatctccgtaggcctctctccgtgcaggaagtaggccacagcatctcattaggagggagagcatcccttggcagactcgcatttatgactgttcataccagcctgcagccgcatccttggccccaggtcgctaggattattgaggccatcgtgatttaggaccttgtcatgatgtctgatgggcaccaagcatggccccagacaaaggtaggcctcttgcccaggcaggccctccctcctaggctggcagggcccttcctgcccctccctgctaggccaagaggtccccagtcctttcaatacgttgtgctsctgaatgggcttgataatccaattctgggagaaaagtggtggagaacagcaattaaaggccgacccaactacatctggggatgtgtggagtcactaaaaccactaattctgttgccacataatgaggtttcttccctttttttgtcaccctggtctccccttgtcaattaaggccaagcacagaagagattggttacaggagggtgaacga

SEQ ID NO: 498516 - DNA, 525 bp, Homo sapiens
taggcctctctccgtgcaggaagtaggccacagcatctcattaggagggagagcatcccttggcagactcgcatttatgactgttcataccagcctgcagccgcatccttggccccaggtcgctaggattattgaggccatcgtgatttaggaccttgtcatgatgtctgatgggcaccaagcatggccccagacaaaggtaggcctcttgcccaggcaggccctccctcctaggctggcagggcccttcctgcccctccctgctaggccaagaggtccccagtcctttcaatacgttgtgctcctgaatgggcttgataatccaattctgggagaaaagtggtggagaacagcaattaaaggccgacccaactacatctggggatgtgtggagtcactaaaaccactaattctgttgccacataatgaggtttcttccctttttttgtcaccctggtctccccttgtcarttaaggccaagcacagaagagattggttacaggagggtgaacgagcctggaggc

SEQ ID NO: 498517 - DNA, 436 bp, Homo sapiens
atgaataaatgaatgagtggatgagtactgactgatgtcatgaatgaatgaatgagtsaatcctagtgtcattactattatgggatgtattcgtcattactcccaaaacttagaggcttaaaacaatacacgtttaccatctcactgtttctgtggttcaggaatccagacatggcttgactgggttctagctgcaggatctctcactaggagggccttgttgataaatcagggctggctcagccctccatcccctgcctataagttctccaaggcccagcatgagcctctcatgaggcaggcatcctcgcatgtggtaggcatcctcaattgtgctaagccccagaccccagggttcaggctgccactgggacttctagagtatatgccccacctttgagggctggtcagagcttgttgggaaggcctcttcctc

SEQ ID NO: 498518 - DNA, 673 bp, Homo sapiens
tgccaaataaagactccacattaaatccttatttcctgctaatctccattttaaaaagaaaagacgagaaaatacaaatgcccagtaaacatatgaaaagatgttcaacatcactagtaattagagaaatgcaaattaaaataagaagtcacttcccccattaagttgggaaaatattaaagtctgcaaatatcaagcgttggtaaatgtgtaggaaaaggggaaactctcattacctgctggtgaacatataagtgaacatataagttggtaaagacattttagaggataatcttacagcatccacttcttaaaacacaccaatcttattacccagcgattccacatctcaaagaaacacaagcacaagcaacatgttgtttacaaagattgttatcgtgcatcatttataacagcaaaagaatggaaacagcatgaatgtccacctgttggtggagagttaaataaactaacatggaagaatcttcaaaacacaatggtaattagcagaaagcaagttgcagaccaagacattcagtacaccaattggctttaaaataacaataataatcatcaccttctaggatacatatatatgttaacacatcacagggaaagtcctagaagaaaacacaccaarctgataacaatagttaccggggacgggaggcaa

SEQ ID NO: 498519 - DNA, 681 bp, Homo sapiens
cccactttcagaaccactacccttacccctaacagttcctaactcttcactttggtaattataactactttcagttccctgaacaagtgaagctctctcttagcttcaagtctttgcatatgctgctccctcaccttagactatatccttctttccctccccaacacattttggcttagttgattcttattagtccttaaagatctaggataagttaccaccttctttgaaaatctttccctgatctgccccttccttcytacctacttctctagcaccctgcacatacctagctccaccaagccattcaccatatcacagtgtaacatttctgtaccattctacctgggattacaaactctgagagaaagagccatttgccatttacattccactttatatccctcaaacccagcacagtacctagcacgtagtaggctctctatattataaaaataaacaactttcatatcagaactaaaaccagtgttaaaagtactaaattgttaacagaatttatatttcaactgaattatagcctgcatgtttatattctgttgacataggcttcgcaaagagtactttaaaaatactcacgatttcataaaagacacaaggcagagtatttttcccatccctcataagaaaagtcttcgaataatatgggccaggtgtaacagc

SEQ ID NO: 498520 - DNA, 428 bp, Homo sapiens
cctggtgtgtccttgcttgtttataacccttggagctgtgatgcgggtccttgtcagatgctcttctcaccgcccacagggcctcatatccactcctaacatttgttagggcccagttctgcctctctactgctctggctggccagacccatgccaggtctggctctgccctgcctgtcctctcaggtactgatgccacaccccttagggcacagccttccttttctcacagaagatacagcttgctgaatgttcctgcttgtggagaaagaggcatgcttggctccaagcaacaaatgtgattgtgcaaaattctgaaaactgaattttaagatgcatttgggcagtggttctcatctgttacacctaagatgaataatgttcacatattctcaaaggcatytgcaattttgataaagcaatacaat

SEQ ID NO: 498521 - DNA, 490 bp, Homo sapiens
gtcaataatttcagtaatattgggtatggagccttagtaggcatgaccatgacattatggttgtggtaatccactgtgaggcaccattcatttttcccaagtttaaaaataggccaaattaggttgttgatggaaaaataatggatataaacaacccttctctaaatagatcctgtttaatgggcttcactccttaaaggtcctgttttaatttayactggggcatattaactattttaactagggcttggggaggcccatggtgtcccattttgccaaaccaatttataaatgccaaggacttgatttaattttaatttatgacttattgggttagactgtccatgcccattgtgggaaacgttagaggatgctatgatcgtgggaaatttaagcaagtcagtagttctgctaattaaagtgaggcatgcctgtttgttctctattttttgttcattaacttccccaagattacaggggtaccttgttt

SEQ ID NO: 498522 - DNA, 490 bp, Homo sapiens
gtcaataatttcagtaatattgggtatggagccttagtaggcatgaccatgacattatggttgtggtaatccactgtgaggcaccattcatttttcccaagtttaaaaataggccaaattaggttgttgatggaaaaataatggatataaacaacccttctctaaatagatcctgtttaatgggcttcactccttaaaggtcctgttttaatttacactggggcatattaactattttaactagggcttggggaggcccatggtgtcccattttgycaaaccaatttataaatgccaaggacttgatttaattttaatttatgacttattgggttagactgtccatgcccattgtgggaaacgttagaggatgctatgatcgtgggaaatttaagcaagtcagtagttctgctaattaaagtgaggcatgcctgtttgttctctattttttgttcattaacttccccaagattacaggggtaccttgttt

SEQ ID NO: 498523 - DNA, 553 bp, Homo sapiens
gctcacagtagtaaagaaatgggttcaagagaaaccctgcaggagggaccttgggggtggtaatgttgttgggggttccaaagttgcaggttccacatctctgcagtgggaagagtagattgaggagcgagagggagggcttagagacatgcaagggcagccagtgccatctggcaagtgtggggtgcgtgaaggctgagctggtctggctggggatccccagcctgtgtttaggcagtgagggccactatgggagtccacgtgattcagactctcctgtrcttttctctcttgcaggatgtccggagaatataccaactccgtgagcatttgtgagtatttcatgactctgagggaatacttttagtccatcaacaaacacaaagtgggtgggtgtccaccgcccggccccctgaggaagagcttggctctgcctgttgaccacttggtcacatactcaccttccttgctgagacctgcggcctccccattcagagctacttcttccaggtggagctagtgcccaggacattctgatactgcacactagcct

SEQ ID NO: 498524 - DNA, 479 bp, Homo sapiens
cctaacagcataaacatgtgtaaaagtttggtgtatttggagaatgacagtaccctctcccctaagcctgacccagatgagaaactggttgacactcaacctctaacagatgcccatgacaggtgtcctgtgcacgttctcagccgggactctgatggccctgccacctgcctccagcctgcctccatccagctcaccccaacagggcccggcctctgtcccatgcaacctcaggagaatcttctctatgkctgtaggtgtctgggcaaaggacagctgtcttgaggagaaatcataccaaacaaggttttaaactaaggtcagatgtcctcatgcatgtttaatcatcctgttctatatttggtgaccttaaggacaggtcttaaagagatgacacccagtcttctatcccaaaggccactcgtcccaagggcatagctggcagcacctgtctatggctgtggctgaatttcgacggc

SEQ ID NO: 498525 - DNA, 565 bp, Homo sapiens
tgcattcattcatctttacgtaggaagrgggtctagaatggaaagggaaacttaatagttcttagttgaggtgaattttctgttcattttaattttctttcatatggttactatgctgtttgtgcaatttttcagtaaggataaaaaatacatcctagtaatttcatttggactatttcccacccctcccctttaaacatccttatgaggtggctgaagacatagctccttcaaagctggaaaatttctaaagctataaggaactgcatggcaaccgggcatgatggcacatgcctgtagtcccagctactcgggaggctgaggcaggtgggctgcatgtgcagcctcaggctggcctctccttcatgacagacccccgcctgtcaacacccccacagggtgtacacaacaggaaattgaccaggattgaaccaaatccaccataaacaacccctgctcaagaactgaactccaatattttttaactgaacaaacataaatgttcaccaaaacacctataagatcagctcaaaccagaaccaaacctttatgctttttaaaataa

SEQ ID NO: 498526 - DNA, 565 bp, Homo sapiens
tgcattcattcatctttacgtaggaagagggtctagaatggaaagggaaacttaatagttcttagttgaggtgaattttctgttcattttaattttctttcatatggttactatgctgtttgtgcaatttttcagtaaggataaaaaatacatcctagtaatttcatttggactatttcccacccctcccctttaaacatccttatgaggtggctgaagacatagctccttcaaagctggaaaatttctaaagctataaggaactgcatggcaacygggcatgatggcacatgcctgtagtcccagctactcgggaggctgaggcaggtgggctgcatgtgcagcctcaggctggcctctccttcatgacagacccccgcctgtcaacacccccacagggtgtacacaacaggaaattgaccaggattgaaccaaatccaccataaacaacccctgctcaagaactgaactccaatattttttaactgaacaaacataaatgttcaccaaaacacctataagatcagctcaaaccagaaccaaacctttatgctttttaaaataa

SEQ ID NO: 498527 - DNA, 624 bp, Homo sapiens
tgccacagtgtcctccccacccaccaaggcactggcacaaaaagtaccaaggaacgccctacatgtttgtgatttatggaaaatctacacatggacgacaaagaaaaaaaatgaagtatgcattcagttgttgtattgtaaattatgaaaaatatctggctcattttctgaaggcaatcctattacatgatgctagagaaaaagggaggatggtccagtatcaaccctcagataatgtgttgtggtcattcaagtcttaggcgacaattgctcactgataagccagttcaagcattttcttagccaagatacytcataaaccttgccaagagaaaagggcatgtggcagtaagttgtaaagtgataaaaagcagacatgggtggaaaatattttatcaagaaagataaaataaagaaattatatggatatgataacagcacaacaaagaatattttatagaaaaaatcttgtaatgttgccaactactaaggcaaaatgaatgaagagcaaatgggttgtatttcaaacacataccattacactgagcaacagtaacattttactacccgagtcacattttttgactgatgcaataaaatttgcaatattcaaagaaaaacata

SEQ ID NO: 498528 - DNA, 639 bp, Homo sapiens
tctatggagtcaaaatttagtaaagaagagctatacttamaaactatatacaagatgtcacctatcaacttggggaggctagacacatctaacatcagtaatttcagagaaatcttaatagaggagggaggtatgcaagaagccagaaaaccttgagtggagtgggatggaccagagcaccaaatgtaaaagggcctgctggctggcttgaagtaagagaggacataatcttcgaagaccctgacagtcaagtgagtttcaaatttaaaattcaagctacatgaatgattttcaaaattaaaccacatgatagaaccctgtgaggctgtcatcgctaatactgatggttgtactccaatttgaaagactaaaaccagacgtagtatacagggcagttttctatgatcataatgcacatgtttaaattattaggaaataaaataaaatggtacctaagcatgaagaaaggtctgtcagtaattcagatgactgactgcattagttgcaaagacctaagggaggaaaatacaaagcagaaaaacaattggctcctattagcaatacttagaaaattacaaatcataaccacacacacacacagacacacacacacacacactccaacacacttcagttcag

SEQ ID NO: 498529 - DNA, 582 bp, Homo sapiens
gcattaaaaaacccttgtggttggaagtattttaatttaatgtaaatttgatgcaattttgaagttgtgatttaaaaattaygatgaaaatctttttcttacatgatagttaatacagggcctcaagattctacaagcagattctaaacctctggtttctgtgataaactaattaaactgtcttattagtaaactgggaagagtagtgttctacagtgaagtttcttaaacataaatatgaatgtgttgttcaaataaaaacattataaagcttacagataatgagctatagtgccatatttgttccttcttttttcctgaaataaagcagataattcaacaacatttcatcaccagtgtttgccaactttctatgcacatggttctgtagtgagtgctggtaatgtgaaaggatagagataacttagggctcattggatttcatggctctatggtgctttacaaatatccactcatttaatccttaatatgatcaaatgtgactatgtggcaggcactaatatattacaaagaaaaggaaactgaggcacagagatgtcaagcaacttgcccagggctaaa

SEQ ID NO: 498530 - DNA, 582 bp, Homo sapiens
gcattaaaaaacccttgtggttggaagtattttaatttaatgtaaatttgatgcaattttgaagttgtgatttaaaaattacgatgaaaatctttttcttayatgatagttaatacagggcctcaagattctacaagcagattctaaacctctggtttctgtgataaactaattaaactgtcttattagtaaactgggaagagtagtgttctacagtgaagtttcttaaacataaatatgaatgtgttgttcaaataaaaacattataaagcttacagataatgagctatagtgccatatttgttccttcttttttcctgaaataaagcagataattcaacaacatttcatcaccagtgtttgccaactttctatgcacatggttctgtagtgagtgctggtaatgtgaaaggatagagataacttagggctcattggatttcatggctctatggtgctttacaaatatccactcatttaatccttaatatgatcaaatgtgactatgtggcaggcactaatatattacaaagaaaaggaaactgaggcacagagatgtcaagcaacttgcccagggctaaa

SEQ ID NO: 498531 - DNA, 615 bp, Homo sapiens
attgttatgtttccaaaattgatgttaatatttactttaaaaaatatggttctggtcgggtgtggtggctcatgcctgtaatcccagcagtttgggaggctgaggcaggtggatcatgaagtcaggagttcaagaccaacctggccaagatggtgaaaccccatctctactgaaaatacaaaaattagccaggtgtggtggtgggtgcctgtaatcccagctactcgggaggctatggcagagaattgcttgaaccygggaggcggaggttgcagtgagctgagatcgcaccactgcactccagcctgagcgacagagcaagactccatctcaaaaaacaaaacaaaacaaaaaattattatatatatggttttgtagaagtagctaacataaaccgagttttttctgagatgctctatattcctaattttctttggcagttaaatttttgttattgtagttgttgcacattggttatctatattataaccttaggatgctaatttcttcccttccccggaatgggctatgtcatcactcagggctttgtccttcacatgctccctctctttgcaactgatgtcacaaagttctgctgacatactctgtgacaca

SEQ ID NO: 498532 - DNA, 560 bp, Homo sapiens
tctcatttgtaatatttataataatggaaaatatgttctccttagagttttcttctgaagaaagtctgatagttcaggcgtagatgactttccagtctagttttcgaggtttaatttctcaccttgaaaatcaattaaatgtgtttcttcaaaatcttgcagtaaaattgatgmtccagaaagatgtccacggagattctgctcttgtgcatccgccctgcacagatctgaggctgggcctatgacagcttcaggagcatgtagccgtggagtacttaagagttaatctgaaaaactaaaaggaaaaatgaattaagggaattaccacggttaagttccaccagcaaattattaaaagtggtccaaagggatacttaaaaaggattaataaaagagttttctcatttgtagaatcctagcccatgacttaatgttgaggtttgctttgtcttttacattaacatgtacgcagaacatttttcatgacctcaccacacaaacttccctcatgtgttgggagggaccaaggggcctctggtcctgcacctgcattaattacg

SEQ ID NO: 498533 - DNA, 596 bp, Homo sapiens
taaaaggcctgatgtgtgtgcacattgttggtacagttgtctaagtttatgagatggtttcttagttgatagggtctgtttctgttacagggtgacaggctgctgaggtgccccttctccactttttcactggaccttgactattctggggcttcagttccactattttccaaggtgggacgtgctaaaacagaccctgaaattgtgattcagggtgaccaggctgaggctgccctttaaaaggcagaactgctaggtctgtcttatttgccttgtcattctaatgtatcttttggtatggagaccagaaaaagagtcttgagtatgtgacaggcttcctgctagagttggtactatttatacatgactcttaacagtcaaggtaggttgagacatctctcctcctggcacaacctgagtaggctagagcactgtgacccttaaagcttagctcatgcggtcttcagagraatttcaaaaaccataggatgtggggggtagagaaaaagctggcagaaataacaagttgcaggtgaaataattggagccaggaagagaatgggacctgcttggaacagtacacacactgcctgggt

SEQ ID NO: 498534 - DNA, 549 bp, Homo sapiens
ggcgagggattggggtgagaagagcattcctgagtagaacctcaaaagcaaaacctcagagtgaagaaagtagaagacagtttttttttcctttgttgcctgggctggagtgcagtggtgtgatctcggctcactgcaacctccacctcccaggttcaagcgattctcctgcctaagcctcctgagtagctgggaccacaggcacgtgccaccacgactggctaatttttttgcatttttagtagagatggagtttcactgtgttagccaggatggtctcgaactcctgacctcgtgatccacttgccttggcctcccaaagtgctgggattacaggcgtgagccaccgtgcccgtccagaagacaattttttttatgtataagtttgttttggatttttagtttcttgaaatatttacttattgactctaaatggacttattatattggtagakctgcaagagagtactattatttttaaaatacaggaaaaaggcaactttttttatcagaccagagtggctggaatggaatgttctggaaggtggg

SEQ ID NO: 498535 - DNA, 497 bp, Homo sapiens
ctacatacaaggtactaaaactcacacaaaagagcaattgaaggttgaaattkttcctctcgtacacagatctgacccacaggtggtttggtgatgcatattcagcacacctgtgaggttggggctcccctactggaacacaatcttcaggtgggattgggcatcttatacatggatcttgcccactgttgagattgtgactctgctttgacccaactcacaggaggtgttgactcacatacatgaagccaggacctgagtgggactgtgaaacttacttctgaatatttccaagtgtgtgattaggacataaaagttagcccagctcctgaataatttgactctcctttttaggccatgaccatagatgaaattttgacatacgtggaccatacacctaagcgaaggtgcctgggcctgcctacaaagggcacttttacgtattactaggaccagcacgcaggtaatgtgaattatttgcctgagccctgcttata

SEQ ID NO: 498536 - DNA, 522 bp, Homo sapiens
cctgtaagctgtgcccatgtgtttttcccaattccaactgtggagacagaccaggcacaagggttgcatcacctgggtgctggccagagatatgtcacaattgccactttggkcagggtcaaaatctccccttagtgcaggggcaattcaggagggtcatatcacctaggtcgtgggcccagcgatatgtcacaatgccccccatggcagggccaaagcaggacagttatatcatctggaagctgggcccagtgatatgtcacaatgccttttgggggcagggttcaggaaggaaagaagagtcacatcacctaggtgatgggtctagagatatttcacaatgccttctgtaattagaacccaggaaaaagagttatatcatttgggttaaaggtctggtgatatgtcacaatcccaactaagggcaagacccaggcagaaaaagagactcacttcactttgacaattggcccacagtataatttaatttctcctgaggacagggctcatgtagaagaaaaa

SEQ ID NO: 498537 - DNA, 522 bp, Homo sapiens
cctgtaagctgtgcccatgtgtttttcccaattccaactgtggagacagaccaggcacaagggttgcatcacctgggtgctggccagagatatgtcacaattgccactttggtcagggtcaaaatctccccttagtgcaggggcaattcaggagggtcatatcacctaggtsgtgggcccagcgatatgtcacaatgccccccatggcagggccaaagcaggacagttatatcatctggaagctgggcccagtgatatgtcacaatgccttttgggggcagggttcaggaaggaaagaagagtcacatcacctaggtgatgggtctagagatatttcacaatgccttctgtaattagaacccaggaaaaagagttatatcatttgggttaaaggtctggtgatatgtcacaatcccaactaagggcaagacccaggcagaaaaagagactcacttcactttgacaattggcccacagtataatttaatttctcctgaggacagggctcatgtagaagaaaaa

SEQ ID NO: 498538 - DNA, 354 bp, Homo sapiens
tgtgcctataagattcacaattttacttctttactggaccctgatatgrcactctttatatcatgcaaagactttatagaatatgcataagtaatatattgtgtgatctttctacatgtagaaggcccataacccttacctgtttgtctaagcctagctagaagagttaaaatctcttctattggctgggttcacatatgcgagtcttcattatacctgtgagcagggcctaatgtgtgaccatcccacctgtgggcaaagactagcggggagagttgtatcaataggtgctgggccagtgatatgtcaatatttttactatgggcagggtcctggcagtaaaagtcacatctc

SEQ ID NO: 498539 - DNA, 354 bp, Homo sapiens
tgtgcctataagattcacaattttacttctttactggaccctgatatgacactctttatatcatgcaaagactttatagaatatgcataagtaatatattgtgtgatctttctacatgtagaaggcccataacccttacctgtttgtctaagcctagctagaagagttaaaatctcttctattggctgggttcacatatgcgagtcttcattatacctgtgagcagggcctaatgtgtgaccatcccacctgtgggcaaagactagcggggagagtygtatcaataggtgctgggccagtgatatgtcaatatttttactatgggcagggtcctggcagtaaaagtcacatctc

SEQ ID NO: 498540 - DNA, 354 bp, Homo sapiens
tgtgcctataagattcacaattttacttctttactggaccctgatatgacactctttatatcatgcaaagactttatagaatatgcataagtaatatattgtgtgatctttctacatgtagaaggcccataacccttacctgtttgtctaagcctagctagaagagttaaaatctcttctattggctgggttcacatatgcgagtcttcattatacctgtgagcagggcctaatgtgtgaccatcccacctgtgggcaaagactagcggggagagttgtatcaataggtgctgggccagygatatgtcaatatttttactatgggcagggtcctggcagtaaaagtcacatctc

SEQ ID NO: 498541 - DNA, 624 bp, Homo sapiens
tgatggcattataaggtatgcaccagagtcacaataatctgtgagatttgcatgcttgtgtggacacacaatcttacctattactttaagcccagagtcaacatctctcctattttctgtgtccaggaatgagatttatcactgtgcctgtgagtkgggtccagaaatgagtcaccatcccatctgtggccagatccacatacgacagtcacaatatcaaccgtgagctgcatcatgagagatttagaccctcagcagtgggcactgtctgtgtgtgaggctgacaatcttaacttttgactagatgtctatatgagagtcacaatctcaactgtgtgctgggccctgttttgacatactctgtaccacctgagggaattttaccatatgtaggagttttcataggcccctgtgacctctgtagaggtaggaaacagacgaccttacccatggacctatgtctatctatgagtcagtatctgtcctattgacttggtctgagcatgagattcaccaccatgcttgtaagctggatctagaaattagtcaccatccagcctgaggccagatccacatatgacagtcagaattccaactctggactgcatccatgtgtgagattca

SEQ ID NO: 498542 - DNA, 499 bp, Homo sapiens
cctggcacagggcacctggctgtcctcccatttttctctgactcagcctcgcccatctgtcctctgatcatggtgttgaccaagtcagcagggagctgagtctccagagggtgctttggggacygaccgaagcctctctgctgaggggtccaggtgagtcgctgccccgaccccaccccatttactgtcgtccccagatccatccactccaccccaggctggctccatccagatgcatcccaaagtcatcagttcctttgggtcacccccaccccaactttcccaatgacctctgcaggcacagactccatactgggtttttcccaccagatttcagatcccctctcagcatgagactcttggtcaggttaccttagcagcaagctctgctgcctctttgctttctctctgagatgcccatgccagggccctgaccatcttctcctcccagggccacagcttttcctgcccctgtacccttgtacccttccctgtgggg

SEQ ID NO: 498543 - DNA, 499 bp, Homo sapiens
cctggcacagggcacctggctgtcctcccatttttctctgactcagcctcgcccatctgtcctctgatcatggtgttgaccaagtcagcagggagctgagtctccagagggtgctttggggactgaccgaagcctctctgctgaggggtccaggtgagtcgctgccccgaccccaccccatttactgtcgtccccagatccatccactccaccccaggctggctccatccagatgcatcccaaagtcatcagttcctttgggtcacccccaccccaactttcccaatgacctctgcaggcacagactccatactgggtttttcccaccagatttcagatcccctctcagcatgagackcttggtcaggttaccttagcagcaagctctgctgcctctttgctttctctctgagatgcccatgccagggccctgaccatcttctcctcccagggccacagcttttcctgcccctgtacccttgtacccttccctgtgggg

SEQ ID NO: 498544 - DNA, 502 bp, Homo sapiens
gctttgactatcattgaaaattatcttaaatggtttctctgacctcttttcaaactttcagtcttgaaaacaaaagtaggatgcctgctagacctagtcagaaagggaggtgaggaagtgggacaagtgaggagatggtaattaatcataacagtaattaatcataccacctagggcactgcttccaaatttggctgaagataagaatcactgaaacttgatagaacaaaaaaaaaaaaaaaagraagattattgctgtaactgagacctactgaacaagaattgacagggtgatctatatatttaatacatatcccttaaggattcttgtcacgctggccaacctagaaaggactgctcaaggtagcacaggcttcggggcaaacccaagtataggttacaggaagttgttcagtaaattgtgaagggcagagcagactgagtacgtctgtaatatcaagaagccaagaagaaacagaaaaggtttcccagtaagttacca

SEQ ID NO: 498545 - DNA, 634 bp, Homo sapiens
taactctaccaatgtaaacagaatttacatagaagtaatattattaagccagaaaatcatccagtccactcagaaacagaacagagtctcgcattgaaataaggsacgataatttctttctttaatgaatacaacgagctggaattatggctagctccacagcaacatgagcatacaagtcctgaaggtatttcaacaccagttcacacgtaatggatcaagaaccctggggcagattcagaaaacttcaatagaagaccgagttctgccatgtaggcaactcaaacagttacttagtttcctcttagaaattagcaactttataatcttttgactgtcctcattagatgactatgaaaagcaagtcagattatccagattaaaggactttacaaattgtaagatagataaaagatattcttacgttgtatatccaagtaagaataggacactgttgactttttctgtaaggtcagtgaaatcctagctctctgtccatttaaatgttccatctactccttgcatgatatcatgtttataacagtcttctcaaggcagggatagtttaatcatctggtcacagtggggtaacaaaaactctcgagatcagcatttatgcatgacccttagggca

SEQ ID NO: 498546 - DNA, 634 bp, Homo sapiens
taactctaccaatgtaaacagaatttacatagaagtaatattattaagccagaaaatcatccagtccactcagaaacagaacagagtctcgcattgaaataagggacgataatttctttctttaatgaatacaacgagctggaattatggctagctccacagcaacatgagcatacaagtcctgaaggtatttcaacaccagttcacacgtaatggatcaagaaccctggggcagattcagaaaacttcaatagaagaccgagttctgccatgtaggcaactcaaacagttacttagtttcctcttagaaattagcaactttataatcttttgactgtcctcattagatgactatgaaaagcaagtcagattatccagattaaaggactttacaaattgtaagatagataaaagatattcttacgttgtatatccaagtaagaataggacactgtwgactttttctgtaaggtcagtgaaatcctagctctctgtccatttaaatgttccatctactccttgcatgatatcatgtttataacagtcttctcaaggcagggatagtttaatcatctggtcacagtggggtaacaaaaactctcgagatcagcatttatgcatgacccttagggca

SEQ ID NO: 498547 - DNA, 621 bp, Homo sapiens
tgtggcccccagtgccctcaggctgtgcctccctgtcttctcaacacagctattttgatactgagtccagcagctcagatgagttcttctgccgctgccaccggccctactgtgaaatctgcttccagagctcttctgactctagtgacagtggcacatcagacactgaccctgagcctactggggggctggcttcctgggaaaagctgtgggcccgctccaagcctattgtgaacttcaaagatgacttgaaacccacgctggtgtgaaaagcaacagagctggtctagacacagaggtcagtccaagagaagctgtaccaaggcccacaggagaagagccaatttctggtctttggggaacagattagtgccctgcatttgaccagcccataccatgtttcagctaggctcactgtgttactttgagtacttcttgatctataaaaagagagkcattgcctgtcctgttactacctcgcagccttactataaaagactccagttgagtgactatgaaagacactgactccttggataaaaggtgctgaatgaacacataggattttctgtccaggtcagcctacattctgtaaaactcttaatatattcagatggatgg

SEQ ID NO: 498548 - DNA, 558 bp, Homo sapiens
gctgataggtgcattagagggtcatgccaggttattcataatggattagaaagtaatattcttaaccatttgacacaacgcattaaacaaggcctttatggtacttatgaagttgtgggcaccrtaaagttgtgaggacatgaaggtaacaagatctcagattacttcattttcagagctagaataaaatgtttaaaagcatctaaattctaaaatattttctcgttcagacccagagaataagctattaaaatataatataattattaagttattaacctaaacttctcatttatttctatgccaacaaaatttgtcctctcaaataataaaatattatttaaaatatattgctacgttgcataaacagtttgcctgtggacacagtgcattatgtggctaaattattcaaagtggaacacactgatgaatattggaaaaaagttttcaaatttcccaattactgtgaatccatgtttataacttctaaaatttgtcagaacaaatctagaccacctttgaaactgtcacctatttcttagatgcctggtaaatata

SEQ ID NO: 498549 - DNA, 477 bp, Homo sapiens
ggcagcctgatatcaaacaatagaaaactggaaaacacagcatttcagaaagactccaactcctcctatcaagatcctattcatgttaagtttttcagcatttcaaagcttgtacattttttacatttttagggaatgaaagtggaatggaatagartgataaataaattctgtatggaagaagagaaatgcagtcagttttacatataggctactaattaaattcttctaaataagaaatctcttttagagttttctctccctcttcctcttccctttctttcctgaacaactcagttctaaagcaattagatgagcaaagaaaactaggcactaaagcatatgagagtggggagtagaagccacagtggccttgtgttttaatcccaagcagtgtgatggggctgcctggcttagggcaccagagcctgagcagggagaagagaacatcacacaggggttagtcagcatagctat

SEQ ID NO: 498550 - DNA, 477 bp, Homo sapiens
ggcagcctgatatcaaacaatagaaaactggaaaacacagcatttcagaaagactccaactcctcctatcaagatcctattcatgttaagtttttcagcatttcaaagcttgtacattttttacatttttagggaatgaaagtggaatggaatagaatgataaataaattctgtatggaagaagagaaatgcagtcagttttacatataggctactaattaaattcttctaaataagaaatctcttttagagttttctctccctcttcctcttccctttctttcctgaacaactcagttctaaagcaattagatgagcaaagaaaactaggcactaaagcatatgagagtggggagtagaagccacagtggccttgtgttttaatccyaagcagtgtgatggggctgcctggcttagggcaccagagcctgagcagggagaagagaacatcacacaggggttagtcagcatagctat

SEQ ID NO: 498551 - DNA, 631 bp, Homo sapiens
gctaaatatgattatcacagttggttttacccatttctgctatgtctactttataatatcttatatagtcatctcccttaatatttactgatgtatagcagttcattgcctaaaaatttcaaacaattaaaggaaaaggagtagaattcattgaacacttgcgatattccaggtgccatgctgagtacatttgtatatgttatcttgaatccttcttcttatgaaatagatacttttacaattattttacaaaagacaaagctgagactcataaggttttcttttcctaaggtttttcctaaggctgcacaaagagtaacgggcagagaagaaatggattcgaacccagatccaaagtctggtctctttccactaaggtgyattacctgccctgccaacaacagtaaagaatcagcattgccatggaactcttattaaaagaaaaacgtttgctctatgtcatagctatgcatatttaattcatcaactcgatggatttgtgtattaagtggcttttatatgtccccaaattttagcggtcatgaagctccatacacacaaaaaaagtaaaattatcatttttgaaacccctctcaaggctgctagataataaaatactggcccatattcc

SEQ ID NO: 498552 - DNA, 538 bp, Homo sapiens
acaggatgctgcaccaggacaaagatgacaaagatgacatacacacaggaactctgatccagagtgtgattttgtcgcaggtggtacgagagcaagtgaggaaattcaacactggccagaacacaaatctcaaatctcatgcctggcaaaatattcccacttcccctctcagtcttcatcagcctgctcattcaaggcatcagtattcctgtcagacatgccatcaaatgattcagcggcagcatgcctcccattttctggtataaaattttatttagagagtgacatacattttgacatttgagattttttagtgaaatttgaaacacaaaggcrgagaattgctgctagcgactgaagtacaagcatttacctctggttcgataataagatctcatcgagaaatatggacagctagtgtcctaatggaaaattttgtctgcatttttaatatttctgccaaaaagtttgatagctgaagctgatgcattttccacaaataattttttatccagcaaaagttctgcaatgccgggta

SEQ ID NO: 498553 - DNA, 663 bp, Homo sapiens
tgaagacagtacaatgtgttccaggaaatgaaaactgcccagcatggctagaggagggcttatgagtagggagacagcaataaatgaggctggtgctgtacagkttgtagtaagaagcttgttctccatcctgagggcagaggtgtctcttgggagattttgaaaaggggactaatggagtctgatatatgcttttagagaactaacaataccagacaaagtttgagttgtgaaataagagatgtgaacactaagtagtttgaagatgggaaacatcaccaggagttgtggtcatcgcagcaaaaacgacagaagaagaaagatattggaaactgaacaaccagtggaagagcaaaaggtgaggaaaatggtcaaaaaatgtgaaggggacatgttacagagaccactttaccagctttaagcattcccatatgtgggggtgtttaaaagatgagaaagagaatttgagtccttgaatgtcaggacagtcatttattatggctgtagtaatactgtgtaaccaacaactcccaaatcccagaggtttacaacaaggaattcattttttttttctcactcatgagtgtttgggtcagtgccagcagctctgcctgagactgcggcttgagctcagggtcactcgcaggtcttcattctgctgcc

SEQ ID NO: 498554 - DNA, 502 bp, Homo sapiens
aaccacatcacctccatacaggaaggatcttattttcaatctaatgtgccaatggcagtttccaataagaagaagcaatttgccagccttgccaattmcaatttgtccttggctgaagatgacagcaaagtctgtgcctctggttcattgaaaacatcagaaagatatccctaatactcagtctgtttctctgtgaagttaagcattaaggaggtgattaaaattcagcttaattttggtaccaaatcaaaggaaagacattgctatctgatggtaggagagggtttcaaaactatccaaagcagcaatgacatgtatttacattccaagccctgtggatgacattgaagcttggtgcctccagtttcaccctcgccaggaagtggctgttctgtatcccatggatatagggctaaaggaggtatcgacacttactgcacacagattgatttaaacatgcagctcttgcctcacttaatacctcttttattaaaagatgacc

SEQ ID NO: 498555 - DNA, 610 bp, Homo sapiens
cactctggtcatactttattctcctgcctctgggctcttgtacatactcttctctttggctttaacaggaktatcctttctctttttgtggttccagcatagaagccatcatttccttaagcaatacccggacactcaagagctccatatgctcccataaaacccagaagatctattactagcagtgatcatgctaatgttttattttgtttgtggtatacatcaggggttgctaaactacagcccataggccatgtacacatgctatctgtgtacagtccacaagctaagaatagttttcacatttttatatagttgaaaaaactcaaaataaaaatttcatgacatacaaaaaattatatgatattcaaattccattgtccacaaatacaattttactggagcccagccatactcatttgtttatgtattgtcacacactgtgaaggtatcatagatacaatcacgaaagagaaagcactatcccagttttcccagagtttggtatccacaatatcttccccagtgtgtagctcaaaggatgcactcaataagtatctgtggcatgaataacgtgtgaataaggaagtaaaactattttgcccagtaa

SEQ ID NO: 498556 - DNA, 610 bp, Homo sapiens
cactctggtcatactttattctcctgcctctgggctcttgtacatactcttctctttggctttaacaggagtatcctttctctttttgtggttccagcatagaagccatcatttccttaagcaatacccggacactcaagagctccatatgctcccataaaacccagaagatctattactagcagtgatcatgctaatgttttattttgtttgtggtatacatcaggggttgctaaactacagcccataggccatgtacacatgctatctgtgtacagtccacaagctaagaatagttttcacatttttatatagttgaaaaaactcaaaataaaaatttcatgacatacaaaaaattatatgatattcaaattccattgtccacaaatacaattttactggagcccagccatactcatttgtttatgtattgtcacacactgtgaaggtatcatagatacaatcamgaaagagaaagcactatcccagttttcccagagtttggtatccacaatatcttccccagtgtgtagctcaaaggatgcactcaataagtatctgtggcatgaataacgtgtgaataaggaagtaaaactattttgcccagtaa

SEQ ID NO: 498557 - DNA, 476 bp, Homo sapiens
gagagtctacccaagagatggtgagaacagggacccgatgcaactagtgcttgatctacccctacagctaggtgaaccaaaaaactccatttgtgcttaagttagccaaataagtttctgttactttcaatcaatgtactcctaattgaaacagcaggtaaagtataacacagatgaaaacagttcacgtatttctaagaaaacaaatataaaaacatacccttaaaaagtgaaaaaaaaaatcatacttgttattcaccaataagaaagctgyggtcaaattataaaactcttcaactctgtaactgaaaattaacatgtactggaaaataaagtatgtattttaacagataccttactaaatgaataggtatatcttttcagtgtggttatattaagttaaatttgaagaatttaggaactaaaactatgataacagcttaactcaactcataagagtactaaaaaagtaaagc

SEQ ID NO: 498558 - DNA, 592 bp, Homo sapiens
gtgtttgaggtagcaatagtcatttaataaaaaccgtctgaaacattcagactcattctttcagtgcttgccttattcacatttccttttcacttccccaagacacacctacttggaacagatcctggcaaacgggaggcaggcctagactgcagctccgactcggatggacagagcagtgtgtggaggcttgcattgtgaattttagttccagaacaactgcaggaataaaacaggaaacctgagaggacccacagaccctctgaaggaagtggattgctcctgcaagacccaggagacaccccaaatactgtgattgctcaaactgtggaagtgggaaagggaggtcctccacccccaaacacatacccccactggggaaactgaaggtctaatttatgggagaagattccgaccttacctggagctgagagctgagtcaatttaggagctgagtgaaatacaggggyagaagaagcagcgggaaaggccctgtgagttcgctgggtccccaagcaggccactcctgcctggcatcacagggatccttcgggagggtggccagaggcacgaggaaaccaccacaagaagg

SEQ ID NO: 498559 - DNA, 500 bp, Homo sapiens
cgctttgagagaaaatgttctaagctatgtccattggactctccctcttcagactctgatttacaacaraaagaccaaaataatcattacttcactcatcccagcacttgctccaacaacatggtacaatgcctgctgccaagatttctggagccagtttcctatacattcttaagttaggttgtttcttagctaataattgtttgtaatatccttaattctcagctagagttcacaaacccttaaaggatacagattatgaaatgttggtgctttgtacatagtagtttttttcaataaatatttgttgtctcaacaaatatgaagagttcagaaataatcttctatgtagagaggacaaggttttatcacagatcaacagtggaccaactaacaccctgccctgctgttgagttcttgcaagatagaatagttttgcccttttattccaattctaaagtcatccgcttttattaatatccatcaatatttaagtagtt

SEQ ID NO: 498560 - DNA, 498 bp, Homo sapiens
ttgagtgtatgaatacataaaaggagaacacaatttgacagagaataagagagatcctctccttattttttgtctccattaataaaatatatttgtattattcctcttctaatgctatctctctcccactctatgatcttttaagggagtactacatagagacaagatttatcttaacaaaagcgcatccattgcttgctatgttagattcattcaaggacacagaagtgtttaacacatggcccwtgctttctaggatgtaaactcaagtcagggtaaaaggtggtgtaaacatgtgaaacaagttatgtttacaaatttagaaagtgtaatccacaaaggttaaataaaatcacatggcatatgccatgtgtagacgacggcaaaatgaaagagacagacacttccaagttctgctgaagatgtggaactggaactcttattgctgaaaggagtgtagattggtacaattactctggacaattgtttagaagcatc

SEQ ID NO: 498561 - DNA, 527 bp, Homo sapiens
tatgatatagaaggaaggcacgatcacctcctaagggagtgagatcctccttcaagagaaagggacagccaggctggttttaataccrtcaagtgttctggcaggcaaaaaagaggatgaaccatttcttcatgtcatcaaatagcatgttcagatgtttcagcatcaatgcatgggaagtcttattaatgtagtcctgttggcacctggtgcccagtgcctgagaacagtcaagggatgggagggcagacaagcagtaaggcaggacagccatctgaccagcccagggtgtgagaccagagccagatgtccgaggtcctgtgtatcgtaacagtctgaactcaatcctgtgggcactgagggttgggcttttagcaggtcagtgacacagtgagatttctgtgtccaagagctcatccggcaacatggaggatgggtttcaggcggggagaccagttaagaggaaacaatctaaatgagagatgataaattaggatagtgaatgatggaagatggagaaaatttcc

SEQ ID NO: 498562 - DNA, 523 bp, Homo sapiens
ctagagctccctgctgcttgattctctctttatactgcctggtgcaggacaagcttatctactagttggtcttcaactaccaacgtgtccaatctgtcttaggactcatcatgtcgaataagtgattggaagaatgattgggaatatcactatttccagcccaagcttctttttgagcttctaatctttatttcttactgccttctaggtaatatccatctagaagtgaacatactaccgtatctttttctactccctcaaatgtgctacatttaacyagcatgaagtactgtgactgctgtctctccagatctggtattctattagctattaaatcctacctattctaacatccaatagtgggcaagaaacatcctctcttccctattaccataatgaaatcctttcattaaggttttcatgctctcatttttattactgtgctaccttctggtctctcagcttccagtgttgctggagaggcagggaaataggcacctcataaataatgccaccagaatga

SEQ ID NO: 498563 - DNA, 606 bp, Homo sapiens
ttctgatggctttgactctagattttctttacattctagaccttacattgaccaaagatgagattttccagcttcttccacatatttggatatccattctcttaactcagttcctgaattcaatttgccatgtgccattttcrctctacacttctgaagttttggtggaaagtctagtgactgcccagtataacaactcagaggaaaaaaaaagtgctactctgtactctattgacataacaatgattcaataaacatttcttgcacatccactgtgcactgtgttctaagagctgtatgatgcacagggattacaaagataaacaagatacagcctccctttctgaagaatcttacaatggaaggtctgtggtcagttggttaaacaaaaaactctattaaagtggacaatctcatccttaagtttctcaatgtaaaaaaaaaagtggacaatcataacacatgcatagctgaaatgtttaatttttaactttaaacccttaaagatacattcactactcaccaaattttagaagtagggtcaaggccttttctttgattgatgattgaactttgcatggtctttcttgcatagccataacatgc

SEQ ID NO: 498564 - DNA, 502 bp, Homo sapiens
ttttgtttgtttgtttgttttatgagacaaggtttcactctgctgcccaggctgagtgcagtggtaaaatcatagctcactgcagcctcaaactgggttcaagcaatcctcccgcctcagccttccaagtagctgggactacaggttcgcaccaccatgccctgctaatttttaaaattttggtagacatgaggtcttgctatgttgctcagactgtgtgcaaaatgttacgtatatcttaaaaggaccctcccctgttaccagcataaatattgttttggaattttcccttacctttttttgtctttgattattttaaattttttttggatattcaatgcwattgcatagttcaacatttctaaggtaaaacaaacagtgagaagtgtctctgacacccctggccccagccatccacctccctgtcccagaggcaaccagtgtcaccagctcctccatgctgaagttccttacggagtttttcttttttctttttttgaga

SEQ ID NO: 498565 - DNA, 521 bp, Homo sapiens
ccaaagaacagaatcaacttgtaaattcacttgttatgaattatggcttacaaataggcacagtagtacaggcgcagtggcctacgcctgtaaacccaacactttgggaggccaaggcctgaggacggcttgagcccaggagttcaagaccagcctgggcaacatggcaaaaccctgtckctataaaaaatacaaaaattagccaggtgtgctggcacacccctgtagtcccggctactcaggaggctgaggcagaagaatggcttcaacctgggaagtcaaggcttcagtgagccgagatcacaccactgcactccagcctgggtgatagagtgagaccctgtttcaaaaatagataaataagtgacacaatagaagtacaatgaaggccacacaaggtaactcacacctataatcacagcactttgagaagccagggtaggaggattatttgagcacgggagttcgagaccagcctgagtaatatagtgaggcctcatctttacaaaaaatttaaaaat

SEQ ID NO: 498566 - DNA, 613 bp, Homo sapiens
atgatgagcaaactgaggatcaaagggattaaatgatgtgtccmtggtcccatgactactaagtgacaaacagaacctggttatcctaaccctcagttcacactgcatgcaccacatctgtttcagtacagtgccaatttatcttctcagttccccttcatatgtcccacagtctagccaaactggccaaatgaacctacccaagcattttaacaaataaactagcctttgcttctaaaaaaaaaaaaatagcgatctttttatgattacagaatatttgcttattctggggagactgaggagggaggatcacttgaacccaggagttcaagcatgcagtgggctatgatcttgccaatgcactccagcctggacaacagagtgagaccctgtctcaaaacaataaaagtcatccattaaaaaaagaatgaacaagctacagttatacgcaatatgaatgaatcacacagccttgggtgccagaaaccaagacaccaaagagtacatgttgtatgatttcatttatacaaggaaaaaaaacagtcaaaactatgagatgccattataagtgaggaacacagggcctatggagatgctgataatgctgtattct

SEQ ID NO: 498567 - DNA, 613 bp, Homo sapiens
atgatgagcaaactgaggatcaaagggattaaatgatgtgtccctggtcccatgactactaagtgacaaacagaacctggttatcctaaccctcagttcacactgcatgcaccacatctgtttcagtacagtgccaatttatcttctcarttccccttcatatgtcccacagtctagccaaactggccaaatgaacctacccaagcattttaacaaataaactagcctttgcttctaaaaaaaaaaaaatagcgatctttttatgattacagaatatttgcttattctggggagactgaggagggaggatcacttgaacccaggagttcaagcatgcagtgggctatgatcttgccaatgcactccagcctggacaacagagtgagaccctgtctcaaaacaataaaagtcatccattaaaaaaagaatgaacaagctacagttatacgcaatatgaatgaatcacacagccttgggtgccagaaaccaagacaccaaagagtacatgttgtatgatttcatttatacaaggaaaaaaaacagtcaaaactatgagatgccattataagtgaggaacacagggcctatggagatgctgataatgctgtattct

SEQ ID NO: 498568 - DNA, 613 bp, Homo sapiens
atgatgagcaaactgaggatcaaagggattaaatgatgtgtccctggtcccatgactactaagtgacaaacagaacctggttatcctaaccctcagttcacactgcatgcaccacatctgtttcagtacagtgccaatttatcttctcagttccccttcatatgtcccacagtctagccaaactggccaaatgaacctacccaagcattttaacaaataaactagcctttgcttctaaaaaaaaaaaaatagcgatctttttatgattacagaatatttgcttattctggggagactgaggagggaggatcacttgaacccaggagttcaagcatgcagtgggctatgatcttgccaatgcactccagcctggacaacagagtgagaccctgtctcaaaacaawaaaagtcatccattaaaaaaagaatgaacaagctacagttatacgcaatatgaatgaatcacacagccttgggtgccagaaaccaagacaccaaagagtacatgttgtatgatttcatttatacaaggaaaaaaaacagtcaaaactatgagatgccattataagtgaggaacacagggcctatggagatgctgataatgctgtattct

SEQ ID NO: 498569 - DNA, 613 bp, Homo sapiens
atgatgagcaaactgaggatcaaagggattaaatgatgtgtccctggtcccatgactactaagtgacaaacagaacctggttatcctaaccctcagttcacactgcatgcaccacatctgtttcagtacagtgccaatttatcttctcagttccccttcatatgtcccacagtctagccaaactggccaaatgaacctacccaagcattttaacaaataaactagcctttgcttctaaaaaaaaaaaaatagcgatctttttatgattacagaatatttgcttattctggggagactgaggagggaggatcacttgaacccaggagttcaagcatgcagtgggctatgatcttgccaatgcactccagcctggacaacagagtgagaccctgtctcaaaacaataaaagtcatccatwaaaaaaagaatgaacaagctacagttatacgcaatatgaatgaatcacacagccttgggtgccagaaaccaagacaccaaagagtacatgttgtatgatttcatttatacaaggaaaaaaaacagtcaaaactatgagatgccattataagtgaggaacacagggcctatggagatgctgataatgctgtattct

SEQ ID NO: 498570 - DNA, 607 bp, Homo sapiens
agccaacaggactggttacaaattcgttgttaattactgtgtgtaattacactagacccaaggttggagggagacaccctactctgttgttgtcttatatacgaattctgtataattttttaaaagcscaccatttttactttctaattaggatatggggatttggggcagcaacctttgttatttaatcatgctttttctggggaggggaggagaggaaaatattttcctttttctatcaacaattgctctcttttccgcattaagagggtggaaacttggttcctccctcatcccctttaggcaaagagtccatggctcagattcataaaggttgttgattttgactttgggttgccctactctgtttttccccacctttcatgctaactaacacaatacataagtcttcctagccagcactccctaagggtggggtagaaacacagcccattaaaaaaattttttttaaagctttgagtaatctcctttttatattcacccaaatgaaccaggttggtggcatattctcctttgtttttacatctgagacgtacttaaagtttaaatagtgccagaatgaatcacattgcttgtgttcttatac

SEQ ID NO: 498571 - DNA, 623 bp, Homo sapiens
catgttgtgatttgatttcatctattttttcacagtaggcatttagtttattttttaacatagtcaaatgttcatttttaatcacttcaaatactgtctctagtgaattgacctccggatggagatgtaagctttctgaggcagatcttcagaagtgacttcttaaataaggggcactaagccttgactaggaatagctgtttgttatttccatctgcacttgatgaggaagttgtggcctcttttttcactgatgtggattttgccatcattatccatgcctctaacctgtggccttgattactataatactcttgactttgggctacttttgagcttcggctggtgaggaatgcagcaatctgtttgcttgtgggtagccactgcaggaagcatattgtatcagtgttccattgtaaaatgcaatggagctgcactttaatgaagccacagcaaggctgagtatatttgaggaatcacttgaatatttaataagtctaaatggaaagaagatatgttttttctttttttcttgcactattttgctatccgtggttgaacaaaagayacttaataaaaacattatagctgaattgttatcatttccaacaccataggcatta

SEQ ID NO: 498572 - DNA, 488 bp, Homo sapiens
taaactgctgggctgccaacattttacttttcttttcttttcttcttttatcctctttgaaaaattagaagaaagtttttttctgaccagataattattttttgattaataccttcttttctacttgcatgcagtcagctaataaaatgacaagaaaaagtaagatacatttgaatttcaagttctcctttcaaaggtttaatcacagcctttgaactgaactcagtgatatgttatctggagttaaccattttgtcataaaaatcataatattgcaaccatcctawaatagcccagttgaaaatattagctcaaagtcaattgcaggagggcagaattttcatgctgactcattagtgagtacttttaaaatatatatatatttttaattgacaatcattgtatatatttatgggatacaatgtaatgttttgatatgtgtttataatacggtattttaaataccctacccttttaggtattacttt

SEQ ID NO: 498573 - DNA, 625 bp, Homo sapiens
aaaaatacagtgctttcgttctttgtcaaagcagtagatgggggcatcccagtaaagcactccctcattcctgtctatatccacgtcttgccccctgaaacgttcttgccatcattcacccagtctcagtattcctttaccattgcagaagatacagccattgggagtacagtggacaccctgaggattttgcccagtcagaatgtctggttcagcacagttaatggggaacggccagaaaataacaaagggggcrtattcgtcatagaacaggaaacaggcactattaagcttgacaaacgccttgaccgtgaaaccagcccagctttccactttaaagtagcagccactatacccctggacaaagtagacattgtgtttactgtggatgtagatatcaaggtattggatttgaatgacaacaagccagtctttgaaacttcaagctatgacaccattataatggaagggatgcctgttggcaccaaactcacacaagtgagagctattgatatggactggggagccaatggacaagtcacttactccctccactcggattcccagcccgaaaaggtaatggaagcattcaatattgacagcaacacgggctggatcagtacct

SEQ ID NO: 498574 - DNA, 594 bp, Homo sapiens
tgggggcaatcttcactggtgtgggaggccgaaagtggacggcgacggaggcccctctggttatctctttgccgtgccaacacagtctctgcgcccactaagatgcatgaaataaaaatttccgtgactcgccctttgcagtggagaactgaaacaggcacaccagggaattggagcggaggagggtaactcaaactcagagtgagagggtttgcagggggccgatttggggccaacaggcttcccagcaggcccccggcgcgggacagcggaaggcgaaacgctttcaagagaccccgctgccaacatccccacgccctcgcgccctcccgccgccccagaaggccaactccgcctgcctgagtcacagctggagctggggaggagccagggaaaggaggcccctgaccgtagtgcrgccagcagttgcaggcagacggagcagagcgactcagggatcatgagggagagtgcgttggagccggggcctgtgccgaggcgccggcggggggtcccgtgcacgccgtgacggtggtgaccctgctggagaagctggcctccatgctggagactctgcgggacggcagggaggcc

SEQ ID NO: 498575 - DNA, 609 bp, Homo sapiens
caggttgactggtctaggatggcctcactcacatgtctggtggttggctggctgatggctgggtgacatgggagactgggacatgtgtctcatcaagcatcaagttaccctggtgttatttacatggcagggtcaggtttccaaaagagagaccagaagtttgaagcatacattcagaaatagtatgatgacacttctgctgcattctattggccaaagcaaaccataaggccagtctagattcagtgtgtgaggaaacagactttcttgatggaaggattgaaaagtcacatttcaaaaagtatggatacagggaggcaggggaagcatagggtcttttttttttttttttgagactgagtcttgctctgttgcccaggwtggagtgcagtggagcgatctaagctcactgcaagctccgcctcccgggttctcaccattctcctgcctcagcctccagcgtagctgggactacaggtgctcgccaccacgcctggctattttttttttgtatttttagtagagatggggtttcactgtgttagccaggaatgtctggatctcctgacctttttttgtatttttagtagagatggggtttcactgtgt

SEQ ID NO: 498576 - DNA, 609 bp, Homo sapiens
caggttgactggtctaggatggcctcactcacatgtctggtggttggctggctgatggctgggtgacatgggagactgggacatgtgtctcatcaagcatcaagttaccctggtgttatttacatggcagggtcaggtttccaaaagagagaccagaagtttgaagcatacattcagaaatagtatgatgacacttctgctgcattctattggccaaagcaaaccataaggccagtctagattcagtgtgtgaggaaacagactttcttgatggaaggattgaaaagtcacatttcaaaaagtatggatacagggaggcaggggaagcatagggtcttttttttttttttttgagactgagtcttgctctgttgcccaggttggagtgcagtggagcgatctmagctcactgcaagctccgcctcccgggttctcaccattctcctgcctcagcctccagcgtagctgggactacaggtgctcgccaccacgcctggctattttttttttgtatttttagtagagatggggtttcactgtgttagccaggaatgtctggatctcctgacctttttttgtatttttagtagagatggggtttcactgtgt

SEQ ID NO: 498577 - DNA, 611 bp, Homo sapiens
ttgggggatggctcagtaaagacacaactatagccaaagtgagagccttgggtgtaatgtgctgtagattattcttgaactacacaggtattagagcaggacaagctgcagactaaacctctcagacaccgagttaagaaggaagggctttattcggctgggagctttagcaagactcacatstccaacaaccaagctccccgagtgagcaattcctgtcccttttaagggcccacaactctaagggggtccacgtgagagggtcgtgatcgattgagcaagcaggggtacatgactgggggctgcatacaccggtaattagaatggaacagaacaggacagggatcttcacagtgcttttcttatgcaaataacccattaggtcaggggtcgatctttaactaccaggcccagggtgtggcgccgggctgtctgcttgtggatttcatttctgccttttagtttttacttcttctttctttggaggcagaaattgggcataagacaatatgaggggtggtctcctcccttagtatcagagttaggatatgcacatgagccatgtgagggccatgaagatgctggtgaggtgcagtgccgtagtgagcagg

SEQ ID NO: 498578 - DNA, 640 bp, Homo sapiens
ccttagccagatgccactgtgggcggggttgggggatggctcagtaaagacacaactatagccaaagtgagagccttgggtgtaatgtgctgtagattattcttgaactacacaggtattagagcaggacaagctgcagactaaacctctcagacaccgagttaagaaggaagggctttattcggctgggagctttagcaagactcacatctccaacaaccaagctccccgagtgagcaattcctgtcccttttaagggcccacaactctaagggggtccacgtgagagggtcgtgatcgattgagcaagcaggggtacatgactgggggctgcatacaccggtaattagaatggaacagaacaggacagggatcttcacagtgcttttcttatgcaaataaccsattaggtcaggggtcgatctttaactaccaggcccagggtgtggcgccgggctgtctgcttgtggatttcatttctgccttttagtttttacttcttctttctttggaggcagaaattgggcataagacaatatgaggggtggtctcctcccttagtatcagagttaggatatgcacatgagccatgtgagggccatgaagatgctggtgaggtgcagtgccgtagtgagcaggg

SEQ ID NO: 498579 - DNA, 660 bp, Homo sapiens
aattattctggtacaacatataatatcttttaatcacttcatttactatcatagtcattaatgtattatttgagtacatataaattgttcaacaatttattgtctacagttttccactattacaagtaatgccaaaatcacttttatcttttaaatatcatgaatacttagtctttatttatacatatttttaggcaaatgcatagtctatggtgctattaaaagttgtgccyggtcctgaatcttagccaatgcagtaaatcttatagccccaaggaagaaagaccagggtactttcttaatctgcccttaaacagatgtgtcctactccccagatgtcagcctcctcacctctaaaaatgagtgccttgcccttggtcaaaaagtgcttcctcatagatactggaataaaatgattaagaaaggcttgaacttaaagaagaaaagggactacctggccagacgctttggtctctatcaatttcacttttagaaaagccagtgttctctcacctctaaagaataatggtggctgggcgcggtgacacatgcctgtaatcccagcactttgggaggccaaggcgggcggatcacctgaggtcaggagttcgagaccagcctgatcagcatggtgaaaccccatctctactaaaaatacaa

SEQ ID NO: 498580 - DNA, 216 bp, Homo sapiens
tggataattcacagttttcttgaatcaggggaaaaataagactcagaaactaggagttttgcccaaaactctcatcagatacagaatccatccgctaactatctagtattatttccataagttagatcaattatcactcccaaaacaaatgcacatggcacccagaatctgtgcatttctcccaagtaaaakaggaggtggacgggcacagtgtct

SEQ ID NO: 498581 - DNA, 284 bp, Homo sapiens
gggcccgctaggtgtaccccaaaacgggcagaaggcccatgaggggaaggtgaggtttgagggaagagaggtgaggcacctgcggcagaaaaaaaaaaaaaccgtgcggaagagaagcggggsctgggtctcccacggacgaaagtgccttctcatcagcccctgcgctgggccccctggactctggcgaccctagttcaaggaccagaagagactccggcatgctagggtaccctaaggaagccagaaagcccatgaggggaaggcgagatttaagggaggag

SEQ ID NO: 498582 - DNA, 284 bp, Homo sapiens
gggcccgctaggtgtaccccaaaacgggcagaaggcccatgaggggaaggtgaggtttgagggaagagaggtgaggcacctgcggcagaaaaaaaaaaaaaccgtgcggaagagaagcggggcctgggtctcccacggacgaaagtgccttctcatcagcccctgcgctgggccccctggactctggcgaccctagttcaaggaccagaagagactccggcatsctagggtaccctaaggaagccagaaagcccatgaggggaaggcgagatttaagggaggag

SEQ ID NO: 498583 - DNA, 284 bp, Homo sapiens
gggcccgctaggtgtaccccaaaacgggcagaaggcccatgaggggaaggtgaggtttgagggaagagaggtgaggcacctgcggcagaaaaaaaaaaaaaccgtgcggaagagaagcggggcctgggtctcccacggacgaaagtgccttctcatcagcccctgcgctgggccccctggactctggcgaccctagttcaaggaccagaagagactccggcatgctagggtaccctaagraagccagaaagcccatgaggggaaggcgagatttaagggaggag

SEQ ID NO: 498584 - DNA, 557 bp, Homo sapiens
tcaacctcacaggcaatgagttgacatgcaagcagatgacagtgacaggcttttagaaagagcttcagaaggcggccagtttttcttcagcctcagccaggccttggaacttgactaggccatccacttcaccagagatgccttcaagaacatcagtgagctccttgccaatccgtccaggaaggacctggacccagccacggacctgttagtgctgtctcagggacaccagaccaacatcctggacatcatcctcatacacaaggaagctcttaccacagtcatggagaacaggcaacatgtggcagaagggaagacacaggtacagaggctgatggcatcattatcacaggaacaggatttctttggccactttggctgaaattcaccacttccatccaatccactcaagcgagagacttgaaatcacagatggagcatttcttgcaacaggagatactattttttcaaaaagtcacctaaaatttgatagtgttggatgactagctattmgattgtggtctttttccagttcaagggtactttctacagcagaa

SEQ ID NO: 498585 - DNA, 324 bp, Homo sapiens
atggtcattttattttattttttgtgaggagccagttcatatttccaccaatagtgttcaagggtttcagtttcayctgcacttgttactttctgttgggttagaagtgatgtcccattgtggtttctatttgcatttctttaatgactagtgatgttacacatcttctcatatatctcatgtatctgttggctatttttatatcatctttgcatctttggataaatgttctttgtccattttttaatcactttattttgttgttgtgttgtagtggggttttttggtcatgatcattcatttatctcacagttcattcttgtt

SEQ ID NO: 498586 - DNA, 324 bp, Homo sapiens
atggtcattttattttattttttgtgaggagccagttcatatttccaccaatagtgttcaagggtttcagtttcacctgcacttgttactttctgttgggttwgaagtgatgtcccattgtggtttctatttgcatttctttaatgactagtgatgttacacatcttctcatatatctcatgtatctgttggctatttttatatcatctttgcatctttggataaatgttctttgtccattttttaatcactttattttgttgttgtgttgtagtggggttttttggtcatgatcattcatttatctcacagttcattcttgtt

SEQ ID NO: 498587 - DNA, 324 bp, Homo sapiens
atggtcattttattttattttttgtgaggagccagttcatatttccaccaatagtgttcaagggtttcagtttcacctgcacttgttactttctgttgggttagaagtgatgtcccattgtggtttctatttgcatttctttaatgactagtgatgttacacatcttctcatatatctcatgtatctgttggctatttttatatcatctttgcatctttggataaatgttctttgtccattttttaatcactttattttgttgttgtgttgtagtggggttttttggtcatgaycattcatttatctcacagttcattcttgtt

SEQ ID NO: 498588 - DNA, 114 bp, Homo sapiens
gtaagcttccctttagcactgcctttgttgcctcctcctgagtttgggtatgtcatggtttcrttttcatttgcttaaacattttttgtcctattgtaatataattgtgttgtt

SEQ ID NO: 498589 - DNA, 376 bp, Homo sapiens
cagctgagaaaaacaggcaaggacttaggaaatattccttatttgaaggggyctgaaagtgtggtctgtggtacaggagtgacctgtcatacttgagaggattaaaatactctccacagtcccattccttcaatcttagctcgttttttcgcgtctgagatatattaaacctagtccatcaccaaatttagcattagattgcgaagttctattgattgtatttgatttgtaatttaagattttctccccctacataattttgttaaaaacacagaagtgaattctgttcacttaggtgtaacagttaatacttgctgtttaaggaactaattaaaccttactggcttataaaaaacaaccaccattttatttgttt

SEQ ID NO: 498590 - DNA, 467 bp, Homo sapiens
gacttaggaaatattccttatttgaaggggtctgaaagtgtggtctgkggtacaggagtgacctgtcatacttgagaggattaaaatactctccacagtcccattccttcaatcttagctcgttttttcgcgtctgagatatattaaacctagtccatcaccaaatttagcattagattgcgaagttctattgattgtatttgatttgtaatttaagattttctccccctacataattttgttaaaaacacagaagtgaattctgttcacttaggtgtaacagttaatacttgctgtttaaggaactaattaaaccttactggcttataaaaaacaaccaccattttatttgtttgaagttctgtggatctgcattttggtgtggtggattcacctgggtagttgatatatttgtgttgcctggatcacaaaaaggccttagtcacctggtgccttgactgagcctg

SEQ ID NO: 498591 - DNA, 507 bp, Homo sapiens
gggccttgggaagtcattcttaaaagggaagctggtcactttgaggtccctgaaaggaagggtgaacgtgcatcccaaaagccctggcagccggcagccagcagccagcagcatggcatacatcttctcacccaacctgtgtgacagaggccccctcctggggcacaagtcccatacctaaagcatcctgtcccagtcggacctcatcctgagccctgggaggggaggggcaccatgggttccctgcagcagccaggattaccacccaggggactcggccttctgtggccctggccagacttagaatttggcccaagacaagcttactcggagcaacttctcagtacctggggcctgtgcatgccaggcaagracaagctggctcaaagagcaaccagctacctctgcaagggtgtgccaggagcaggtggagcagtcaccaacctcacccactcaaggaaacagggatggccaggttcccacagtctgaatgaccaccacctgaca

SEQ ID NO: 498592 - DNA, 416 bp, Homo sapiens
tggcagccggcagccagcagccagcagcatggcatacatcttctcacccaacctgtgtgacagaggccccctcctggggcacaagtcccatacctaaagcatcctgtcccagtcggacctcatcctgagccctgggaggggaggggcaccatgggttccctgcagcagccaggattaccacccaggggactcggccttctgtggccctggccagacttagaatttggcccaagacaagcttactcggagcaacttctcagtacctggggcctgtgcatgccaggcaaggacaagctggctcaaagagcaaccagctacctctgcragggtgtgccaggagcaggtggagcagtcaccaacctcacccactcaaggaaacagggatggccaggttcccacagtctgaatgaccacca

SEQ ID NO: 498593 - DNA, 507 bp, Homo sapiens
gggccttgggaagtcattcttaaaagggaagctggtcactttgaggtccctgaaaggaagggtgaacgtgcatcccaaaagccctggcagccggcagccagcagccagcagcatggcatacatcttctcacccaacctgtgtgacagaggccccctcctggggcacaagtcccatacctaaagcatcctgtcccagtcggacctcatcctgagccctgggaggggaggggcaccatgggttccctgcagcagccaggattaccacccaggggactcggccttctgtggccctggccagacttagaatttggcccaagacaagcttactcggagcaacttctcagtacctggggcctgtgcatgccaggcaaggacaagctggctcaaagagcaaccagctacctctgcaagggtgtgccaggagcaggtggagcwgtcaccaacctcacccactcaaggaaacagggatggccaggttcccacagtctgaatgaccaccacctgaca

SEQ ID NO: 498594 - DNA, 571 bp, Homo sapiens
tgtcttaaataaattacatcagtgtgtcaatcaacaaacaaaaggcacagcacagaggtgtggcagtgcatgagtcatcagatcagaagtaaagacaaagcagaaaaaagggggtgagaggggccagaaaacaaagcctgccctgctgttaaggaagccttcgagggttgatgagtttgcaaacgccgtgccccatttctgacttaaaaaaggcttatagggacacaggttacaaaaccagaaatgtagctttgcattttaccagtctctgagtctagattttactgaaccaaaccaaatatacctcttcaaaacattttaggaaaacgtaactttaayttcaggactaaccagcaggtattagttttagccaagtatctctaggattacagactcaaccacatatgtaaatgctatccagaggatttgaggacaaaataaaattgtctcagaataaagataaataactctgaatgatgctctggagagcaagggcaagaaacataactgaaatttctctcttcattgatttcgcctcatattctctttctgggcagtaggaaggtcatat

SEQ ID NO: 498595 - DNA, 577 bp, Homo sapiens
ctggctacctgtaattggcggaatgaagcgtggctatttgagattgactgaaataycgctatctgttacaaaaaatatatactcctatgttaggtttcaggtttttttgttttgttttgttttgttttgttttgttttgttttgtttacatactaagttacattacagtttattatgtaggaactcaaaatacagagacagcctcaggcttatggcctcttgcttttttagaaattttactctgaatccttcaatgcatgagtgcgaccaagaagcacctacatagatgaattaggaaacagaaatagaatttgggatcataagcaatgtcagtataatgaaatgtgtaccagtttgcatgttcaccagcactgaatcttcccaatactattgtatcaaacttgtaattttgccagtttgatgatctgttgggtgagaatgtcttactgttttaatttcattcaatcgtttaattcatttaattagcattttcccaattactagcaatattgcatgtcttttcacatgttagtagccatctgtagttacttattctggaaatttcctttcttttgtt

SEQ ID NO: 498596 - DNA, 675 bp, Homo sapiens
tgtaggaactcaaaatacagagacagcctcaggcttatggcctcttgcttttttagaaattttactctgaatccttcaatgcatgagtgcgaccaagaagcacctacatagatgaattaggaaacagaaatagaatttgggatcataagcaatgtcagtataatgaaatgtgtaccagtttgcatgttcaccagcactgaatcttcccaatactattgtatcaaacttgtaattttgccagtttgatgatctgttgggtgagaatgtcttactgttttaatttcattcaatcgtttaattcatttaattagcattttcccaattactagcaatattgcatgtcttttcacatgttagtagccatctgtagttacttattctggaaatttcctttcttttgttcttttatcagaacttttgtcttcttttctgatggaagccttttacatgatctgggtaaaactttggctctgctgtatacactgcaaatattttctcccactctccattcatcatctagttagtcttcagcttcacgacttgttcgatktctgtgagctatatgagaaatcctttctacttaaaggtgataaatataactacacatttaaacatcattttatactttgggtttgcatatgtctttaatatgtctttaatcagctacactaacga

SEQ ID NO: 498597 - DNA, 258 bp, Homo sapiens
atacattaacactgcctgagagctcctyttagcatttcaaaaaaccaatagaaatgtaccttcgggcaatggtgtggtgaatcagttaggatgtacacagagatgtaagaaattgacctttacattagaaattgggaccttggttgtctaaattttctgtgctaatgaaaaggttaattgtagacagttctcatccttccaacctccctctactaggtaggacggccttcatccatccagttggatgtagagaagaca

SEQ ID NO: 498598 - DNA, 527 bp, Homo sapiens
attactaagccattctcttggcgttgtctagtgccgcgggtgttggcaaacagtgctctgggttccacttcgctctggctctagctcaccaggagcacagtgtgggtggcggcaggagagaacggaggatgggaggggaagggtaacggctgtgcccagacccggagacccccgatctgagctctttgtccagtctgcttccctttgtgcaaattctccaagttccaaatgaagacattctatagctgttactgcagactgactgagacaggtgggaacatggcagaagggaggaggtggagaggagcaagccgactcccaacaccctgcagctctgccctgtgcagagaggatgcccatcacccttttctgtggcccctctacaygggctgctgtccaccacgtgggcgccttctgcctctctccttgccggaagcgggaggagttcaggtgttgagttccgagtgtctcctcttcatgtaagacccattacgtaagcaaaccaaactgatgttattcagacatta

SEQ ID NO: 498599 - DNA, 659 bp, Homo sapiens
gcttgggtgggggagccgacagcatgacaaaatgtatattattctattgttttaaagaaaaggatccttaacatttcagtgtgtaagtacatcaaagcataactataattatctccaaagtgataatgttaccagtactggacatcaaggctttctgttgttggaggagtttttgtccttgcaggcatcaccaagttgcttccttagctgtaaacatcttaggaccatgggctgtgactggcaaggagcrggccttgctagtttcaagatagagttggttttaaaaagatgttgccctggctctcctgggctcttgcttccctgacagcaggagtctcttctgcattttgtatactgcagctatctagaatctgcacactggaagaacgtaagtgtacaggaaccaggaagcttggagaggctgctggcctcctggtcttcctgtaggtactaaggaggcctcacccttctgggatccagggtctctccctcaaggcttgggttagggacattaacatctaaggaacactatccaccgcaggaggctgtagctctgacgtgcccaagaggaaagccctgacctacagtggcggccgctctgttctaggatgtggatggcacagactggtcagagagagccagaaggttctgggggtgag

SEQ ID NO: 498600 - DNA, 502 bp, Homo sapiens
atggttttataaggggtctccctttttgctcgggtctcattctctcctgtctgctgctatgtaggacgtgctttcatttctcctttaccttctgccatgattgtgaggtctcctcagccacgaggaactgtgagtcaatcaaaccttttttcctttataaattacccagtctcaggtatctctttattagcagcgtggtaacagactaatacagaggagatgtcaaagctgttgatcaatgagaggtttaagattcctgatgattctcatttagttcagcatcatcatcatcaacaccacaaacaccctcggggcatgtccgatggrcctggcgaggtgctgagcagttggcatgcaagggctcatctcatttttgcaatggctataactgtttattctgagtgagtatttcatattttaggctgatgattaacccatcagcctaaaatccagaatgcttggttctttcattggttcttgcctaggcagctctaggatatgg

SEQ ID NO: 498601 - DNA, 422 bp, Homo sapiens
atcctgctgattggtccattttacagagtgctgattggtccgtttttacagagtgctgattggtgtgtttacaaacctttagctagacacagagcactgattggtgcgtatttacagagtgctgatcagkgcgtttacaaacgtttagctagacaggagctctgattggtgtgtttttacagagtgctgatccctgcgtttacaaacctttagctagacagagctctgattggtgcctttacaatcctttagctagacagaaaagttctccaagtccgcaccccacccagaagcccagccggcttcacctcttacctaggaccttcccattctgaggctgaggaggtggcctgggaccctacaagggagtttctcagtgggggcttccacatcccaggcctggctgggttcccactcccagc

SEQ ID NO: 498602 - DNA, 491 bp, Homo sapiens
attctctctctctctctccttctttccctccctctcccagccatttgatactgtaaaataactgtcatctaagaccgttgcaaacaccaaccacaataaccatatttgctcactgagttgccacttagcaggtgcaacaaggaaatactgtttctcatctcctaaaaccaaaagggttcatctcgtacctaatttgtcacttaagtgaaaagcatatcacgacttacactaactttctcctaagtgtcagaggttgcyggcttaaccagaccggagaagagcaggatccccgggcctagctttgctgagcggcacaggggagcatcgcctggaattggtgggtgtccctcctcactagtgggcacccccttgcccatcgacctgcccaaacccgaggaccccgccagggtctcggtttggcacctaccctctcctgctccccgccaagagccagccaccctcctcgaccccgaagaaagctcgggtgccca

SEQ ID NO: 498603 - DNA, 491 bp, Homo sapiens
attctctctctctctctccttctttccctccctctcccagccatttgatactgtaaaataactgtcatctaagaccgttgcaaacaccaaccacaataaccatatttgctcactgagttgccacttagcaggtgcaacaaggaaatactgtttctcatctcctaaaaccaaaagggttcatctcgtacctaatttgtcacttaagtgaaaagcatatcacgacttacactaactttctcctaagtgtcagaggttgctggcttaaccagaccggagaagagcaggatccccgggcctagctttgctgagcggcacaggggagcatcgcctggaattggtgggtgtccctcctcactagtgggcacccccttgcccatcgacctgcccaaacccgaggaccccgccagggtctcrgtttggcacctaccctctcctgctccccgccaagagccagccaccctcctcgaccccgaagaaagctcgggtgccca

SEQ ID NO: 498604 - DNA, 570 bp, Homo sapiens
ttagtttttttcacctgaaaaattggtatcatatctaccttagggttattcacgaagattgaatgagataacattgccaggaaaacagtacagactaggcatggtgactcaccctgtaatgccagcactttgggaggccaaggcaggaggatggcttgagctcaaaaatttgagaccaatctggacaacagtgagatcctatctctacaagaatattttttwcttttttatctttaacacaatgatgtttcagtctgaagaaaatacttaaaaatttgccaggtgctgtgtcgcacatctgtagtcccagctactcaggaggcggaggagaggcgggaggatcacttgagctcagaaggccgaggctgcagtgaaccatgatcattgtgccacagagtgagaccctgtctcaaaaaaacaaacaaacaaaaacacacagtacagaatctgccacatagtatgttagcaatgaaagcttctgttatcaggaagtactaccagccagattgcctctgttgcacaactggactctgtgtgcccctaaccgtgtaatttgccagttatttaagt

SEQ ID NO: 498605 - DNA, 277 bp, Homo sapiens
ttagggaagccttcctgcaccttatgagaccaggttaattcttacaacacggtgtacttttcctacttacttattgtaattgccatgatgtgtgtgattatttaacatgtgtcttccccagtaaactataaacactatgaggtcagggatcatatgtcttattcaccartctatccagtacttggtatagtaagcattttctaaatatctgttaaatgagtgaatgtatcacaaaccagaaaaaggcacgacaaaaatggaaaaaaaaaaaaaaaaa

SEQ ID NO: 498606 - DNA, 609 bp, Homo sapiens
tgggaattaacagaaagggctgccccacayggaatggcaaagccagcatgcagtttgtattacatacgtccactctgaatctcttcattcttctctcatgcaggtgaggaacgagctgcagcaacggatgcacaactgacgactgagaggacatgaacacacacgtgaataagtgcatggcttctcagcagtggccatcaagacggtttcctatttgtttttgtttttacccactaaacttgtcccagacaaaacagaaaattaaagatgtcacctaaaacaggtctttgggagcaattcgaagaactgtggagaataaaccaagaggtgggataaaatttggtagctctacgctgggatttttatcctcatattgagaagaagcactttcctgacggctgcagctctcttgtgaactgtcagcaagtaaaacccctcactgcctctttgagaggcaaaaggcagtctgtctgttactagacttactcaaaataattcggaccaggcgaaacccacactgccagtagcaattttccactataaacatgttaatctggaagattatactatacacacatctaataacctcctttataaattatatactta

SEQ ID NO: 498607 - DNA, 609 bp, Homo sapiens
tgggaattaacagaaagggctgccccacacggaatggcaaagccagcatgcagtttgtrttacatacgtccactctgaatctcttcattcttctctcatgcaggtgaggaacgagctgcagcaacggatgcacaactgacgactgagaggacatgaacacacacgtgaataagtgcatggcttctcagcagtggccatcaagacggtttcctatttgtttttgtttttacccactaaacttgtcccagacaaaacagaaaattaaagatgtcacctaaaacaggtctttgggagcaattcgaagaactgtggagaataaaccaagaggtgggataaaatttggtagctctacgctgggatttttatcctcatattgagaagaagcactttcctgacggctgcagctctcttgtgaactgtcagcaagtaaaacccctcactgcctctttgagaggcaaaaggcagtctgtctgttactagacttactcaaaataattcggaccaggcgaaacccacactgccagtagcaattttccactataaacatgttaatctggaagattatactatacacacatctaataacctcctttataaattatatactta

SEQ ID NO: 498608 - DNA, 264 bp, Homo sapiens
catcttccccggagtaaatgcactggctttctatattttcccaaaagcacagttygttttgaatctttaaaaaaggttatagctcttttaaattctctgatagctgcctgagccagtgggagttcacacaatggcagtgagcctctgtccctgtacatccatgttcagaaggagcaatctgtaataagaacacagaaccccaatatttggaggaaaaggtccttattgtccaccctggctccagcaagctgtgtcagaaataca

SEQ ID NO: 498609 - DNA, 550 bp, Homo sapiens
aggtgtaagtttttgatcctagctttcagcaagaattttttcaactcttagttccctgtgctgtaaagcaagggaatttgctttcaacagtatgatgttgaaagtaattcaacatcaatgtgattttaaaaaattataattaattataaaaaattaggttcaatgtaattatttttaagtgtctaaattcctgataagttttctaatctttaatttacctattccacctatatcgtaacatcccaattagaaaaatacaaataataattgatttttactcagaggagattaatatttactaaataaaagtgtcatatagtcttatcactatatttttaaatttttaaattaattagtaacttatcrtgtcagcttttgtgccaaaacaaaccactctaatacttagtgtcttaaaaaaaactccctttattgaggttacagtactgtgggttagcaagtggggctggcctcaactgggtggttcttttgctagtttctttgaaaggctcacttatgtctggctggaatcaactgccacgtcaggtgtcag

SEQ ID NO: 498610 - DNA, 391 bp, Homo sapiens
tcataagtggaagctaaactatgaggatgcaagcaaaggcataggaatgacacaatggactttgaggaccaaaggggaaaggttgtgaagggggtgaggggaraaagactacaagtaggaagcaatgtttactgcctgggtgatgggtgtaccaaaatctcacacattgtcattaaagatcttactttaatgtaaccaaacaccacctgtcccccaataacctatgaaaataataacaataaataaatgcaagatcactgaggatgctacaaaaaaaatagattagaaaagcacaaagaagacatttcatatagtacatacacaaagacatacacattaatgatcatagcattgttctgctatgttctgggtttgatagtctagtaacact

SEQ ID NO: 498611 - DNA, 617 bp, Homo sapiens
tgaccaaaatataaccactggaaagcagtgagactgagctacgcttgactattttgttctttttgtctttcagaaaccatggaataactcaaatattcacaaagtaataaagaaaaatataataaacttaccattcaacaatatacaatacatcataatttctttttttaaagaatcaaacacattaaaaacccaggagaatcatttctggatttcttctaaattgtgttcactctgacattttccagaatcaaccaccattctttgttattgacctgtccataaacatctctagggtgttatttttcttttgtgacatcatgtaagtgaactgcattgcatgtattctttagcaataagcattttttcaactttatatttttatgtttacccacttaatacatgatgttaaaatttactcatgtttttctttatttttcatcatcctgtttaacatttaagttgtttccaagttcaataatctcaaacggtggagaagtacccatccctctacatgtctcttcttgtatcttgaatmtctgagccagccacttccctgatatgtcacatatctgaaatcacccttctatactctgtcttgcagttctggcattgag

SEQ ID NO: 498612 - DNA, 617 bp, Homo sapiens
tcttgtgtcccctaatccagttgagaatattccagcatgtcctctatttatgaataggctttaattcaaaatgaaagaccatgattggttcgattagcttagcctaacacaacctctgagcttaatttttggattaacagggrcacttctgccatttcattcattccttggctccttctgctatgtatgatttcaagatgatgattccctttggacttttggctgaaggcatttgtcacttccaattcattatttccttgatatttgctcactgcagagcatctgtcccctatgcagttttggaagaggatgtacatctctgaaatagcaagacaaatatgatgcctgattataagtttaggaaaataaaaacagaggagagttcttgcatggttttcaaaattttctatgaatttatcatatttaagctgctattttagtttctggcaggtatattttctataacaaggaacaaggaaggctagtctgctctgcaggtgttttatataacattgccctcctgtgtcatgtggtctgactaaaaattttataactgaaaatttgcgtattttaagtacacagtggatgggatttcttcttgagggacataaacaaaa

SEQ ID NO: 498613 - DNA, 617 bp, Homo sapiens
tcttgtgtcccctaatccagttgagaatattccagcatgtcctctatttatgaataggctttaattcaaaatgaaagaccatgattggttcgattagcttagcctaacacaacctctgagcttaatttttggattaacagggacacttctgccatttcattcattccttggctccttctgctatgtatgatttcaagatgatgattccctttggacttttggctgaaggcatttgtcacttccaattcattatttccttgatatttgctcactgcagagcatctgtcccctatgcagttttggaagaggatgtacatctctgaaatagcaagacaaatatgatgcctgattataagtttaggaaaataaaaacagaggagagttcttgcayggttttcaaaattttctatgaatttatcatatttaagctgctattttagtttctggcaggtatattttctataacaaggaacaaggaaggctagtctgctctgcaggtgttttatataacattgccctcctgtgtcatgtggtctgactaaaaattttataactgaaaatttgcgtattttaagtacacagtggatgggatttcttcttgagggacataaacaaaa

SEQ ID NO: 498614 - DNA, 578 bp, Homo sapiens
atctaacttggacaatacaaaccttgggcctcaattttcccgattatgaccatgaggaggtgagcagggttggtgtaaaatatgagttaatttcctttaatggtctgaaacctcaagtctttaaaggcgggcttatttggagtgtctcctactcaaagcatctgaaactgcctggattcacattagccttaaatttcatcttcaagttcctaggcacagcarcaagaagggcccaagccagactaatccaagctgctcattaaatacatctacagcaacaaattacccaaagccccatgttttcacccagtattgatttatgtagaaaaagtaatccaagctctggagtcctcctagtcatagcaattattattattattattttgtcaacaagaacaccccttagagcagaaaattcaagactcttcatgtaagccagaaatacaggaatgattttcctagttccatgagatttgctagaagatggcagtaaaaggtagatgcttgtgattatatggcaataatttgtattaaatcaagccaaggattttatgaagatataatatccagtcctgtca

SEQ ID NO: 498615 - DNA, 402 bp, Homo sapiens
tccttgctccttgttgtaagcacatatgagcatatacaccctttgcgtgagaacaagacctgtgtgtctacggtttaggcataagccatactattcacaatatataaaaatagaacttgtctttaggttgtggctgtaaccactattttcaggactgagaacaatttgcatgttggctttatgtaactaatattctacagaagattttgctcaaagattttttgattactacatgtcaggctgctatggctccctagaggttcagtttggactatattgtttgaagctcttctttaatacactcttaaaattattgttctactkaggctgctaagattcactcaagttcagttcaccatacagcaagcaccctgaagtccgtcattcccacagatacccagc

SEQ ID NO: 498616 - DNA, 577 bp, Homo sapiens
tgttgctggtaaaccggtacttgcaatgagtcttgtttttggttattccattttatgttgaaaatcaaacatgaatccacttgtagttcccactgtaaatatttctgtgtatacttccaatttattccatttgtagaatttggataagaatttttaagatttccatgtatacttccaatttactccatttgtaataggaaactttcatggttgcctattacataattgcaaggtaatcaaagtctctgggacctgacaattatttacctctctagtctcatttctcactattctcctccatattctctacttctcactttttcctgaatataccagatgtctctcacctcagtgcttttgaagacactatttctcatgtccccaaacaacctccccttccatatcctgtcctcatactaagaaactttccctcttcctcctctccaaaagccaactcagatattacttcttctgcaaggccttctctgactcagtgtgatattatgatatgtgtatatatacctccagattttcattcatggytcctggctcataactcccatagcctttattattt

SEQ ID NO: 498617 - DNA, 585 bp, Homo sapiens
catacacaaacatcttaaccataatgtactctgagtgatgaaattatgggtgctttcatattatttatactattgagtattttctgaaatattttttgaagcaacatgtattacctttataaatagaaaagtttttctttaaataagtttattgaagtcacaagttgattaaaacatatttaaaataacaaaacttttatgtctaaaaacaggttctaaattttaaagcctcaaaataaagggttgcataaaattaaagagagggcaagtaggctcaagccttgatttgttgtgtgtgtgtgtgtgtgtgtgtktgtttttttaactaaagaagtgaatttgctaatctaacttccattgattaattaccacgatttgacaaaattatacacattgtacttttttcttatgaagtcttaaatatatctcatatcagaaatcaaaataattggaagtatgattagtgaaggaaaaatctctttgatctaaaaccaacagatttcacattttaaacttccatttgtactctaagtaactttagtctctcaattaactgctgccttatgtagcattagtacatggtta

SEQ ID NO: 498618 - DNA, 585 bp, Homo sapiens
catacacaaacatcttaaccataatgtactctgagtgatgaaattatgggtgctttcatattatttatactattgagtattttctgaaatattttttgaagcaacatgtattacctttataaatagaaaagtttttctttaaataagtttattgaagtcacaagttgattaaaacatatttaaaataacaaaacttttatgtctaaaaacaggttctaaattttaaagcctcaaaataaagggttgcataaaattaaagagagggcaagtaggctcaagccttgatttgttgtgtgtgtgtgtgtgtgtgtgtgtktttttttaactaaagaagtgaatttgctaatctaacttccattgattaattaccacgatttgacaaaattatacacattgtacttttttcttatgaagtcttaaatatatctcatatcagaaatcaaaataattggaagtatgattagtgaaggaaaaatctctttgatctaaaaccaacagatttcacattttaaacttccatttgtactctaagtaactttagtctctcaattaactgctgccttatgtagcattagtacatggtta

SEQ ID NO: 498619 - DNA, 660 bp, Homo sapiens
atacttttgaaaaacaaacagaggcatttatacagttccttcacagtaaaagcaactgcttctgagacgaaatttgttttgtgaaaccataagtctgaaacagttatttggaaaagtttctggcacctaaaagaaattcatgcattcctaaagcttcagcttgctaagaactgacagaaaattaacttttaattcgtaatttacccaggactgtgtttgggctgtttccaggaattttcacatggcagatctctagaagatgtgggaagagtctgaaggaatcacayagggtcttcatatttatcaggaggtgtgatgagcaacaacatgccttaaagtgccaatatatttgccccctcagattccaggtgctctgatctggtgcccatcttgtatcagctaaatttctgcactctttatctaatgggaagatacttgtatcccttacctcagttccttgtcttctgtcaatcacatactgattctgcaccaatacggcaaaatttctcacctacagaaacactcatgacacttttacacgacttggaaaaggagtattacaacatttacatgacttttcatataaaaatttcagtggaagtatgaaatgtaatcacaattattaaaatgtaatatatattgattagtcattaagaacaa

SEQ ID NO: 498620 - DNA, 586 bp, Homo sapiens
  misc_feature (1)...(586): n = A,T,C or G
gtcagctgctgttctagactctctcacgggggcctgcactgcacttctgcttcatctgcccaaagctacttccacctgtttccttttcccaggtgtggattcctaataaagattttgtacccaaactccatctcagtgttttggattttggaaaacccagcttgaaacacagatcaagatactatcaagattaatggaagcagattccctaatttctaaacaagagtgaacttgtgcttaagttgcttagtgaaatgatgaaggcattacactttgagaatgannatagtagagctctgantaggcanatgaagtcctntctgnattagaacatacatacaaaaccatgcacacaagaaccaagctaacataaaaattrtgctacaaaatgaatagaaacttctgctctgtaaaatttgctgtgtttgtaattcaggtaaatctattttctgtaaagcaggcatgatcagacattaatatttgtacgcctcatctaggggaatcctcccacattgtaattgttgacagtgatcaatgggcctgaacaaagagaggataaataggtcaatccatcatcaaaccagct

SEQ ID NO: 498621 - DNA, 561 bp, Homo sapiens
cattttactcttaagacagtgagagtgatgaaataaatgggagctcaggaggtaaataaattcctgaagacctggctataattctaactgttaggccttaatatctcttggcatcttaaatctcatagcatatctgggtctgtttccacaccygcaaaatggaaacgtataggcaagatgatttctaaggccattatcacagttttgatttgaagagtcttagaagggaagagggtaggatggccagtcaaaatcagctctctcctggcctgtactgaatgatctattgcacttaaatgtacacttagtacatattttaaggaaaagcaaaaatgtggttgggtggagctagaaagtcaaaaaagcaggaaagaaaaggctcttttaatttcagcatacatgaaagtttcgtgtttgggttttttaaaaaataaatattgctgagtggcactatgtgtttatgctttgggcctttattattaataaaacggcactgcttttcccattatctacaaatgatctgaagtaccttgagggtcagaaaaactttagccaagcaag

SEQ ID NO: 498622 - DNA, 561 bp, Homo sapiens
cattttactcttaagacagtgagagtgatgaaataaatgggagctcaggaggtaaataaattcctgaagacctggctataattctaactgttaggccttaatatctcttggcatcttaaatctcatagcatatctgggtctgtttccacacctgcaaaatggaaacgtataggcaagatgatttctaaggccattatcacagttttgatttgaagagtcttagaagggaagagggtaggatggccagtcaaaatcagctctctcctggcctgtactgaatgatctattgcacttaaatgtacacttagtacatattttaaggaaaagcaaaaakgtggttgggtggagctagaaagtcaaaaaagcaggaaagaaaaggctcttttaatttcagcatacatgaaagtttcgtgtttgggttttttaaaaaataaatattgctgagtggcactatgtgtttatgctttgggcctttattattaataaaacggcactgcttttcccattatctacaaatgatctgaagtaccttgagggtcagaaaaactttagccaagcaag

SEQ ID NO: 498623 - DNA, 640 bp, Homo sapiens
tggatacaaattgaaagaaggataaatgcatgctaacttcttatcttgatctataagtctaaaaacatcttaaaataccagatgattaaaaaaatagtaactttaattgttaaaaatgatcatttatttttcctcaggtggtggctcagtgttcactccgaaaaatgaaaaattgcccatttttgtgaaaaagttctactgatatgtgaaggtaccacattattcattgaattctcttcctgagtgaatgacatagaaccccgacagataaattaatatgttaaaattaaaagattatctaataaacaacttttccgttttaataaaattgtattttgatatatttgaaagatttttattgtagtgaaaaatatatataaaataaaaaataatgatgttggataatatcataaatgatttctaaggtagaaggttctrttgtttagaaaaacatctttgagagtcttttttcatgaggcactaaattccttggtataatagggtaccctagacaaagtagctttttttttttttttttgagagtcttgctctgtcacccaggctggagtgacaaatctcggttcgttgtgacctttgcctcccaggttcaagtgattatcttgcctcagcctcttgagca

SEQ ID NO: 498624 - DNA, 585 bp, Homo sapiens
ggcgcggtggctcacgcctgtaatcccagcactttgggagctggggtgggtggatcacraggtcaggagatcgagaccattctggctaacacgatgaaaccccatctctactaaaaatacaaaaaaaattagctgggtgtggtggcaggtgcctgtagtcccagctactcgggaggctgaggcaggagaatggcctgaacccaggaggcagagcttacagtgagccgagatcaagccactgcactccagcctgggccacagagtgagactctgtctcaaaaaataaataaataaaataaaataaaataaagatgacctacctttggttactacatgatccaaagttcaagccttttctgtccttgaaaagtaaaggatattgtataaaaacatcaggaaggacattaatggccatcttctatttagttaagtctttagaagcctagaagaaacacagcagagtcagtccccaaagacatgagaacctactagaaatgcatgtttgggattctggcagctaccaagaatggctaaatgagatttgccattaatatttttaagagtttctggttttaaaactgtatt

SEQ ID NO: 498625 - DNA, 569 bp, Homo sapiens
gctggcagagaagcagaatacacaaatatgcaaataatttcccaaaaatccaataagaaaaraaaccgccacaaataacaaagagaacataagcagatgataggaagaagcaactcacagaagagaaaacctgaatgatgaataaatatgtaaatgtgttagtcacatccctgactagatcagaacaatggggccacatttttcatccatagtatctgctagcgtggttgagtctaacaagaccaagtgttggtatggacgtgaagcatctcatgtgttgctggtgggatgtcagttgaggacagccattgacagcaatgtctagtaaagttcaaacatgcacacttatggttcatctagtctacttctaggcatttatctttgaccaattcttgcataaatacataaagaaatatgcacaatatgttcactgcagcacaatttgtaattgtgaaaaattttaaatgagctaaatgttccccagtaggggaatggaaaagtcataggatgtcctttcaatagaaagacacaagaagttagagtaaacgagcccgatctctatatatcaa

SEQ ID NO: 498626 - DNA, 569 bp, Homo sapiens
gctggcagagaagcagaatacacaaatatgcaaataatttcccaaaaatccaataagaaaagaaaccgccacaaataacaaagagarcataagcagatgataggaagaagcaactcacagaagagaaaacctgaatgatgaataaatatgtaaatgtgttagtcacatccctgactagatcagaacaatggggccacatttttcatccatagtatctgctagcgtggttgagtctaacaagaccaagtgttggtatggacgtgaagcatctcatgtgttgctggtgggatgtcagttgaggacagccattgacagcaatgtctagtaaagttcaaacatgcacacttatggttcatctagtctacttctaggcatttatctttgaccaattcttgcataaatacataaagaaatatgcacaatatgttcactgcagcacaatttgtaattgtgaaaaattttaaatgagctaaatgttccccagtaggggaatggaaaagtcataggatgtcctttcaatagaaagacacaagaagttagagtaaacgagcccgatctctatatatcaa

SEQ ID NO: 498627 - DNA, 569 bp, Homo sapiens
gctggcagagaagcagaatacacaaatatgcaaataatttcccaaaaatccaataagaaaagaaaccgccacaaataacaaagagaacataagcagatgataggaagaagcaactcacagaagagaaaacctgaatgatgaataaatatgtaaatgtgttagtcacatccctgactagatcagaacaatggggccacatttttcatccatagtatctgctagcgtggttgagtctaacaagaccaagtgttggtatggacgtgaagcawctcatgtgttgctggtgggatgtcagttgaggacagccattgacagcaatgtctagtaaagttcaaacatgcacacttatggttcatctagtctacttctaggcatttatctttgaccaattcttgcataaatacataaagaaatatgcacaatatgttcactgcagcacaatttgtaattgtgaaaaattttaaatgagctaaatgttccccagtaggggaatggaaaagtcataggatgtcctttcaatagaaagacacaagaagttagagtaaacgagcccgatctctatatatcaa

SEQ ID NO: 498628 - DNA, 635 bp, Homo sapiens
tacacaaatatgcaaataatttcccaaaaatccaataagaaaagaaaccgccacaaataacaaagagaacataagcagatgataggaagaagcaactcacagaagagaaaacctgaatgatgaataaatatgtaaatgtgttagtcacatccctgactagatcagaacaatggggccacatttttcatccatagtatctgctagcgtggttgagtctaacaagaccaagtgttggtatggacgtgaagcatctcatgtgttgctggtgggatgtcagttgaggacagccattgacagcaatgtctagtaaagttcaaacatgcacacttatggttcatctagtctacttctaggcatttatctttgaccaattcttgcataaatacataaagaaatatgcacaatatgttcactgcagcacaatttgtaattgtgaaaaattttaaatgagctaaatgttccccagtaggggaatggaaaagtcataggatgwcctttcaatagaaagacacaagaagttagagtaaacgagcccgatctctatatatcaaggctaacaggtctcaaaaatatattgtagagtaaaaaaaaggagggacagaaagctacatagagtatggtaccatttatgtaaa

SEQ ID NO: 498629 - DNA, 663 bp, Homo sapiens
ctgggatgtgctgcaggaccagggccaggtgtggggctcatgcctatcacgccagtgctttgggaggccaaggtgggaggatcccttgagcccagtagttcaagaccagcctgggcaacacagtgagaccctgttcctaaaaaaatttaaaaaattaaaaaaataaaaacatgccacaggaccactgctcagagctctttggtctggcaaccctggaccttcacatggttttgtttgccaaagcaaagtccttattaatatccaaatacagtttgagttttcttgggctttatcctctccagaaacccaggagygtgtcaacatcttggttgcattgctttcttcaaagagagagtgaatccggtagagatagaaaggatgtcctttacgtatcccacagcggcctcacggagaacgataagagaacaatcattaaaactttcattgccataattttctgctttcgttttttaaaagtttgggttagcaaccaatttcctccttgaccaggtgattttttccttagactgtttatccagagcattaaggaaaacagagcataccaccctcccaccatagctgataaggggattcaacacaggtgcgtgtgctagagttaagggaacatattatgctaacatgaatctagactgacttaaaaaa

SEQ ID NO: 498630 - DNA, 604 bp, Homo sapiens
ggatgtgctgcaggaccagggccaggtgtggggctcatgcctatcacgccagtgctttgggaggccaaggtgggaggatcccttgagcccagtagttcaagaccagcctgggcaacacagtgagaccctgttcctaaaaaaatttaaaaaattaaaaaaataaaaacatgccacaggaccactgctcagagctctttggtctggcaaccctggaccttcacatggttttgtttgccaaagcaaagtccttattaatatccaaatacagtttgagttttcttgggctttatcctctccagaaacccaggagtgtgtcaacwtcttggttgcattgctttcttcaaagagagagtgaatccggtagagatagaaaggatgtcctttacgtatcccacagcggcctcacggagaacgataagagaacaatcattaaaactttcattgccataattttctgctttcgttttttaaaagtttgggttagcaaccaatttcctccttgaccaggtgattttttccttagactgtttatccagagcattaaggaaaacagagcataccaccctcccaccatagctgataaggggattcaacacaggtgcgt

SEQ ID NO: 498631 - DNA, 656 bp, Homo sapiens
tgagctagggaacaccagggatccacgtccaccccaggagctgggagaggcaaggaagcgttctcccttacagatttcagaggcggcatggccctgctgacaccttggtaccagacttctggcctctagaaccatgggagaataaatttctgttggtttcagccacccagtttgcggtcctttgtcaccacagccctagaagccaacacaactatggcagggggttccagaatctagtagtaattctgtgatgtgcttcacggcaaggtggggagcatctttgctgatcggcttctcactgaaatctccaggccctcatagtctcactcctgtattcctagggacaaagcatgctatagtctgaattttggtgtcccttgccaaattcatatgttggaaactgatgcccaatgtgatagtattaagaggtggggcctctgggaagtgattaagtcacaaggaccccaccctcgtgaatgggattagcgcccttataaagagacttgagtgagcttcctygcccttgctgccatgtgagaaggcagcaacaggacaccatctatgaaacctcacaagacccttaatctgctggcatcttgaccttggacttttgagccttctgaactgcgagcaatacatttctgttgtttatgaat

SEQ ID NO: 498632 - DNA, 595 bp, Homo sapiens
tttatttgaggttttttcttctggtcagtgaacccaaaggcctagggaaaaaaatcaattcacatttttgaaacactgtggtcctgccatttgcctctcattcatcatgttgacaaacaagtgtaagggaaaacagagggtgaatgagaccaggctccagaatgttcttcctcggggagcgtaccgttgcgggcgcacttcctctggttggcaagaggctccctcacctccaggttgcccagggtcatttggcaggcctgtgttggattctgacactttgcagagctgttgtcactgagaccagcggcttgtggttgggaaagaccacccgagccagcgagtgatcagtgacattcaagctaagctcaatttatgtcagtatgccagtgacgaaattcacaacttgattctccctcagggctgccgagtgtctgacgggacaaatccttccaayggccgcagcaggtgcttcttctagccctgtgttgcaatgacctgcagctcctggggataactcaggcacgctgctgacgccatcaggaggttcaacaccctcacctgcttacgctacgaccagcaaaagcaaaccccgcag

SEQ ID NO: 498633 - DNA, 595 bp, Homo sapiens
tttatttgaggttttttcttctggtcagtgaacccaaaggcctagggaaaaaaatcaattcacatttttgaaacactgtggtcctgccatttgcctctcattcatcatgttgacaaacaagtgtaagggaaaacagagggtgaatgagaccaggctccagaatgttcttcctcggggagcgtaccgttgcgggcgcacttcctctggttggcaagaggctccctcacctccaggttgcccagggtcatttggcaggcctgtgttggattctgacactttgcagagctgttgtcactgagaccagcggcttgtggttgggaaagaccacccgagccagcgagtgatcagtgacattcaagctaagctcaatttatgtcagtatgccagtgacgaaattcacaacttgattctccctcagggctgccgagtgtctgacgggacaaatccttccaatggccgcagcaggtgcttcttctagccctgtgttgcaatgacctgcagctcctggggataactcaggcacgctgctgacgccatcaggaggytcaacaccctcacctgcttacgctacgaccagcaaaagcaaaccccgcag

SEQ ID NO: 498634 - DNA, 562 bp, Homo sapiens
aagtatattgcaaatagaagctactccctcatcctataaacaggaatgaaggaattatgtggcgggtacccccaggcaacttatagcacaaaacagagccacaccctaaaataaatgcagagcggagtcagaactaaaattagcgagaagtaatatttgttcttgtaagctgctgaggtttttgggtgtggtttgttatcatgacctatcacagaaaaactgattaasatgtgactcattaatatgaaaagatgtcccaaacctttggtattcagaattgtaaatttaaaaaaaaagcatcaatttcacagtgctacgttcagaatgatataaaatgctaacatggacttttgaaaagttgtaaagcataaagaactcctgtctcacatctacatctggttaatatttgtacaatcatttcagaaaagtctttactgaataatcttgaacatgttcattaacaaagattaacaatctgtttcttgatgtttacgttggagaaattattatatatggacaagagagaaaaaaatagcctgttaagatttcctatattaaaaag

SEQ ID NO: 498635 - DNA, 562 bp, Homo sapiens
aagtatattgcaaatagaagctactccctcatcctataaacaggaatgaaggaattatgtggcgggtacccccaggcaacttatagcacaaaacagagccacaccctaaaataaatgcagagcggagtcagaactaaaattagcgagaagtaatatttgttcttgtaagctgctgaggtttttgggtgtggtttgttatcatgacctatcacagaaaaactgattaacatgtgactcattaatatgaaaagatgtcccaaacctttggtattcagaattgtaaattwaaaaaaaaagcatcaatttcacagtgctacgttcagaatgatataaaatgctaacatggacttttgaaaagttgtaaagcataaagaactcctgtctcacatctacatctggttaatatttgtacaatcatttcagaaaagtctttactgaataatcttgaacatgttcattaacaaagattaacaatctgtttcttgatgtttacgttggagaaattattatatatggacaagagagaaaaaaatagcctgttaagatttcctatattaaaaag

SEQ ID NO: 498636 - DNA, 432 bp, Homo sapiens
ctccagcaagcagtccaccgttttataccctcaggaccacataacatactgggctgaattattgaagaatatctggtttctaggagggacaggagtagatcctgggctgttctggccagctctcactcatctcaggatgctgcattcccagcacattctatctacagttattcttgagaattacaaatgagaaagcagggaggactgcattgattcaatatcattcattatcacctggagaattatcctgcactttattctcccaactcagytttccctcttagcaaagttagtctgtttcctatgcccattcatctccctgaatctagaagtagaggcttgtgttcttagaccgatataaaaccttgactgataagatcttagcacaatgttgttgagtcataaccagaattcatttcatcaggcccaaca

SEQ ID NO: 498637 - DNA, 339 bp, Homo sapiens
gcgtttgtatgactgtcacttcttcctggcttgcatttgtgtgtgtgtgtgtttgtgtgtacattaaagttggtgtttcactggaattatagttagattatactcacaagcgaaagcaatcattttgtctccgcctkcatcagcattactcgttggagaactaaaatgctagtaatgataaaaatgaacattcgtggagtgcttaggatgtgctaagcattgttgtaattgtttaacatagattatgtcatttaattttcacaagaacagtatgaaatagttattagtactctctctcttttgctgctaagcaaactgagatatggaggttaagaatct

SEQ ID NO: 498638 - DNA, 574 bp, Homo sapiens
atgttcatttttcctagagtttcatataaatggaaatctagagtaagtactctgtagccttcttttactcagcgtaatattttttggatcatacatgctgttgtgtgttaatagtttgttcacattactgagtagcaatttgcttatccatttacttgctgatamgtatatttttagttttcctgttagaggccattatgaacaaagctactgtgaacattcatgcacaaatctttctgcagacttgttttcagcctacccatgaaatagtacgcagcttaaagcttggaagggggtattattttatgcctgcagagagagagagagagaggacacagaacatgatggaattcctcttctaaatggaaaacctcaaaacacaaccagagaaacttgcaaatgtatctttaaactattagcttattcctctaagatgaaaatagctcatttcaatttctttaaaaaagcccccaagttttagtttcataaattcatgttcccattctgctgagccaactcttcatggttctacaggaactcatctatgctgaagaagcacaccattgtactccag

SEQ ID NO: 498639 - DNA, 574 bp, Homo sapiens
atgttcatttttcctagagtttcatataaatggaaatctagagtaagtactctgtagccttcttttactcagcgtaatattttttggatcatacatgctgttgtgtgttaatagtttgttcacattactgagtagcaatttgcttatccatttacttgctgataagtatatttttagttttcctgttagaggccattatgaacaaagctactgtgaacattcatgcacaaatctttctgcagacttgttttcagcctacccatgaaatagtaygcagcttaaagcttggaagggggtattattttatgcctgcagagagagagagagagaggacacagaacatgatggaattcctcttctaaatggaaaacctcaaaacacaaccagagaaacttgcaaatgtatctttaaactattagcttattcctctaagatgaaaatagctcatttcaatttctttaaaaaagcccccaagttttagtttcataaattcatgttcccattctgctgagccaactcttcatggttctacaggaactcatctatgctgaagaagcacaccattgtactccag

SEQ ID NO: 498640 - DNA, 653 bp, Homo sapiens
ttactgttcaatgcctgcagttgcagcacattgcctggatattaaaaacagattgttaaacacttgctggcaaaatcccagaggatctatgtggatgtatttgttttaaaatttattaaaattctctggctacagattaattttgcttgttcaatattttttattgtttcacctgctgttgagtagaagctgcaactggaaaagtttttgtttcrtttaagttaccaagttctatcaaaattgtttgaaagttcctaaacattttttttttattggaatgatttgctttgaaataacccaccaccctcaggagggggttactcacacaaggtatccagatgtcttgggtaaggagcaaatattcagcatccttaaggaagggcaagagcacttggaacttggcaggagctcagcccattaagagaagagactccactcctctgttgatgaccaaggaaaatggtctgctggattccgagtgtgagaaaaggcagctgagccttgtatttgatggaataagccaggcaaaacaatttgcctagtgctgtaagggcgagccagatcagagcatcctgtgaaaggaagtctgagagggacagggattcattcctgggaaagagcatcatcacagcaaactgcttaataaataagca

SEQ ID NO: 498641 - DNA, 615 bp, Homo sapiens
ctatattgcgaagtggtgaagtttgagcttttattgtaccagccaccctaatagtaaacattgtacccagtggacaatttttcatccctcatccctctcccacccttcaattttttgaactctacaatgtctattattctactctatatgtctatgtgtgccttttgtttagttcccacttatacatgggaatacgtggtatttgactttctgagttatttcacttaagatgatagcctccagttccattcaggttgctgaaaaacaataattttgttctttttatgactaagtagtattgttatatatatatgtgtgtgtatatatatatatgaatgaatatatatatatataaaagcttctcattccatctgtcttaaactagatatatgggaagtcttcctaaagatatgtgtggtgttgtatttcaatatcagtttataggttgataataatagcttatatacatacacaacactttsatcatagtagacgtgatggcaaaccttcttaaggttttaagtatattaatctttttaattctcagaacaaccctaccaggtaagtactattattatatccttgttagtaatgagaaaatggaggcatataaag

SEQ ID NO: 498642 - DNA, 601 bp, Homo sapiens
agtcactgccagtgtcattagcaaatttctgagtcagagccaccagtgatggatggtatcatgtggctatgagccatgataacagattatttgcatatgtttgtttggcttcttcctgccctatttacttgtttagggacttctggcattccattccctgtgactcactttctatactgcccaacaaagcatttctttgccaatcgtggcaagragccagttttttttttttttaaagcaacgcttagcgagcagagttttatttaactccttcctctgctggtgacagcgaagtacttatcttcttttaaagaaagttaaaatgaaaaggagagtagcccagcaaaacagtggtagaatttgagagaggactgtgggattccaaaactagttcactactctactcataggtgatacctatgtttttagatgctctttaactgtggatagagatagactatcctccatcctctacgcagtatcaaaaaaacttttgctctgtttatgcagggaaaacagcactcacacttcttgaatgtgaagggaggtcgatgatcaaattagaatcttactcctatcactgctcccaccccagcagcag

SEQ ID NO: 498643 - DNA, 601 bp, Homo sapiens
agtcactgccagtgtcattagcaaatttctgagtcagagccaccagtgatggatggtatcatgtggctatgagccatgataacagattatttgcatatgtttgtttggcttcttcctgccctatttacttgtttagggacttctggcattccattccctgtgactcactttctatactgcccaacaaagcatttctttgccaatcgtggcaagaagccagttttttttttttttaaagcaacgcttagmgagcagagttttatttaactccttcctctgctggtgacagcgaagtacttatcttcttttaaagaaagttaaaatgaaaaggagagtagcccagcaaaacagtggtagaatttgagagaggactgtgggattccaaaactagttcactactctactcataggtgatacctatgtttttagatgctctttaactgtggatagagatagactatcctccatcctctacgcagtatcaaaaaaacttttgctctgtttatgcagggaaaacagcactcacacttcttgaatgtgaagggaggtcgatgatcaaattagaatcttactcctatcactgctcccaccccagcagcag

SEQ ID NO: 498644 - DNA, 562 bp, Homo sapiens
tggttcttggttattgagaagtgtttcttaggaatatttttcctccataaatggccgccatttgagccctctcaaaactaggcaaagcaatttttataatgctaggtcaatttcatttccatagcctaggtatctcaaaacttatgcatcatcagattttgaagcttgcagagattcaataaaatatctgtgatgttattagatttggttgggaggatactacgacgagatacaagtgacagtaggcgaagttagaaaatacaagtcactcacaaaacagggcataaacatctgaatgccctctctgtgaccacctggaaaaatcagattgtatttgcaaccctgtgacagaaagctggtttgtgatctcattattataattctctcttcaggccgggcatggtggytcacgcctgtaatcccagcactttgggaggctggggcgggtggatcacctgaggttgggagttcaagaccagcctggccaacatacatacaaccccatctctactaaatttacaaaaattagccaggatagggtttttaagggttttggagtggg

SEQ ID NO: 498645 - DNA, 639 bp, Homo sapiens
taggatgtgattcccactgacaaatcacctacaatgactaaccaaaacatagaaaatgttttaagtatgaagtttaaatagaaggagaattatggaaagcccaagaggtagaaaaacacttacaaggaaatattgataaatttgactagattaaaaattagggatctctattcatcaaaaaacacaacaaagaatgtggacaaaaacaaagttaacaactggggaaagatatttgatacacatagaaaatatgtttgaaacacatataacagaaaaatccaagtttgtaagaaactataggagaagatatatgtgtatatatataatgtgtgtgtgtatatacatatataaatatataaaatagataaataagtgaaagaaaagagaaaattgatggcttgtaaacatttgaaaatatgttaagcctaattgagaataagtatgtaaattaagaccacaatgagatgtatctgtccacctataagatggcaatttctccaaattcctatcattascattaatcttcccttgaattccaatcccatgtccccagctttctactctattaaaactgtacttggatgactatgcttgttcaaatgctctttttgtcatatttcccatctttataattttata

SEQ ID NO: 498646 - DNA, 504 bp, Homo sapiens
tcataacattgaggaaattccacattccatggttgaagtgactaaaggaagtcagtaaaatggaaaaaaaaaggagcttacagagaaaaataaccaaaaaaagtaaaagtgcaattacataagtcactgagagtaattaaaaaaataaaataaaataaaataaattttaaaaaaagaaagaaaaaagaaagaagaaagaaggaaggaaaaaagagagaaagataaaattgtttattgtattatcaacatttaagtcactggtgatttctcttttgaagtgtagtgttatgatgaatgagtatkaagtgaataaatggatctgataatataaaacgtactttgagaagcttggatgtgtaccgaagacaaggtataaatccataaaggaagagatatattgttttaaatggagaaaatgtttaaaaagcatatcttacctcagcttttgcttctgtttttagttaacgtactgtgtgttttgatataatattttgccccaagtgc

SEQ ID NO: 498647 - DNA, 586 bp, Homo sapiens
tacacatttatatgtgtgtgtgtgcttctgtttgtatgtatatcatatatatgtatatgcatcttattatatagaagttgttatgtatacagktaaattatctgtagtttaaattttgatagagaacattgtaataccattttagacatgcaagattgagagaaaagatgaatcaataacccatactagaatttgaggtttgagttagaagaatttctaaaaagtgtaccatattttacatgtagaattttactaaaaagaatttgcgaaagagaccaagtctttcaaagacagttcatagttaagttaaaaaacaaaacataaaaatgtattttatttaattgaatttaattgtgttttatatttctctcataatcagaacaccagtttactttaggtcaaggcaaagagagaattctacaacctagagatcctcaataataattttaaaaggtatttccagttttattgggaaagtgtttggtggctatcagcaagtatactctaaattctcttaagtgtcttcataaagcccagaatattacataatttcaaattgaagtacatggacatttaatgaaatcta

SEQ ID NO: 498648 - DNA, 515 bp, Homo sapiens
aaactcagttgcaatgacagatttcacatctatagagacttgccatgtgtactaacaaactatggggacaacaaaaataaaacagagcaaaaatcaaaccaaaaaaaccctacagttaaaacatgagcttacaaacaacagttacaagaacatacaaaattgcaggcatgaygtgtgatggtgcttacttgtcagatgggcaactttaagaagtaggttgcaggatgagttacgatttatgtatcaaacaaaagctaacatttctccagggcaaagtttcaaatgccatgggataggtaaattaattagtaagcaaacaaatgtgctatatatgaaatcagtgtatattggcctggctcctcaaaacaaagcttaagactagacctttttgaaaaaccctgaatggaaagctttatatatacatataaacaaaatttggtctggagattttcaaagtcatctttgataagtgaattattttttaattctaaggtaaggatttagagccactttta

SEQ ID NO: 498649 - DNA, 624 bp, Homo sapiens
tgggggcaggccagcccctctatcacttactatggctgccgttttgtgcctggccatccatcatagacaaccttcaactggaatctctcctaatgaagccctaccacacagaggcagtcagccctgcaacggtgtaggctcgaggccatggccgcagcaggaggcagtggcagtagagggtggcagttagggggcaggaatcactggactctcagaaccccattggggtgtggcttcctcaagccctccaaggcaagacatacactgggacaaataaataagttttcagggccaggtgcggtggctcacgcatgtaatcscagccactgtgggaggcctaggcgggaggatcatctgaggtcaggagtttgagaccagcctggccaacatggtaaaaccccgtccttactaaaaaaatacagaaactagctgggcgtggtggtggttgtggtgctagtagctgtaatcccagctacttgggaggctgaggcaggagaaacacttgaacctgggaggcagaggttgcaatgagccaagattgctccattgcactccagcctgggcaacaagagtgaaactccatctcaaagaaaacaaaagaaaagaaataggttttcagcagga

SEQ ID NO: 498650 - DNA, 520 bp, Homo sapiens
tacctcacgaatggatatagatttcatccgaggcctaaccaaaatgaaactgccaagctgagtgacatagagttgcaaagggatggattccctctttgactggcaaataatttgctgggagcatcagctttttgtgcttcrgtaactgagcatcccatttgaggcctgcagctcccgagctgcccactggactcagtgatggagcgcttggatctggcttaagtgggtttgagtactccaagttgctggccattctcattctttcttgcctactttccatatactctgcactagaagtgtttgtctatttgtatttcccaaccttgctctctctgtccttgtttccctccctacctggctcacacagcgcacaaacagttaagggcacttagcttagctgcctccacatccctgtagactaccctggaaggattgaatgaaattgatagtactaacattacatcactcacatccccaaagcaagtgtagctgggcgggtagaaggaatgaccctggagaa

SEQ ID NO: 498651 - DNA, 647 bp, Homo sapiens
atctttcataaatgggggcaaatgaaagatgttttcatacaaacatagaatgtgggktttttttccctcttggacctttcctaaagtaaaatctcaggaatataacttaggcagatagaaagtgattccagatggaaactttgagatataagaacaaattaagagtattaaaatatgtgaggtaatggctgggcacggtggctcattcctgtaatctcagcactttgggaggccaaggcgggcagatcacgaggtccggagatcgagaccatcctggctaacacggtgaaaccctgtctctactaaaaatacaaaaaattagctgggtgtggtggcgggcgcctgtagtcccagctactcgggaggctgagacaggagaatggcatgaacctgggagtcggagcttgcagtgagccgagatggcaccactgcactccagcctgggcgacagagcaagactccgtctcaaaaaaaaaaaaaaaaaaaaaaagtgaggtaatataaaaaagcttcaactatgtaagaaaataataataccttatgggattaaaaatagaaaatactaaaatactctacaataatggcagagaagcagttgagtgagaaattcttgcatgtgtgccccaggaggcataaagaaggatgtt

SEQ ID NO: 498652 - DNA, 647 bp, Homo sapiens
atctttcataaatgggggcaaatgaaagatgttttcatacaaacatagaatgtgggttttttttccctcttggacctttcctaaagtaaaatctcaggaatataacttaggcagatagaaagtgattccagatggaaactttgagatataagaacaaattaagrgtattaaaatatgtgaggtaatggctgggcacggtggctcattcctgtaatctcagcactttgggaggccaaggcgggcagatcacgaggtccggagatcgagaccatcctggctaacacggtgaaaccctgtctctactaaaaatacaaaaaattagctgggtgtggtggcgggcgcctgtagtcccagctactcgggaggctgagacaggagaatggcatgaacctgggagtcggagcttgcagtgagccgagatggcaccactgcactccagcctgggcgacagagcaagactccgtctcaaaaaaaaaaaaaaaaaaaaaaagtgaggtaatataaaaaagcttcaactatgtaagaaaataataataccttatgggattaaaaatagaaaatactaaaatactctacaataatggcagagaagcagttgagtgagaaattcttgcatgtgtgccccaggaggcataaagaaggatgtt

SEQ ID NO: 498653 - DNA, 526 bp, Homo sapiens
tcctgaggattctgacccacaatctgactttcacatgcgtttgaggatagaatttacactacccaagaattccaaaagatcccaagcaaaaactgagttaaaaggagtaatgatttggcaatgccttctgccattttgccaaagtaattacaaatcctctttgaagaaaaaataacctcttaactcaggcttcaaagaacttctacagcccaagttcctcaaaagtcaagagaggtaaaacagaacttagaacttcacacaagtagaggaagaatatggaataagacaatcaaggaaggcaaacagagaaaaagtaatataaaaaaagcaacttatagaaagcacaaagactaaaatggactcaaatatatcggcattcaaaataaatataagtgatttaaacttgccagttgagacaggttgtcagaacagatgaaaaagaaacagaacccagtaacatgctttttacttgaaacatgaggacccagaaagttttaaaacatrtaaatggaaaaaagtttttagc

SEQ ID NO: 498654 - DNA, 621 bp, Homo sapiens
gggtgatcttaagtgttctcaccaaaagaaaaagaagaagaaaatggtaactatctgaggtgattgaaaagtttgttaattagcatgtttgtggcatttcacaatgtatatatatatcaaatcataaaatacaccttaaatatatacaattttaattatcaaatatactttcacttaaaaactttaaaatatataattaaaagattcttgtttattcttgaatagaaggataaggttaactttttaaaaggttatcaaggaaaaaaatagtgaatccgaaaaataaacaaaatcacattagtgaagaacttctctttagcaccattgacaatgagaagacagtgggaagatagtgtcaaaatttagagagaaagtcactttaaccacagaattctttacccaggcaaatgagcatccaagtatgagcacaaaattaaagtcaattccagacacacaggaccccagaaaattaaccagctacacatccccactaaaggattatttaaggatatgctgcragtaaaacaaaaacaaacaacaacaacaacaaactgtatccaaggacacgagtgaaatgtgaaatacaagaaattcgcacacaggcccaatatgtcccaagaa

SEQ ID NO: 498655 - DNA, 492 bp, Homo sapiens
agtaacaaagaggcagggactaccatttatgcaagagtcaggaaagctttctggaaagaagtgacttctgcccaggtgtggtggctcacacctgtaatcccagcactttgggaggctgaggtgggtggatctcttgaggttaggagttcgaaaccagcctggccaacatggkgaaaccacatctctactaaaaaaaaaaaaaaaaagccgggtgtgggggggcatgcctgtaaacccacctacttgggaggctgagacaggagaattgctttaacccacgaggcggaggtttcagtgagccgagatcacgtcactgcactccagcctgggtgatagccaagactccttctcaaacaaacaaaaaaagaagtgactcctgacattgttactcggaatacggcagagctggtcaagcactatatagagaaaggtgagatgccacacatggtacactctccaataaaagcaaaacttgtggatacacaaacaagt

SEQ ID NO: 498656 - DNA, 558 bp, Homo sapiens
gagtggaaaggttgggaacagcttccatggggctggagctggagtgtgtttcattccagccacgaaaacatggggtccaaagaccttgaggagacagagtcagcatctacaggggagagacaagcttcagggaccagcgcagaggagcagaggccagtgtcatggtttggttaggggagactgaggccagggtggaaacaccccagatacacctgaggataggaacggggaacaaacagtcctgggcaactgctaggagtgacttgagggcagcaagacgcatgatgatgagcagacactggatgcggcccatcatctgctgtgtagccttgagctcattaatcactctctgtggcccacttccctggtctatcaaacatggctaatgatgatgcctacagattgtctcttctgaggttgttgagagacttaaaaagagccagaacatggaatgtgctaggatatggtggtactcaatgacagatagacacggccatcagcgctgtggtgattatgtcccacagctctgtgtstggtctctagattacccaaatgaca

SEQ ID NO: 498657 - DNA, 585 bp, Homo sapiens
tgtcagctgtctttccttgttattagaaggcaaacttctgaaaagattactatatcttctaactttctttttctagttgcatatgggttgggatgtcaggttctgaagtttaaaagaagagtgtctaagaaaagtgaatgaatttttttgagtgaaggtggtactataaacaaataactcccttatatacaaaacccatgagctaaagtatatggaagctctgggatcctatctaatcttcagagatatatgctcgagctacattctagtctctctgtgctgaatatttcagatagagacatatctcctggataagttggaagactgagaaatgtgggaaagttagaaatgttatacacagtaaacttgtcaggatttctttattcctgggcacagaacagcttgccaacttcatgtkctattctattctaaagacttctcagttcctgtgaaaccacacggattgatcctccaggtgcactgcaagacctaaattaagaacttaccaacagaagcccaagcataatgacagatattagccacagacaaaaataggagcctacttgctgagaccaaagacatgct

SEQ ID NO: 498658 - DNA, 444 bp, Homo sapiens
ggaggtgcctccttctttgtccagaaagaagaaagagtggctgcttggcccgggggctgtcaaagggcaaaccaggtcaatggtcccacccggcccacagcgtcagaggtcccccacgaacgacttggctgaggcatccctccaggggtggggattggcccctccatcctcatggcaagcatgctaataggcctyctcctatcactgcctcctgtttcttggatgggataaactgtttggcctttggacaagattacttttgcaccaaacaggattgttatcacttaattgaaaataattatccaatgcaaattgagttcaacttatctagctggaaataaagaagtgagtattttgggtggtttcactgctgcaaaggcaggtattttaagcaaatgaaagtaacgagatgcaggctgtgttttctgcaggaggccctgggaa

SEQ ID NO: 498659 - DNA, 561 bp, Homo sapiens
gagctgccattcatagcatgcgggatcggtgacagggtatcttaccactgtttggaccccaaacaatgatggacaaatggcttggtttacaaagaaaccatttagtacatggatggagaaggaccacaagctttgatgcaggatagagggatgaaggcatggagacaggatgtagggggaagggacagaaaagaacacataaatgtgtaaatccatggacattttatctgaatgtttattgggctagactataaaacacagaaatcacactaatatacatcttccamccatacaaaatgcttaacatattcaaatctgctactatattttgcatgtgattgtacatgaaccccaataaaaaaattataaaagaatagacccatagctctattacgtttattagctaatacatgggggatccaaataaaccccaagattttcatttttaccataactccacatgacttacaacacatggccctcccaccacctgccatcccaactctgcttattccactgtaatactcttaaccatcgatcacaaaggcagggaattccaca

SEQ ID NO: 498660 - DNA, 622 bp, Homo sapiens
gtagatacattggtacaatcttttagaagagcaatttgacaatacttatccagacataagtgtacgtcttttaatttcacaattccatttataaaatatgacttaccaaaacattattaaatgcaccactgtttgtttaaaaaatgggtaacaatttaagtataaatttgctggtggaattacaataaataattgtcatgttatttacatgagaaatacatatatataccaaacactcatactctaatctgttttaatctgaaattcatttcaacagaaagccatactaatttattgagcaaaagattataggtgtatttcagacatgcattaaaaagggctgtaagaaaaaagactataggtgtatttcaatataaataaaattagaaaaatatttctgctttcgtatcatgactttggggaagtacatattaaagtacttttattattttaaaaaataggtragtaatgctttaaaaaagagaatgagagacacccctttcataaataccccttaaatcaattagaattgccacttaggtatgaggatgaaaaatgactttgtactgattagctgttaatataaaataaacatatgttactatgtagtaagaaacgcaat

SEQ ID NO: 498661 - DNA, 535 bp, Homo sapiens
ggctttgtattgtggtatatgttacctagctcccctattggctattaaacacttaagaatgaggacctggtttttacatctttgcagttcctttggttcttcataggtatttacaaactattgatctagtgaatgttgtcaatgttggacagtcattttcagttaaagaaaaaagtgaaaccatatcarttggactaaattaaatataaaaattttgattattcgtaacagaagccatttgatggaaagggaccgctacatttgccccacatctgttattattgtggtttctccatttgtagttgaaaatgcagagtcaatgcgcgtcaggtaatgcctcttgtgtgtgagccattattacaataattaataacaatggcagctcagttgataggaacttggcaatgtgtgtacccttatcttcaaagctccaaatggtttggaatttggctttttgtaaaaccgtttaataagaaagtgtgtgtttagaatctattcccaaagactgacccttatctctgaagtccttaatgag

SEQ ID NO: 498662 - DNA, 590 bp, Homo sapiens
gatttcaccagtttttccacttgatgttctttgtctattccaggatcctgcgttgcacttagtagccatgtctccttaaccgacaatttttaagactttctttgtttatcatggctatgatagttttgagaagttactggtcagatattttgtaaactggccctctgtttggatctatctgattttttttctcattattcaactaggattatargtttttcccattattagactgggattataggtttttcccattattagactgggattataggtttttgagatggataccagaaaggtgaagtgtccttctcagtgcaccagatcaggggaattcaagacatcaacatgactcatcacccatgatattaaccatgatcacatgggtgagatgagatctgccaggtatctccactgtaaatgtactattttttgctttctataccaagatctgaggacgcgtgtgcttgttgctgttgggttgtcagtttctgggctctcttagaagacagagctagtaaaaaattatgagtgatttttattttcctcttttgtcttgttcatattttctaaatgttctgcaataagtg

SEQ ID NO: 498663 - DNA, 589 bp, Homo sapiens
ttttgcttgggaattttgcaaatcactatcamacttaaataaaacaatgtagcaaaatagcacactggccaaagatggctttgcattttagcctttctgtaagaaatggattgttgttctttgtcaagttgcaattccacatcatcagttacctttatcccttttcttcatgactttcattcttccaaaagctatgtcatgttcatacttttgagagaatacatatttcctctttaaaaaaaaatctcatgtgatgattctatttttcacttttcataatcaactaaggaacaatgaatgtagaaaggaagacttattcgcagaaaattggctgaggaagccaaaaaagaatttgctgaattgcgtattttttttctacactaaacagtcaggagacaaatgaaatagaagaaggaagtaaagctttgctatatttgttttcagatagattaatatatttgtcaaaagttagattacaataagagagctctcaaaatatgaccagcttgatagtcaggctggaaagtcaaaattgagctggatctattacaaaatacagatatcacaaagaagtatttgctaaaatgtc

SEQ ID NO: 498664 - DNA, 495 bp, Homo sapiens
gctcacagcagaaagctacacacccaatcacaaaccatactctgtaagttttattacttaagagttcgttatctcattcatctcaactcaaaatctttaattctgtcctcatcatttctctccctagattaataaaatagactcatctacctttttcaaattgaggttcttctgatacattcttctccctagtcctgggactgtccttttaaaaaggtatacctgggcatgatgaagccctgtttttttcttctgcractcctcatttccttcaggataaagacctacctcatctatgaccatgattccacttgtatcctttccttctaataattgtatcgtaatctgatgaagaattgaattttggagcaattaaaaagcaactatgttctttaaagaatgttttaaatagtttctttttttcatttattcattcaattaataaatagtcattgaatttttaataatgtaccaggtactatgcaagggactata

SEQ ID NO: 498665 - DNA, 495 bp, Homo sapiens
gctcacagcagaaagctacacacccaatcacaaaccatactctgtaagttttattacttaagagttcgttatctcattcatctcaactcaaaatctttaattctgtcctcatcatttctctccctagattaataaaatagactcatctacctttttcaaattgaggttcttctgatacattcttctccctagtcctgggactgtccttttaaaaaggtatacctgggcatgatgaagccctgtttttttcttctgcaactcctcatttccttcaggataaagacctacctcatctatgaccatgattccacttgtatcctttccttctaataattgtatcgtaatctgatgaagaattgaattttggagcaattaaaaagcaactatgttctttaaagaatgttttaaatagtttctttttttcatttattcattcaattaataaatagtcattgartttttaataatgtaccaggtactatgcaagggactata

SEQ ID NO: 498666 - DNA, 527 bp, Homo sapiens
ccaggctgtgggaactgagttgcaggcaatctccacacctggcccatcaccccggtgcccctccagtagtgtctcacctcccctcttctcagatcacagggcatgctaaagccgacagtgagtcgggagaccctctaagatccaacaaagcagcacagtgggtggaaagagaacatcrgaatcccagagaccagacttagagcctgttactcgcgctctctgatagataaataaaaatgcccagctcgtggttactatgaggattcaaaggggcttaacgcctatagcactgagcatggtgcccggcacagaggaagtgcttagtgggtgttagctgttactacctggaccagcacctgagtctactgagagtgaaactgatgctggagaagtgatattgaataataatctgtaccaggaccaagcatggtagtgcaggcctgtaattccagctactcaaaaggcagaggcgggaggatcgcttgagcccaggagttttagaccaggctgggcaacacagcaagacc

SEQ ID NO: 498667 - DNA, 527 bp, Homo sapiens
ccaggctgtgggaactgagttgcaggcaatctccacacctggcccatcaccccggtgcccctccagtagtgtctcacctcccctcttctcagatcacagggcatgctaaagccgacagtgagtcgggagaccctctaagatccaacaaagcagcacagtgggtggaaagagaacatcagaatcccagagaccagacttagagcctgttactcgcgctctctgatagataaataaaaatgcccagctcgtggttactatgaggattcaaaggggcttaackcctatagcactgagcatggtgcccggcacagaggaagtgcttagtgggtgttagctgttactacctggaccagcacctgagtctactgagagtgaaactgatgctggagaagtgatattgaataataatctgtaccaggaccaagcatggtagtgcaggcctgtaattccagctactcaaaaggcagaggcgggaggatcgcttgagcccaggagttttagaccaggctgggcaacacagcaagacc

SEQ ID NO: 498668 - DNA, 527 bp, Homo sapiens
ccaggctgtgggaactgagttgcaggcaatctccacacctggcccatcaccccggtgcccctccagtagtgtctcacctcccctcttctcagatcacagggcatgctaaagccgacagtgagtcgggagaccctctaagatccaacaaagcagcacagtgggtggaaagagaacatcagaatcccagagaccagacttagagcctgttactcgcgctctctgatagataaataaaaatgcccagctcgtggttactatgaggattcaaaggggcttaacgcctatagcactgagcatggtgcccggcacagaggaagtgcttagtgggtgttagctgttactacctggaccagcacctgagtctactgagagtgaaactgatgctggagaagtgatattgaataataatctgtaccaggaccaagcatggtagtgcaggcctgtaattccagctactcaaaaggcagaggcgggaggatcgcttgagcccaggagttytagaccaggctgggcaacacagcaagacc

SEQ ID NO: 498669 - DNA, 352 bp, Homo sapiens
ctttcctaccaggtggtggcgagacttcctgctgtgcctgcatgcggcctcagctttcttcttgagacagctaccagacaatcactacccatcaattgggcttggcacagaaaaatagaatgtattttcttttcaggtaamaatggctataataacactatacacatttgctgtgggaattcagagtgctttctcatggagtttggttgtattagtctgttttcacactgctaataaaggcatgcccgagactcggtaatttataaaagaaaaaggtttaattgactcacagttccacatggctggggaggcctcacaatcatgagggaatatgagtgaggagaaaagtcac

SEQ ID NO: 498670 - DNA, 513 bp, Homo sapiens
tcacgtgggaagctggtttttcaaacgatctgcttcttagrgggcatctacacagcgtggctggagaggcccggaaaacccttccttccgaatcatcttttctgtcgcagactctagggctcttttgtacccaacttagaagtagatgattgtgttaggttaagatatttaaaatgcgaatggacataagaagaacatattaaacaagtgtcagtcacaacaacttaatatggattagtttaaaatacttatttaaccattagaactggaaacagttcttagattcaaagtgtggtcccgggactagcagcatccacatcacctgggagctggtgaggaaagcaaattccccagtcccaccccagaactgcagaagcagaaactttggccatctgcattttacaagccttccaggcaattctgatgcacactaccatttgagaaacactgctcttaaagattaggagacagaaaaacacagagggtaaatgacttgcctaaggtctccaagct

SEQ ID NO: 498671 - DNA, 513 bp, Homo sapiens
tcacgtgggaagctggtttttcaaacgatctgcttcttagagggcatctacacagcgtggctggagaggcccggaaaacccttccttccgaatcatcttttctgtcgcagactctagggctcttttgtacccaacttagaagtagatgattgtgttaggttaagatatttaaaatgcgaatggacataagaagaacatattaaacaagtgtcagtcacaacaacttaatatggattagtttaaaatacttatttaaccattagaactggaaacagttcttagattcaaagtgtggtcccgggactagcagcatccacatcacctgggagctggtgaggaaagcaaattccccagtcccaccccagaactgcagaagcagaaactttggccatctgcattttacaagccttccaggcaattctgatgcacactaccatttgagaaacrctgctcttaaagattaggagacagaaaaacacagagggtaaatgacttgcctaaggtctccaagct

SEQ ID NO: 498672 - DNA, 575 bp, Homo sapiens
gacataaatacatattttctactcattattctaagtmttcactgttaaatcatgatacttcatatgagccatgaattttgtgacacattttaaaatcaaatttttatataggcgggtactctgcaactaatatttgcttggttccctgtacatcctgaataaaagcagccctctgttccttctacacaacctctgagtgtggccaggcctctctgctgaaagtttaatcacaccctcagccttgcacagctctgaccaggtgcttggctgaccaagagcaaccccattgggtccctaactcagtgattctcattccttattctcacgggaggaggggagagggacaattagacaatataaattcaggggaaggaagatgaaggcaaggaactaacacgactgcattttgcagaagttgagataattagcaaattgtgatcctcatagatttagagtgaattttctccatctctgagaattgtctttggaaggagtgtgttgaagtgtacatgtgtagacacttggttcaacaattacttgctgaatatttggaagaatacataggcatacctata

SEQ ID NO: 498673 - DNA, 575 bp, Homo sapiens
gacataaatacatattttctactcattattctaagtcttcactgttaaatcatgatacttcatatgagccatgaattttgtgacacattttaaaatcaaatttttatataggcgggtactctgcaactaatatttgcttggttccctgtacatcctgaataaaagcagccctctkttccttctacacaacctctgagtgtggccaggcctctctgctgaaagtttaatcacaccctcagccttgcacagctctgaccaggtgcttggctgaccaagagcaaccccattgggtccctaactcagtgattctcattccttattctcacgggaggaggggagagggacaattagacaatataaattcaggggaaggaagatgaaggcaaggaactaacacgactgcattttgcagaagttgagataattagcaaattgtgatcctcatagatttagagtgaattttctccatctctgagaattgtctttggaaggagtgtgttgaagtgtacatgtgtagacacttggttcaacaattacttgctgaatatttggaagaatacataggcatacctata

SEQ ID NO: 498674 - DNA, 524 bp, Homo sapiens
ggggctcatgcctgtaaatccttagcattttgggaggccaaggggggaggatcccttgagcccaggagttcaagaccagcttgggcaacataggcrgaccctatcttatataaaaataaaaatacataaattaaataacccccctaccgcactggcaatttctgagtcttccaggaaatgtgggtattttataagacaggctaccagaaactcttgcaaagccttgtcagggtattatcagctcatctctgaagcacataatttttcatctttgatgtcagaaaaggtgaatggaaagatccatcaagtgacaataaggaaaaaagtaaaaaagtcacactcacactaagaaccttttaaaaaggtctattgtttttctgtcttggtatagctttacatatgggtttgtcttccataaaagaggcaagtacacaattaatcaaagacaaatgaaaagtcatgctgtctagctttgtatcctagaaagctatttccagcattgtttattttagcactgctagcac

SEQ ID NO: 498675 - DNA, 524 bp, Homo sapiens
ggggctcatgcctgtaaatccttagcattttgggaggccaaggggggaggatcccttgagcccaggagttcaagaccagcttgggcaacataggcggaccctatcttatataaaaataaaaatacataaattaaataacccccctaccgcactggcaatttctgagtcttccaggaaatgtkggtattttataagacaggctaccagaaactcttgcaaagccttgtcagggtattatcagctcatctctgaagcacataatttttcatctttgatgtcagaaaaggtgaatggaaagatccatcaagtgacaataaggaaaaaagtaaaaaagtcacactcacactaagaaccttttaaaaaggtctattgtttttctgtcttggtatagctttacatatgggtttgtcttccataaaagaggcaagtacacaattaatcaaagacaaatgaaaagtcatgctgtctagctttgtatcctagaaagctatttccagcattgtttattttagcactgctagcac

SEQ ID NO: 498676 - DNA, 620 bp, Homo sapiens
tccaattgcagtttgcctggtctgcatcattggctcttctctgtggtcaattaatagcttggctggatgtggatgatcttagatggtttagtaggtaaaataatgatctgcctaagaggtccttccacatcttaatccccagaacctgtgaatatgttactttacatggcagaaaggactttgcagttatgattaagattatagatcttgaggtgggaagattatcctgatttatctgggtgggcctcatctgattacatgagctattaaaagtggaagaggaaggcagaagggtcagtcaaggtgctgcaatgatcaaagatgggaatggcctctgctaacagctagcagcgagtgggaacctcagttctgcatctgcaaggaactgaattctgccagcaaccgaaatggacaaggagacagacccgaacacaggccagccaacacctttcttctagcccaatgagtcctttgtttgacttcaggcctatagaactgagagataataaatttgtcttgtttaagccactragtttctgcttgttgttatggcagttatagaaaactgataacagatagtttcacacatgtatctggcatttggcaggctatttggcttc

SEQ ID NO: 498677 - DNA, 635 bp, Homo sapiens
aaaaagataaaaaaagggaaggctgcatatgatgccagtgctctcgaggaaggcgcagaccctgagtcatcagtgtaaagccaatatgaaggacacatattggccaggtgcaacagacttattacaggcttcaggacaacccattcacaagttaggaacatagcacacagtgaaacatcagaggtcaccrgagctcaagttttggaaggtgtgacttccttgtacaactctaagtaataccgtttcatttatttaacaagtgattattgagccaatgactctctgtaagaccaaatgatgggatatagtaataggttttttaatcttttttactaaaaaggccaaacaggacttatattgcatatgaaaccataaggaacataatttcaattctacttattcaattcaactaacatttactgagcatctactgtgtggccaggtagtattctaggtagacaagggatatatacagacatgatcactgccttcagggagctcactgacggaaaggtaaacaaataattttctgtcatgggtgcaatatcacaaagaagtatctagtacacatgcaacaaagaaaaggaagtgattacttgggacagtcagggaaggtttcccaagggacacggtga

SEQ ID NO: 498678 - DNA, 458 bp, Homo sapiens
aatgcctttgtgctaagtaatatttcctcaactatcattcagatagtatcatatttcatttttccgcttcaacctcctaattctttagagaggaccctggaaatccatttgcctttcttggagatggaacccaggacgtgctcattattattattatcatcatcactgaagataaaaraaatctatcaatttcactatttcctgctgcgtacgtaataactcaagctctgtcttggtcatctactttaagggacaatataatggcattactggcagttacttatatccactcacttggaagctagcagctcttgattcagtttcaatagatcaaattctattcgagaaagttatgagaacaatgattatttcttttgggagtttgggagtctttatctctacacaagtgggtctaaaaagttcattgctctgtgagtaccagttttcttctggggaat

SEQ ID NO: 498679 - DNA, 637 bp, Homo sapiens
cagcccccatctcatcctcaaggaggggatctttggggatttgcttgcatccctggggaattgctcaacaatttctakacagttcttgttggaattgagaaggtgagagatttaatacacccacctgattttacacatagagatgctgaagcccacagagtaaagaaacatttacctctggtgttcaattatattataaatcatccagcgtcctaatatgagctagcaatacagttacagggggcagaaacttgcaaattttgctttctttttcattcatacctggtaagtgctgcaaggcaggataatagtttttacctatgctaggcattgtgctttatgtgttattttgttgtcacagtaaccttatagtttggtgcttttattaacctcaattcatgaataagtaaagcaaaactaagagaaactaagatttatccaccgtctcactgatagtaagtgccacagcccaagaagtctgactgcagagcccatgttcttcaccaatgcatgttctccttatactttgaatgaggtcatttagagcacaaccttcgaaagaggcttgatgcgtgaaaagtgggcaaaatcccacatttagtttctagtgtagcctgccttcttcatcgtacctgga

SEQ ID NO: 498680 - DNA, 637 bp, Homo sapiens
cagcccccatctcatcctcaaggaggggatctttggggatttgcttgcatccctggggaattgctcaacaatttctatacagttcttgttggaattgagaaggtragagatttaatacacccacctgattttacacatagagatgctgaagcccacagagtaaagaaacatttacctctggtgttcaattatattataaatcatccagcgtcctaatatgagctagcaatacagttacagggggcagaaacttgcaaattttgctttctttttcattcatacctggtaagtgctgcaaggcaggataatagtttttacctatgctaggcattgtgctttatgtgttattttgttgtcacagtaaccttatagtttggtgcttttattaacctcaattcatgaataagtaaagcaaaactaagagaaactaagatttatccaccgtctcactgatagtaagtgccacagcccaagaagtctgactgcagagcccatgttcttcaccaatgcatgttctccttatactttgaatgaggtcatttagagcacaaccttcgaaagaggcttgatgcgtgaaaagtgggcaaaatcccacatttagtttctagtgtagcctgccttcttcatcgtacctgga

SEQ ID NO: 498681 - DNA, 637 bp, Homo sapiens
cagcccccatctcatcctcaaggaggggatctttggggatttgcttgcatccctggggaattgctcaacaatttctatacagttcttgttggaattgagaaggtgagagatttaatacacccacctgattttacasatagagatgctgaagcccacagagtaaagaaacatttacctctggtgttcaattatattataaatcatccagcgtcctaatatgagctagcaatacagttacagggggcagaaacttgcaaattttgctttctttttcattcatacctggtaagtgctgcaaggcaggataatagtttttacctatgctaggcattgtgctttatgtgttattttgttgtcacagtaaccttatagtttggtgcttttattaacctcaattcatgaataagtaaagcaaaactaagagaaactaagatttatccaccgtctcactgatagtaagtgccacagcccaagaagtctgactgcagagcccatgttcttcaccaatgcatgttctccttatactttgaatgaggtcatttagagcacaaccttcgaaagaggcttgatgcgtgaaaagtgggcaaaatcccacatttagtttctagtgtagcctgccttcttcatcgtacctgga

SEQ ID NO: 498682 - DNA, 602 bp, Homo sapiens
ctggagtgcaatgacatcatcttagctctctgcagcctcgaactcctgggctcaagggatcctcctatctcagcctcctgagtagctcggactacaggtstatgccactacacccagctagttttttttctattttttgtagagatgggctctggctatgttgaccaggctggtctcaaactcttggcctcaagtgatcctcctgcctcagcctcctaaaatgttgagattacaggcatgagccactgcacccagccattataagtatatttttaactaactgactctatgtagctatatgtagatgttgtgggacaagacatagtttgaggtactcaagacagtttgagactgctttatttaagatgagtttggtaatcccttatgtcttcagacccaattgtgcagctatagggagcctgggcgagccactggcaggctaagctgagcagaaaggaaaaaccaaattgaaactcaagaactactggagcaagagagcaaggacaaagagcagctcatgtggagcaaagtctgcttttctcagagccaagacaataactggaaactacagcaggctctgcagataaataaaatgtactttg

SEQ ID NO: 498683 - DNA, 502 bp, Homo sapiens
ggtgttatgtggggaaggtttggctctcctcatggtgtgaactgatgctgcttccttagccacttctatcatctgctcatagggtcctgcctcccagggacaatacatagcctctgcttgtttgatatttttggtccctcaaaagtatttcagcatttagccacctagctcacatgggccattgtgtggttatatgtaagttatggcatctctgagtctccaaggaaatcatgtctcctctaaacttttctgtcagaatggagtggggacaggaaattatttaagaagtgaaataagacgttttcagaaaggacagaaccaacggaagggagacaaagactttgagcacctagccacaagatgacagatttaaagcatcctgaagcaatgcttattagaaaagtcctataagagcaggagccrttataaacacctactcttcagcacagagaacaagagcaattgtgtccactaacaacaacagtcagagactggcatctat

SEQ ID NO: 498684 - DNA, 633 bp, Homo sapiens
ctggctcactgcacccacagatacccagctcaagagccagcctggtgatagcctcacttctctggagagtccaccatacagcctgctggcacactgaaccaaaatattcctgccccaaataaccagctcagtgcccctgcccccaccaaaaccataccaccaacatctgtagcctatcctcctgtagatatcatacaaaagaaccaaaaaaatcgtggagctaaagaattcaatgcattaagttttaaaagaatgagagctttagcaacagactagatcaagctaaagaaataatttctgaatttgaagactggtcttttgaaataaccagtcaaagagggaaaaagaataaaaaggaattaagaaaccrtataggacttatgggacaccattaaatgaacaaatattcaccttataggggcaccagagggagaagtagagagatattttgttattattattaacaaaataatagctgaaaacttcccatgtcttgggagatatatgcatctaagaagctcaaaagtccccaattagtttcaacccacaaagatactctctgaggcacattataaccaaactgtcaaaagtcaaagacaaagaattctaaatgctgaagagaaaagcatcaag

SEQ ID NO: 498685 - DNA, 623 bp, Homo sapiens
ggatcaaaactgagaagaaattgtatttacattccagtagaatggcaaatcaatagaggcactatccttatttggattgatctatataaacatcctcaacagtgtattatactatggtttttaaaaattacagattgaatggcttccaattktaacaaatctcaacccaaatacaaaagtatattatgagcccattccctcatcctactcctagaagcaattgttgttttacttctaagaattctagtctatatttgttcaatctttatacataggatttttttggggtgggggttagttttggcaccattaaaagtgaaagcagtgttttgattgatacctatagaaaagtcagggttctttttaaattatgacagtctagtaggctagagtgtcaatatcatttaaaaacagatttttttttaacttagttcaggggtacatgtgcaggtttgttatgtaggtaagcttgtcttatgggggtttgttgtacagattatttcttcacccaggtattaagcctagtacccattagttatttttcctgatactctcccacctctcaccctccaccctccgccctccaataggctgcagtgtctgttgttttcctgtatgtgtcc

SEQ ID NO: 498686 - DNA, 623 bp, Homo sapiens
ggatcaaaactgagaagaaattgtatttacattccagtagaatggcaaatcaatagaggcactatccttatttggattgatctatataaacatcctcaacagtgtattatactatggtttttaaaaattacagattgaatggcttccaattgtaacaaatctcaacccaaatacaaaagtatattatgagcccattccctcatcctactcctagaagcaattgttgttttactyctaagaattctagtctatatttgttcaatctttatacataggatttttttggggtgggggttagttttggcaccattaaaagtgaaagcagtgttttgattgatacctatagaaaagtcagggttctttttaaattatgacagtctagtaggctagagtgtcaatatcatttaaaaacagatttttttttaacttagttcaggggtacatgtgcaggtttgttatgtaggtaagcttgtcttatgggggtttgttgtacagattatttcttcacccaggtattaagcctagtacccattagttatttttcctgatactctcccacctctcaccctccaccctccgccctccaataggctgcagtgtctgttgttttcctgtatgtgtcc

SEQ ID NO: 498687 - DNA, 623 bp, Homo sapiens
ggatcaaaactgagaagaaattgtatttacattccagtagaatggcaaatcaatagaggcactatccttatttggattgatctatataaacatcctcaacagtgtattatactatggtttttaaaaattacagattgaatggcttccaattgtaacaaatctcaacccaaatacaaaagtatattatgagcccattccctcatcctactcctagaagcaattgttgttttacttctaagaattctagtctatatttgttcaatctttatacataggatttttttggggtgggggttagttttggcaccattaaaagtgaaagcagtgttttgattgatacctatagaaaagtcagggttctttttaaattatgacagtctagtaggctagagtgtcaatatcatttaaaaacagatttttttttaactyagttcaggggtacatgtgcaggtttgttatgtaggtaagcttgtcttatgggggtttgttgtacagattatttcttcacccaggtattaagcctagtacccattagttatttttcctgatactctcccacctctcaccctccaccctccgccctccaataggctgcagtgtctgttgttttcctgtatgtgtcc

SEQ ID NO: 498688 - DNA, 623 bp, Homo sapiens
ggatcaaaactgagaagaaattgtatttacattccagtagaatggcaaatcaatagaggcactatccttatttggattgatctatataaacatcctcaacagtgtattatactatggtttttaaaaattacagattgaatggcttccaattgtaacaaatctcaacccaaatacaaaagtatattatgagcccattccctcatcctactcctagaagcaattgttgttttacttctaagaattctagtctatatttgttcaatctttatacataggatttttttggggtgggggttagttttggcaccattaaaagtgaaagcagtgttttgattgatacctatagaaaagtcagggttctttttaaattatgacagtctagtaggctagagtgtcaatatcatttaaaaacagatttttttttaacttagttcaggggtacatgtgcaggtttgttatgtaggtaagcttgtctyatgggggtttgttgtacagattatttcttcacccaggtattaagcctagtacccattagttatttttcctgatactctcccacctctcaccctccaccctccgccctccaataggctgcagtgtctgttgttttcctgtatgtgtcc

SEQ ID NO: 498689 - DNA, 635 bp, Homo sapiens
accttttaccgcttgagcatcagaaaaaaaaaaaaagaaagaggtgcttagtaatccatcatgataaatagtagtataaagcatagcttgagaagataatcagaaaattagacttaaggtataattaattccacattttgacygtttatatggcaaatgatatcttagagccctcctcaatttgaatactggaaaataaacattactgttgcattaagtactacaattttctagtttcccagagtctgttttaaaatatggcttccggaaatgaatataaaattacatatgccatccgatgaattcaaggtactctgagagcatgacattctaagattcagatagtatacatgtactaaggaggtatatggcaccctttagtctggtctaaggactgaactaatcacaagttcattctcatttaccaaattctatcaaacttttatttaaagaaataaaaattttaatacctcttccatcatatcattccatttcaaatgttcaaaatgagttgctaatactaaaacccttatttcttccaagtgttgtatgaggcttttatatgcactctgaatcactgtttcattctgtaaaagggagaaaaccatataaaatatcttaaataaagtatttcc

SEQ ID NO: 498690 - DNA, 635 bp, Homo sapiens
accttttaccgcttgagcatcagaaaaaaaaaaaaagaaagaggtgcttagtaatccatcatgataaatagtagtataaagcatagcttgagaagataatcagaaaattagacttaaggtataattaattccacattttgactgtttatatggcaaatgatatcttagagccctcctcaatttgaatactggaaaataaacattactgttgcattaagtactacaattttctagtttcccagagtctgttttaaaatatggcttccggaaatgmatataaaattacatatgccatccgatgaattcaaggtactctgagagcatgacattctaagattcagatagtatacatgtactaaggaggtatatggcaccctttagtctggtctaaggactgaactaatcacaagttcattctcatttaccaaattctatcaaacttttatttaaagaaataaaaattttaatacctcttccatcatatcattccatttcaaatgttcaaaatgagttgctaatactaaaacccttatttcttccaagtgttgtatgaggcttttatatgcactctgaatcactgtttcattctgtaaaagggagaaaaccatataaaatatcttaaataaagtatttcc

SEQ ID NO: 498691 - DNA, 488 bp, Homo sapiens
gatgatgaggtggttgttgagggatgtaagtgcaaggggcaattcccagaaaggtctgccacctgaccctcgagaaacaaataaaatccattcacagagaaagtatattttattctgtcctaggagataatgctaagtcatcagggcaggataacaaagtagttccactctcaytgtggtccatagtaaataaatgatgttggatttcttccaaactagtgattttggcaaggaagagaaaaaaggagaccataattctgaaggaaacaaaagtcccttaagagaaactttgctctctacatgaaaaagagaaagactgaaaaattccagctcagggacttcctgtttttcataacagaacatggtaaaaggtgatatggtctatagctatacttgagaaaaggaaaatatggcttttaaagttgaaacagcaacatcctaaaaggtcatgaaatggagataaactccttttctctgtaaaatcacag

SEQ ID NO: 498692 - DNA, 658 bp, Homo sapiens
ctggattaaagccagctcactcatcctgttcccatgccttccttcccaaagctatttccatgagtgttacagagaataaatccaaggttagaaggttcctttacattcttctcctgttgcttcaatgtattctgcttcccctcatgawtgaacaatttcagtgtaatctcatgaatactatactcatttggatagaccatcttgctattgtcattgctatcttaggagcacgaagaaaggtcttatataaatgcacacctcacaaatttaaccagttgtctaagcattttaagaagcatgtctctctagttgtctagttactttacaaaagtaaagtatcacagagtaaagagctgagaagattcatacaacagcacagctctgcagaagtcatacagggtcagaacacactgtaatggttctgttgctttccaattactccattaatagctactgagaatagacgaaggcacatggccaaaatgatgatcttaccaagaactccaggccactgtactcacaaatgcttaaaggtaacttaccttaaatcactctaagcagagtaaaccattaaaaaattataaaatactatgcaactaaaaacttgctgaaaattcaatgctgaagatatcaaaatataattggaaggcttaaagag

SEQ ID NO: 498693 - DNA, 443 bp, Homo sapiens
ttagtgaaaataatatgttataaactcagtcttctatttttatatttaggtatatcaaattgatgtgagtggyaaattctttgcttgatatattttcccaattaaaaccaatatgttttcatacgtgtttttaaaagtgacaactaaagtggtttgactatctcctttctttcttctaaaagctgaaacattgcattcatattagcaacactgctttttgatagttcatcatgcagtatctaaacccttcttttgcgctgtttaacattcacattatttacccttgttccatcactggtctcttgacccctcatcaaatactgctgcaggtcaattttatgttttcctactatcatctctaatgcagcatatacaaagctaaattttgttctttctcttaaacctagatctttttctgtcttctctatcttgaggaacccaca

SEQ ID NO: 498694 - DNA, 443 bp, Homo sapiens
ttagtgaaaataatatgttataaactcagtcttctatttttatatttaggtatatcaaattgatgtgagtggcaaattctttgcttgatatattttcccaattaaaaccaatatgttttcatacgtgtttttaaaagtgacaactaaagtggtttgactatctcctttctttcttctaaaagctgaaacattgcattcatattagcaacrctgctttttgatagttcatcatgcagtatctaaacccttcttttgcgctgtttaacattcacattatttacccttgttccatcactggtctcttgacccctcatcaaatactgctgcaggtcaattttatgttttcctactatcatctctaatgcagcatatacaaagctaaattttgttctttctcttaaacctagatctttttctgtcttctctatcttgaggaacccaca

SEQ ID NO: 498695 - DNA, 599 bp, Homo sapiens
ctttgtttcttcagagagtgaaataatctgccattatatggtagataactagtccagtgctataatttaatttattaccatctcagcacacaccacacataaccttctttaagtgtgtctgggagaaacctaggaaatcagtaaaggctccttgcagccagcctggtattgcctgccagcagtttgggagcacatctctttcaaaaggtcaccaagttagggactgtgtccaactctctgttcagtgcagcactgttgggggctctctatgggtgctagtttccctctgctggccagagagcttagttactgccctgctgggcacagagggtagttggatactttcacactctcccttctctttctcactcccctctcaaaattcttttcataccaaaaaatgcctggtagaagaaagaatatatgacagttggaggaagccagtgctcccacactgtctgccaggaggtatatttctggggcaaagcatagtgattttttttttttttggtggaaatgtcagagtttataacaacttagagttgtttttacgttaaatgtctgcatcataataytcttgaaccatcttctttcttaag

SEQ ID NO: 498696 - DNA, 638 bp, Homo sapiens
cagctggcatgatcacactgacactaaccaacacttyatattttttcacttctctcactctactgagcccctcactccctccttcctcattccccttttaaaatacccaattttcctttgtacaaattgaagtggatctcagctctttattctactgtccagtaatatttgaataaaatctgtttttaccactctaagatctggctgttttatctttgacagtacaaatctatatttgtcttcactcagtcaagtagttaactgaggcactatttgcattattccagctaaaggagaggtaaaccaagtgcatattcaggatgataaaagtttattttggggcccagcgcggtggctcacacccataatcccagcactttgggagaaagagatgggcggatcaggtattcagcctggtcaacatggcgtaaccctgtctctactaaaaatacaaaataattagccaggcatggtggtgcgtgcctgcaatcccagctactcaggagcctcagtgggagaattacttgaacccaggcagtggaggttgaagtaagccgagatggcatcactgcactccagcgtgggtgacacagaaagactctgtcaacaacaacaacaaaaaaactctaagaacaaac

SEQ ID NO: 498697 - DNA, 638 bp, Homo sapiens
cagctggcatgatcacactgacactaaccaacactttatattttttcacttctctcactctactgagcccctcactccctccttcctcattccccttttaaaatacccaattttcctttgtacaaattgaagtggatctcagctctttattctactgtccagtaatatttgaataaaatctgtttttaccactctaagatctggctgttttatctttgacagtacaaatctatatttgtcttcactcagtcaagtagttaactgaggcactatttgcattattccagctaaaggagaggtaaaccaagtgcatattcaggatgataaaagtttattttggggcccagcgcggtggctcacacccataatcccagcactttgggagaaagagatgggcggatcaggtattcagcctggtcaacatggcgwaaccctgtctctactaaaaatacaaaataattagccaggcatggtggtgcgtgcctgcaatcccagctactcaggagcctcagtgggagaattacttgaacccaggcagtggaggttgaagtaagccgagatggcatcactgcactccagcgtgggtgacacagaaagactctgtcaacaacaacaacaaaaaaactctaagaacaaac

SEQ ID NO: 498698 - DNA, 637 bp, Homo sapiens
cagaaacaaaagggaaaaaagatttttggatctgtattttactcatccttcctcgtgtcctcttatgggctaccaaaacgatgcagaattttttgctccttagttcagctaaatccaggttcttatctcacgaccaggaaaaattaggcatgcagacacaytgaagggcgaggaggatggaatttattaagcaaaaggaaagctctcagcaaagagaggggtcctgcaaaaagatttccacttcacaataccagggcttccacacacaagctgaaggggccagattcttccccaccataaggcacaaattcctggtggctccacccagttcctccagtgtgtatgtgggcccttgatctgagccactccacattgatttatttcccttacttcacatgcgtcaagggaaggaagttttcactgtgcacgtgtttaggcaagtcccctgtgcaatgacatgggtggttggaggttctctaggcaacctcacccatctgcctagcatctatctgtctgctacctgtatcactattattattgactcaagtgtattttaactgcatttctcacatagtggaagtaaaatagttgtgtatttaagggacataatttagtaatgtatagtgatttttaagtt

SEQ ID NO: 498699 - DNA, 583 bp, Homo sapiens
  misc_feature (1)...(583): n = A,T,C or G
nnnnctctcagcacactgcttgtggagtagctgctctgcaggagcattcacggagctgtaacactgccacctcaataaagctactttctttcaccactggcgtgttcttgaattctttcccaagtgaagccaagaacctccttaagctaagcccccatgttggaactcacctgcccagcatcaataggttctggcagctccacaaatggttccaatgtcagttycctgctcgtgtacacaatgagagcctcattgcattcctcccacagcatagccctgtatacaccatttccattttattgtggggccctgttgggcaccacctttctcagtgagtacccagtactcagtgagttagagtacccaaagcattagggtatgttaagtttctagactattttatgtctttcagtcataggagcagttttaattaatgcccaatatcagtccaatatggcatgtgtcatatcattgtgcttggaaatttctggtccaaaatcccaaatactgttgctgagtggtgatacccaaagggctttttcataagcttcagtctgtggaattgcaagttgcagatactttc

SEQ ID NO: 498700 - DNA, 656 bp, Homo sapiens
ggcaataagctggacattagaaccgccttatatacagaaacagtccagcaacagagggctggataagatttcaccttcctatgatccactgtcagcaggctagatgacataagcacacagcctagtggcagtgggctggggaggaaaactgcaaacatcatgcaatttatataacattttcccttaacacactccccctaatgacctccacctggcaacyttcatcaacccaaaactcagggcctcaatgtgtacagctcatgtcccatggaatgaaacggagtggggggctcagatgtttatcatagacaaggaacaaatctcctggtcgacctctcctggattccctagtttggaacacacattcaggtgcatctgccatcctgggtcatcccaagggtatgcttaagtcactgttatcagatgcatttaccctacaggaacaccttcacatcatgttagcccaattcctttctttctttgtatcattgcttccctttaaatctaaaaagaagattaagtcttccatgccaagccaagcccaattactacaatcagtctttatatggcagtaccccacccatctagactgccgactaacttctctcctcctgatagtctctgctttatgtattttccttaaaaaccacaggaac

SEQ ID NO: 498701 - DNA, 656 bp, Homo sapiens
ggcaataagctggacattagaaccgccttatatacagaaacagtccagcaacagagggctggataagatttcaccttcctatgatccactgtcagcaggctagatgacataagcacacagcctagtggcagtgggctggggaggaaaactgcaaacatcatgcaatttatataacattttcccttaacacactccccctaatgacctccacctggcaaccttcatcaacccaaaactcagggcctcaatgtgtacagctcatgtcccatggaatgaaacggagtsgggggctcagatgtttatcatagacaaggaacaaatctcctggtcgacctctcctggattccctagtttggaacacacattcaggtgcatctgccatcctgggtcatcccaagggtatgcttaagtcactgttatcagatgcatttaccctacaggaacaccttcacatcatgttagcccaattcctttctttctttgtatcattgcttccctttaaatctaaaaagaagattaagtcttccatgccaagccaagcccaattactacaatcagtctttatatggcagtaccccacccatctagactgccgactaacttctctcctcctgatagtctctgctttatgtattttccttaaaaaccacaggaac

SEQ ID NO: 498702 - DNA, 614 bp, Homo sapiens
atcccatggaaggtcacatgaagttcaataataaaactcatttttcccctcccataataaacatgagcagtcaaaaggtgccatttccccctattcaaatgctgctactagccagtggagctttcgccccaacttatgaacataaatgaccctctctgtgtcatctgcaaaggggaaatataccagagaccgattctctaaaattttaatttgagccagtggaactgaccagaggatcagctacagatcaccctggcttttctgtcgccattcacaartgaggtgacatggagcagccaaagctgtcagcagttctgcctttgcctgggtccaaggaacatcttcacggccctgaaaggagtcacaggaatgtaattgttaatactattaggggaacagaagctcacattgttacaagtggcctcttgtcaactctgtggttggttcttgatgtgctgggaaagagaatggtggaacaggacagcagaccataagtgcagaggtgcttagtagcaccaggcctgccgagggtggaggagaatcctgaaggcacaaggcaccataatcactgcactcccttgctgtgttatctagtggtgctggtattttatatg

SEQ ID NO: 498703 - DNA, 451 bp, Homo sapiens
caggctggcaggaaatgccgtggccatgggcatgggggacctggcagtggcctatgattccagagagtgtgcccaggagctaggtgtctaaataagcaaatgcaggcctccctgaggacgtggacagtcatgcaccccacagaargtctgagtgggtagttatgggcaccccaggtttctggaccagctgttcctccagcccgtcttggagctggaagcagaatagagaccagagtctggggtgtcagggttggggtaggggctgttgtgaagctgcattgtgcatttgctgtgggaatgctggcagtcacatgccttctgccattgcctgcccggctgggtaaaactgagcttctgtgcctttaaaattgtttgacatctttgagattggaaacagagctccccagtggaaggccagcagtagctatggaatgctattctaatacaaaac

SEQ ID NO: 498704 - DNA, 557 bp, Homo sapiens
aggtgacactcaatcacctcccagtgcagcagttgggagcaggagagcagctaactatgcacctacctacatccctacccacactgctggagtcaggctgtagctggacagtggccttggactgtttcccagcacgttatttccgatggggccagagaagatttcccagggactggattaaattagctggcattcttccctcatgcagaaggacatggcagcaggactgctgggcttctgtctcatgttragtgatggcacaggaggtatcactttcaatcctatcctacgctggaaaaggctggtgtacagaagggatatcaggcgtgaggaactgggccaggataaaaacaagattggcaggagcactcatattaggccacggctggggacaagaacccagggaaggcagagaggcagaagccatgtgaggcagagaagcatttcacaagtaatatgctaacaagagttggctgcaatgactgcctttgaacagggtacctaccttggccctgcctggaggctgtccaccatccaagcagccatctatccattgc

SEQ ID NO: 498705 - DNA, 477 bp, Homo sapiens
gaaggggctttgtgaagaaaaggagggcttggaaaagagatctgaagttgacagcatctctcaagggtccctcagtccccaaaagactgagagctgctgagggtaacataaaggaagtgctttttgttcatttcawaaccaaataagtgaaatacaaacctctgcaagttatgctcagtggcatgttttgacatctcactggaaatcaaatttctgccccataaaagccaagaggttttggccaggacccaaaagcctttctcaaccttctcattagcaagcaagagagtaatctgaggtttctgacccattctgtaaactgcagtatctccccttccctaaaaccagaaaaaccccagaatatgttctaaatggaaaaggagctttcctgcagccgaagatgggagaggagtgacctcaggacctctgtagtcaggcgagccaaacccctgggctctagagaggaaggaaagagaa

SEQ ID NO: 498706 - DNA, 610 bp, Homo sapiens
taagcgtcccttaaaggcatcaataagttctcagaatagatgccatgaacatatagatgatttacttaatctcacaggagaaatgttttcaaggatacctgcagtcattgacaatttcagtattttccaacagttatatttttttcctttttaatgtattttagagatgaggtctcgctgtgtcacccargctggagtgcagtggcacgatcttcgcttactgcagtcttgaactcctggactcaagtgaacctcccacctcagcctcctgagtagctgggactgcatgtggataccaccatgcccggctagttatttaatttttttgtagagattgggtctttctatgttgcccaggcttcatagaagaaatattttaaacatagatactaatttgagtttttctttagctaaagaactgagaaaaatcagataaaaaaattagtaagttatgcaattgataaaatcaacctaagttattttgattttaagaaacaagttgtagcaaaagaactcttagtgccaaaggcatttattcgttaagaagaggaggcacattttgaagataagtaatgaacagggtcttggacagttgatagtcccatctcta

SEQ ID NO: 498707 - DNA, 472 bp, Homo sapiens
tgtaagcgtcccttaaaggcatcaataagttctcagaatagatgccatgaacatatagatgatttacttaatctcacaggagaaatgttttcaaggatacctgcagtcattgacaatttcagtattttccaacagttatatttttttcctttttaatgtattttagagatgaggtctcgctgtgtcacccaagctggagtgcagtggcacgatcttcgcttactgcagtcttgaactcctggactcaagtgaacctcccacctcagcctcctgagtagctgggactgcatgtggataccaccatgccyggctagttatttaatttttttgtagagattgggtctttctatgttgcccaggcttcatagaagaaatattttaaacatagatactaatttgagtttttctttagctaaagaactgagaaaaatcagataaaaaaattagtaagttatgcaattgataaaatcaa

SEQ ID NO: 498708 - DNA, 559 bp, Homo sapiens
actttggaagtttcttaacacctctaagcctcagtttgctcatctgaaactggggatagtgacattccccccttcatatggttgttctgaggcttacttttttgyaaaatgtttagtataatgttagccgttgcaacgttccattatttatcacacagtacatctccaaaccaaacaatccccatgtccagcctcacagtattgacatgtgggcaaaccaggcagtgcataccaggccacttgcaaggacattgcaaggaggcattattgttaggtcaatttctaaacttaaaaggggtaccgagtgtgtggaagatttgcaactctttgagcctatgggtagagaagaaggattaaggaattcatctaagctaaaagactcctggaacagatgaaatatagaccttcagttgttattctcctcctggagggtgacgctctctggcaaatatttccttcactaatgggctggtggtgatgtccctgtccagaagcagctcccatcaaaagctgagaagctgaggagttggtgtaacctgagacctcactccagcaggcc

SEQ ID NO: 498709 - DNA, 559 bp, Homo sapiens
actttggaagtttcttaacacctctaagcctcagtttgctcatctgaaactggggatagtgacattccccccttcatatggttgttctgaggcttacttttttgcaaaatgtttagtataatgttagccgttgyaacgttccattatttatcacacagtacatctccaaaccaaacaatccccatgtccagcctcacagtattgacatgtgggcaaaccaggcagtgcataccaggccacttgcaaggacattgcaaggaggcattattgttaggtcaatttctaaacttaaaaggggtaccgagtgtgtggaagatttgcaactctttgagcctatgggtagagaagaaggattaaggaattcatctaagctaaaagactcctggaacagatgaaatatagaccttcagttgttattctcctcctggagggtgacgctctctggcaaatatttccttcactaatgggctggtggtgatgtccctgtccagaagcagctcccatcaaaagctgagaagctgaggagttggtgtaacctgagacctcactccagcaggcc

SEQ ID NO: 498710 - DNA, 559 bp, Homo sapiens
actttggaagtttcttaacacctctaagcctcagtttgctcatctgaaactggggatagtgacattccccccttcatatggttgttctgaggcttacttttttgcaaaatgtttagtataatgttagccgttgcaacgttccattatttatcacacagtacatctccaaaccaaacaatccccatgtccagcctcacagtattgacatgtgggcaaaccaggcagtgcataccaggccacttgcaaggacattgcaaggaggcattattgttaggtcaatttctaaacttaaaaggggtaccgagtgtktggaagatttgcaactctttgagcctatgggtagagaagaaggattaaggaattcatctaagctaaaagactcctggaacagatgaaatatagaccttcagttgttattctcctcctggagggtgacgctctctggcaaatatttccttcactaatgggctggtggtgatgtccctgtccagaagcagctcccatcaaaagctgagaagctgaggagttggtgtaacctgagacctcactccagcaggcc

SEQ ID NO: 498711 - DNA, 414 bp, Homo sapiens
acagtacatctccaaaccaaacaatccccatgtccagcctcacagtattgacatgtgggcaaaccaggcagtgcataccaggccacttgcaaggacattgcaaggaggcattattgttaggtcaatttctaaacttaaaaggggtaccgagtgtgtggaagatttgcaactctttgagcctatgggtagagaagaaggattaaggaattcatctaagctaaaagastcctggaacagatgaaatatagaccttcagttgttattctcctcctggagggtgacgctctctggcaaatatttccttcactaatgggctggtggtgatgtccctgtccagaagcagctcccatcaaaagctgagaagctgaggagttggtgtaacctgagacctcactccagcaggcctaaaatcgc

SEQ ID NO: 498712 - DNA, 574 bp, Homo sapiens
tcttatgtggcaggtgaaaaatgtaaaagccctcagctttctgtgatgttctagcaaacactggcacatccagaggaacrtgtgccactttcgggccaagccagcaaaatgattacgaaagtctttgaagacctaagtcacattaatgactcagaactgctgtgtttttgacaatgaagctttggatggacacactgacccagtgtcgtctcaccaaccatcccagggtgagctcagaaggggacatatgtcacagtcttaatcagcaattggcaagtttttcctttaaagggccagattgtaaatattttaggcttagcaggccacatacagcctctgttgttgcattttttttaatgtgcatgttatgtttttttttgtttgttctaacattttaaaaatgtaaaagctatccttggctcacctggctgtgcaaaaataagcagcgggctggatttggctcatggactgcagattgcaggcccaggtgttcctggcttatttgcaggtggtggaaagaccacaggctttggagctgaaactgactttgaatcctgctgtcctcactttccag

SEQ ID NO: 498713 - DNA, 574 bp, Homo sapiens
tcttatgtggcaggtgaaaaatgtaaaagccctcagctttctgtgatgttctagcaaacactggcacatccagaggaacatgtgccactttcgggccaagccagcaaaatgattacgaaagtctttgaagacctaagtcacattaatgactcagaactgctgtgtttttgacaatgaagctttggatggacacactgacccagtgtcgtctcaccaaccatcccagggtgagctcagaaggggacatatgtcacagtcttaatcagcaattggcragtttttcctttaaagggccagattgtaaatattttaggcttagcaggccacatacagcctctgttgttgcattttttttaatgtgcatgttatgtttttttttgtttgttctaacattttaaaaatgtaaaagctatccttggctcacctggctgtgcaaaaataagcagcgggctggatttggctcatggactgcagattgcaggcccaggtgttcctggcttatttgcaggtggtggaaagaccacaggctttggagctgaaactgactttgaatcctgctgtcctcactttccag

SEQ ID NO: 498714 - DNA, 577 bp, Homo sapiens
cctttgcagtgaccatattgcaggcatttcccagtcattttgtgtaattgtttgatgtctcaatccccctttttctctgctcctagagcagtgcttttcagaggtttaggtgaataaagacttcatgccaatttcaaatggttcccaaaactcatattttatcttattgggcaattttctacgttccaaggactgtcttaggcacaagtcaacgttcacaagtcaattcctccagtagatacatatgacagttatcttagaggtggaggtacatggaaactttctagatattaaatcagatgagctcatgaaacatcaacacagttcctggctcatagtcagtgctccaggaccctgtgggtcaggcatgggccaggtgcagaaaatccaacgatgaacaaacagggagtttgccctcaggaagcacacagtctgcaggaagatgagtcaggtgcaaagaaaacaaagagcaagkcatgagccttacagagagtaaatgccatgggtgaggctgaaggcatacatctagatctttgaactgtctttcctcaaagtttagagaaaatcagaaaatttc

SEQ ID NO: 498715 - DNA, 556 bp, Homo sapiens
ggtaaatgacaaggacctgcattcaaactcagatctgtatgatcccaaagctgtgctctgtggactacattaagaagctagtagaatattatttttaaatagattcctaagaatcctcaagtccccagacartaagtgaccagagccagggccatttttttttttttttttttgagatggggcgtcacccaggctggagtgcagtggcgcaatccccactcactgcaacctccacctcccaggctcaagtgattctcgtgcctcaacctcccaagtggctaggattacaggcatgtgccaccatgcctggctaatttttgtatttttagtagagatgggggtttgccatgttggccaggctggtctcgaactcctgacctcaagtgatccacccacctcggcctcccaaagttctgggattacaggcgtgagccactgcgcctggcctcaacatgggtcttgttaaaggatcgtcttctcactataccactctgcctctctgaactattcctgaaagggacattttcatggtaatctgggtgacattatagtcatt

SEQ ID NO: 498716 - DNA, 556 bp, Homo sapiens
ggtaaatgacaaggacctgcattcaaactcagatctgtatgatcccaaagctgtgctctgtggactacattaagaagctagtagaatattatttttaaatagattcctaagaatcctcaagtccccagacagtaagtgaccagagccagggccatttttttttttttttttttgagatggggcgtcacccaggctggagtgcagtggcrcaatccccactcactgcaacctccacctcccaggctcaagtgattctcgtgcctcaacctcccaagtggctaggattacaggcatgtgccaccatgcctggctaatttttgtatttttagtagagatgggggtttgccatgttggccaggctggtctcgaactcctgacctcaagtgatccacccacctcggcctcccaaagttctgggattacaggcgtgagccactgcgcctggcctcaacatgggtcttgttaaaggatcgtcttctcactataccactctgcctctctgaactattcctgaaagggacattttcatggtaatctgggtgacattatagtcatt

SEQ ID NO: 498717 - DNA, 621 bp, Homo sapiens
attaataaaataatgctggcatgtagacatatgcaggttataagctatagaacttgagtacaaatgtgtctctggtctttccgatgctgcaacaaagaggcagtcacatttgttacatgattggaatggaacctggaaagagtgtatgttccattctcatgggacaggaagacttgctgtcaccaaagtctggaacactgactgcattggtcacagagatgatgtagtgaaaaggtttttttactgccaacctggaagtaaacacttttagcattttgcagtataaatagtcacttagtgctaaagcataactcctgtaatgaggtttttctggytgctgaaacagtgtggtcccagacagattttggaaggccctacttgattcatggctaaatcctagaacatctggaggattgagttgaccacaggtccttaactaaccccccatacatttctgtcaattcatctgtacatggagaatttgtagcagattgttcacaattgtattctctgacaaatatttccactgctcacttgcactttcattcaatgtagtcttaattggtttattctaatgctacccattaacccaaattatatgcaactccaatggctatacgc

SEQ ID NO: 498718 - DNA, 573 bp, Homo sapiens
gtcttaaagaatgcttgtgtaaaggtgaaaaaaattacttcctatcccagtggagtaagatttgataaaaattaataatgggtattggttttatatgcatatggttcctgttccttctgacatcatgtaataaatcagtatattttctaatgttcaattgagtttttctttgcattttgaagttttccttttcttttttatttcacaaagaattatttggtaataatatgcatctacttcctactcataggttttaataagtgctcattatccgtcatttgttttctctcttttttttctatttattcatataacaatagtggctgttttartagttgctattttttcatcattattccttgaaaatagccagtttttcttgggtcagcaactggcaggtacaggagatggccatttttctgtctcctaagcatggaagtagcttgtagacaggattttgcctatatgttaacttttcactcctccctgagaatggttaaatgtgtctggaggttttccaagcagaaaatctcttattccccatgttaaacaaaaacagatcctggcaaattc

SEQ ID NO: 498719 - DNA, 533 bp, Homo sapiens
aaaacgtatccatgaaccacacaggagcatgtcttaaagaatgcttgtgtaaaggtgaaaaaaattacttcctatcccagtggagtaagatttgataaaaattaataatgggtattggttttatatgcatatggttcctgttccttctgacatcatgtaataaatcagtatattttctaatgttcaattgagtttttctttgcattttgaagttttccttttcttttttatttcacaaagaattatttggtaataatatgcatctacttcctactcataggttttaataagtgctcattatccgtcatttgttttctctcttttttttctatttattcatataacaatagtggctgttttagtagttgctattttttcatcattattccttgaaaatagccagtttttcttgggtcagcaactggcaggtacaggagatggycatttttctgtctcctaagcatggaagtagcttgtagacaggattttgcctatatgttaacttttcactcctccctgagaatggttaaatg

SEQ ID NO: 498720 - DNA, 627 bp, Homo sapiens
agacaagccatgattcaagggcggaaggtgattagattccacctcttgatgagaagcatagtaggaacctgcagcagtctttaataaaccacaggttgtcctctgtccacaaactattaacgtttctcccacatgcaaattatgctttgcccctctcaagagtcccaaaatggttttccttatggcactggctggtagcccaactgaatcctgaatcaggttgtggtggcctrtcatctgcccctgatgcactcagccacagtgaggactgaatcaggttgttgtgacctatcatctgagcccacacactcagccgcagtgaggactgaatcaagttgtggtggcctgtcatctgcccctgacgcactcagccacagtgaggactgaatcaggttgttgtgacctaccatctgagcccacacagtcagccgcagtgaggggacaggtgtgaaaacagtcggcatttccctttagaagctgttggtgggaggcaggagggagatgctgccctgcaggccccgtctaacagttggtcattcccatggggcgcctgttacagttctgtgattagtgcccagtccgggtccctgagaacggcgcccagtccttgtccctgagaacagcgtt

SEQ ID NO: 498721 - DNA, 627 bp, Homo sapiens
agacaagccatgattcaagggcggaaggtgattagattccacctcttgatgagaagcatagtaggaacctgcagcagtctttaataaaccacaggttgtcctctgtccacaaactattaacgtttctcccacatgcaaattatgctttgcccctctcaagagtcccaaaatggttttccttatggcactggctggtagcccaactgaatcctgaatcaggttgtggtggcctatcatctgcccctgatgcactcagccacagtgaggactgaatcaggttgttgtgacctatcatctgagcccacacactcagccgcagtgaggactgaatcaagttgtggtggcctgtcatctgcccctgacgcactcagccacagtgaggactgaatcaggttgttgtgacctaccatctgagcccacacastcagccgcagtgaggggacaggtgtgaaaacagtcggcatttccctttagaagctgttggtgggaggcaggagggagatgctgccctgcaggccccgtctaacagttggtcattcccatggggcgcctgttacagttctgtgattagtgcccagtccgggtccctgagaacggcgcccagtccttgtccctgagaacagcgtt

SEQ ID NO: 498722 - DNA, 627 bp, Homo sapiens
agacaagccatgattcaagggcggaaggtgattagattccacctcttgatgagaagcatagtaggaacctgcagcagtctttaataaaccacaggttgtcctctgtccacaaactattaacgtttctcccacatgcaaattatgctttgcccctctcaagagtcccaaaatggttttccttatggcactggctggtagcccaactgaatcctgaatcaggttgtggtggcctatcatctgcccctgatgcactcagccacagtgaggactgaatcaggttgttgtgacctatcatctgagcccacacactcagccgcagtgaggactgaatcaagttgtggtggcctgtcatctgcccctgacgcactcagccacagtgaggactgaatcaggttgttgtgacctaccatctgagcccacacagtcagccgcagtgaggggacaggtgtgaaaacagtcggcatttccctttagaagctgttggtgggaggcaggagggagatgctgccctgcaggccccgtctaacagttrgtcattcccatggggcgcctgttacagttctgtgattagtgcccagtccgggtccctgagaacggcgcccagtccttgtccctgagaacagcgtt

SEQ ID NO: 498723 - DNA, 627 bp, Homo sapiens
agacaagccatgattcaagggcggaaggtgattagattccacctcttgatgagaagcatagtaggaacctgcagcagtctttaataaaccacaggttgtcctctgtccacaaactattaacgtttctcccacatgcaaattatgctttgcccctctcaagagtcccaaaatggttttccttatggcactggctggtagcccaactgaatcctgaatcaggttgtggtggcctatcatctgcccctgatgcactcagccacagtgaggactgaatcaggttgttgtgacctatcatctgagcccacacactcagccgcagtgaggactgaatcaagttgtggtggcctgtcatctgcccctgacgcactcagccacagtgaggactgaatcaggttgttgtgacctaccatctgagcccacacagtcagccgcagtgaggggacaggtgtgaaaacagtcggcatttccctttagaagctgttggtgggaggcaggagggagatgctgccctgcaggccccgtctaacagttggtcattcccmtggggcgcctgttacagttctgtgattagtgcccagtccgggtccctgagaacggcgcccagtccttgtccctgagaacagcgtt

SEQ ID NO: 498724 - DNA, 210 bp, Homo sapiens
gtatagggtcgcatacacataaacccagtgtaactcagaaacgaatctaatattccattaaacccatcataacgttgaaaaatcataaatcaaaccatcataagtcacggtttgtctgtggatatgggcgtcatcaattccgttgtattcagtaatgcygtacaccattaacaatggcagactgattgggagttgatattgatagcatta

SEQ ID NO: 498725 - DNA, 613 bp, Homo sapiens
aaaaacgaaaatggttaaaaccaaagataaagtgagacaattagaattccttgaaatatgtctaacaatcatagtaacaaaactaaatagaagggctgaatagcagaattaatacattagaaataatgagcctacaaacctgaattttgttcttttttttactaaaaagtagtaaatgcaagacaatgagagaaaaataagaaaggaaggttaaaatagaagatataaagattagctgcaacaagaacagaagaaaaaatgttaccaaagaaacaataaaaaatctttttccagagttgaaaacagatataagtaaataagatatctagagtgtaccatccaggtaataaacaggatgaatataaagacctaggcatacgactgtaaacatttcaatgccaacagcaacaaataataataaaaatgaacaaatgaataagcaaatacatatatacatgcatatatggtaagtggagaatcaatgaaagtatgggaataaagttatctatggccarctcatgcacaatactgacttataaaaagcaatgatgaaataattactttttcattcatcaagaaatttaatggaccaaccataattttttaatcacgg

SEQ ID NO: 498726 - DNA, 613 bp, Homo sapiens
aaaaacgaaaatggttaaaaccaaagataaagtgagacaattagaattccttgaaatatgtctaacaatcatagtaacaaaactaaatagaagggctgaatagcagaattaatacattagaaataatgagcctacaaacctgaattttgttcttttttttactaaaaagtagtaaatgcaagacaatgagagaaaaataagaaaggaaggttaaaatagaagatataaagattagctgcaacaagaacagaagaaaaaatgttaccaaagaaacaataaaaaatctttttccagagttgaaaacagatataagtaaataagatatctagagtgtaccatccaggtaataaacaggatgaatataaagacctaggcatacgactgtaaacatttcaatgccaacagcaacaaataataataaaaatgaacaaatgaataagcaaatacatatatacatgcatatatggtaagtggagaatcaatgaaagtatgggaataaagttatctatggccagctcatgcacaatacygacttataaaaagcaatgatgaaataattactttttcattcatcaagaaatttaatggaccaaccataattttttaatcacgg

SEQ ID NO: 498727 - DNA, 630 bp, Homo sapiens
cttattttagaaaacaatgactacaactgagtctgcttgtttcaggggcctaccatgtaactgggaattctccgaattaacttccacgtggtgtacaatatctaataagggacacatatcaagaraatataaattgaatgtgtatatacatatttttaaaatttaactctaaaaacaatttttttgaactttatgatagctaaacttttcttaggtaagagtatttttattactgactgtttaaattttttggatcatgagataataaaaatatagaacttttacataattttattatttttatactttatctcctgcctttgcatgtccttatcatctgctctcaggcagactgttacttcttcacatcccatcatatgctgaaatagaggcttacaatgaataaaattttctttaatagtcaattctttggacaaacccagtactcattgatgtaatatctctcactacagggagcttgtaagactgaatttagagaaaatcaggaaattcaagtattgggatcaaaaagtaatgggaaatgaaaaggaatgatggtaccaggtaatactctcaatttaacaatcaatttaagtagactaatttaagaagcatgtttaggtgttgtgc

SEQ ID NO: 498728 - DNA, 593 bp, Homo sapiens
gaaactcgaaataaaatatgaccagatgatcaaaaaggagtaaaaacagactatgaaaacagacctacagatgattcccataagagttgccaaagttactttaaaattctgagaatacagtcaagaaaataggagaaaaggataaaatttcaaaatgtgaagattttcaatagagatattcaatctatagaaaaagtattaaaataattgtaaagaattgaaaataatacaatacctataattaagaattcattaaaattatcagcattccggaaacaacagaagatataattaatgaaattgaagacatttacttaaatagaataagagaaaatttattcctggaataagtcatgatgaaaaatragtcttggaagattgtctggtggtatctactaaagctaaacagagtaacttcatttcaaggtgtatacccaagagaaatgaatgaatatatccaccacaagtcctgcccccaaacataaattgcagctttatttataattgcataaactagaaaaaaaataagtattttattttatttttaacttttattttaggtgcagggatacaaatgcatgtttgttatatag

SEQ ID NO: 498729 - DNA, 593 bp, Homo sapiens
gaaactcgaaataaaatatgaccagatgatcaaaaaggagtaaaaacagactatgaaaacagacctacagatgattcccataagagttgccaaagttactttaaaattctgagaatacagtcaagaaaataggagaaaaggataaaatttcaaaatgtgaagattttcaatagagatattcaatctatagaaaaagtattaaaataattgtaaagaattgaaaataatacaatacctataattaagaattcattaaaattatcagcattccggaaacaacagaagatataattaatgaaattgaagacatttacttaaatagaataagagaaaatttattcctggaataagtcatgatgaaaaataagtcttggaagattgtctggtggtatctactaaagctaaacagagtaacttcatttcaaggtrtatacccaagagaaatgaatgaatatatccaccacaagtcctgcccccaaacataaattgcagctttatttataattgcataaactagaaaaaaaataagtattttattttatttttaacttttattttaggtgcagggatacaaatgcatgtttgttatatag

SEQ ID NO: 498730 - DNA, 536 bp, Homo sapiens
tccaaataagtttgggcagcacagcaccctctatcgctaaccattattaatacacatattaaaagctttgagaagccctagtttaaaggaatacatttaactttctttatttcaatatagtccaaaggtccaggattgtcttgggaaacatttttaatgtaattttttgaaataatgttttcaaaatacactctgggaaattctgcccaagagcttctatgcatgaaagcttctgatataaaggggcatttgtgcttgatgcagccttttccatattttcactaaaacactatgaagaccaaaaaaacggaaattcacattatccatacaaattaggattagtagctgatagttgatatagtttgaatatttgtccccmcccaaatttcatgttgaaatgtaattcccaatctgggagatggggcctggtaggtgtttgagtcatgggaaagaatccctcaagggttgatactgaccttgccaaagtgagtgagctcccagcagatcaggttgtttaaaagtgtggcacctctccc

SEQ ID NO: 498731 - DNA, 552 bp, Homo sapiens
gctgggaagaattcatgcaaacttaaactactaactagaaagtggtcaaaaccaaggcagcggctttctccatccacctcacaagaaccaaatcatctatcctcacaacctgctctcccagtcccccttattctgctctttcttttctttccatagcattccaatagctatctcactcatttaaaatgtcagttgtttattgcctcccttctctagaaagcttactatatgaaagcaaaaatcttggttttattcayttatgtatcccaagcagctagaacaataagtggcacatagtaggtgctcgtatgtctgctccattttttctctttctatagatttccaatttctttttaatccctagcttacacatggtcatatatgtcttgattgtggtggataagctttttcatgtgctgctggattcagtttgccagtatcttattaaggatttttgcaactcaactataagtggttagcacagttttttttagttccatagttccaaattgttgagcaagaaacctgctagtactcatctcatctttttga

SEQ ID NO: 498732 - DNA, 435 bp, Homo sapiens
tgcaaattaaaaataaacataaacaatttgaggcaaataattattagattatcattaatataagaaatatattatttttatgtggcaaaatgcaaaaattttataatacaatatattttaatattgttttgtgcattttattatgatgttaaattgccatatgttaaaatatttatgttttcaggttgaattacataactatttggtaatcattggtttgtagctgcctggaagtgttgagatasagcaggggtccctaagccctgggacacacgggtactggtctatgacctgttaggaactgggtgccactgcaggaggtgagtggccgataagagagcattatttcctgagctctgcctcccgtcagatcagcagcagcattagattctcacagaagcgccaacaaccctattgtgaactgctcatgtgagg

SEQ ID NO: 498733 - DNA, 579 bp, Homo sapiens
aaaatcttgtcttgctctaaaacccactcaaagcagccaatcttctgggccatttaggggataaatgagagcattagaaacattttgccttcaagaatccaaggaaatcacctcctatatcccaactttgtaatgayagaagattcaaggtgcagaactgttcactttggaggggatatctagcatatcttaagcaaagaaacaaccaaattcatcaagatagcaggtcataatgtttgtagcagaccttcagcatgcatatatcttgtaaaagaaattaagaactgatatacaggtccaaataacattatttaacctaaataatgaattgtagtaatgtcttatgtaaccttgatatgacaaaggcaccttgaacttataataggatacagccaagtgaactttgaggcatggtggaaaatgtgtattgctatccattccagataaaagccagcatgtcataatactcttataatattctccatttcttgcactaaatatgacagtattttccatcctaaaaattgcatactgattgccaagggctgtttgatttgttcaagcaaataaattcacctc

SEQ ID NO: 498734 - DNA, 594 bp, Homo sapiens
tgctcacatgcactctccctcccatgggggggtggagcagcgagtgagtgcagttcacccctgccagcacccatgcacaacacttcccactcatgaaggcatcagggaaatatcctgcttcactgtcatgttcgaatccatgctaccaactaattaaaaaaaaaataaaaaaataaaactgtcatgtaacaaaaggtgaggatgaaaaaataaaacacaaaaccccaaatagttaacattttaaacaactactgcaaaaaaaaaaagccttacatttaatctttacagcaaatatatttggtakgtactatttctattttttacatgaagaacctgaaattcaaagaagttagtggtcttgttcaaggtccagtggttcactggaattaggatttaaatgtaagcagtttgactctagaagtcttgtgtttgatccctcaattgagtgtgacttatcacctcctcaaactccccctaccaaaaaacacaccaaagagcaagactaatgtatttgcattgtcaagcaaaaaataatctagattaattaaattcataataaaaaatcatacttttatgtattatcttgttcaaagt

SEQ ID NO: 498735 - DNA, 558 bp, Homo sapiens
gacttgtatgggaccatactatacacatattgtcctgcagtatgcatatatatatatatatatatgtatatttattacttagcagtatgtcttgaaagcatttccttgtcagtacatagagatagaccttattcatttcatagttctatatgtcccattgttatgaacgcagaccataatttcttttaccgttttccttttgaataatggagctatagtagatccttttacacatgttcttgtgtacatgtttgaatactttcaattcctagaaggtcaaagaataggtgtattttaaattgccayaagtacttacaaatcctcttctgaaatgatagccagttgacccactccaaccgattatgtaaaaatcctatttcttcacagtctaactaatactggatattgttaatctttcaatgttctggataaaaactgatatcaatggtgttttctgatatcaattgcctggctaagtttttacatttttattagggataggatttctctatgttgccccaggctggtcttgaactcctggactcaagcaatccaccc

SEQ ID NO: 498736 - DNA, 658 bp, Homo sapiens
ctgtggggtggggcctgctgtgcactgggcaaggcggagaaggggagaggtggctgacccctcccaggccctgcaaaagggaccagtgaagctctcctcaggacttccaggaccaagccccacaaggaggaaaaactgctaggattagattccaaaccaagtaggccagagaagacagaaacaaaagatctaaaaaaaaatttttttttaattagccaggttgactatcctaaaagcaataaragcataccaaaaagacatgtctataaaacagaagagaaaacaaacaaaaactttggagcatcaggcaaaaagaccccaagtcacttacaagacaaataaactcaactggtcatcaagagcaatgttttgtgccagataacaatggattaacacagtaagacacctgagaaaagaaaatgtgcactaaggaatctgcaactggcattcagatagaaaggctgccaacacactgttaggaaacaaaagaagtcagtgaatattgttctcaagagccttcctaccacagaggtgggttgcaaactcttgcatgcacctctgctggggactgatgctcctgccggagtccacactttgagacgtccggtactaaagcatgaacttcagataaccaaaaatgactggacaaacatcacca

SEQ ID NO: 498737 - DNA, 557 bp, Homo sapiens
aaatacaggttttacatgaatagagataggattccataacataagtagcaaatgaaggataattatttcccacatagttattcaaaagttagcatgctttataatccatactatttgtatggcatctacatgtgctactttaggatatttaaggttttttaatccttaaaataatcctggccgggcacggtggtgcacacctgtaatctcagtactttgggaggctgaggcaggtgcatcacctaaggtcaggagttggagatcagcctgactgacatggtgaaaccccatctctactaaatacaaaaaattagctgggcatggtggcacatgcctgtaatcccagctactcgggaggctgaggcaggagaaccacttgaacctggaggtggaggttgccgtgggctgagatcrtaccactgcactccagcctggacaacaagagcaaaactccatctcaaaaacaacaacaaaaacaacaaatcctgcaatgaacgtcattaattccatttgaaaatgaggaaactaaatctgaacaagtcacatagtgttgtagg

SEQ ID NO: 498738 - DNA, 557 bp, Homo sapiens
aaatacaggttttacatgaatagagataggattccataacataagtagcaaatgaaggataattatttcccacatagttattcaaaagttagcatgctttataatccatactatttgtatggcatctacatgtgctactttaggatatttaaggttttttaatccttaaaataatcctggccgggcacggtggtgcacacctgtaatctcagtactttgggaggctgaggcaggtgcatcacctaaggtcaggagttggagatcagcctgactgacatggtgaaaccccatctctactaaatacaaaaaattagctgggcatggtggcacatgcctgtaatcccagctactcgggaggctgaggcaggagaaccacttgaacctggaggtggaggttgccgtgggctgagatcgtaccactgcactccagcctggacaacaagagcaaaactccatctcaaaaacaacaacaaaaacaacaaatcctgcartgaacgtcattaattccatttgaaaatgaggaaactaaatctgaacaagtcacatagtgttgtagg

SEQ ID NO: 498739 - DNA, 512 bp, Homo sapiens
ctcttgatggagtatagatgtctgcataacatagaggaaaaagcattttttgcttatcagtaatacctcggcatgcttcaacacasagagtgtgccaaccagctgataatttggcattttagatgtttacattatttaatcttttatcgatgatcggtcatctttgaagattagactgtcatctttatagttttatcatctttatgtaccctgtcatcataaagtgattttaaactaaattgcaacagcagagacaagaacccactatttctcatgaacagacaagtcatatattgagatagtcctatttcagcatggaagagggccttttaattcttattggaagtggtttcaaacctacaaatttggcaggcattatatgttccattctaaataaagacatttttgtatgtctgaagagcatttctaagtcctgaaagttttcaacagtctttctgaatataatagtctgtcagtgaatctgggagggctgacaaaactctagagtggaa

SEQ ID NO: 498740 - DNA, 512 bp, Homo sapiens
ctcttgatggagtatagatgtctgcataacatagaggaaaaagcattttttgcttatcagtaatacctcggcatgcttcaacacacagagtgtgccaaccagctgataatttggcattttagatgtttacattatttaatcttttatcgatgatcggtcatctttgaagattagactgtcatctttatagttttatcatctttatgtaccctgtcatcataaagtgattttaaactaaattgcaacagcagagacaagaacccactatttctcatgaacagacaagtcatatattgagatagtcctatttcagcawggaagagggccttttaattcttattggaagtggtttcaaacctacaaatttggcaggcattatatgttccattctaaataaagacatttttgtatgtctgaagagcatttctaagtcctgaaagttttcaacagtctttctgaatataatagtctgtcagtgaatctgggagggctgacaaaactctagagtggaa

SEQ ID NO: 498741 - DNA, 638 bp, Homo sapiens
ctgacttgtggggagttttccttccattgtggcccctcaaatctctcgagtccacatttctccctttcctacccccaaagccggctgctttcccctcagtgtattctcaaatattgagtcttaggttcagactaaatactgtagcctgtatgtagacttttgattcaacgactggtatcctgactccacaaaaccaacccagaattgttcacatgtctcccaggtggtagaaactgcaaagcccaacacttcccataacaacatacacaaagatagctctaatcctgcaattacacaagagaccaggggcactgctgcaggtaatgagtcaggggaagaaagattctattttgtcttttgggtaatttaaagcagaggcaatgaatcattgtgttagaaaaaacgactttggtatcagacaaaaccacatggatcttakggcaaatttcaaatttgccactttggcagtagcaaattagtattaaattcagttgtgtgtgacacaaaacccccaaataagcacttagctagctaagctgtagccatgatttctgcatcccagctagtaggaagaaggaactggaggccccattcttctaaggacaactgccagtagtctcccacgtcatgcatactta

SEQ ID NO: 498742 - DNA, 638 bp, Homo sapiens
ctgacttgtggggagttttccttccattgtggcccctcaaatctctcgagtccacatttctccctttcctacccccaaagccggctgctttcccctcagtgtattctcaaatattgagtcttaggttcagactaaatactgtagcctgtatgtagacttttgattcaacgactggtatcctgactccacaaaaccaacccagaattgttcacatgtctcccaggtggtagaaactgcaaagcccaacacttcccataacaacatacacaaagatagctctaatcctgcaattacacaagagaccaggggcactgctgcaggtaatgagtcaggggaagaaagattctattttgtcttttgggtaatttaaagcagaggcaatgaatcattgtgttagaaaaaacgactttggtatcagacaaaaccacatggatcttatggcaaatttcaaatttgccactttggcagtagcaaattagtattaaattcagttgtrtgtgacacaaaacccccaaataagcacttagctagctaagctgtagccatgatttctgcatcccagctagtaggaagaaggaactggaggccccattcttctaaggacaactgccagtagtctcccacgtcatgcatactta

SEQ ID NO: 498743 - DNA, 638 bp, Homo sapiens
ctgacttgtggggagttttccttccattgtggcccctcaaatctctcgagtccacatttctccctttcctacccccaaagccggctgctttcccctcagtgtattctcaaatattgagtcttaggttcagactaaatactgtagcctgtatgtagacttttgattcaacgactggtatcctgactccacaaaaccaacccagaattgttcacatgtctcccaggtggtagaaactgcaaagcccaacacttcccataacaacatacacaaagatagctctaatcctgcaattacacaagagaccaggggcactgctgcaggtaatgagtcaggggaagaaagattctattttgtcttttgggtaatttaaagcagaggcaatgaatcattgtgttagaaaaaacgactttggtatcagacaaaaccacatggatcttatggcaaatttcaaatttgccactttggcagtagcaaattagtattaaattcagttgtgtgtgacasaaaacccccaaataagcacttagctagctaagctgtagccatgatttctgcatcccagctagtaggaagaaggaactggaggccccattcttctaaggacaactgccagtagtctcccacgtcatgcatactta

SEQ ID NO: 498744 - DNA, 537 bp, Homo sapiens
ccctcaacgactccccttctttgatatgcattattttccaggcagttagagctgatccatcctgcatagtgtcatctgcttcttgtatctgtatttagagggagctacttctgattctttgccctcagtgggcacgcaatcaaagcttacagtctaccgaatgaaaccacaattgcacattgaatttctttctctgttaatttcagacaacatgtcacgaaatgtctgtcgtgagaacakgctgatttatgtagcagttcctgaggtcatgaaaatgaaaactggagatttagcagaccagattctggcatatatgacttatgattattatgttggattgggtcaatttcatcgctatacttcatcttgttagttactaacaaattgtcataataaaattaacacattttaaagtttataggaagacttgaattaaaatttctgagtctaattcaataatattcctcatgcttcagtgatacgacaattctttgagaaaatggagcccttcattgaatgcttctttattcaataaac

SEQ ID NO: 498745 - DNA, 592 bp, Homo sapiens
ctgggcaccacagggggcatggagggacaagagcagagcagccccaagacttgctgccttccaatgcactctggtcagtctcctcgcgtgtctttagccaaatggatggggccctgatcacaggtgtgagggaactccctctggcagtctggggcccaccatggaccacaatgatgcgcttctgcaccwctcccactgtgcctggcacaaatctggtgcctggtgaatgcttgatggatggacaaatggatgaatgagttggatgctgagtagagaaagccttctgttttaaatgtaaaaactatatccccccagggccttctagtcttagcagttagtgctaccacagagaccctcaacccatcaattacgaaaattaactgtaaattatccttttgcatagttaattcagcctcttcattctgtgtttagtagcgctcagcaggcataaaattcaatagcaagctttggagcaaatccagtttctgtcgtctgtgatattttgaaaatgcaaagttttaggagtggaccttggagcgtgtctttcctggaaggtctccaatgagctctgcatctcgcttctctcttggaa

SEQ ID NO: 498746 - DNA, 592 bp, Homo sapiens
ctgggcaccacagggggcatggagggacaagagcagagcagccccaagacttgctgccttccaatgcactctggtcagtctcctcgcgtgtctttagccaaatggatggggccctgatcacaggtgtgagggaactccctctggcagtctggggcccaccatggaccacaatgatgcgcttctgcacctctcccactgtgcctggcacaaatctggtgcctggtgaatgcttgatggatggacaaatggatgaatgagttggatgctgagtagagaaagccttctgttttaaatgtaaaaactrtatccccccagggccttctagtcttagcagttagtgctaccacagagaccctcaacccatcaattacgaaaattaactgtaaattatccttttgcatagttaattcagcctcttcattctgtgtttagtagcgctcagcaggcataaaattcaatagcaagctttggagcaaatccagtttctgtcgtctgtgatattttgaaaatgcaaagttttaggagtggaccttggagcgtgtctttcctggaaggtctccaatgagctctgcatctcgcttctctcttggaa

SEQ ID NO: 498747 - DNA, 633 bp, Homo sapiens
cacagaattctaggtcagggtgacatcagggcaagctctctggtgcactgggggcaggggcctggctagaacaccgacatccgtctttcagggagttggagatctcagacaaaaggaagaagagatagttctgtgtccacctggaccctgggaatgtgtgtgatagagcaaaggtcagaccagactgacccgacagagaaatgagcccccgggaggccttaggattcaacgttctgacacaagacaaagaattcctctgggaagatacagaaccaatgcccttgtctctttatttttgtacattcatattctttcctaccccttctccacccccacacagcctttgtcttcttygtctctaaaaaatgcatagtatgattgtctaagttgaagaaaatgcaaccccattttgaaacttgaccctttcgtggagatgagtcactgggcgatttggtgtcgctggttccgctctgttcattttaagggagcatctccactttgtccttgctgactgatgggatggctggccagtggtactagagagcagaagattttcctagagaagctgggaatctaggcttttttttctctaaaatctctggattttaaattataagaaccttcactttttag

SEQ ID NO: 498748 - DNA, 487 bp, Homo sapiens
tgttgtctgtatccagcctgatgacaaaggttgatgggcaggaaacactgtcagaaccaatgacatcagaaaggaacctcccctcttctccctgcactgcccccagtgaattaagctttgcctgagaaacaagaaaacaagagcattttgccctttaaggttgaccctgttgagccattgcagatgctttgcttggctgtagttgggcggcagtgatgtgtgggacrcagtacatggcattggctggtgggcccggttcaattgtgctgcccttgctctgcatgggtagcagagtgaaagaggaagcaaagggccagtgtgaaggggctgagtttattttgcagactcactatacttctgtcagtgacccaacagctatgtaaaaactatttgccattgtggggactggtaaaaaaaaattgactttatgtgcctggcttattttactcaaagtaatgtcttccaggatcatccatgttgctgcaaa

SEQ ID NO: 498749 - DNA, 619 bp, Homo sapiens
tgccttagcaacaggctattggatatttccactacatttctggtcattcttaggcactacaatattattttagtaactataaagtccagccatatacaacattcagactttggaacttggtttagaattgatactgcactcctatctaagcatgggtataagctgatttttctttgattttctgcttagygtttcatacttctctagctcataaactcttgagttcttaccttttcactgttggagcaataagggaagagaagaataatgtttaacaaagttcttttttgcctggtaatgtccacatctgatatttcaatatctggacttcacaggagtttaagcttattccttctttcacaaatcactcatggagtttacaggatctccctccacttcctccctccctagctgggaactgccatctgcagaacccttgtagtggtaaaacagtatcattgcattgtgtcttactcctctgctcagccttgagaaaggtgcctttgagcaaagcatatgtaggtgaccagtatatattcaccaaaaacaagcatgcatccattttcccaaaagaatctgggagtgtagctacattctaaatatcagccttctattttaa

SEQ ID NO: 498750 - DNA, 619 bp, Homo sapiens
tgccttagcaacaggctattggatatttccactacatttctggtcattcttaggcactacaatattattttagtaactataaagtccagccatatacaacattcagactttggaacttggtttagaattgatactgcactcctatctaagcatgggtataagctgatttttctttgattttctgcttagcgtttcatacttctctagctcataaactcttgagttcttaccttttcactgttggagcaataagggaagagaagaataatgtttaacaaagttcttttttgcctggtaatgtccacatctgatatttcaatatctggacttcacaggagtttaagcttattccttctttcacaaatcactcatggagtttacaggatctccctcyacttcctccctccctagctgggaactgccatctgcagaacccttgtagtggtaaaacagtatcattgcattgtgtcttactcctctgctcagccttgagaaaggtgcctttgagcaaagcatatgtaggtgaccagtatatattcaccaaaaacaagcatgcatccattttcccaaaagaatctgggagtgtagctacattctaaatatcagccttctattttaa

SEQ ID NO: 498751 - DNA, 665 bp, Homo sapiens
ccttcagctttgttactctttggatacatagtcacatgaaagtgattttacatcttttggatgcaaattcattatctaaataccatattggattaagtgatcttttaagtttccttgcaaaactaaaacctattattcttactggaatttgcattgagcaaaaattaaaaaaatatttattggaagagctcaaaatttatcattccctgactgattgttttattaagattgttttaccttcaagtgaagcatcattacatgagctagaacatgtttccagactagaagttcatggcctcagttgtcatatgtattggacagactttctgagaattttggaccagcacatgagctctccaacagttaatcttttattcaggtatagtttcttctctggctcctcatttattttttgtaagagatggaaaatcctctaccaggtcaactgtcagttaaaatatgtaagtccatatttaactaaaactatagataatctacattctgagtgtttgccaaagagtgtaatttcaaactctttgctttccaatatctatcaaaagatctgcagamagaaacaatatatagaaaagattgcttgaaagatgaaatccatccattattccagacactttaaaatctacccttggatttggacaaatcagaag

SEQ ID NO: 498752 - DNA, 571 bp, Homo sapiens
gactatttatcatacatggcacctactatgtrtcctcacatggtaaaagaaaaaagggggcaacaggctccctcaagcctcttttataagggcacaaatcccattagaatagctgtattcatagctcatgtgcctccatttggaggcctctttattaggggccttcagctaaggtcttcctcaggcatctctactgagacctacttttagaaggagggtggtaccttgaagacaattttccccactctcactcagtacttttctacccctagtttttcgtcgtctgctttactcccctacccaacccaggcccgtaaaatgcaggtgccttttttgggaggctctctctacaggtattttacattaaatgcaacaatggagaacccagtacttttacctatttatttagcctcttgttactatcacagaaagtaattaaaggcttgattattactttaattttggcttgttgtcttaattggctaccctgagctcagctctatccggctgaactcagctctcgacaaacccttgatttcatgtttggtcccaagaagtattttactttgag

SEQ ID NO: 498753 - DNA, 571 bp, Homo sapiens
gactatttatcatacatggcacctactatgtatcctcacatggtaaaagaaaaaagggggcaacaggctccctcaagcctcttttataagggcacaaatcccattagaatagctgtattcatagctcatgtgcctccatttggaggcctctttattaggggccttcagctaaggtcttcctcaggcatctctactgagacctacttttagaaggagggtggtaccttgaagacaattttccccactctcactcagtacttttctacccctagtttttcgtcgtctgctttactsccctacccaacccaggcccgtaaaatgcaggtgccttttttgggaggctctctctacaggtattttacattaaatgcaacaatggagaacccagtacttttacctatttatttagcctcttgttactatcacagaaagtaattaaaggcttgattattactttaattttggcttgttgtcttaattggctaccctgagctcagctctatccggctgaactcagctctcgacaaacccttgatttcatgtttggtcccaagaagtattttactttgag

SEQ ID NO: 498754 - DNA, 602 bp, Homo sapiens
atcaggctgggactttaaatgtttattattactgtggttatctgatacaacagtgagtaagagtgttggattactttttgctccatgtttatgatcttccattgaacctacaatgcttagaattaaccacattcagccaagtatctctaaatagacatagaactaaatgaaacataactatttgttaagcaaaaaagaaaaaaggaaagtcccagtaacaagcaatatccaactwgagcctacttgtgcattgtcatatggtcatctcactccttataaggcaggtctcctctatgaccttgaattggggtagaaaaagtggttagagatcccttttgaaattgccacctgcagaaggatgggaaaagctgaatgatttttttccatcatctctccctctcctttatatgcatttcagtaaaaatttatagtagattaggactactagttttctttatttatgctacaacttaatatctggaaagaatttttctataaactgttttcaggaatgtgttgattatactgacaaaatactatgtaatttaaaagtaattgaaatctatatatgagagagagagaataagtgagggaggtaggta

SEQ ID NO: 498755 - DNA, 556 bp, Homo sapiens
tccagcagctgatctctctgatcatatctagccaaactcctctcggtgtttagatgctccttctcttctctccttttctgccatgctrttctgccatttgtctgctcatctgcttgtctccttgtctcttggagcctggggtctggagtttatataggtacaagatagaaggcatggggggccaaaaggcaacttttggggcacaaaaacaggaatctctgttctcatttagggccatgggtatccaggcatgagggtggggcctttgccatggaactgccttcttctgcccagtatttccatttctcctgtccatattgatattccactaacagtcataaagtatttggatgagctagtcttgccccttggaatttccatttggtagcactttcaggtatgttctcacagtacccactgagccacttgaagaatcagtttggaatagagtagaatgttatgtagttaataacaaagatatttaagaaatagctggattttttaaaaatgtgttttttggccaaaaaatcattgtggtgagtagtggagttagtct

SEQ ID NO: 498756 - DNA, 630 bp, Homo sapiens
gatctctctgatcatatctagccaaactcctctcggtgtttagatgctccttctcttctctccttttctgccatgctgttctgccatttgtctgctcatctgcttgtctccttgtctcttggagcctggggtctggagtttatataggtacaagatagaaggcatggggggccaaaaggcaacttttggggcacaaaaacaggaatctctgttctcatttagggccatgggtatccaggcatgagggtggggcctttgccatggaactgccttcttctgcccagtatttccatttctcctgtccatattgatattccactaacagtcataaagtatttggatgagctagtcttgccccttggaatttccatttggtwgcactttcaggtatgttctcacagtacccactgagccacttgaagaatcagtttggaatagagtagaatgttatgtagttaataacaaagatatttaagaaatagctggattttttaaaaatgtgttttttggccaaaaaatcattgtggtgagtagtggagttagtctgtactgcctctggttctctcaaattctcctaaagaggaagaaactcagcccagaaaattttagggaactcaactccatccatat

SEQ ID NO: 498757 - DNA, 589 bp, Homo sapiens
taaggatcattgtgaatgaatacaaactatttcaagagatttgaatstttgctatacgtgtgtgtgtgtgtgtgtgtgtgtgtgtttttctctgtatgagttcttgtatgaattcagtaatacataaaatgcccaggtgatatatgatgtgatcaggttagaaaaacacctcatgctaatggcgccagtgccattagcaacttatggcctagatttgatgaagaaataagcttctctcattttaacagtggtatcatacagagagttacttatatgcatgctctggataaaagactcagcacaattccagttttaaaatagataattaaaaatctgtatatgtcaaacaagatttccagatagctgttggaaggggggaaaacattgttaagataggtgtacacatatagcaacctcagatataaattcatttaaattcttcattgatagcaaaccaaaaagaattatttctaaatagaactttgaagttactttaattttaatgtaataacaacgtcataacatcataaatcttagttgagaagcagctgttggttttttcaatccattagttatggtatttcaagct

SEQ ID NO: 498758 - DNA, 590 bp, Homo sapiens
accccctatccactgaatcataatttatattggtagggtgaaaaaaataaggatttaaaaaaaaatctgaagcattttatttgcaatcasggacaaggaaatgacacttacaatcagacaaattttggaaccactgatccagaatattctaaggtatttaatgaataggtaatatttgatttagaataattgatatataattataccaaaaattggaagatagattctataaaaatagtagtttaaaccttaaaactttcaactaacttgactctgaaaattacattattggattaatgacttctaaatctaaaatttaactttagttttacaaattacttcattcactcaataagtattgagctagcctgtggaagatagaatgacaaataaacaaaatcctcacccttaggcgccttgaatgattgttacaccaatccatcaggagtttaaacagccctgtgcaatattggatatcattagtcttaattcataaagatgaaactgacgcatttcttcctactttcttcattcacatcattgtctcaacaaaggtgccactaatttaaaagggaaaaggatccaaaagt

SEQ ID NO: 498759 - DNA, 610 bp, Homo sapiens
taagctgtcaagtgcttaccatctggttcagctcctaatccagatgggctgacaatagtaatttatgaaaggtttgaaagcaacttgccattcttcagaaataatcattagaacacattaacattggaatttgcttccctcctccagccccaatttacaacaaatgcaaagatagggcaactgcttccatacagtaaatagarcagtctattcttgaaccagaagtcaatacgtctgtgctctttgagaaaaaaaaaaaaagcaattatttttcttccccctccacttccctctattggctcaatgaataagggagagaatgttctcatttggagtttctaacaaatgcctgaagaagctttcacagtctgtgatgcttggaaaagtcaaagtcaacctcaggaataatctgatctaccgcatgttcacactacagacaggcatcctctaatccattcttacagagacagcccaaaggtcaatcaatatttccagtgcaaatcacaaagccacagactgttagagctagaagtctaagcccattgttagcccctctcccacccaatcaggctgcacatgagcagtgttacttccaaatcagaacaaaatg

SEQ ID NO: 498760 - DNA, 505 bp, Homo sapiens
tttctaattgttggtgataacttggttttcatgtaatgaatacagccttgagcattcataatcattgagaacaaggaccttagtgttatgtaaatattttaccctattagattagtaaatgctttgttaattggctgatccacatttctattcaaagagcatctttagataaatgaagtttttaaataacatcctaaggaaaagtcgtggtaaacatactgtgrctttgccataaggttttcaaaatatcctacagaaatattaaaaagtaagcctttagaaaagaagattagaccttgttgcaaaaacccataactcatcttttccctcaggactgacagacaaaacaaaagaatataatttttgcttcctgctatgccgagatgatagctacttaacttctgttatcctaaagctgatgccttttaccaacgcctacctaacatgagagcagatctgttttcaaatattctgtgttctatattggggtggagtgaattaacag

SEQ ID NO: 498761 - DNA, 613 bp, Homo sapiens
ttttagaggcattttcattgtaggagctctcacgtcacttttctttgtctcatgaggccaacacaggcgaaaaaatgataatgtgaggcatggcttctttttttttttatcaacaagtatatttgatttctaattgttggtgataacttggttttcatgtaatgaatacagccttgagcattcataatcattgagaacaaggaccttagtgttatgtaaatattttaccctattagattagtaaatgctttgttaattggctgatccacatttctattcaaagagcatctttagataaatgaagtttttaaataacatcctaaggaaaagtcgtggtaaacatactgtggctttgccataaggttttcaaaatatcctacagaaatattaaaaagtaagcctttagaaaagaagattagaccttgttgcaaaaacccataactcatcttttccctcaggactgacagacaaaacaaaagaatataatttttgcttyctgctatgccgagatgatagctacttaacttctgttatcctaaagctgatgccttttaccaacgcctacctaacatgagagcagatctgttttcaaatattctgtgttctatattgg

SEQ ID NO: 498762 - DNA, 649 bp, Homo sapiens
gcattctacaggtcctagagaattcgctttagccagcccacagatgaacaaagagaggaaggatggttttgatgggctggttctggaaggaatatgtctacttctcccacatcccattggctggaatgtggtggcaggaacgcacctaactgccagggagactgggaaatgtagtatagctatgtgtccaggagtagtgggaaacgggttcagtgagcacagtcaccaaataccattaagtctccgtcgcaaataccaaaagaaattgctaagctaaaaaatacgtaggctgggcacaattacaawtaccaaaagaaattgctaagctaaacaatacttaggtggggattacgcctgtaatcccagcacttttggaggccaaggtgagtggatcacttgaggtcaggagttcaagaccagcctggccaacatagtgaaaccctgtctctacgaaaaatacaaaaattagctgggcgtggtggcacgtacctgtaatcccagctatacaggaggctgaggcaggagaattgcttgaacctgggaggcagaggctgcatgagctgagattgagccttgtacttcagcctgagtgacagagtgactctctgtctacatatatataatatatatattatatatatataaaata

SEQ ID NO: 498763 - DNA, 649 bp, Homo sapiens
gcattctacaggtcctagagaattcgctttagccagcccacagatgaacaaagagaggaaggatggttttgatgggctggttctggaaggaatatgtctacttctcccacatcccattggctggaatgtggtggcaggaacgcacctaactgccagggagactgggaaatgtagtatagctatgtgtccaggagtagtgggaaacgggttcagtgagcacagtcaccaaataccattaagtctccgtcgcaaataccaaaagaaattgctaagctaaaaaatacgtaggctgggcacaattacaattaccaaaagaaattgctaagctaaacaatacttaggtggggattacgcctgtaatcccagcacttttggaggccaaggtgagtggatcacttgaggtcaggagttcaagaccagcctggccaacatagtgaaaccctgtctctacgaaaaatacaaaaattagctgggcgtggtggcacgtacctgtaatcccagctatacaggaggctgaggcaggagaattgcttgaacctgggaggcagaggctgcatgagctgagattgagccttgtacttcagcctgagtgacagagtgastctctgtctacatatatataatatatatattatatatatataaaata

SEQ ID NO: 498764 - DNA, 509 bp, Homo sapiens
aaaagtcacatagatgatgaaatacaatcagtgctgtaatgaaggtctatataaatcatccacaaaacaaacaagcaaggaattagatgtcattttattaaactcaaagtgttcccatctttatggaatactaatactaacctaggcctcaatgtacttggtttcttttattttcatgttttcctattgctgagtaagcttraagcattaagtggttggttatctgtttcatgtatgtacatatgtttttcccataagggtcataaactagaaagaaaaaggcaatgagttcatgtgaaatcaaagtaagttaggggatgggggacataagtgtgatgggcatcaataagcagtgattggttgatcaggaccagagtgccttgggctcatttggattgactgtattccagacaaaggggagtctgattcatttaaaagttgagggtagaattagatatggaggatcgaggttctgagaagtctttaacaagccaaagaaaagtgattga

SEQ ID NO: 498765 - DNA, 509 bp, Homo sapiens
aaaagtcacatagatgatgaaatacaatcagtgctgtaatgaaggtctatataaatcatccacaaaacaaacaagcaaggaattagatgtcattttattaaactcaaagtgttcccatctttatggaatactaatactaacctaggcctcaatgtacttggtttcttttattttcatgttttcctattgctgagtaagcttaaagcattaagtggttggttatctgtttcatgtatgtacatatgtttttcccataagggtcataaactagaaagaaaaaggcaatgarttcatgtgaaatcaaagtaagttaggggatgggggacataagtgtgatgggcatcaataagcagtgattggttgatcaggaccagagtgccttgggctcatttggattgactgtattccagacaaaggggagtctgattcatttaaaagttgagggtagaattagatatggaggatcgaggttctgagaagtctttaacaagccaaagaaaagtgattga

SEQ ID NO: 498766 - DNA, 509 bp, Homo sapiens
aaaagtcacatagatgatgaaatacaatcagtgctgtaatgaaggtctatataaatcatccacaaaacaaacaagcaaggaattagatgtcattttattaaactcaaagtgttcccatctttatggaatactaatactaacctaggcctcaatgtacttggtttcttttattttcatgttttcctattgctgagtaagcttaaagcattaagtggttggttatctgtttcatgtatgtacatatgtttttcccataagggtcataaactagaaagaaaaaggcaatgagttcatgtgaaatcaaagtaagttaggggatgggggacataagtgtgatgggcatcaataagcastgattggttgatcaggaccagagtgccttgggctcatttggattgactgtattccagacaaaggggagtctgattcatttaaaagttgagggtagaattagatatggaggatcgaggttctgagaagtctttaacaagccaaagaaaagtgattga

SEQ ID NO: 498767 - DNA, 509 bp, Homo sapiens
aaaagtcacatagatgatgaaatacaatcagtgctgtaatgaaggtctatataaatcatccacaaaacaaacaagcaaggaattagatgtcattttattaaactcaaagtgttcccatctttatggaatactaatactaacctaggcctcaatgtacttggtttcttttattttcatgttttcctattgctgagtaagcttaaagcattaagtggttggttatctgtttcatgtatgtacatatgtttttcccataagggtcataaactagaaagaaaaaggcaatgagttcatgtgaaatcaaagtaagttaggggatgggggacataagtgtgatgggcatcaataagcagtgattggttgatcaggaccagagtgccttgggctcatttggattgactgtattccagacaaaggggartctgattcatttaaaagttgagggtagaattagatatggaggatcgaggttctgagaagtctttaacaagccaaagaaaagtgattga

SEQ ID NO: 498768 - DNA, 576 bp, Homo sapiens
aatggccatatccagtactctttgtaaatggcctaaagatctcaagataatatgtctgataaccacaggccataagtttttatcagtctgtctgacttaaaataatcatctacaaatgtttttctgcattaaattaattttcctagagaattataccaatagatgtttgaaaacaaaaagtaatgaagcctgtaatcttcatatttggaaaagacaatggaaatttagaatwtaaccaagcatcctagttgtgtgtccgctgccttcttgattggccaattgctgctttttatctcctccatggcacttgccttcagtaacttaacctctcagtactgttctctgtcctcttcttttagtttgaacaatacttataaaatattaattccttaaattcttgagtttcacctgcaatgctgataattaaaagctctctacctttaataatactgtcaattttaagattttgcttaacactgataaaaattttatatatattttcatttcatatttatgtaaaaaatgttattgtatttcattttgcatattaggtaacaggctcaaataaattaagta

SEQ ID NO: 498769 - DNA, 576 bp, Homo sapiens
aatggccatatccagtactctttgtaaatggcctaaagatctcaagataatatgtctgataaccacaggccataagtttttatcagtctgtctgacttaaaataatcatctacaaatgtttttctgcattaaattaattttcctagagaattataccaatagatgtttgaaaacaaaaagtaatgaagcctgtaatcttcatatttggaaaagacaatggaaatttagaatttaaccaagcatcctagttgtgtgtccgctgccttcttgattggccaattgctgctttttrtctcctccatggcacttgccttcagtaacttaacctctcagtactgttctctgtcctcttcttttagtttgaacaatacttataaaatattaattccttaaattcttgagtttcacctgcaatgctgataattaaaagctctctacctttaataatactgtcaattttaagattttgcttaacactgataaaaattttatatatattttcatttcatatttatgtaaaaaatgttattgtatttcattttgcatattaggtaacaggctcaaataaattaagta

SEQ ID NO: 498770 - DNA, 576 bp, Homo sapiens
aatggccatatccagtactctttgtaaatggcctaaagatctcaagataatatgtctgataaccacaggccataagtttttatcagtctgtctgacttaaaataatcatctacaaatgtttttctgcattaaattaattttcctagagaattataccaatagatgtttgaaaacaaaaagtaatgaagcctgtaatcttcatatttggaaaagacaatggaaatttagaatttaaccaagcatcctagttgtgtgtccgctgccttcttgattggccaattgctgctttttatctcctccatggcacttgcctkcagtaacttaacctctcagtactgttctctgtcctcttcttttagtttgaacaatacttataaaatattaattccttaaattcttgagtttcacctgcaatgctgataattaaaagctctctacctttaataatactgtcaattttaagattttgcttaacactgataaaaattttatatatattttcatttcatatttatgtaaaaaatgttattgtatttcattttgcatattaggtaacaggctcaaataaattaagta

SEQ ID NO: 498771 - DNA, 680 bp, Homo sapiens
atgtggggctttgtgatataataagagagcaaaataagaatcatttcaccatagaggagacagaagtaggtggttccagaaaggctgaaataactataatgagtatggtggaagacaaaaacctgttccatgtctgtttttgagagaatacatttccatcatacattatgcatctatagtttcaaagctcttcctagactttttaaagatattacctctaatcatcacagcatctttgtaaggtagatatgaatgttcttattttatagcttaagsttagttaaaactaaaagtggttcacacagccagggaaggggcagaaccaggccctaaaattctgatgtaactagctccaaaggctccaagattgtgtgattattggtgagggaaaggtctctgagaaggccagtaaactgaaagtcaaggttgttccatggtcatattttatttggtgcaccaagtgttttagggaattttaaatttacgttcctctgcccaccaatattttacaattctccgacatactatattttatactcagcttccaacagaggtacatcaattgcatggctcttgaaagacattaagaagtctggtgaaagatgattatgatgatagcaggacattatacagaagcacttcactatatgctgtacacatgtcccatttaatactaacaa

SEQ ID NO: 498772 - DNA, 680 bp, Homo sapiens
atgtggggctttgtgatataataagagagcaaaataagaatcatttcaccatagaggagacagaagtaggtggttccagaaaggctgaaataactataatgagtatggtggaagacaaaaacctgttccatgtctgtttttgagagaatacatttccatcatacattatgcatctatagtttcaaagctcttcctagactttttaaagatattacctctaatcatcacagcatctttgtaaggtagatatgaatgttcttattttatagcttaagcttagttaaaactaaaagtggttcacacagccagggaaggggcagaaccaggccctaaaattctgatgtawctagctccaaaggctccaagattgtgtgattattggtgagggaaaggtctctgagaaggccagtaaactgaaagtcaaggttgttccatggtcatattttatttggtgcaccaagtgttttagggaattttaaatttacgttcctctgcccaccaatattttacaattctccgacatactatattttatactcagcttccaacagaggtacatcaattgcatggctcttgaaagacattaagaagtctggtgaaagatgattatgatgatagcaggacattatacagaagcacttcactatatgctgtacacatgtcccatttaatactaacaa

SEQ ID NO: 498773 - DNA, 596 bp, Homo sapiens
gctgcctttagatttttgaattagcactcaatatattttaattcaatttagaaactaatggatgcctgaacttatttagcccatccattcaagcatcttgaagtgcgattttgattgaggcaatttttccaattacaattttaattcttcatttttctttatgtctctcaaaaattaaactctgctttattgatgactgggaaattctaggtaagcagtctagtaaagtaaaatataaatggctcttccaaatgttttttcccagtatggtggaaaagataaatattaaataatgttggatttttgtagattataacagccttgtgtacaactcaccttatttttaaccagattttatgggtagtctgggggtcaaattgtgctttctctaaccaggaaaacgacaacaacacaggaaataaagacccaacttgtcatggttaacctatcagacaggggtttctcttattaccttgctcccaagggttttaaaaggsttcatatagttgcatttaaggacaaactcagtagctttccagttcaataagctaagtatatattccctatgtcgttttgctttgctttttggaagggtc

SEQ ID NO: 498774 - DNA, 585 bp, Homo sapiens
ctggtctgcagtggcactgctccatgtggcctctcatcctccagcaagctagtctgggtttattttcatggcaaagccagggctttaaaaaagagcctggaaaggcatataacactttccatgcctctgactgaatcaagtttgctccaagcccattggccaaagcaagttgtgaggtcaagccctgagtcagcctgaaaggactccacaaaagggcatgggtttggggaggggtgaaagatcaggatctttaaatgtctaccacactagtagttactgagatattttgctgcagcatgtatgttgccaagacagtggtttccaagttttccctagtctgaaaaaacccctttatatggatctccatgccctgagccagcctgacygagggtggatggcagcacctgtgaaaactggcctggctaggtctgatcctgctgctcctggcatgggagctgctccaccttgcagtgtttccttagttgctaaactccacaaggaagaaggaatccagacaccaaggcatggccctgagctgccatgcattcactgcccaaatttaaagtgcaggtctcttgggccaaa

SEQ ID NO: 498775 - DNA, 607 bp, Homo sapiens
aaaacaaaatgcttactcttattatattttctgactcatgctttaaataagaaagctatcaatgatctcaaagttcccatgggtccagaggctaagcacagctaaactgtgtcttctgctctggaggtcctcagcccacaaagctataatcaaggtgtcagccaagctgtattctggacgctgaactggggatcaatctgcttccaaactcattcaggttgttggcagaattcatttccttgcagttgcaggactaaaggccgtggcttttgctgactatgggctggmggctgcctcagctcctagaggatgcctgcggtttcctgccacgtggccctctccacagacagttcacgtggttgattacttccaagcaaatgggagaatttctctctctggtctaagacaatcttatataataaaagatttacatctgctgtattctactgggtagaatcaagttacaggtacttgcacacaagggcctgggtcactggaggtcatcttagggtgagtctgccacaatcactatcactatttaaatctattcattcttttcaaaaggctacagaatgtttcttccacctgttgaagactatttgtttct

SEQ ID NO: 498776 - DNA, 654 bp, Homo sapiens
ttttcctacccaagagaagtgtaaaaaaatccttaatttataaacattccttttaataaaaatagtaaagccctattattattattaatatctgttaagcacatttcatatatcatctaatttcttcagtttttataaaatgtaaaactaccattttattgatgaagagtttgaagctcaaacatggttaagtaatttgctcaagtcatatacaggcatattttgttttattgtggttcattttattgtgcttcacagatactacgttttttacaaattgaaggtttgtggcaaccctgtatagagtatgtctattggtgccattttttcaacagtatgtgtcacttagtgactctgtgtcataatttgtaaatctcacactatttcaaactttttcattactacagtatctgttagggtgatctgtgatcttcgatattagtaatgtaattgttttgaggtgccacaaattgagcccgttgaagacagcaaagctaattgataaatgtgtgtattctgactgctccactgatcagccattcctctttctctccttgggccaccctattccmtgagacacaataagattgaaagtgttgtgccagttaataacgctaaaatgggcttcaagtgttcaagtgaaaggaagagtca

SEQ ID NO: 498777 - DNA, 604 bp, Homo sapiens
tcctaagcagtatacgctgaatccaraatagtcttttatcccttatcccctttccacctttctccctgagtccccaaagtccattgcatcatttttatgcttttgcatcctcacagcttagctcccacttatgagtgaggacatatgatgcttggttttccattcctgagttactccacttagaatagtagtctccaatcccacccaggttgctgcaaatgccattaattcattcttttttatggctgagtagtattccatcatacatgtataccacagtttctttatccacttgttgattaatgggcatttgcattgtatatttcaaaacagctaaaaaagaagatcttaaaagttatcactacaaagaaatgataaaactttgaggtgatgaacgtgctagctacctgtgttgtatcaatttgcaatgcatacatgtattgaaaaatcacactgtaccccacaaatatgattatcatgtgcaaataataaatattaaaaatttataaaattaaaaaaattgttttcttccagtctgcaaatgtaaattaaatcccccaattagatgacctcatgtaagatttcaaaggtggaagtgaggcag

SEQ ID NO: 498778 - DNA, 604 bp, Homo sapiens
tcctaagcagtatacgctgaatccaaaatagtcttttatcccttatcccctttccacctttctccctgagtccccaaagtccattgcatcatttttatgcytttgcatcctcacagcttagctcccacttatgagtgaggacatatgatgcttggttttccattcctgagttactccacttagaatagtagtctccaatcccacccaggttgctgcaaatgccattaattcattcttttttatggctgagtagtattccatcatacatgtataccacagtttctttatccacttgttgattaatgggcatttgcattgtatatttcaaaacagctaaaaaagaagatcttaaaagttatcactacaaagaaatgataaaactttgaggtgatgaacgtgctagctacctgtgttgtatcaatttgcaatgcatacatgtattgaaaaatcacactgtaccccacaaatatgattatcatgtgcaaataataaatattaaaaatttataaaattaaaaaaattgttttcttccagtctgcaaatgtaaattaaatcccccaattagatgacctcatgtaagatttcaaaggtggaagtgaggcag

SEQ ID NO: 498779 - DNA, 529 bp, Homo sapiens
  misc_feature (1)...(529): n = A,T,C or G
gtctcggtaaatctggtaagctccatgtgcagttctagcgagcccagatgtgaggactgcctgttggctgggaaccctaaatctgcttgggcttcatgaggatcttgccccaggtgacctccagctgggagaatcaccctctacccacaccagggagagcttggtcattgttcgcagggacccaactagtcaggacgggcgtcgacraggagacagatttgaaagtattctctcttcaagaagcagtgactttgaactagctcttatataatgggtgctgtgttcctaacaaaaccaaaatatggtccaatattggcttcttcaagagaagcacagggcagttgggctgtccaaagtcttctttggaacttcacagatttcaaagatgatggttcaagaggctccagtattattcagccataaaaaggaatatgtaaagaaacgtgtggcctagccatagaatggaatattattcagccataaaagaataacattctaacacctgctacaannnnnnnnnnnnnnnnnn

SEQ ID NO: 498780 - DNA, 529 bp, Homo sapiens
  misc_feature (1)...(529): n = A,T,C or G
gtctcggtaaatctggtaagctccatgtgcagttctagcgagcccagatgtgaggactgcctgttggctgggaaccctaaatctgcttgggcttcatgaggatcttgccccaggtgacctccagctgggagaatcaccctctacccacaccagggagagcttggtcattgttcgcagggacccaactagtcaggacgggcgtcgacaaggagacagatttgaaagtattctctcttcaagaagcagtgactttgaactagctcttatataatgggtgctgtgttcctaacaaaaccaaaatatggtccaatattggcttcttcaagrgaagcacagggcagttgggctgtccaaagtcttctttggaacttcacagatttcaaagatgatggttcaagaggctccagtattattcagccataaaaaggaatatgtaaagaaacgtgtggcctagccatagaatggaatattattcagccataaaagaataacattctaacacctgctacaannnnnnnnnnnnnnnnnn

SEQ ID NO: 498781 - DNA, 671 bp, Homo sapiens
ccctccacccagacccaaaattcttcaaccaacctcttaatagggataacataaaaaaagtctgaggagtgagtttttcagatgaaagtgctacatacattccaattacctgattattatttggccagtgctctgagggaaaagtgcagcccttatctttatgaagcacttgaagtattgcatcacagctgacacataaaatgaaggttggaagaagccaagtcaatactggtttgaacacttgcctcaggggtcaaaaaattcacagtgaagttaatctgttgatcctgaactgaattagaaaagatgctattattttcatttaatttccaacttggaaatatcaaaataaaaattaaatttcaataaaaatagtttaaaaattcattaattaaaatatttgagtaaataatttctatgtaaacttttctatagacatctctctgataacataaaagactgaaaagraaagcattcatgagatagagattgcactaggtaaatatttttttctgaatttaggtgcatctatagcagcagaggtggttcagagaagggagacaaattctcataaaaatgttgaaatgggtcaaactgctcccacctcaaagctaaagattcccattttaagtcacaataatttcctgataccctgaaggaaagagatgagg

SEQ ID NO: 498782 - DNA, 622 bp, Homo sapiens
tggcttgggaagctgtatgcttaacaatgcctcaggtatatgcctagatgcaacattgctgtgtctcaactgagcagtggtgagagggctactttagagccacttgaaagtccttatttgttggagcaatcaatgtggcaagtcatcttgctgtttcggatactttccgtgttttagagggctattctgacctaggtactgcaatactgggtctggctgctattggaaaaattagttcagaaatcatcaggaaatgatcccagcctgtggaggagctgtatagaaagtagctgtttgctggtacatatcatattgtccattgtgacaggaaataacctttgagagtctagccacagaattctttcttccctttctttaaaagactgtaaagaacactggcaaaaaacaaacaaacaaacaaaaaaaaaaaacaggctctggagccaaacggccttggwaaatccaggctccactaaacaactaattgcaatcttgggcaatgcaattaatctaaccatgcctaggtttccttcttgtaaaaatagtcacaataataacagtacctaccctcatgttgttgtcacaaagattaaataattataaatgcctagaatttaagtgt

SEQ ID NO: 498783 - DNA, 482 bp, Homo sapiens
gggcttcgtgctcctgaagggccacctggcagctccggagtttctctttggtcattctaagtaggttctggtggcttgtgaggagctgggaacacaggcggccctcctgcccagcaccgtggccttcttcactcagaagctgccctctctgggaaagcttatcaagagactctctgaaaaaaaggaaaaaaaaaaaaaaaaaaaaagaaaaaaaattaattctgacatyctggagtgcaggggagtgacaaatgattgttgatattggagcagtaaccagacacaggctcatagctgacatgccttttaaataaagatgctgggaactgacctggttatttcattctcttatgatctctcctaatgttgtcagtacctatcgggggataacattcagtctgtgctgtgcctgcatccaaatagcagtggtggagcctactgtattacttactgtatttccagaaatttaattcagaaaatgg

SEQ ID NO: 498784 - DNA, 491 bp, Homo sapiens
ggacagactgaaaagcacaagcaagttactattcagaggctggggaaaagcacatcgcggacgaagctttggcccagagaacatggaaatcaacactggcaggcagtccgtgtaccctggaggctttattatctccaatctacacaccgtggagcacaaatcatggaaggaaacaaatcatacttccaaggaaagtcagaaaacataaaatccaccagaaatggggaaaaacacactatgtctcacggcagcacagtctaactcaagggtgctgagcatgcatctgtaaggtcgacagaggacrgacaaagactaggtcagatggggctacggggaggcgggctcatcacctggagcttctgctgctccctcctctttgctggcagatcatagaggcgattgctgctttcatggaccatcttctcagttttactcagccagtcctggataggctcagcacttacttcaaagtccttcatttggatctttag

SEQ ID NO: 498785 - DNA, 587 bp, Homo sapiens
gagctagcaagctttctggtgtccctcctcataagcgcactaatcctatcatgaggaccccatccccatgacctcatctgaacctaaccaccttccaaagttcccatctccaaataccatatgagtctgaagaagaacacaatttggtgctagcatgtgtgcctatgtgtgcacatgtgtgcytatgtgtgcacatgtgtgcttctgtgtgcacatgtgtgcttctgtgtgcacatgtgtgaatgtgacaatggctcatgatgaagcatcaggccctgaagcactgtggttggggaatgtggaattatgaggcttagtcctggcttctgttctgttcttctgacttcaccaaaggggaaccgaagctctatcgctacagaatcaaggttttggcatctccccttggaagatgagatattccttttggaatattctaccaaatttgaaaatcacaaagaatttttctaaaaaataaaaaatactagtagaatttcagatatgatggcttctgattcataactataggtgcacatagttcatccttaaaaaacaatagtgggtgcctggaagtctgcaagagggcagca

SEQ ID NO: 498786 - DNA, 587 bp, Homo sapiens
gagctagcaagctttctggtgtccctcctcataagcgcactaatcctatcatgaggaccccatccccatgacctcatctgaacctaaccaccttccaaagttcccatctccaaataccatatgagtctgaagaagaacacaatttggtgctagcatgtgtgcctatgtgtgcacatgtgtgcctmtgtgtgcacatgtgtgcttctgtgtgcacatgtgtgcttctgtgtgcacatgtgtgaatgtgacaatggctcatgatgaagcatcaggccctgaagcactgtggttggggaatgtggaattatgaggcttagtcctggcttctgttctgttcttctgacttcaccaaaggggaaccgaagctctatcgctacagaatcaaggttttggcatctccccttggaagatgagatattccttttggaatattctaccaaatttgaaaatcacaaagaatttttctaaaaaataaaaaatactagtagaatttcagatatgatggcttctgattcataactataggtgcacatagttcatccttaaaaaacaatagtgggtgcctggaagtctgcaagagggcagca

SEQ ID NO: 498787 - DNA, 587 bp, Homo sapiens
gagctagcaagctttctggtgtccctcctcataagcgcactaatcctatcatgaggaccccatccccatgacctcatctgaacctaaccaccttccaaagttcccatctccaaataccatatgagtctgaagaagaacacaatttggtgctagcatgtgtgcctatgtgtgcacatgtgtgcctatgtgtgcacatgtgtgcttctgtgtgcacatgtgtgcttctgtgtgcacatgtgtgaatgtgacaatggctcatgatgaagcatcaggccctgaagcactgtggttggggaatgtggaattatgargcttagtcctggcttctgttctgttcttctgacttcaccaaaggggaaccgaagctctatcgctacagaatcaaggttttggcatctccccttggaagatgagatattccttttggaatattctaccaaatttgaaaatcacaaagaatttttctaaaaaataaaaaatactagtagaatttcagatatgatggcttctgattcataactataggtgcacatagttcatccttaaaaaacaatagtgggtgcctggaagtctgcaagagggcagca

SEQ ID NO: 498788 - DNA, 452 bp, Homo sapiens
aaattaatgtttatcaatggaaaaagtacttttaaagttaattttgcaaaataactcagactgtacctcagaaaacattgaaagtyattcttactactcaccatcaaccttctattaagtttgtattttctttctactttgctttgatggtagaagattttcaaaactaaggctgatctcataggctaactaggtaaatacttattgtaaaatctttggtaagaaatgtttctgggccatgaggttcaatccatgtaaataatagtgtttaaggattacagttgtttcattcaatatcaaattagctttactgagctctgcagaatatatatatatatatatacttttttttttaaacttaaattacctactttgttgaaaagattaccataaggaaatgatcatttttgtccctaatctattagtatctcagcatttataaaaagtggcca

SEQ ID NO: 498789 - DNA, 515 bp, Homo sapiens
gcatagcttttgtattgttagtgttttctgccagactgaagaccttggtgttaayaagatggctgctttccaatacctcttaaaaaaaaaaaaaacaaacaaaacaaaacaaaaaaacaccattttcctctctcctttttcttttatttacaaatgtaatctctgatccatgaattcataaggtgagaacggtgagtggctagctttttatgggaccatacataaagggctaaattcagtgatccatctcccatctttctaactacttagggaaggaatttgaaaagaagtcaatgtggcagatttgaaggagaggctgttggaaagtgtgccacaggcttttttacattctgtcttcgagacaatttgagtctgcattttttaagtgaaactattagtaacgtagtgatttcaggttttttttttttaagttggtagatgtaggtcataataggactataattttatttatttattgatggtctgattttaagcccttagaatattaatgtcta

SEQ ID NO: 498790 - DNA, 431 bp, Homo sapiens
agcatagcttttgtattgttagtgttttctgccagactgaagaccttggtgttaataagatggctgctttccaatacctcttaaaaaamaaaaaaacaaacaaaacaaaacaaaaaaacaccattttcctctctcctttttcttttatttacaaatgtaatctctgatccatgaattcataaggtgagaacggtgagtggctagctttttatgggaccatacataaagggctaaattcagtgatccatctcccatctttctaactacttagggaaggaatttgaaaagaagtcaatgtggcagatttgaaggagaggctgttggaaagtgtgccacaggcttttttacattctgtcttcgagacaatttgagtctgcattttttaagtgaaactattagtaacgtagtgatttcaggttttttttttttaa

SEQ ID NO: 498791 - DNA, 515 bp, Homo sapiens
gcatagcttttgtattgttagtgttttctgccagactgaagaccttggtgttaataagatggctgctttccaatacctcttaaaaaaaaaamaaacaaacaaaacaaaacaaaaaaacaccattttcctctctcctttttcttttatttacaaatgtaatctctgatccatgaattcataaggtgagaacggtgagtggctagctttttatgggaccatacataaagggctaaattcagtgatccatctcccatctttctaactacttagggaaggaatttgaaaagaagtcaatgtggcagatttgaaggagaggctgttggaaagtgtgccacaggcttttttacattctgtcttcgagacaatttgagtctgcattttttaagtgaaactattagtaacgtagtgatttcaggttttttttttttaagttggtagatgtaggtcataataggactataattttatttatttattgatggtctgattttaagcccttagaatattaatgtcta

SEQ ID NO: 498792 - DNA, 617 bp, Homo sapiens
tgtgaacttgggcaagtaaccgctctctgaaccttcttatctgttaaatggaagtaatattaaagcctacagggacatcaaaaggattaaattacattaatattttatgttatttcattaaataagattttataaactatctcaaagtctgctctattacgtgtgctaattatctggtagttactattattctagaaaagcatcctatcccccctaactcatgcaaagaaacaatgaacgtttccaatacttcacattaaaaaaattactttkacagtatccacaggaaatcaggtaaaaagcaaagacagacaagcttagctctttccactggactttgtgagatgtgtctagttgtactagagttcaggcgagcattctaagagatgctggagggcagaaaatgaagtgaacttcattctatgaagcacttgagacttgtctttcccagtatttccccatcatctctcaaagaactgcctattaataaaaaacaaacaaaaaaaacttattccttggtatgctaccaaaaaaaatattcttcattcaagtaagtttggaaaccactgagtattacatttccctgtgaagaatcataatcattattttggtgttaa

SEQ ID NO: 498793 - DNA, 610 bp, Homo sapiens
ttctagaaaagtttgctaagaaagtaattctaaatttaggaaaaacttttattattgcattatttataatagaaaacaaaaatatggagctacccaaacattttcacttcatttagacttatcagtcttgtgatggattgttagggaccttctgaatcatattattccattaaaaataaaaattcacaaggacaaattaatagcatagaaattcctatgttatattgttaaccgaataacagcagggattaaaaattgatgggatagtatagaaaaaaaaatcctggaattacaggtgcaaatatcttaacagaattattttgtaatgtaataattgggtattttttctctatttttctgagtcttgcaaatattccataataagcatccattacatttataayggcataaaataataaccttaatctttaaaaaatgctagtggagtaaatgaaacttttcctgcattttcttgccagttcatgtcgctggggagtgtcacttatttctcttgtctgtttccctatggtgaaaaacatagaaacatgttgataaagaacacaaagaaagaatgcatgactaggaatgaggagaaggaaaagcttcatgc

SEQ ID NO: 498794 - DNA, 369 bp, Homo sapiens
tgtggccacctccctggaaaggcattcggaatgagtttcaaattcgcattttggcctgaggaaaagggagtgaagttatgactttttccccttctgattgtcaagtaacaccattagcccacgccaagaagccatttctccaagtagagatatagatgaggctggttattctttccaaaattccgcaaggctccaattaattccatgtgtattgtatatttaacacgcatttcttcctgagaacaacacaagatggtgtactttaactacatttcagagaggccacaacgttgggctggaaagtgtgctataaaagagtctttcttgtccacagggtctgaaactytactggattttaaaatccccaca

SEQ ID NO: 498795 - DNA, 580 bp, Homo sapiens
ggtggaaaatgtatcataagttaaacccaatcaaattttgtattttgacttttgtggggagagtctgtgtgaggggttgggacacagtctttttgggtaaagttaaaagagatgagttctgtgagtctctagccaccatattttgtccatgtttgccctttgctaaaaaggatcaagtgtacctgagagacaaaagatgacccaaccccaagagaaagaagcagagatgagatgtggaggtttcctggaatgtttgagtgcttccaattgtttctgagactacctgcagctcagccctttatgcagttaaatgaagtttccaatcatttacttttgttttaaagctaaacccaactcaagttgagtttttgtcacttgctaccaattgtctttatacagtatagttgcacagatgccaataatactgccrtgtatcaaggacagagtactggttacgcttgatctcatttcacagcaatctctatctatttctcaccaactcaagaacacatttgagaacacaagataaccacttatttgtatagcagttgtattagtctgttttcacgctgctgataga

SEQ ID NO: 498796 - DNA, 543 bp, Homo sapiens
tttgttctccagcttattactgtagaagctaaacattcccattttgttctcactgaatccaggatgtatggaaacttaggtttgtagctaacgtaaggtctttagacatcgttctattcactaggcaacggacacaccttccaaggtctctatggagctgmctttcctaacttacgtaggacttgctgttctctcttatctactttggcatgcactacaaaatgctttcatcgttactctttcatgagtaatgccttcatttgctagaaagctcactgggggtaaagagtgtggattctgtatgtttcaaaacagacttcgggtttacgctttcagtcataatttggtcccagcagtattgcttactggttctgtgtacttgatcaaagagccagtgctctattcaagttcaccaaatatcaagcaatagatgagtttccatgctacctttagataccaatgctgccattagcacctaaaagtagcatggaaactcatggatgttcccattacatatgtgaaattatccaccttcatttttta

SEQ ID NO: 498797 - DNA, 543 bp, Homo sapiens
tttgttctccagcttattactgtagaagctaaacattcccattttgttctcactgaatccaggatgtatggaaacttaggtttgtagctaacgtaaggtctttagacatcgttctattcactaggcaacggacacaccttccaaggtctctatggagctgactttcctaacttacgtaggasttgctgttctctcttatctactttggcatgcactacaaaatgctttcatcgttactctttcatgagtaatgccttcatttgctagaaagctcactgggggtaaagagtgtggattctgtatgtttcaaaacagacttcgggtttacgctttcagtcataatttggtcccagcagtattgcttactggttctgtgtacttgatcaaagagccagtgctctattcaagttcaccaaatatcaagcaatagatgagtttccatgctacctttagataccaatgctgccattagcacctaaaagtagcatggaaactcatggatgttcccattacatatgtgaaattatccaccttcatttttta

SEQ ID NO: 498798 - DNA, 491 bp, Homo sapiens
cattaaattgtaagagatatgccgtcacagcgttacttgttaatcaaaacaggtttcccaaatccaaatgcaattaaagccgagtttttagacckttatctccttcctcctgggtgtgtatccccctgtgggaactcctgctgggaacactgctttggaaacactaatatgtgttgcaggcccgtgaatatggcaccagagaagacggaggagggaagctggcctgtcaattaagcgaaaggaatctgaaacaggagaacagacacagtggcgttctgctgcagggacagaaacctctgccagggagactcgccccacacgctaatagcagattcagtctctcctgtggtctcggtcgaaagaatcgctaatcaagagccaccagccaaattcatggagagagttttttttttttttttttttggagggagctattacaaagcagtgctgacatagtgtgaagtgcatgtcatagggtcttagaaaacatc

SEQ ID NO: 498799 - DNA, 491 bp, Homo sapiens
cattaaattgtaagagatatgccgtcacagcgttacttgttaatcaaaacaggtttcccaaatccaaatgcaattaaagccgagtttttagaccgttatctccttcctcctgggtgtgtatcmccctgtgggaactcctgctgggaacactgctttggaaacactaatatgtgttgcaggcccgtgaatatggcaccagagaagacggaggagggaagctggcctgtcaattaagcgaaaggaatctgaaacaggagaacagacacagtggcgttctgctgcagggacagaaacctctgccagggagactcgccccacacgctaatagcagattcagtctctcctgtggtctcggtcgaaagaatcgctaatcaagagccaccagccaaattcatggagagagttttttttttttttttttttggagggagctattacaaagcagtgctgacatagtgtgaagtgcatgtcatagggtcttagaaaacatc

SEQ ID NO: 498800 - DNA, 652 bp, Homo sapiens
ctttcataaacaagacatagagatgtacagaaccatttccaaattgatggttatttaaatgatttctaatattttgctgttataaatattgaaatgaacactcttgcccttgtctttttttaggcttatatgtatttgtataagtttcgattcttacaaggagacttgctgggtcaaatgataatgcacatctaaaattttgataaacactgaagtaagatttttacttttcaatttacaatagaggtcagaagccaaaactccatgtcttakgaggtagggaaaggaaatgagactaatatcttgcctgaggcatcagtccagttggcttttcagcctcccatatcgtgacataaaaattgagttccccccaaaaggagttcttgagttcaaaaaatgagttcatgagatttgaagtcatgaatgagtcagcctttataactagaagactttagcgtaccttgacaaaggttaaaaggttatactattgaatatggctgcatttcacaatcaataaaactgataccagtaatcataacagtcaccatttattgagcatgcactatgtgctgggaaccctactaaaggcattcacagtctcatttaatcttcctaaccatccacaatcctatgagtgcccagagccaactat

SEQ ID NO: 498801 - DNA, 517 bp, Homo sapiens
gagaagggaaggaagcttcttatgcattttatgcatagttcttttcaatagaaggcaataaatgacattaaattgcaaagacattgactgaatattgggatgcattcaaacttaatttttcttggttaactcgatcatactaaccatcaaggtacagatttagtaagataaagcaagagttcttaaaaacaaaaccccaaaccaaagctttagcaaaacttcattaatatcctttyctcaaccagatattttatatataaatataaatatgtatgtgtgtgtgtgacgcacacacaaacacccactagctgtgtgtactaaaagtcaagagccagggttttcctacaaaatttacttggaaaatgtatacacacaaatctcaaacataaattagtaattctaactgagctgttaaacatttaaggatttatctatcacagactccctaaatgtatacccagcatttggcaggatacagtatgtaagcaataagttacctttctctgaatttttttta

SEQ ID NO: 498802 - DNA, 598 bp, Homo sapiens
aattaaatgtatagctttttaggggcgagaactctattttccacatatgctgcattatcttcttgaatgttccagagatttttctagcattaaaataaaattcaaaaacaatttaccaaatctttgcaaaaatttttaataaaattatttttaaaattttaaaagaaaaacttgaaatcaatcagaagaaaagagattttcttcgtaggataaaatattacactgatactgaactttttatcagaaacaaaaccagatgacaattgtccaagtttgggttcaactgaagcagacagtgaaagagagtttggtgtacacgatatttactaagaatacatacctatatcatagaaatgaaagacggagtgggcagagggagaagttacrctgtaatgctaccctaaaaatgcttcagccaaccccactggaatttgggagaatatatggcccatgagagttgtcctgccataatagctggatctttctgttccttactgcaattgttcatggaatatgggctgctgcaggaaaggaaggcccttaggtgaagtggtcctctgtagctgaatcaactctgatgtttcagacagctagaagc

SEQ ID NO: 498803 - DNA, 447 bp, Homo sapiens
agttcaacggacatatttgggcaaatttttgtgccaaagatgtaggagctgggctttggaatatactacaggttattctgttggtcaaaatgtggacatttttgctgagagcagagaggtgtaattaaccgtggctctctcagaactataattctgtctccaggtgtctagaaaaggtatgcttaaaattaaaaggagaaatcttacgataataagtaatttactctcttrctataaattacagaattaacctccaaatctgttttttctccacataaactacagtaggcagtattctttaaaagttatattctgtgaagcagtgaattatagggtttctaaaactactagctatcatcatttttagaaacatacaactctcttcactaatgcaactgtacttacccaaagttaaaatattatttatttaggtgttgaaaaatttat

SEQ ID NO: 498804 - DNA, 618 bp, Homo sapiens
ggagagagccagcgggtcagatggcagcccctcccccgggaggccggccctgctaaagcaggagggagctggcaagccatgcagttctcaggccaggccgcccatcctcccctctcccactgcctctggtccacacggatcttagggctgagatggcttggaatgcaggggcccctagggccttggagagggctcacaccccctcccttgacagaaggaagaaattggctttcagagacctggaaaggccctcccaaccccctccaggactcccaaaccaagcccccagcttttctttacaggggcagggagcttgtggacagcactccttgtgcccagagaggggaagtgatttgcccaaggtcacacaggcagggagaggcagactctccctggagaagaaaggaggaaaagacttagtttgtcttcaggtcaggcctccctgaaaaacatacttctgtttccatagaggtgcatttatccgacggctgtggccttgggaaaagaccaagccatttgtacctggctaggtcagagaacccaggttgtggggaaaggtgagggggcatggcagggatgctgggggccttgggagyggagcagaggccctgcttgagg

SEQ ID NO: 498805 - DNA, 372 bp, Homo sapiens
gctggggattgctttggtgtgtgaagtgttgcccggttatttttaagcagctcctggcttggggggcttcakcttggtgactttggtgtcattaactcatgcatttgagctctttttttgcttttgctctttgcgcatgggggatgtaaagggaatggacccacctttagggaacttgttgaagacagatcccaagcatacgatgggatttcagagtagatctgaggcttccctcccaagttctgattcccagcccagcctgctgcaggattttgcagcacatgtctggggctgggagcaccagggtgggagcactgccaacagtaggagctgtaattgttccctagcggggcaggttttcctcagggctca

SEQ ID NO: 498806 - DNA, 599 bp, Homo sapiens
aagtgttggacttcattctcatttttatatgccttaagttggatgcatcggtggtgacattgtggtgcccttcagctcctcatcctgcagtcctttacgctctggacactggatccgttccgtggacggggagacaagagcgagctggggattgctttggtgtgtgaagtgttgcccggttatttttaagcagctcctggcttggggggcttcagcttggtgactttggtgtcattaactcatgcatttgagctctttttttgcttttgctctttgcgcatgggggatgtaaagggaatggacccacctttagggaacttgttgaagacagatcccaagcatacgatgggatttcagagtagatctgaggcttccctcccaagttctgattcccagcccagcytgctgcaggattttgcagcacatgtctggggctgggagcaccagggtgggagcactgccaacagtaggagctgtaattgttccctagcggggcaggttttcctcagggctcacaggtatgcgtgaaggcctggaatgccagtgctggggggtcacggggctggctgacaggcacggggtagccagagcattgttgt

SEQ ID NO: 498807 - DNA, 599 bp, Homo sapiens
aagtgttggacttcattctcatttttatatgccttaagttggatgcatcggtggtgacattgtggtgcccttcagctcctcatcctgcagtcctttacgctctggacactggatccgttccgtggacggggagacaagagcgagctggggattgctttggtgtgtgaagtgttgcccggttatttttaagcagctcctggcttggggggcttcagcttggtgactttggtgtcattaactcatgcatttgagctctttttttgcttttgctctttgcgcatgggggatgtaaagggaatggacccacctttagggaacttgttgaagacagatcccaagcatacgatgggatttcagagtagatctgaggcttccctcccaagttctgattcccagcccagcctgctgcaggattttgcagcacatgtctggggctgggagcaccagggtgggagcactgccaacagtaggagctgtaattgttccctagcggggcaggttttcctcrgggctcacaggtatgcgtgaaggcctggaatgccagtgctggggggtcacggggctggctgacaggcacggggtagccagagcattgttgt

SEQ ID NO: 498808 - DNA, 550 bp, Homo sapiens
atttactgctagcaggaagtttcttttccttgagaagctggatacatgtgggagggacagaccatggggagctgtgggagcccagcagccaggagtcaatcccaggcattcttctcccgggcaattggttgcatggcttaaaaaacatatttgacagaattctttatactgaaaagaggaaactaattttcaaataaaaggtgctttattttttatttggccccaactttccttctttcaccttcctgctcccacattccctctttagggaggcttccctggctgtcccctccaccacagcccccgggactcctcattccgactctgctatgcttccttcccagccctgatcacctccactaggtcygatgtctgttgatgacctgactttttgctagaagggtttcctgaaggcaggaatcctgttttctgagccatcttcatgtcccctggaatgggacttggctcgttgtaggtgttcaatgaacgtgtgtggaccggatgcataaatatcccacggtacgtggtcagacagctcttctctaagagg

SEQ ID NO: 498809 - DNA, 550 bp, Homo sapiens
atttactgctagcaggaagtttcttttccttgagaagctggatacatgtgggagggacagaccatggggagctgtgggagcccagcagccaggagtcaatcccaggcattcttctcccgggcaattggttgcatggcttaaaaaacatatttgacagaattctttatactgaaaagaggaaactaattttcaaataaaaggtgctttattttttatttggccccaactttccttctttcaccttcctgctcccacattccctctttagggaggcttccctggctgtcccctccaccacagcccccgggactcctcattccgactctgctatgcttccttcccagccctgatcacctccactaggtccgatgtctgttgatgacctgactttttgctagaagggyttcctgaaggcaggaatcctgttttctgagccatcttcatgtcccctggaatgggacttggctcgttgtaggtgttcaatgaacgtgtgtggaccggatgcataaatatcccacggtacgtggtcagacagctcttctctaagagg

SEQ ID NO: 498810 - DNA, 639 bp, Homo sapiens
cttgggagtgtttataaagttatacacttaagtgataagtgtggcttgggtattgaaaagttagctcaaagaaaacaaaatttcgttccttttttttctgtcacttaggctggagtgcagtggtgcagtcttagctcactgcagcctctacctcagggtctcaagtgatcctcccacctcagcctccagagtagctgggactacaggcacgcaccaccacccccagctaatttttgtattattattattattattattattattattattattattattattgagatagaatctctctctgtcacccaggctggagtgcagtggygcagtctgggctcactgcaacctctgcctcccgggttcaagcgattctcctgcctcagcctcctgagtagctggaattacaggtgccagccaccacgcccagctaatttttgtatatttagtagagacagggtttcaccatgttggtcaggctggtctcgaactcttgacctcaggtgatccacctgcctcagcctcccaaagtgctgggattacaggcgtgagccaccacgcttggccataatttttgtattttttgtagggacgagttcccactatgttgcccaggctggtctccaactcctgggctcaggc

SEQ ID NO: 498811 - DNA, 639 bp, Homo sapiens
cttgggagtgtttataaagttatacacttaagtgataagtgtggcttgggtattgaaaagttagctcaaagaaaacaaaatttcgttccttttttttctgtcacttaggctggagtgcagtggtgcagtcttagctcactgcagcctctacctcagggtctcaagtgatcctcccacctcagcctccagagtagctgggactacaggcacgcaccaccacccccagctaatttttgtattattattattattattattattattattattattattattattgagatagaatctctctctgtcacccaggctggagtgcagtggtgcagtctgggctcactgcaacctctgcctcccgggttcaagcgattctcctgcctcagcctcctgagtagctggaattacaggtgccagccaccacgcccagctaatttttgtatatttagtasagacagggtttcaccatgttggtcaggctggtctcgaactcttgacctcaggtgatccacctgcctcagcctcccaaagtgctgggattacaggcgtgagccaccacgcttggccataatttttgtattttttgtagggacgagttcccactatgttgcccaggctggtctccaactcctgggctcaggc

SEQ ID NO: 498812 - DNA, 584 bp, Homo sapiens
tttttaaaaagacaaaatacggtatttcaagtttctaaataatttttatttaaacaattacaactccttgccacttgctcattaattgaaaaggtttcatttgaaatcactagtatttattctaggaattagtagttagtttgaagagaaggttgcagtagctaaaatttaaatttatactaatttagggcacaggaagcagtatataatatagtgaatcatgtttcaaatggaaagcaaacaaaagagtgtccaaatgtttcatcctrtatctatcagagtccatttctggtgctaaataaaataattaaagatctctgccctcagtttaccccaagtgcaaaatgaaaatagtacctcactcaacagatgagtgattaaattagctgcagctgggccagcttggcattaagtaactgctgtgcaagactttttgaccgcaaaagagcaaagtggaggggaacaagagccaaaaaggacacacccacccatttgcgctcccttttgtattaggaatgcagggcctcagcattgcccaaggggtttcagggtaagatgctggacaggtctgatagacagttctg

SEQ ID NO: 498813 - DNA, 567 bp, Homo sapiens
gtaaaccacaggaattagcttttttcaggcaagggtgaggtgagcattaggcaactcgtggactgtgggagttctcacaaccatactagattgtaactgtgcaagagggagctatttatatgattttgaacgaagcttgaggcatattctggtgctttttaacttctatgttaggtgaaaaagctgcytacaaaagccttcctcccacccaaaatactagctgttagttggtgactgatcctcagaaatattaacatgaatcatatatgctcttttcacagtgcaaaaagagataattttaacactcagaaaatgtcataaaccacacaatagagaagctatccagccttcaaattgtaaataaataaaatcctgttcctgcatggaagcctcttcctcctttcgattctgatgcttcctcctctggattctgatgcctgcagggctggctggtgttaaccgtgttcagtctgatgctgaaggcagcctttgctctccatccttcctccctggcgcccacccttgttagcccgactgtctttgggaacccatagcactcagccttgc

SEQ ID NO: 498814 - DNA, 662 bp, Homo sapiens
gtagatagaacaatttaattgcttcctatttttgctttcatattataaagattccctgcaattggtttttggtcctttaaagtataatagtaattttaatcaaacagttattactgacattcattgaaagcctatagatgaaaaaactgaggttctgagagcttgagtaattttccccaagttcatataatcatgaagtatcagaactgagattcagatctgggtctgatgaaaacctgtgccctggatgagcttcctgacctcagtgctagtagtcctgccttgcttctcctctctaacatctgcctgggatgccctgtacaccacaagcaaggggtgccttccagaagtctcatctagtctccaaactattgaattctcggagtgagcasgggcattcatggccacagatagtgagattgtgcttcttggtcctgaaagtgaatattctggcctgcctggtgaaaggggcatcaggctgaggccctcccatctatcccatctgtgtttggcccacactgcctgcctgggtatctgattacttctttcttttttattccactctaaaaattgagccttaaccagaactctgggcagggaaccttggctatctgagactgttgtgtagttctttacaataattttccttggtgacagtcact

SEQ ID NO: 498815 - DNA, 472 bp, Homo sapiens
tggcataagagccataagtataggaaccaataacctcaccggttcrtgaagatcaaaagaaataattcatataatgttgcgagcatagtgcctggcatataagaagtactccaaaagtgtgagctagaaataataagaagaaactatgcttttaagactaagaagcaaaaagctttgaaagttagctgtcattttttttttctttctgtctggaaacaatgagaagcttgttaacatgaatggaaatattcatgactcatcactgcctgctttcatttttggtgtctacattgatttacttcacttcagcaatggaatccagtagcaattttacaccattatgaagacagatggaaatcagtgattaatatcattctttcacaggacaaatcactacctatgattaggaagagttaatacaattagaggtgacagcttctgactcaaatttataatatttattatgttctga

SEQ ID NO: 498816 - DNA, 645 bp, Homo sapiens
gtgagaagtaccatgataagaggactaaatcctagaaaaacacagaaacaacagacattgttccatctggggtgagcaggggaaacttcatggacaaggtggcctatctgcctttcgtgtaaaggatttataaagatgaaaggaaagggcaaatgtaacaatcattaaaaaggcagggaaaagaaggtggtctgaatgactatttcatccagggatgactaagtataggagagggaagagtccaacttcaggctaggatgaaagtacagagtttggtagaaatcccctggaaaataaaaattcttctagaaactaaaaactagctataagtttgggcaatatattattttctgcacacgggagtctggaaggttgtcatgtgtgtctcatctctcctcctttctctgcctaccctatcacccctgcatcaaatcacttaccaagcaccaccaattctccatccatatcctctcttctatctcttctttttgtcactctaattccactgtgtgcttaatgactgaaagactcctgcatggtgccatgtttcctctctccctcttcaatctacacctgaatcctttgaaaggcaggctatggacctggctgcttatcacgacacasaggtcaaggaggtgagtgtgg

SEQ ID NO: 498817 - DNA, 290 bp, Homo sapiens
tgatctcagcctgcatggtgtccagtcaaaaccggatgtggggatgacaaaactgcctcccttccttccctcyacggttctctcccgtaatcagcttttctaccacacagcgagcaaggccaacttccctaaactaagaatgctgagattcttttcgacttataatgttctgactgtctctctctgtttccccttacctcagaatttgtttaatagaggaaatatgttatgtctacagatattttctgaaactgaaagaatgaaaccacccacctgccatttcctccctg

SEQ ID NO: 498818 - DNA, 470 bp, Homo sapiens
cacctccctggttcaagcaattcccctgcctcagcctcccgagtagctgggattacaggtgctcgccaccacatccggctaatttttttttttgtatttttagtaaagacagggtttcaccatcttggccaggctggtctcgaactcctgacctcaggtgatctgcccgcctcggcctctcaaagtgctgggattacyggcatgagccactgtgcccagccatctattttctttttcaaggagcagcagggtgatggtctagatgatcctgcaaagtccctccctggactataacatcggagtgctcatacttgggttattccagaagagacaagaagaaatagcctaaaacaaaagcttctaggggttgccatgaacatattctcagtgatagctgttcatgaaggcaaccttcatgggttcctagtaccaagtcctgcctgtgacgtttacaaaatccactgctgcat

SEQ ID NO: 498819 - DNA, 595 bp, Homo sapiens
tttcaagaaagcttatgaatttgtgttgggctgaatttaaagccatctcctgagccgcatgcaacctgcaggtcatgggttggacaagctaggcttaaagcttatacagtttgaggacacctgtttcagggaaaaaaaaatcgaaataactaataaaaggttgttagtttccattctagggccttcgaggaaatccatgcaaaggaggagttataaaacctaagctttacaagctttatggtaaatccaccatcattataccatatagtattctaaaagttttcttaagcatttttagaaacaaacataatttgtagtttttattgctattacatatatccagttccttcacatattaaaatttacactttatctgtttttatctatacctgatttttaacagtttttccatctgcattcarttgttgtcaagcttcacagcttcctaaacacgtagaggaagatgaagttgcttgtcaacacactcttcttataaatgctccagaactccctcagttgtgttattgcagatagtgcagatcacttaaaattatacttgcctgcttatcttgtattctctgcagaacattatctc

SEQ ID NO: 498820 - DNA, 590 bp, Homo sapiens
cctccgttcatttgtgttcttaaaattttactataatttttctctattaattcctctttatattgaaaaaatagaggcattaagatgaaaataaatttactcacacctaccctgaaattccaggcagatcattattagaatttgagatataataataatctgctaaagtacattttaactaattgtttattgagtaactactctgcagaggctctggctttgaggggaacatgttgataaaaataaataagacatggagacgtgtccattacaaatatgaagtaaatggcaagcatatggatgcagctagcttcaagttagcaaataaatattgtcaagtttcagtgttggctcagtggaatggtatctgstaaacatcttgctgggtctggaaaaacagattatttgtcctttatctcctcttatttccagagttgatggaaaatgaggattcatttatagaaggtatttcagtttatatttcaggtggtgtccattcaacagttggagacagaactcaaaattttatcacattatgaaaacaaattttatgaattcaaagcagagtataatttggctgatacatgaga

SEQ ID NO: 498821 - DNA, 623 bp, Homo sapiens
tcattctctagttaaaggtcttacttccattttccaaaaaaaaatctcaagcaattggatcaagcaagttgtcgacataaatttttttttaaaaaaagacttacctgattcaattatctacagattttgagaaagttcaaacaagttttggcttctttcagatcaaatgttcttgaaggggacctgcaccaaatgtgcacatactttagagttaaggtgttataactatcataaatattgacttaggtaaacctcctcttcttgacactctatttcacccttttcccattttatcatttatctatttcatttaggacttgggattgaacaggaaccaygggagtatgaatgtgtcccatgatgattccttgccattaaatatttgctggcttgttgaatagggaaaagggttcaagtccagacagccaaaccactttcaactttctttcaactccagagctctttcccttgtcttacttataaccaattacatgcactatgtttctaatagatttaggaagagttttacatggagagatttctgtgacactatacgaagaattgaattgaattgaatcttcagtgatattccacacatcagtgagaagaaactcagcaaagaa

SEQ ID NO: 498822 - DNA, 623 bp, Homo sapiens
tcattctctagttaaaggtcttacttccattttccaaaaaaaaatctcaagcaattggatcaagcaagttgtcgacataaatttttttttaaaaaaagacttacctgattcaattatctacagattttgagaaagttcaaacaagttttggcttctttcagatcaaatgttcttgaaggggacctgcaccaaatgtgcacatactttagagttaaggtgttataactatcataaatattgacttaggtaaacctcctcttcttgacactctatttcacccttttcccattttatcatttatctatttcatttaggacttgggattgaacaggaaccatgggagtatgaatgtgtcccatgatgattccttgccattaaatatttgctggcttgttgaatagggaaaagggttcaagtccagacagccaaaccactttcaactttctttcaactccagagctctttcccttgtcttacttataaccaattacaygcactatgtttctaatagatttaggaagagttttacatggagagatttctgtgacactatacgaagaattgaattgaattgaatcttcagtgatattccacacatcagtgagaagaaactcagcaaagaa

SEQ ID NO: 498823 - DNA, 623 bp, Homo sapiens
tcattctctagttaaaggtcttacttccattttccaaaaaaaaatctcaagcaattggatcaagcaagttgtcgacataaatttttttttaaaaaaagacttacctgattcaattatctacagattttgagaaagttcaaacaagttttggcttctttcagatcaaatgttcttgaaggggacctgcaccaaatgtgcacatactttagagttaaggtgttataactatcataaatattgacttaggtaaacctcctcttcttgacactctatttcacccttttcccattttatcatttatctatttcatttaggacttgggattgaacaggaaccatgggagtatgaatgtgtcccatgatgattccttgccattaaatatttgctggcttgttgaatagggaaaagggttcaagtccagacagccaaaccactttcaactttctttcaactccagagctctttcccttgtcttacttataaccaattacatgcactatgtttctaatagatttaggaagagttttacatggagagatttctgygacactatacgaagaattgaattgaattgaatcttcagtgatattccacacatcagtgagaagaaactcagcaaagaa

SEQ ID NO: 498824 - DNA, 605 bp, Homo sapiens
caatataattagtcattagggaaatgtaaatttaaaatacaattagttgcaactccacacttgtgaggaagctaaaattaaaatgacaaataataacaagtttagcaaatatgtagaggaagtgaaattttcatgggaatataggaacataaaataatgtaagcacttaaaaaagggtctctcagtttcttttaaaaagttaaacgtacacctacaatatgatgcagacattccaatttattatttgcctaaaaatggaaaaataaaatatatagccatataaagacttatatacaaataagcaactatattggtaataggcaaaacagaggcacaakaaaaatgtctatcaacagtgaacgaatcaataaactgtagtattcccatacaatgaactacttctaagcaatataaagggaacataatattgatacatatataaaaatggataaattcaaataaatatactgagttaaagaagccagaccaaggaaaaacaatagaacaagtagtggattggggagaggtgggagaaaattttggggaccatggatacattcattagtttgattgtagagatagttttatgggcatacatcaaaaca

SEQ ID NO: 498825 - DNA, 591 bp, Homo sapiens
gtcatcccaaagtctttttaccttttaaggttctcacttttgaggctgagaactatgaagctagtattcaaatttgcattcattgttgtaatttctggcagtatgtccaatttaattctactgttaggtgsttctttgttgtacttatgaagaactaaggattttctagtagcccagagttatgttattttttgcttagtgacaatttttacaagagaccttattataatgaaaccaatgaaatgcatcacagtacctttttcagagtgccagtggcttatgagatattttttgatgtaaacttgttaaagccatgtaactaaccaagcttatatccttactgtagaactagagacatattataaatatttataacgaacaaaattggggtaagaatccctcatttgttctattttttggtcagtcaataaatatatttttaaaaatttgtgtctgtgactggttttggtaacagggtaatactggcctcatagaatgagtttggaagtattccttcctcctctatttggaaggatgcccttctcttctatttttcagaatagtttgagtgggattaatattagttcttta

SEQ ID NO: 498826 - DNA, 591 bp, Homo sapiens
gtcatcccaaagtctttttaccttttaaggttctcacttttgaggctgagaactatgaagctagtattcaaatttgcattcattgttgtaatttctggcagtatgtccaatttaattctactgttaggtggttstttgttgtacttatgaagaactaaggattttctagtagcccagagttatgttattttttgcttagtgacaatttttacaagagaccttattataatgaaaccaatgaaatgcatcacagtacctttttcagagtgccagtggcttatgagatattttttgatgtaaacttgttaaagccatgtaactaaccaagcttatatccttactgtagaactagagacatattataaatatttataacgaacaaaattggggtaagaatccctcatttgttctattttttggtcagtcaataaatatatttttaaaaatttgtgtctgtgactggttttggtaacagggtaatactggcctcatagaatgagtttggaagtattccttcctcctctatttggaaggatgcccttctcttctatttttcagaatagtttgagtgggattaatattagttcttta

SEQ ID NO: 498827 - DNA, 591 bp, Homo sapiens
gtcatcccaaagtctttttaccttttaaggttctcacttttgaggctgagaactatgaagctagtattcaaatttgcattcattgttgtaatttctggcagtatgtccaatttaattctactgttaggtggttctttgttgtacttatgaagaactaaggattttctagtagcccagagttatgttattttttgcttagtgacaatttttacaagagaccttattataatgaaaccaatgaaatgcatcacagtacctttttcagagtgccagtggcttatgagatattttttgatgtaaacttgttaaagccatgtaactaaccaagcttatatccttactgtagaactagagacatattataaatatttataacgaacaaaattggggtaagaatycctcatttgttctattttttggtcagtcaataaatatatttttaaaaatttgtgtctgtgactggttttggtaacagggtaatactggcctcatagaatgagtttggaagtattccttcctcctctatttggaaggatgcccttctcttctatttttcagaatagtttgagtgggattaatattagttcttta

SEQ ID NO: 498828 - DNA, 602 bp, Homo sapiens
caaaagtaataataaactggaaaaaaaaagtggttggaaacaactatttcagaatcctggatattgactgttaggaactgaatgtttgtgtcccccctaccaacctacaatctatatgttgaaatcctaacctccaatgaggtggtattaggaaatggagacttttggagataaatcaggtcatgagggtggacccctcatggatgggatcagtgcctttgtaaaaaatactttagagagatttctagctctctttctgccacatgaggatataaggagaagttgatggcttgcaacctgaaagagggcactcaccagaacccawccagactggcagtctgatctcaggcttccagccttcaaaactatgagaaataatttctgttgcttataaaccacctagtctatgctactttgtgatggctgtccaaattgacattaagacaaaaagaaagggaaacctgtatttgtgaaaacctaatgaatatcagataagaacagcagtatcttatcttagcctatggcttcttgcattatcactaccccaacaaactccttcagcataatagttccagcagggtggggaaagtggtggaagtcag

SEQ ID NO: 498829 - DNA, 602 bp, Homo sapiens
caaaagtaataataaactggaaaaaaaaagtggttggaaacaactatttcagaatcctggatattgactgttaggaactgaatgtttgtgtcccccctaccaacctacaatctatatgttgaaatcctaacctccaatgaggtggtattaggaaatggagacttttggagataaatcaggtcatgagggtggacccctcatggatgggatcagtgcctttgtaaaaaatactttagagagatttctagctctctttctgccacatgaggatataaggagaagttgatggcttgcaacctgaaagagggcactcaccagaacccatccagactggcagtctgatctcaggcttccagccttcaaaactatgagaaataatttctgttgcttataaaccacctagtctatgctactttgtgatggctgtccaaattgacattaagacaaaaagaaagggaaacctgtatttgtgaaaacctaatgaatatcagataagaacagyagtatcttatcttagcctatggcttcttgcattatcactaccccaacaaactccttcagcataatagttccagcagggtggggaaagtggtggaagtcag

SEQ ID NO: 498830 - DNA, 631 bp, Homo sapiens
ttatgaggataaggaacgactatttccttctcgcattaaagccatcagctaccccaaaccgtatgtcccttgctccctctggcattcccatcttagacccgggaacagtggttttctccttcctatctcctttgctttttccccttgcatcctttcgtgtgtcatcctcacctcaccccttttctatgttcttatcatttcatccttgaactttaagtctgcttgacgttttgttgytttctggtcataatgttattgtgtaacctttgaaatcttttgagtctatgaacatgctttgaatcctgctggcttttctgtaatgcaactttcaaacgccataatgtaaacttggaacaatttcatatataagccctgtgaaagaatccccatttgtccatcatgtttgcaaggggggttttacacatgtctctttgaattccagccccaatctgtcaaggaggtgttctcatgaggaaaccaaggctccaagaaggactttgttaaaatctaaaaactaataaacaatggaggtcagccagacccaggtcttcggactccaaatctagtgttcttcccaaatcacttctttgcctttttcacaaatgatatcattgccctaaatacagactgc

SEQ ID NO: 498831 - DNA, 568 bp, Homo sapiens
agcacaccccatactccttgttgaaattggagtcttccagcccctgcagacacacacccaaatgttcttacctgccatgcctaaggactccctaaacccaggcagagaaccttttggaaaccctctatgaaacagtagcttcctcgctgacttagtcaactttctatgcctctggattcgaactggatccatttcacctgccttctccagtctactttgaaggggtgtagattttctttttgtttagtttagtttagttttgttttgtttctgacccacagcgcctacttgccacttcctaaaggaactgctgttctkggtctgggcttgttgccaggcccttcctgggtgatgggagtcctgctctgtcaccccagctctgtcctgtggggctgcttgcatccaagtgcaatactctctctgctctgtttgtgcctagcataaggcacatatcgcctgcaattcaagctttaagagcccgggaatgttttactacgtctcttctctcttcaacagagcctgttccatcagccggggtcctgggatgaaggtaacgtggagcagagtt

SEQ ID NO: 498832 - DNA, 586 bp, Homo sapiens
ttaaaaatcaggtatctagtcctataaaaaacagtaaaacttctttaagatagttcctcattacacatattggaatatggtaccaagtatatcttgaaaacttacagctgaagattacactaaaaatagaaaaattaaataaatttcccaaacacatgagtctcactctttgaattcaacaaaaccaaaacaccacacaaagtaaagagtcaatcatgattccttccctttgtccatgaaggcyggcagattttttaaaaattaattaattaattaattttttttttgagacggagtctcgctctgtcacccaggttggagtgctatggctggatctcagctcgctgaacctccacctcctgggttcaagccattctcctgcctcagcctcccgagtagctgggattacaggcgcccgccacacacgcctggctaatttttgtatttttagtagagatggggtttcaccatgttggccaggttggtcttgaactcctgacctcaggtgatctgcccgcctctacctcccaaagtgctgggattacaggcgtgagccaccgcgcccagtcgaggctggtggatttta

SEQ ID NO: 498833 - DNA, 586 bp, Homo sapiens
ttaaaaatcaggtatctagtcctataaaaaacagtaaaacttctttaagatagttcctcattacacatattggaatatggtaccaagtatatcttgaaaacttacagctgaagattacactaaaaatagaaaaattaaataaatttcccaaacacatgagtctcactctttgaattcaacaaaaccaaaacaccacacaaagtaaagagtcaatcatgattccttccctttgtccatgaaggccggcagattttttaaaaattaattaattaattaattttttttttgagacggagtctcgctctgtcacccaggttggagtgctatggctggatctcagctcgctgaacctccacctcctgggttcaagccattctcckgcctcagcctcccgagtagctgggattacaggcgcccgccacacacgcctggctaatttttgtatttttagtagagatggggtttcaccatgttggccaggttggtcttgaactcctgacctcaggtgatctgcccgcctctacctcccaaagtgctgggattacaggcgtgagccaccgcgcccagtcgaggctggtggatttta

SEQ ID NO: 498834 - DNA, 231 bp, Homo sapiens
ttacctggtaaatagattattctgtatatcatgacactgtaggcctctatcgttttcccacccattttctactcatttttcttctattaacagcaccctcgttttgctttggaagatccaagttggggtcattagrtgcactcaacttggaattgaaaggatgaatgaccaatgtcaaaaagacctaccatcataacatccagaagagattgacagtttcttcgtcccaca

SEQ ID NO: 498835 - DNA, 235 bp, Homo sapiens
ctgccttctaatgtgtcccatgtaacactgtcattcccctttcactctttcccctttccaaaccattcaaccattcaccaaarggagtgctatggcctttagttcttctccactttgctcaggaccgaagcatcctccaatgaaggcagcatcctctgcttctccctgtaacttcttccggctcttcccccttcctcactgcctcaggaatcagttgtatttccacacagcctcc

SEQ ID NO: 498836 - DNA, 235 bp, Homo sapiens
ctgccttctaatgtgtcccatgtaacactgtcattcccctttcactctttcccctttccaaaccattcaaccattcaccaaagggagtgctatggcctttagttcytctccactttgctcaggaccgaagcatcctccaatgaaggcagcatcctctgcttctccctgtaacttcttccggctcttcccccttcctcactgcctcaggaatcagttgtatttccacacagcctcc

SEQ ID NO: 498837 - DNA, 235 bp, Homo sapiens
ctgccttctaatgtgtcccatgtaacactgtcattcccctttcactctttcccctttccaaaccattcaaccattcaccaaagggagtgctatggcctttagttcttctccactttgctcaggaccsaagcatcctccaatgaaggcagcatcctctgcttctccctgtaacttcttccggctcttcccccttcctcactgcctcaggaatcagttgtatttccacacagcctcc

SEQ ID NO: 498838 - DNA, 235 bp, Homo sapiens
ctgccttctaatgtgtcccatgtaacactgtcattcccctttcactctttcccctttccaaaccattcaaccattcaccaaagggagtgctatggcctttagttcttctccactttgctcaggaccgaagcatcctccaatgaaggcagcatcctctgcttctccctgtaacttcttcmggctcttcccccttcctcactgcctcaggaatcagttgtatttccacacagcctcc

SEQ ID NO: 498839 - DNA, 615 bp, Homo sapiens
ctcagtgtatgttgttaccccaccatgtgtacatgtgttctcatcattcaactcccacttacaagtgagwaaatgtagtgtttggtttttctgttcctgcattagtttgtgaaggataatggctttcagctccatccatgcctgcaaaggacacgatctcattctttttatggcttcatagtattccatggcacatatgtaccacatttaatgattatcaaaataattaatacagtataaattacttatatttatatttttaaacattattacatttattatgacattacagtgttacaattgtcctaaaataagaaggacaattatcatacccatctacagattgagaaactgaagttcagatagaaagcaatttgcctgaggtctcacagatacctgtggcaccagatcagaattttctggaacagaattttctgactcttcatcagatctatatatgccttatgcttttagtgatcatcttatttgaaaatgtaaaaacttagaatatctaaattgcttaagacaattttgtgacagacatcagtactgtcaagaatatcagcctagacatctcataaaaatgtatcaaagtacccagtatataggtcagta

SEQ ID NO: 498840 - DNA, 615 bp, Homo sapiens
ctcagtgtatgttgttaccccaccatgtgtacatgtgttctcatcattcaactcccacttacaagtgagaaaatgtagtgtttggtttttctgttcctgcattagtttgtgaaggataatggctttcagctccatccatgcctgcaaaggacacgatctcattctttttatggctkcatagtattccatggcacatatgtaccacatttaatgattatcaaaataattaatacagtataaattacttatatttatatttttaaacattattacatttattatgacattacagtgttacaattgtcctaaaataagaaggacaattatcatacccatctacagattgagaaactgaagttcagatagaaagcaatttgcctgaggtctcacagatacctgtggcaccagatcagaattttctggaacagaattttctgactcttcatcagatctatatatgccttatgcttttagtgatcatcttatttgaaaatgtaaaaacttagaatatctaaattgcttaagacaattttgtgacagacatcagtactgtcaagaatatcagcctagacatctcataaaaatgtatcaaagtacccagtatataggtcagta

SEQ ID NO: 498841 - DNA, 549 bp, Homo sapiens
tctagaagtctgctttggctctgccctgccggggtgtgggggccccagaggatgaaggatataatgtaattgattaccaacgctgtaaactgtacaactctaatgacgctctaattagggtgcagagggctgggggagagggcggaggccattttttgttgctgttttctgcaggctgctttggcattttcccagcattctctctataacaatagacattagcattttcatatgtcttgaaagttaaagcaacatgtgggaaattcaattgttggagagcaaaattctctaattacactgttcagagatttccagtacttttggaaaatgtgcattgacaaagggcttaatttaattagtggtactgtttcgtttccagggatggcctgatttccaatccaccctcccaccctgatgtacttgctctgctgtggaagcacccactagcttcaaagggaacaaagaatagtgcaaagatgctgaaaggtggagttagatatgattcacggtgattttttttttccatcytccctaagtctgtgtcatcac

SEQ ID NO: 498842 - DNA, 637 bp, Homo sapiens
gctatcttccttgaatgtttacattcaaagaagatggttccttcctgagttcttgagaaaggcattctagggtcaagttgacaaagggcctatctacttttcaaaacaatttacatacatttctaagagagcagaaagtacttgcagttataaatttccaaaataaacactctaaggaaaaggaggagagtgatgttatcttcccttacttttaagagggagaagctaagactctttagtctgtatttgtctaagatgagtcaattccctttaaggaacatttttagaaacctcacataaaaatttccctttggccaggcacggcggctcacatctgtaatcccagccctttgggattatatatttcaagacatcatgtcatacatgataaatatatacaattttgtytgcgaattttaaaaaataaattttttaatgtgatggagagaatgttttcctagaaatgaacttgttttaatctactgtgtgggattagctgacccagtaagaggccattcttactgctgtgctacataggagtcacttctattgacattagtaaccagtgatcgtcccatttacaatagtgtagggtcagaaagatgtgatacattttctcacccatcataagggtcac

SEQ ID NO: 498843 - DNA, 559 bp, Homo sapiens
tgtaatagtgacaactgttttgcccaaaatgtggtatcgtgttggcaggggaggcagcagttggtgaggaaataggaagtataatagataggagaaccatgtcctcatatgatatgtcaggatgtcagtagattatgtcagaaatcgataagtcaagaaatacccgtgtaaactgtaaggcagaaagtaaggaaaaaagctagagaagctgaagttttctcttagtaaataagtaatactgtttgatttttaaattttttaaatttttattttttgagacagagtcttactcattctgttgcmtaggctggagtgcagcatcatgatctcagctcactgcaacctccgcctcctgggttcaaatgattctcctgcctcagcctcctgagtagctgggattacaggggtgtgcctccatgcctagctacttttgtattttttgtagagttggggtttcaccacattggccaggcttgtcttgaattcctgacctcaagtgatctgcccgcctcagcctcccaaagtgctgggatttacaggccatgagccaccacgccca

SEQ ID NO: 498844 - DNA, 640 bp, Homo sapiens
cttgaaattgtgaatttcctggacctgaatttccctttcacatttgggaaagaaaaattaattctactggatgtttcagtgcactacgtaggccatgaggtcttctctaaaagtttgttttggtagctactgaagggctcatttcttccctgcagcacaacaaactttttatctgtaaagactcatattatgtggccatctcattgagtgttttagcagaagttgattgtatatatctgctggatcctatgctgcctccagaacatacaaggatgaaaggacacattgccctaagggggaccacagcccagtagggaggacagacgcaatgtgaagagttttctaatacctgagccgaaacaaccacctagagtacgaactakcagactatggcatgtgggctggccacctgtttttgtatggcttgttttgttgtaatatagctatgcatactcctttacatattctcaatggcttacatattgtacaatgtgtagttgtgatagagattatatggcccacaagcttaaagtatttacctggtccttgaacttaaaaaattgccatcttctagcttagaaggagcatcaagaaagtgtatggttggtcaccaaagaataggatagtggaggacatcctg

SEQ ID NO: 498845 - DNA, 640 bp, Homo sapiens
gctgaagtggtagcagcttggtgtttgccttatttgsacagttggctggctgtgagtggttgaaacatagtttgtgtcattggctgagcccaagccatgtgttaaaagagtagattacagactgtttacatatccagttaggttacagttctctatttacagagaaacctgtaggccaaacttacaaggaagcagctttagagtaaacgtaacattatatgaaattcttaattatgctactgatatttaatatttttaaaaagtaaatatttgaatgtattcagatttcaccactttttctgttaatgtcctttatctgttgcaggatccaatcccagttcccacattgcatttagttgtactgcctccttagcctcctctgacttatgatagtttttccatctttccttatttttcatgaccttgagagttttgagacatattttggtatgcattttgtagtatgtcccttaaatgaggtatgtctgatgctttcctcatagaacctagactcttaaattctagaataccacagtttttttctcattatctcacttagtttctcagtagttagaagttaaagaaataaaaatatttttccccaaaatatattcctttgatatatttttaaatgaccaga

SEQ ID NO: 498846 - DNA, 640 bp, Homo sapiens
gctgaagtggtagcagcttggtgtttgccttatttgcacagttggctggctgtgagtggttgaaacatagyttgtgtcattggctgagcccaagccatgtgttaaaagagtagattacagactgtttacatatccagttaggttacagttctctatttacagagaaacctgtaggccaaacttacaaggaagcagctttagagtaaacgtaacattatatgaaattcttaattatgctactgatatttaatatttttaaaaagtaaatatttgaatgtattcagatttcaccactttttctgttaatgtcctttatctgttgcaggatccaatcccagttcccacattgcatttagttgtactgcctccttagcctcctctgacttatgatagtttttccatctttccttatttttcatgaccttgagagttttgagacatattttggtatgcattttgtagtatgtcccttaaatgaggtatgtctgatgctttcctcatagaacctagactcttaaattctagaataccacagtttttttctcattatctcacttagtttctcagtagttagaagttaaagaaataaaaatatttttccccaaaatatattcctttgatatatttttaaatgaccaga

SEQ ID NO: 498847 - DNA, 640 bp, Homo sapiens
gctgaagtggtagcagcttggtgtttgccttatttgcacagttggctggctgtgagtggttgaaacatagtttstgtcattggctgagcccaagccatgtgttaaaagagtagattacagactgtttacatatccagttaggttacagttctctatttacagagaaacctgtaggccaaacttacaaggaagcagctttagagtaaacgtaacattatatgaaattcttaattatgctactgatatttaatatttttaaaaagtaaatatttgaatgtattcagatttcaccactttttctgttaatgtcctttatctgttgcaggatccaatcccagttcccacattgcatttagttgtactgcctccttagcctcctctgacttatgatagtttttccatctttccttatttttcatgaccttgagagttttgagacatattttggtatgcattttgtagtatgtcccttaaatgaggtatgtctgatgctttcctcatagaacctagactcttaaattctagaataccacagtttttttctcattatctcacttagtttctcagtagttagaagttaaagaaataaaaatatttttccccaaaatatattcctttgatatatttttaaatgaccaga

SEQ ID NO: 498848 - DNA, 640 bp, Homo sapiens
gctgaagtggtagcagcttggtgtttgccttatttgcacagttggctggctgtgagtggttgaaacatagtttgtgtcattggctgagmccaagccatgtgttaaaagagtagattacagactgtttacatatccagttaggttacagttctctatttacagagaaacctgtaggccaaacttacaaggaagcagctttagagtaaacgtaacattatatgaaattcttaattatgctactgatatttaatatttttaaaaagtaaatatttgaatgtattcagatttcaccactttttctgttaatgtcctttatctgttgcaggatccaatcccagttcccacattgcatttagttgtactgcctccttagcctcctctgacttatgatagtttttccatctttccttatttttcatgaccttgagagttttgagacatattttggtatgcattttgtagtatgtcccttaaatgaggtatgtctgatgctttcctcatagaacctagactcttaaattctagaataccacagtttttttctcattatctcacttagtttctcagtagttagaagttaaagaaataaaaatatttttccccaaaatatattcctttgatatatttttaaatgaccaga

SEQ ID NO: 498849 - DNA, 625 bp, Homo sapiens
tctctcctccaccctcccaggttctgcaggtgaggcactggaaagtaaactgacaaaaacyggttaacaagagaaaaagaaacagaattgattaccatgtagcattcaaacatatgggaaaaagtcagtgaggagtaactcagagaggtggttagaatctgggggtatacagcattttaacaaagaacaataaatttgtagagaagtaacaagacaaaacagaaagtcttttagaggcagcaaactgtgagaaggcagacacatggaaggaaactaatacagtaaatgataagagttattttaataagttttgttacataaacttctctctctgtggtatctctaggttgataagaatctattgttgttcccagtgattaaaggtttaagagttgctttcctcttcctggtatagaagagaggtacacacacatggaatttatgtcttgttttttaggcaaataaaggcataaagggcagagagttttttggtgcctgctatttttttaattgccttcagctaaaaaatctttatgtaaaataacctattttggagtggcatattctgatcctctacaatattaatatatttattacattcatgtattaattatattaacattac

SEQ ID NO: 498850 - DNA, 625 bp, Homo sapiens
tctctcctccaccctcccaggttctgcaggtgaggcactggaaagtaaactgacaaaaaccggttaacaagagaaaaagaaacagaattgattaccatgtagcattcaaacatatgggaaaaagtcagtgaggagtaactcagagaggtggttaraatctgggggtatacagcattttaacaaagaacaataaatttgtagagaagtaacaagacaaaacagaaagtcttttagaggcagcaaactgtgagaaggcagacacatggaaggaaactaatacagtaaatgataagagttattttaataagttttgttacataaacttctctctctgtggtatctctaggttgataagaatctattgttgttcccagtgattaaaggtttaagagttgctttcctcttcctggtatagaagagaggtacacacacatggaatttatgtcttgttttttaggcaaataaaggcataaagggcagagagttttttggtgcctgctatttttttaattgccttcagctaaaaaatctttatgtaaaataacctattttggagtggcatattctgatcctctacaatattaatatatttattacattcatgtattaattatattaacattac

SEQ ID NO: 498851 - DNA, 609 bp, Homo sapiens
tctagtgaatgaaattccagagagttatagactggaatatgtgtttattctgaaaaggcacattgtggctttataaatcaaagtgagaactcatcagaaattgcacagtgaaggataaggagtgggtgaagatgaaagtgcaagatgcacctactccctgttttcaactgtgcactataaataaacgtcctccccaaatcaccagtgaccaacaactgtcttccttcttctgactacttcactcagtccctttcacacatggccctgtgagagcttatggatttataatttgatcaaggttagaaaygcattgtcactcctaactaggtattgcagagagatatttagaagtgttgtttataggaaagagattgcaaaatattttaaagagctgtgcgtctcagtgttcattagtaccaatttgttggcttcccattggcacccctctgcagccttcttctactgagtcagttactcctctctattctttgtcttccaaaaaatgtattaaaatctctaacttgctgaggtctcttctatttttatcttccaaaaatacactgaaatctttaatttgctgagatctcctcttgcactatctttttttcc

SEQ ID NO: 498852 - DNA, 627 bp, Homo sapiens
cctgtagtcccagttacttgggacgctgaggcaggagaatggcgtgaacccgggaggggagcttgcagtgagctgagatcgcrccactgcactccagcctgcgtgacagagcgagactccgtctcaaaaaaaaaaaaaaaaaaattattcaatgccaattatatgctgtatgaggtgatgaacatctagcaattccaaagttatttccttacctgtaaaatggagatataacaatatctactacatgattactctattaaatgagaaaatacgcataccagttaggtgcttaacacaattgctcagtaaactgtgtatgcatttatacgtgtaccgtgctttggtagcaaatgtttaataactagctggggagaggggtatctgatttataacatttgctaatttacatggtttaaattctcctattattccaagctcccaatataattttgttaagcaggttgctaggaagacatgggcatattcagagcactattctatgtatctagcattaggaaaggagaaaacaaaagctagagtgagtgagagagaaacttcagggcttgagttttctaggaaatgagatgtgagagatacaatctctcaaatacagggcaatataaattc

SEQ ID NO: 498853 - DNA, 479 bp, Homo sapiens
tggcgcgcaggtggggaaggggygtggggacgtggggagtgggaggctggacagcgcttgctctcggcggaaacgctgggaagccggcgccaagtcctttcccacactactttgatctaacagcgcaggaattcaagaattgccctttcccttttctgcccacaacctctgctccctgggggcgaagttctgtggtgctaggcggagatagtggtcaaggctgggaggaagggaggggtctgacccgggcccaagggcgaggggtggcggtccaagccggcgagaccccacttagggcgcaggctcctggcgctcctacctcgggaagccgctggggtggagagagacggggcacgggccagaatccagcagcggaaggaggggagagtcttcgaatccatctctcggtgggatcttgagaggattcgcgggggggacggtaagataaatctgaggagctggaagaagccgtagatcgg

SEQ ID NO: 498854 - DNA, 479 bp, Homo sapiens
tggcgcgcaggtggggaaggggtgtggggacgtggggagtgggaggctggacagcgcttgctctcggcggaaacgctgggaagccggcgccaagtcctttcccacactactttgatctaacagcgcaggaattcaagaattgccctttcccttttctgyccacaacctctgctccctgggggcgaagttctgtggtgctaggcggagatagtggtcaaggctgggaggaagggaggggtctgacccgggcccaagggcgaggggtggcggtccaagccggcgagaccccacttagggcgcaggctcctggcgctcctacctcgggaagccgctggggtggagagagacggggcacgggccagaatccagcagcggaaggaggggagagtcttcgaatccatctctcggtgggatcttgagaggattcgcgggggggacggtaagataaatctgaggagctggaagaagccgtagatcgg

SEQ ID NO: 498855 - DNA, 479 bp, Homo sapiens
tggcgcgcaggtggggaaggggtgtggggacgtggggagtgggaggctggacagcgcttgctctcggcggaaacgctgggaagccggcgccaagtcctttcccacactactttgatctaacagcgcaggaattcaagaattgccctttcccttttctgcccacaacctctgctccctgggggcgaagttctgtggtgctaggcggagatagtggtcaaggctgggaggaagggaggggtctgacccgggcccaagggcgaggggtggcggtccaagccggcgagaccccacttagggcgcaggctcctggcgctcctacctcgggaagccgctggggtggaragagacggggcacgggccagaatccagcagcggaaggaggggagagtcttcgaatccatctctcggtgggatcttgagaggattcgcgggggggacggtaagataaatctgaggagctggaagaagccgtagatcgg

SEQ ID NO: 498856 - DNA, 522 bp, Homo sapiens
ggggagaggatctggaaaaataactaatgsgtactaggcttaatacctgtgtgacaaaataatctgtacaacacactcgcatgacatgagtttataacaaacaaagaaactagcggagtgggagtctatagagtgaaaatctgaagtctaagcacatattataaaatctatcgagaggaattgatctgaatattttaaaagcctaatgaaataaaatagaaaacattagagcaaaaaaaaaaaaacagccactacaatgttagttaaaccatgtcagattatagaaaactataaaactttattgaaggacgtaaaaatatgaacaatgaaatattctgattttttgagggaagtttattgcaattagaatcacaataagttttaatattttgtggtttaaaacacataaaacaaatttctcacggaagaatagatgtctaagaatagccaagtgaacactgaaaagaagattactaagggaggatttgatttagcaaatagcccatattaaaaacagatcat

SEQ ID NO: 498857 - DNA, 639 bp, Homo sapiens
ttttcttttttttttttttggagagatgtggggtgggaggaaggtgtctcactttttttgcccagtctggtctcaaactcctgcgctcagatgattatcctgccctggcctcccaaagtattgggattataggcrtgaaccctctcgccagaccgtgaagttattttgaataacaactcttccaaaaaatgtcttgctcctagtctgttttcttccttagcacttattactatgcagcatattgtgtctttattgatttagtattttctctctcatgggaagtaaatttacaaggacagatttttgtgttttggcattgtggttgccatcatacctagaacaagtcctggcacatcttagatactggtgagttggtaaatattagttaatagccacaatttccaattcaccaaaccgaaacatcagtattcctcattactcacgatcttatttcaccttttaaaaaagtatagaacagttcaaaagtgaccacatggatttgatctattatttaacatcatgacatgtaaactacaagtctcttttatatttagagaaaagaggaaaacactcatgaaatttaagtattcttcaactccatccccagacctgttatcgactttctcaggtcaagtctat

SEQ ID NO: 498858 - DNA, 639 bp, Homo sapiens
ttttcttttttttttttttggagagatgtggggtgggaggaaggtgtctcactttttttgcccagtctggtctcaaactcctgcgctcagatgattatcctgccctggcctcccaaagtattgggattataggcgtgaaccctctcgccagaccgtgaagttattttgaataacaactcttccaaaaaatgtcttgctcctagtctgttttcttccttagcacttattactatgcagcatattgtgtctttattgatttagtattttctctctcatgggaagtaaatttacaaggacagatttttgtgttttggcattgtggttgccatcatacctagaacaagtcctggcacatcttagatactggtgagttggtaaatattagttaatagccacaatttccaattcaccaaaccgaaacatcagtattcctcattactcacgmtcttatttcaccttttaaaaaagtatagaacagttcaaaagtgaccacatggatttgatctattatttaacatcatgacatgtaaactacaagtctcttttatatttagagaaaagaggaaaacactcatgaaatttaagtattcttcaactccatccccagacctgttatcgactttctcaggtcaagtctat

SEQ ID NO: 498859 - DNA, 496 bp, Homo sapiens
agtggcgcgggataatgcgggtcttcttgttgtcgcgggcggcgttgcccgccagctccaggatctcggcagtcaggtactccagcaccgccgccaggtacaccggcgcgccggccccgacccgctcagcatagttgcccttgcggagcagtcggtgcactcggcccacggggaactggagaccggcacgagaagagcgggtcttggcyttggcgcgagctttgcctccctgcttgccgcgtcccgacatgacgaagaaacgataaatggaggaactgagaacagccgagagaagttcaccagagctccactacttatagtcaatactgggcgcgaaaataaagctgtgccattggctcaaattacagttttatttcaaccaatggaatcgctgttatgaaacatgcttctttggattggacaaacgtgtatatgacgtcatctagaatcgccaccagtcctacacactattttattaatcacctcatttgcataa

SEQ ID NO: 498860 - DNA, 630 bp, Homo sapiens [sequence omitted]

SEQ ID NO: 498861 - DNA, 607 bp, Homo sapiens
caccaaggcggctcggaagagcgctccggccaccggcggtgtcaagaagccccatcgctatcggcctggtacagtggctctccgcgagattcgccgctaccagaagtccaccgagctgctgatcagaaagctgccttttcagcgtctggtgcgtgagatcgcgcaggacttcaagaccgayttgcgcttccagagctccgcggtgatggcgctgcaagaggcatgcgaggcctacctggtggggctctttgaggacaccaacctgtgcgccatccacgccaagcgggtgactatcatgcccaaggacatccagctcgcacgtcgtatccgcggcgagagggcttgagtctcaaggactcactgattacatacccaaaggctcttttcagagccacccacatgcgcgctgaaaagatctgtttctctcaggaattcttcctggtacttgttttgcctgtagtagatagggcccatttccagacgttatacaatctgtttcgtaagactcagcctatccctttttgaatgctaattttgggagtcttaacatctaataatgtccggcatttttccgtaagcattgagtgtagccaaaagttccttcgtg

SEQ ID NO: 498862 - DNA, 487 bp, Homo sapiens
tttgatcctgaccactttctgaggtctcattgccatttgatcatgagatgagraagagagtgtgagagagacctctcacagtattcttcaccccaggaaagtaagtgtgaggcatgagaaagcaagttatcacctttgaaggtgttcccttgggaaagtgggagtggtggtgcgggctgcaaccacaaacagaaaatgtgggtggggagttgttttcattccaaggtgccaaattgttagcatttgacaaccatatgctccctttgggccctgcagttgtacctagaggcatatggtgggacatttttttaaagcaaatatatattctctgttttcatggagccaaaaacaacacaaaatatgatcagaatatttctagaaatgcaactaaacaagcttactttagataaggcaaacagtggtgactcagggcacggtttagttccttctggctcccttcacagagatagaaggaggcagacagata

SEQ ID NO: 498863 - DNA, 487 bp, Homo sapiens
tttgatcctgaccactttctgaggtctcattgccatttgatcatgagatgagaaagagagtgtgagagagacctctcacagtattcttcaccccaggaaagtaagtgtgaggcatgagaaagcaagttatcacctttgaaggtgttcccttgggraagtgggagtggtggtgcgggctgcaaccacaaacagaaaatgtgggtggggagttgttttcattccaaggtgccaaattgttagcatttgacaaccatatgctccctttgggccctgcagttgtacctagaggcatatggtgggacatttttttaaagcaaatatatattctctgttttcatggagccaaaaacaacacaaaatatgatcagaatatttctagaaatgcaactaaacaagcttactttagataaggcaaacagtggtgactcagggcacggtttagttccttctggctcccttcacagagatagaaggaggcagacagata

SEQ ID NO: 498864 - DNA, 580 bp, Homo sapiens
atgaatgtacttatgcatatatctggtttctttgaattttaatttttgtgtgataacggcccatgtctgggtttactgggccaaagaagatgagttttcataggccttgataaataytgacaaatagcattactgtttttgtaaccattggcaatattaatatattccactttggccactctttagcagcattaaattggcttatatgatttgctaatttatgtagtatagagtaataagtcattattttatgtatatctgataatatttaaactactcctttaattttgattgtcaaagtacttggagaaaatattttggttgccatttcaaagcattaagatagggtggcaagaagttgtataggatatgcaggcatgaaaaagaatggaatcatgtcctttgtagcaacatagatggagctggagtccataatcctaaacaaattaacacaggaacagaaaaccaaataccatgtgttctcacttataagtgggagctaaacactgagcacacatggacataaacatggcaacaatagacactgtagacctctagatggggagagaagaaaggggag

SEQ ID NO: 498865 - DNA, 623 bp, Homo sapiens
caacaatagacactgtagacctctagatggggagagaagaaaggggarcatgagtttaaaaactaactattgggcactatgctcactaccttggtgcaatatgcccatgtaacaaacctgcacatataccccctgtatctaaaataaaagttgaaaaatacaaaaaataaagtttaaaaaaagtgatgtagaaaataagtatcttttaaaaatcttcctgtataagtttgtgttgacaaaatatccaagcaagtgcagtatacagttctacaaataggagatatgtgtgttactgtgttgtgctatgtgtatttgcatgcttgaaaggctactacatatatatgttattctatatatatcatatataatatggtaaacatagatataataatagactttacatataatattgtggaactttatataatcatatttctcctcatctaactatatagaaatccctttttgtgatccagatttgaatgtctttctcttgttctccccacagtgtccttctagagcacatttttactccatcttcttggcatttctctgctacgcctatttttttaattaattaattaatttatttatttatttatttacttgcttctctcatccct

SEQ ID NO: 498866 - DNA, 623 bp, Homo sapiens
caacaatagacactgtagacctctagatggggagagaagaaaggggagcatgagtttaaaaactaactattgggcactatgctcactaccttggtgcaatatgcccatgtaacaaacctgcacatataccccctgtatctaaaataaaagttgaaaaatacaaaaaataaagtttaaaaaaagtgatgtagaaaataagtatcttttaaaaatcttcctgtataagtttgtgttgacaaaatatccaagcaagtgcagtatacagttctacaaataggagatatgtgtgttactgtgttgtgctatgtgtatttgcatgcttgaaaggctactacatatatatgttattctatatatatcatatataatatggtaaacatagatataataatagactttacatataatattgtggaactttatataatcatatttctcctcatctaactatatagaaatccctttttgtgatccagatttgaatgtctttctcttgttctccccacagtgtccttctagagcacatttttactccatcttcttggcatttctctgctacgcctatttttttaattaattaattaattwatttatttatttatttacttgcttctctcatccct

SEQ ID NO: 498867 - DNA, 613 bp, Homo sapiens
tcagaacagttttgctttctgctgcaacagggcagcactgagttcaatgcaaagtcccccagtcactacgctgtccctccccgacgtgtacagattctcyctctgcaccacatgggtgttattggggaatgcggaggggcagcatcagcgtttcaagactgtttttcctgttttcaatgcttctttcagtgatatgaagttaaaaccaggtaacgtgattgctcacctgatttttggttcttatgaaggtgcttttctgtgtgcagataattgttaaaacttggtttcctgtgggtggtggggggagcaatcagtggaggcttctattcagccattttgttccacctcagtggccttggtttaaaataactacagagtttttattttctccacgtatgttgacatatttgtgattattataaaacaattacctgaactaataagatattaagatctttcaatgtaagaaaaatgatagagcatcatagttaatcatatgttttcattctccttttcatataaaatacaattaaactctgtaaatatcttatatggcaaagggtatggctctttttcctccagcttcctctaatgaaaaagctgatttctgaaa

SEQ ID NO: 498868 - DNA, 613 bp, Homo sapiens
tcagaacagttttgctttctgctgcaacagggcagcactgagttcaatgcaaagtcccccagtcactacgctgtccctccccgacgtgtacagattctccctctgcaccacatgggtgttattggggaatgcggaggggcagcatcagcgtttcaagactgtttttcctgttttcaatgcttctttcagtgatatgaagttaaaaccaggtaacgtgattgctcacctgatttttggttcttatgaaggtgmttttctgtgtgcagataattgttaaaacttggtttcctgtgggtggtggggggagcaatcagtggaggcttctattcagccattttgttccacctcagtggccttggtttaaaataactacagagtttttattttctccacgtatgttgacatatttgtgattattataaaacaattacctgaactaataagatattaagatctttcaatgtaagaaaaatgatagagcatcatagttaatcatatgttttcattctccttttcatataaaatacaattaaactctgtaaatatcttatatggcaaagggtatggctctttttcctccagcttcctctaatgaaaaagctgatttctgaaa

SEQ ID NO: 498869 - DNA, 589 bp, Homo sapiens
ttaaactgttttatattttccaaaagaaatgtataagctcaaaggaatctttcattattttgtggaaaaatcccccaatttttaaagatgcaagcagccagtgaagtcactatatgaactgtatagactcgtcttgggtaaattcgcttcaagatgtgggggaagaatttggctatatgtcatggttgtgctgaattcgagccttgtgggaagtaccctaaactttggtcagtcagattcaccagagttacgttaatattgtataatattacattttaatattgtattgaggatgtttaccatttactgctttaagctgtaaactgtggagaacatggcctgtggctttttctgcctggtctgatttcccttagtaatatagttttgactcaagattatgtctaattagtttaactcattcagataattcacctagaaaagtaacrtcttgaatttgagggaaaaatagttttgatgtcagggttatccaaacaattgattactcttaacttcatgtgccgtgaatttgtccatctttcaagttactttaaactatagaatatttgagaaaatactcttgtatatacta

SEQ ID NO: 498870 - DNA, 562 bp, Homo sapiens
agtccaatttcagatcgaactcgaaatacgtttaaattacagagtggtactgagcaaacatcctcaaaggcactaactgtcccatttcctgaaaaaggaacaatttatgattatcaatttgtcactgaggtaagagttctgaagcaagatttgcagctgccagcctggcagagtcccctctctgacacatagcatataatggccctgtggccaccttcatcatcactatttaccataagagacagcatagaatagaggaagatgcactggcttgaagtcagacacctctaggtttgagtcctagtaaagtcactttctttctgtatagccatggactagttgatttctctgaacatagttctttccartgatactatgagataataatatctaatggaccagttgcactcattaaatagaatcacaccaggcacatactgtttaaggacagctgttagaagttcatggtgcatgttagtatactaggcactaagaagtcctgtaggaatccagctggtataatcttaattcagtgcttcccaaacagatttgaaactaaaac

SEQ ID NO: 498871 - DNA, 585 bp, Homo sapiens
tctcaaaaaaaaaaaaaaaaaaaaaagatccaggtgtggtggcaggcgcctgtaatctcagctacttgggatgctgaggcaggagaattgcttgaaccctgcagaagttgcagtaagctaatcacaccactgcactccagcctgggcaacagagtgaggctctgtctcaaacaaaaacaaaaacaaaaccaaacacaaacaaacaaaaaaacctctcttgttcagggcattgttacaatttattggattcattctgataagggagaaagacctaagcatggagatacagagtagaatattacagtgtgggagagtcacacagacaggytgggagaactctcaggactcagatctcctggtgcagggtaggagttgcagtgacaggttgatttctcccatctcttccgacatgggtttccccatgtgccactccctgtagattagtagtggggtcacgaatatactcaaaccacactagcatgctgggacaatgtgtgtctttgtgttctgtaattgatctgagtctcctttatgagccccctctctcctgaatacttcaagttgccagttagcaagatatcagtc

SEQ ID NO: 498872 - DNA, 569 bp, Homo sapiens
gctctgcaaatggatgtcatgtctgtggtgtgtggctagccagagttaaagtaaaaccattttgctagtttcatattggcgtttggtttattgaagtgtcagaaggtttataagctcttcaactcaagttttgattgttttatccaactactgtcacttcttatcagtattaaaggcaaaaatcaaagaaaaggcccaagggaggagcacttccaaatgttgctttttgctgtcacagttgtagcactgatactctcttgacaggccctttttcttgacaccacagagtaattagggggatttttataataggcttcaccaattagttaatacattttctgattaaacactcctttatctcagccttagagaaactgcytaaatgagtaagagctggagattggacctatagtcagggcgagaagggagacagcattcggagtgcaagtgtcaccagggctttgatctacccaagaccttgagtcaggaatacttgtcagtgcaggcaattgggacattagggcccagcacaatattcagacctcacagagtaattttgcaatcaatag

SEQ ID NO: 498873 - DNA, 617 bp, Homo sapiens
gaagtaataaatcccagaaaaaatgcctgaatactgaacagaaggtccacaattgtataaayatcctaaccatgattatgattatttttctatagtatatggggacatgaaaaatcaaaatatctaaattattaattttggctgctttttccaaccaatctcttaattagaactagtagctaacagtctgatttgagaattactttcctctaactaatttatgttataaagggaacaacatcagtggaatgattaaatactgaagaaacaaaagacctagagagcccatagatgacaagctctgaattatcaagattatctttctaattgcagcccaattataacagattggaatgttgctatgtcaaaaagagacttataacccagatatctcaataccaaatagatataaagaacacacactctccacaaggaagatgtttattaatacaggtttacagcttgtggaaaacgtcttggtaaccagcattagtctataggcaatagctttctagaaggaattcctagaaggaataggaattcaaaaaataattccagactgaaaaggacactaaatgtgatgaagaggtcattgggcagagatcaaaggaggtctg

SEQ ID NO: 498874 - DNA, 617 bp, Homo sapiens
gaagtaataaatcccagaaaaaatgcctgaatactgaacagaaggtccacaattgtataaatatcctaaccatgattatgattatttttctatagtatatggggacatgaaaaatcaaaatatctaaattattaattttggctgctttttccaaccaatctcttaattagaactagtagctaacagtctgatttgagaattactttcctctaactaatttatgttataaagggaacaacatcagtggaatgattaaatactgaagaaacaaaagacctagagagcccatagatgacaagctctgaattatcaagattatctttctaattgcagcccaattataacagattggaatgttgctatgtcaaaaagagacttataacccagatatctcaataccaaatagatataaagaacacacactctccacaaggaagatgtttattaatacaggtttmcagcttgtggaaaacgtcttggtaaccagcattagtctataggcaatagctttctagaaggaattcctagaaggaataggaattcaaaaaataattccagactgaaaaggacactaaatgtgatgaagaggtcattgggcagagatcaaaggaggtctg

SEQ ID NO: 498875 - DNA, 617 bp, Homo sapiens
gaagtaataaatcccagaaaaaatgcctgaatactgaacagaaggtccacaattgtataaatatcctaaccatgattatgattatttttctatagtatatggggacatgaaaaatcaaaatatctaaattattaattttggctgctttttccaaccaatctcttaattagaactagtagctaacagtctgatttgagaattactttcctctaactaatttatgttataaagggaacaacatcagtggaatgattaaatactgaagaaacaaaagacctagagagcccatagatgacaagctctgaattatcaagattatctttctaattgcagcccaattataacagattggaatgttgctatgtcaaaaagagacttataacccagatatctcaataccaaatagatataaagaacacacactctccacaaggaagatgtttattaatacaggtttacagcttgtggaaaacgtcttggtaaccagcattagtctataggcaatagctttctagaaggaattcctagaaggaataggaattcaaaaaataattccagactgaaaaggacactaaatgtgatgaagaggtcattkggcagagatcaaaggaggtctg

SEQ ID NO: 498876 - DNA, 496 bp, Homo sapiens
ctaagaaaaaactatataagtggctgtgaccaaaaattaaaagggaccttwatttgaataagatgctcagatataacctcagtatctaatgctaaatatgtaatactgatttcttgattaaatgatgaatggaagaaacacatctaacttttatctcacaatcatattaaaatgaatatctaaatatccaactagagattattctgtgttcatattagaaaacatggaagaataacagtaaaatacagaaacttcaagacaattttctacataaggaggagtcctacttaacaatgatttgcacagatcattgcttgtctgcacgcaaagaagcaccttgcccagaaaataagggaagagattctaaaagaattcactagtatcaatgggttgaaggccaaattcattactttaacactaagacagcaatgtgtgatccttctagagtcctgtgaggaccctattattgtttgccttaagtgcctagatcccatag

SEQ ID NO: 498877 - DNA, 496 bp, Homo sapiens
ctaagaaaaaactatataagtggctgtgaccaaaaattaaaagggaccttamtttgaataagatgctcagatataacctcagtatctaatgctaaatatgtaatactgatttcttgattaaatgatgaatggaagaaacacatctaacttttatctcacaatcatattaaaatgaatatctaaatatccaactagagattattctgtgttcatattagaaaacatggaagaataacagtaaaatacagaaacttcaagacaattttctacataaggaggagtcctacttaacaatgatttgcacagatcattgcttgtctgcacgcaaagaagcaccttgcccagaaaataagggaagagattctaaaagaattcactagtatcaatgggttgaaggccaaattcattactttaacactaagacagcaatgtgtgatccttctagagtcctgtgaggaccctattattgtttgccttaagtgcctagatcccatag

SEQ ID NO: 498878 - DNA, 606 bp, Homo sapiens
atacagtgggctcaaatcacaaagggcagagtcagagaaggaggtgtgaggagggagacagaagtcagagtgatgtggctataagccaaggaacgcaggtagcctttagaagccgaaaaaaaaaaaaaaaaagaaattaaatctcccttagagtatccagaaggaacacagctatgctaacttgttaattttaacccaatatatcctgttttagacttttgaactctgggaatgtaaaatgataaatttgtattgttttaagctatgaagtttgtggtaatgtataacaacagtaaagaaactaataccacttyctagttggtaaagacaatattttctatctctctgtaacaattccatctgaaaactattttttccttcttgaaaccatcttcctcctttggcttcctagtttcctcattattgagaatttttctttttgcttaggttaggccttttcagtttcctgtaatgaatttcttcctctttctgtttcaaaattctgaaatcactggaagttttttctttttcttcaattcttagactacttaccttatctcataaggagatcttaaagtttcatccatttctatgactttatttgcc

SEQ ID NO: 498879 - DNA, 570 bp, Homo sapiens
aagtaaaaaaaaatattggaactgaaatcaatagaacataaaaaggaattggatgtttgaaagaccaataaaattaatacatctataaaaaactgatataaataaaagacacaaattacaaatatcataaatgagaaaagtgatatctgtactgaatttacaggtataaagaaaattaagaacatattgtgaattaatttatgacaaaaattcaacaacttagcatgtacacattcacttaatatacaaactacttagttcaatcaagaagaaataaattatttaaatagtctcatgtctgttaaaaaaaaaattgagtctgtcgttagctttcccataaagaaaactccagggctaggtagattygctgttaaattctaccaagcatttgaggattaaactctgacttttaatccttgctcaaatttttttccaaagtgcctggggaaagttatgccttccaagacataaaatcttattaaacaggtctctgtgatccagtatattctgactcactttccagactgattctgatatggcatcacataacagataacatacctacttatc

SEQ ID NO: 498880 - DNA, 570 bp, Homo sapiens
aagtaaaaaaaaatattggaactgaaatcaatagaacataaaaaggaattggatgtttgaaagaccaataaaattaatacatctataaaaaactgatataaataaaagacacaaattacaaatatcataaatgagaaaagtgatatctgtactgaatttacaggtataaagaaaattaagaacatattgtgaattaatttatgacaaaaattcaacaacttagcatgtacacattcacttaatatacaaactacttagttcaatcaagaagaaataaattatttaaatagtctcatgtctgttaaaaaaaaaattgagtctgtcgttagctttcccataaagaaaactccagggctaggtagatttgctgttaaattctaccaagcatttgagrattaaactctgacttttaatccttgctcaaatttttttccaaagtgcctggggaaagttatgccttccaagacataaaatcttattaaacaggtctctgtgatccagtatattctgactcactttccagactgattctgatatggcatcacataacagataacatacctacttatc

SEQ ID NO: 498881 - DNA, 586 bp, Homo sapiens
aatttgaacatacattttgtatgggatttgactaatacattagcatccgtagacacaaggtctatttacttttgcttgagccactagtaaatggcatatcattatataatttactaaaatatatttatactttgtggcatgaaaaattagtaaagtataaaaagaaaaagaaatagacgaagaatttacattatttgggccaggcatgttggctcatgcctgtaattccagcactttgggaggccgaggcaggcagatcacttgaggtcaggagttggagatgagactggccagcatggtgaaatcccatctctactaaaaatacaaaaatcagctaggtgtggcatcacttgcatgtagtcccagttatgcaagagattgaggcatgagaatctcttgaactcaggaggcggaggctgcagtgagctgagatcgcaccaatacattccagtcggggcagcagagtgagactctgtctcaaaaaaaaaaaaaaaaagaatttacattatttggacaattatcctgctatttccaccaggactccctaasttagtaaacattatattgttgatgatgtaatttaaaa

SEQ ID NO: 498882 - DNA, 547 bp, Homo sapiens
ataaaaaacttgaggtttggcagtttatttttaacagatrtttttaagatattcatatacaaagaactgcatatattgaatgcgtatactttgttgagtttgcacatatgcaaacaccgatgataccatcaccacagtcaaggtaatagacacactcaacaccggccaaaggttttgtgtacctttgttttttgtttttgtttatgtttttgtggtaagaatttttttttattttagttgacaaataattagacatattcatggggtacatagtgatgtttcaatacatatgtacagtaatcagataagggtaatgagctctcaacatgagatttatcctcaaattttgaagcgcataatatcatgtgattatcttcaggtactacgatgtacagcacctctctataacttttcttctagcatagctaaaactttttacccactgagcaaccaactgccttttccccaacctcccctttaacctgttgtattatgtgtttctatgagtttgaccattatagataactcatataagtgaaatcatgtg

SEQ ID NO: 498883 - DNA, 646 bp, Homo sapiens
actgatgtttgggtccttcaaaaccaggcttgggtaattagcatgcattttcaaccatgggtagaactttctactcaggaaaaatagtgtgataagcctgaattataaaatgtgtatttaaatgcagttttattacttttatgtacattatacactactgagtgagatataaatctgtattactattagagggtggaaaaatgaaaaaatacaatatcacataatayattataattataaaaaccacgtagcatatggaaattaattgctaggcccagagctgaaatcatgtgaagacattttaaaattattgagtccttgttttgagatgaaattgcttttaccttaaattttccatgttcctgattagtatcctggccatttccagacatttttttgagatacataaatttcagtcaaaatcacatatgccagggacatgacagcaacatctgaacgactggagttcaaggtattgttaaaacaatattccaaaaatagagcgtgcgaccgaggcaattatatgtggagagataatctgtaacacagtagcagaatggatggaattaaaacaggaaggcacattgaaaatgtatacctattaagatgctagaacggttaatagtatttgctattttttaaaaaa

SEQ ID NO: 498884 - DNA, 616 bp, Homo sapiens
accatcttctattttgggattttcttacatcattgtccacctccccagagaggagataggaacttgctttccttagctctcttgcactgaagcacagccctatgataaatattctgcagttagctgtcttgtggaggctgtggtgtagaagatagtcctttgagagagcaggccccaggtgggacccaccttttgtggaggaggcagaggaggcaagtcgccrttaagggagtggcagtggtggaggttctgaggtccaatgaccagcatcagtcgtgagagttatgttgaaagccagcagcagtggatagtatggactttctaggggtcttcaagttgcccaataatcttcaataaatgctgttttttgaccaacgtagctgaagtgggttctgctgttcataattaagctgagaggcttaggattctgcatagtctctgtcatctaagtcttctcgtatgtccccattctgatgccagtgcacacttccttcttggtaaagcccccactctcacacaaaatccctggagaggttgtgaattcaactagccttgccatttgtcaaaccacaggttcaaactttgagcttgttcttagatgactcatccctgatgc

SEQ ID NO: 498885 - DNA, 605 bp, Homo sapiens
tgccaaatgacatagatttatagcaaatcaatttcacgacctccagggttgaagtgctggtggttttttttttttctttttttacttttggtcatgatttgtgtgggtctccatctccagtgaaaacactaactggatttatgaatgctggagcccgggtggaagggtttcctctttcaccttccacaacctgcccttcttcctcaccaaatcctgcaaaagcagctccgtaggattttgaaactagtttatgttctgcaatgctcctgtccatgggcaaatccttccccaacccagtctgggcagcgtgtccccagggttatctgagccctcagggccccaatctgctctgctcatgggcgctcagacgttggcccctgctcggaatagccttatcagaaacaccaggaaatgaaagtccctccgcatttcagttatgctccccatatcccccaaccgccaagactactcttccttcatatatatatatatatatgaagttaatttttgaaaaattgaaaaacacaaaaaaggtagttttatagctataacacaattttttttwaaaaaaagcttgttcactgggttaaaaactggattaccca

SEQ ID NO: 498886 - DNA, 500 bp, Homo sapiens
ctggagcagaagcaagagagagcgggtggaaggtgatacgctcatttaaacaaccagatctcactcactatcacgagaacagcaaggggaaaatctaccccatgatccaataatctcccaccaggccccacctccaacactggggattataattcgacatgagatttgggtggggacatagagccaaatggtatcactagccatgtgtcttatctgatcaggcaaattatacaggtaaaaggcattgcagacacaatgctagattgtcagtatcatttaatacaattaagaccaaatgacctcaygcttggtcttcaatttgctcctgtggcttagtggaagaagcacggccttctaccttgagcattacacttatgcttatttttgccagtttttctttaatgctgtcaccagtaaaatatgatcataaataaaacaagtaaaatgatgcatttctccaagaatcatcaaggcttcactgatgcaatgtttctgaaagc

SEQ ID NO: 498887 - DNA, 670 bp, Homo sapiens
ggatgcgatgggaagtgcaacctgaggacagggaggtgtccaagtcactgggcctcaaggactcactcctcagagtgcagccaggcattccagggccacaagcctttcacagagttagacacaccccttcctcacagtgtctgaggaagcacacaggtagggttagggctgtgcagccaggcacagccaggtggtcagagttttattttgtttcaaatcttctaaaagaactctgctcttctttgccacctttgggacgtttatgtgggctctgcctgaaagcaaagtagtgcacccccagggctccaagggtagaagagaagaggattctgtatttcagtctctgctgcttgacccctggtacatctttgccagatgcctactatgggcttctctgtcagggtgcaggcgacagcggagaggacgggagcagagccaggaaaccgcggtgctccagtaggaactggatgttcrgtctgctgttcctttcctttcattctgtccaccaagtcagcaacaccaggaggagaatcttctactccgagataatctgtttcttcttccaggaaatccccacagaggatggggaggtgtccagccaacaccacaggcagtgtctgtgcttcaggagggagagtggcttcatggctatgccctgcccactgtcaca

SEQ ID NO: 498888 - DNA, 628 bp, Homo sapiens
agtcactgggcctcaaggactcactcctcagagtgcagccaggcattccagggccacaagcctttcacagagttagacacaccccttcctcacagtgtctgaggaagcacacaggtagggttagggctgtgcagccaggcacagccaggtggtcagagttttattttgtttcaaatcttctaaaagaactctgctcttctttgccacctttgggacgtttatgtgggctctgcctgaaagcaaagtagtgcacccccagggctccaagggtagaagagaagaggattctgtatttcagtctctgctgcttgacccctggtacatctttgccagatgcctactatgggcttctctgtcagggtgcaggcgacagcggagaggacgggagcagagccaggaaaccgcggtgctccagtaggaactggatgttcggtctgctgttcctttcctttcattctgtccaccaagtcagcaacaccaggaggagaatcttctactcygagataatctgtttcttcttccaggaaatccccacagaggatggggaggtgtccagccaacaccacaggcagtgtctgtgcttcaggagggagagtggcttcatggctatgccctgcccactgtcaca

SEQ ID NO: 498889 - DNA, 628 bp, Homo sapiens
agtcactgggcctcaaggactcactcctcagagtgcagccaggcattccagggccacaagcctttcacagagttagacacaccccttcctcacagtgtctgaggaagcacacaggtagggttagggctgtgcagccaggcacagccaggtggtcagagttttattttgtttcaaatcttctaaaagaactctgctcttctttgccacctttgggacgtttatgtgggctctgcctgaaagcaaagtagtgcacccccagggctccaagggtagaagagaagaggattctgtatttcagtctctgctgcttgacccctggtacatctttgccagatgcctactatgggcttctctgtcagggtgcaggcgacagcggagaggacgggagcagagccaggaaaccgcggtgctccagtaggaactggatgttcggtctgctgttcctttcctttcattctgtccaccaagtcagcaacaccaggaggagaatcttctactccgagataatctgtttcttcttccaggaaatccccacagaggatggggaggtgtccagccaacrccacaggcagtgtctgtgcttcaggagggagagtggcttcatggctatgccctgcccactgtcaca

SEQ ID NO: 498890 - DNA, 573 bp, Homo sapiens
acaggcgcatgctaccccccctggctaattttttgtattttcagcagagacggggtttcgccgtattggtcgggctggtctcgaactcctgacatcaggtgatccactcacctcagactcccaacgtgctgggattacaggcgtaagccaccacacctggccatattaaagtgatattttattatttattttctgacttctttcactagtatataagatccatgaggtcagagactgtgtttgatttattactttatctccagtgccaagaacaccttakaaatgatggatacttaaaaattctttaggacttaattaattcatgcagcaattttctttattatcaggaaagatcactttgagtgatgcagtaaatatggccatttccaaaacactgacagtgtagattttccacctatttaattttaacgttgtagctgtccccattgcacccctagtttattcaacaactgttgactgagtgcctaccaaatgctcgccatgattctagatgccagggatgtagaaatgggaaaacaagtaaagatacatcctcaaactgtgtgtatgtat

SEQ ID NO: 498891 - DNA, 401 bp, Homo sapiens
cctctatctgtgtggaagagttgggtgggggctgtgttaggcgagtctgtactggagatccttgctgtgtgttggcctttctgttctttggttggtcacgtggaaaatttgccggagtttcttttatctttctttttcctacagaatgcaccttaacccctctcatccccccaccgtgcagtgagacttacagacaggtctgagaattttatctggaaggaatggcagtgcctgatgcctgaagaagaactctagtgggaggtcatgttggactcccctgtcagggaccttggtattgaactgttgcccttctgagcagagttggactctcctgaggctaggctggcggartaccctaaccctggcagcttgattcctggagggggctctggaagacaccc

SEQ ID NO: 498892 - DNA, 538 bp, Homo sapiens
agtatgttgcagtgggaggtaggcatggtcatacagcactcaggaaatacaaagtggtaaaccatcaaggactaacaagaaatctgatgccttgtggtttttctttgtaaataacattttttgcctggaagtttgtcaattttttcaatttctccttagaatttgttaattgtaaggagtaatgttagcaatatagcagaatacaagatctcagtgcttaatctacccacagagctattaaacacatcaaattatctatctatctatctatctatctatctatctatctatctatctatctatctatatggagggagacagaaagagagatgtcctaaccctccccactcctgctgccaatacctcagaatgacatttggaaaaaggcttgctacaaatataattaattaagttgaggttatactgtaagtacagtgggcccctaagccmatatgactggtatctttataaagccaatatgactggtatctttataaagaagccacgtgaaaacacaggcagacagagagaaccatga

SEQ ID NO: 498893 - DNA, 517 bp, Homo sapiens
actctctctggtttttgttgacaagccagagaaggccaaactcttattagagggtgtagaaaataagttaataccaggccttaaaatcatagttgtcatggatgcctacggcagtgaactggtggaacgaggccagaggtgtggggtggaagtcaccagcatgaaggcgatggaggtgagtgccctgcctccttcccttctctgaaggctttccctggggccgtgttggctcacacgtgctatccagtgctatctagtgctatggtgcagtcccagcgctggccggttgcctccgcaacccatgaaagagagcagaaacttctgtctcattgctggaaaaaggattctacatgtgtgcccagtgttaacacmtcacaccttacccaagtgctttcagcactccaatatttattccagagcactgacaagctgtgcccggaaatgccagaaatgggaattacagcttcaggcaggtggaactttcagtttctgtgtctcctttgggctttaatgcctt

SEQ ID NO: 498894 - DNA, 646 bp, Homo sapiens
cctgggggtaagtgtcacacaggtggtgagttggccaaggacagctttgagggtcagcagcaygcactaggaaagcctacacaagaggctgcaggccttgcttctggtcctggttctgccactaaccagctataaccttgggtgagtcacctcttttcctgagacaggtcctcctcatctgtgaaatgaagatgtattcccacgttccagcttctgagtttttctagtacccctcaagtggagagaaataatgctatgccgccagggggaccgggagagtttctagaattttatcttaaaaattatacttgacttcacaatgtatccacatcagctttgaaatacaatgctttgaaccacctgttaaattccttaacttgttctccccaaacctttgtgtcaagtttctccttggatgccccatgcttacggcaaggctctgagctggtccagcacatacactctggagaaaccttccggctccaagaatgcacatacagaagcacccctgcttgcaagaggagtccacagagcctgtctcatacaaactcacctgtttatatgaaagccattcatagggttggtctggtttccgagagcctaaacaagggccattatctaaaaaaagagaaaaaacaacagatgg

SEQ ID NO: 498895 - DNA, 646 bp, Homo sapiens
cctgggggtaagtgtcacacaggtggtgagttggccaaggacagctttgagggtcagcagcatgcactaggaaagcctacacaagaggctgcaggccttgcttctggtcctggttctgccactaaccagctataaccttgggtgagtcacctcttttcctgagacaggtcctyctcatctgtgaaatgaagatgtattcccacgttccagcttctgagtttttctagtacccctcaagtggagagaaataatgctatgccgccagggggaccgggagagtttctagaattttatcttaaaaattatacttgacttcacaatgtatccacatcagctttgaaatacaatgctttgaaccacctgttaaattccttaacttgttctccccaaacctttgtgtcaagtttctccttggatgccccatgcttacggcaaggctctgagctggtccagcacatacactctggagaaaccttccggctccaagaatgcacatacagaagcacccctgcttgcaagaggagtccacagagcctgtctcatacaaactcacctgtttatatgaaagccattcatagggttggtctggtttccgagagcctaaacaagggccattatctaaaaaaagagaaaaaacaacagatgg

SEQ ID NO: 498896 - DNA, 485 bp, Homo sapiens
ccagcactttgggaggctgaggcaggtgggttacctgaggtcgggagttcaagaccagcctggccaacatggtgaaatgtcgtctctactaaaaatacaaaaaattagccaggcatggtggtgggcacctgtaatcccagctacttgggaggctgagacaggagaatcacttgaacccaggaggcagaggttgcagtgagccgagaccacgccattgcactccagcctgggcgacagagcaagactctgtytaaaaaaaaaaaaaaattaatactgacgctctcactctcaaaactattccatttaggcaaaaataatatgtttatcctatctatagttaaccactttcactagttccttcaagcttttcttgatgcagaattaagcaaagaggaatatagatttttatttttccatcttatgtattcttttcagcacctggcttttcttcctaacaacgggaaccctttttgtagagatgatcc

SEQ ID NO: 498897 - DNA, 347 bp, Homo sapiens
ccaggaggctctgtggccctggtgctgccttttaactaggaatgtatgtagcgagttggaagcctctagcctggagcaagccacgctgccctaaatgggatgtgctttgagaaaggggttttgaagttgataatgaaagtaattcttcccctaatggagccgaaatagcagaccttgaaagcctgtcaagcaaagaatagtttaaaagaaaaagaaaaaaaagacagaaaaattagaagtgccaccataatccactccctaaaaagaggaatataattcaagaaacagtragttatctaaactgaatagcaggaagagacccatcaactgtcttgcaaggagctgca

SEQ ID NO: 498898 - DNA, 218 bp, Homo sapiens
ttctccagggaagccaagagctatcacttyctttttctacctaatatattttgtccctgataatccatttgtcatatctgactttctccttcctgctggcagcaaccagagaccctctcattacacgactgtcaggtttgcttcagcctgaactgctgcagaattaacttgtcatgtgcgctccaccatgggaacctgtggggagtcagagcctcaaa

SEQ ID NO: 498899 - DNA, 649 bp, Homo sapiens
ctgagtccaactagttcatatccacccagcagaaatgggagcaaaactcccygatacattctaaatatctatgatctactattaaccatcttgtcagaaaggtaacaatccactggaatcaattatacatgttctaatataaaaactttaacagtggttaggtacatgctccattaatactttattttgatgactccccctcatacatgaaaaaaaaagtttgctcctttgtttaccctgcataaaaattctatcgtcttctctaactagacagtaaactccattaacaggaaatgtgcttagtggttgatagctcagactttggaatatgactatttgggttcaagtatcaatgccacaagttctataaattggagcaatttacttacctcactgtgtttaatttcctcagcactgaaacaggttttataatggtaatcacctctaggactgtggaggattacaagagtcaatacatgtcatctgcttacattggtgtctggcattattttaatagagagtgatgtatattaccattatttgatatcaagatgagtcttagccaaggctgggcactcctcactgtgctttgaaggtaacatatatctataaataaataatcaatagaagagtttgggaattctagggc

SEQ ID NO: 498900 - DNA, 649 bp, Homo sapiens
ctgagtccaactagttcatatccacccagcagaaatgggagcaaaactccctgatacattctaaatatctatgatctactattaaccatcttgtcagaaaggtaacaatccactggaatcaattatacatgttctaatataaaaactttaacagtggttaggtacatgctccattaatactttattttgatgactccccctcatacatgaaaaaaaaagtttgctcctttgtttaccctgcataaaaattctatcgtcttctctaactagacagtaaactccattaacaggaaatgtgcttagtggttgatagctcagactttggaatatgactatttgggttcaagtatcaatgccacaagttctataaattggagcaatttacttacctcactgtgtttaatttcctcagcactgaaacaggttttataatggtaatcacctctaggactgtggaggattacaagagtcaatacatgtcatctgcttacattggtgtctggcattattttaatagagagtgatgtatattaycattatttgatatcaagatgagtcttagccaaggctgggcactcctcactgtgctttgaaggtaacatatatctataaataaataatcaatagaagagtttgggaattctagggc

SEQ ID NO: 498901 - DNA, 649 bp, Homo sapiens
ctgagtccaactagttcatatccacccagcagaaatgggagcaaaactccctgatacattctaaatatctatgatctactattaaccatcttgtcagaaaggtaacaatccactggaatcaattatacatgttctaatataaaaactttaacagtggttaggtacatgctccattaatactttattttgatgactccccctcatacatgaaaaaaaaagtttgctcctttgtttaccctgcataaaaattctatcgtcttctctaactagacagtaaactccattaacaggaaatgtgcttagtggttgatagctcagactttggaatatgactatttgggttcaagtatcaatgccacaagttctataaattggagcaatttacttacctcactgtgtttaatttcctcagcactgaaacaggttttataatggtaatcacctctaggactgtggaggattacaagagtcaatacatgtcatctgcttacattggtgtctggcattattttaatagagagtgatgtatattaccattatttgatatcaagatgagtcttagccaakgctgggcactcctcactgtgctttgaaggtaacatatatctataaataaataatcaatagaagagtttgggaattctagggc

SEQ ID NO: 498902 - DNA, 381 bp, Homo sapiens
acatatatatgtatgtatatattcaatggaaaaggatgaaataaatatgtgtatatatatatatgtattctattggttctgtttctttgaggaaccctaatacagcattattacccaaaccctaatcctgagaaagttcttccaaatctgccatgtgccctcccccaacttcccacccaatacaggtccattatcatccctgctctacagtctggggtaagttactggggtaagatcagttaacttcatatctgttcttgcacaatctaggaaaaagcacaaggtttaagaaggsctggaaggggagacctagcaagttgccagttgagaagagtaatggtgtgacctgggtgacagccagatcaagttgtcttatcagag

SEQ ID NO: 498903 - DNA, 515 bp, Homo sapiens
aaaaaatagattgtaaggaggtagccgttccccagaagacatgaaaacaccattttaaaaccacagtccagggtcacatcatgttctccatgagttgtcataacgtgatgaggctgcaagctccgcttcctcagacccacgcgtctggtgattaagatgtcacctctatggatgagtccaggtgagctggtgcttgtgccaatgcattatgggggagtggaggaagagacatttgaaaaccaaaccaaaaattctagcacccttgttgatgaacgcttatgctaggccaacctctgtgctgagatctttatacttctgayttctttgggacctgggaagagtcctcggaagggagccactgccattgttcccgtttaacagatgagcagagttcagagagctgatttagccaagatcacctaatgatggcctaaaaatctccacccaagtgtaactgattggcaaactttgacttttgactacaaactcacgagagaataaccctgagtccccca

SEQ ID NO: 498904 - DNA, 417 bp, Homo sapiens
agaaactcactctccactctttcccatggagctcaatggcccagggaacaacttcagagagactatattagtttgcgagcacttctataataaagtaccayagcctagggagcctaaacaacaaaaatttattttctcatagttctggaggctggaagtgtgagatcaaggtgtcagtagggttggtttctttcaagacctgtctcttcctagcttgcagatggctgtcttctgtctgaatcttcaccttgtcttttctctgtgcatgtctgtgttcaaatttcttcatcttacaaagacagcagtagtattagataagggcccactctcatgacctcactttacttaattatctctttaaagactctgtctccaaatatagtcacatgctgaggtattgggagttagggcttcaac

SEQ ID NO: 498905 - DNA, 538 bp, Homo sapiens
gaggaaactggcacacagagacttgttgaatgacttgtgaaacttgttcagatgggtgtagtggctcatgcctgtaatcccagcactttgggaggccgaggcgggtggatcacctgaggtcagaagttcaagaccaccctggccaacatggtgaaaccccatctttactaaaaaacacacaaaaattagctgggtgtgatggtgggtgcctgtaatcccagctactcaggaggctgaggcaggagaactgcttgaacccgagaggcagaggttgcagwgagctgagatcacgccattgcactccagcctgggtgacaagagcaaaactccgtctaaaaaaaaatgaaagggaatagaacgagctgcaatgtaatacactgcgatacaacatgatgtgatggaattatacaacaggacagacactgtcaagcagataatagaacataggtgacaactcctaacattcatggcatgaaacaaccttgacctggatggtgttctgcatactcaaaactgtaagtgatttagttccatgttc

SEQ ID NO: 498906 - DNA, 520 bp, Homo sapiens
aggaaatagcagaactagaatgcaaaccaacttttgttacccaggagtctcaactaaaggtctgcctgccctgccgagggcactcccctctctgyggtttctcttctacactcctgccacactggccccagtgctgccatgtccactcccagggctctgcacttactcttccttctcttttaagtattttttcgctagctgttcccagagctgcaccctcctcatcctttaggcctcaacccaaatgttacttactcagagagttcttccctgaccacccagcccacacttctgtgactgtacaagtttcctggggctgctgaaacaaatgactgcaaagttggtgacttaaaccaccacaagttggctgggtgtggtggctcacgcctgtaatcccagcactttgggaggcccaggcgggcggatcatgaggtcaggagattgagaccatcctggccaacgtgatgaaacctcatctcaactaaaatacaaaaaaattagccgggtatggtggtgtgtg

SEQ ID NO: 498907 - DNA, 609 bp, Homo sapiens
tctccccagctgtgggagtcctggtctggggcccatgaccttcggctctgcagccctccgcctctcctctggggtgtggccactgccctcctcggcagcttccgtcacaggcaccttttccctcttctaggttccctggaccyggtggacccccagggccaatgggccctgggcccaacatgggacccccagggccaatgggcggtccaatgcatcctgacatgcaccccgacatgcacccggacatgcaccctgacatgcacgcagacatgcacgcagacatgccgatgggccctggcatgaatcctggcccacccatgggccctggcggccctccaatgatgccctacggccctggagactccccacattctggaatgatgccccctatcccgccagcccagaacttctatgaaaacttctaccagcagcaggagggcatggagatggagcccggactcctgggggatgcaggtatgcgggactccaggtgtggctgcctggggctgcaggctttacccagtggagcacagttggggagatgtgatttttcttccttcgtccaagtctctttgaaagcatgactccatctctgtcccatttaatggg

SEQ ID NO: 498908 - DNA, 627 bp, Homo sapiens
aaaggattctgccattattgagaacattcttgatatttgcagaaaggtaagccaagcctcaaagaatggatgcctcataaatttatttaatttcattgacatcaccactttaatccctcatcttctccaattttcccttcttttctcaagtctatgatcataaatatttccataactataaacagctcattatttaagtagctttagtctaagataattctggaaatttagctgaattttcaagggaaaaattgtgcttatctttcaagagaatgatttctaagttctcattattgctgttatagccaattcaaacaaaataaggtttaagataagggatttttataaatgctacccctagacttttccaggggactaagtgacagattctatccagtaatattgaaactatatggaagtggaactaaactcttccaagaattcaaatcaaaggctgtatatctaaatttctacatcttctaatccagtatgtgttaacttttctttttcaactgtttttaaactagcagaggctttgaaataactatgraactttactggccaagactgtctctgataacactttgacttctaaccatgaacatgtgtgaattctcttcttccttc

SEQ ID NO: 498909 - DNA, 587 bp, Homo sapiens
atatattaaagaatagctttacacaaatattaaatatagaaacctaggatacagatcatactgaaagatggtaagaggctttgttcatttattgataggaaaaatcagttgtgttaatgaaactaaatattaggaaggaaaacaaaagtgttactgaaatgggagarttccctgatcccccttacaggatgtgtaacagaggtgtggcttgcctgttggtcgctgctgctactcaaacccctgatgggaggcagaccacgcagatggtcaggtgcaagaggtggggcgagtgctttgggctccagccccgtggcagtatctaggggtgggtgcctgcagccccagtgttacaatgctcttttagctcttttaaccttgctgtccacagacagcttaagtgttaaccaactcaacagaccctctttttgcaagggcagagggctagtgtgacaactttgcaagggcagcgggccagtgtgacaactttctgtatcctgaactcttgcccagagtcctggaagaattgggtcacacatgggcttgaaggatgaaattggggttttattgagtggtggaggtggctttca

SEQ ID NO: 498910 - DNA, 587 bp, Homo sapiens
atatattaaagaatagctttacacaaatattaaatatagaaacctaggatacagatcatactgaaagatggtaagaggctttgttcatttattgataggaaaaatcagttgtgttaatgaaactaaatattaggaaggaaaacaaaagtgttactgaaatgggagagttccctgatcccccttacaggatgtgtaacagaggtgtggcttgcctgttggtcgctgctgctactcaaacccctgatgggaggcagaccacgcagatggtcaggtgcaagaggtggggcgagtgctttgggctccagccccgtggcagtatctaggggtgggtgcctgcagccccagtgttacaatgctcttttagctcttttaaccttgctgtccacagacagcttaagtgttaaccaactcaacagaccctctttttgcaagggcagagggctagtgtgacaactttgcaagggcagcgggccartgtgacaactttctgtatcctgaactcttgcccagagtcctggaagaattgggtcacacatgggcttgaaggatgaaattggggttttattgagtggtggaggtggctttca

SEQ ID NO: 498911 - DNA, 524 bp, Homo sapiens
aattacacatcttaccagctagcaggaaaactataaattcagctacctatgaaaagttcccagattcatctaaaattctccttttaactgaaagtattcaatcaaatgtgtctaaaactaggaattttatgaggaaatacactatagacagaaacatcatattttttaatttaattatattcttattatttatatatgtggtaaaaattatattttatacccctaaatagatcagttccaataggacagatgctgtactgatacttctgtttttccctcccttttctcacccaaagactctggctcygtccctcctacctactagctcttcaagacaaccagaccattgcttctggttctattttgggatgtaacagtggattccaatattcctattgggagccttgaccaaagaggtcattaaacaagcaaggtttcttcttcccaattaccggccacatctcacagcataatttggatatataatggggtttaaagactccttcccctgatgggtgcgaatg

SEQ ID NO: 498912 - DNA, 595 bp, Homo sapiens
gtttcccttggtgggtgaccgtgtcccttgatgagtgactgtgcgctcactcgggcaccaaggagaagcaggaccatcgggtagcctaygtgaatccaacagcaatggccagatcaaggggtccaatccagtcttaagggccaacaatccaggattctctccgtcaaccaaggcctatctgggaagaagtgcaagagcaactagaaaagaaaaagaaaaaggcgccaaggctttgtatgaatttgaagaaaaaactagaaaaacacaggaagaaattgttaagtgaaagtaagagcttatccaaaaaaagagaaaaaaaaagaaaaagaataaatctggtaggtattcatcgtcttcatcatgctctgattcttccagcagttcttctgattctgaggatgaggataagaaacatggaaaagggagaaagaaaaagaaccattcacataaatcttctgaaagctccatgtcagaaactgaatcagacagtaaggatagaaagacaataaggaagaaagacttctttttaaagaaaaagaaggacccaactgagaaagaaaaaggctattaaacgactcagcaaaaagaaacccat

SEQ ID NO: 498913 - DNA, 595 bp, Homo sapiens
gtttcccttggtgggtgaccgtgtcccttgatgagtgactgtgcgctcactcgggcaccaaggagaagcaggaccatcgggtagcctatgtgaatccaacagcaatggccagatcaaggggtccaatccagtcttaagggccaacaatccaggattctctccgtcaaccaaggcctatctgggaagaagtgcaagagcaactagaaaagaaaaagaaaaaggcgccaaggctttgtatgaatttgaagaaaaaactagaaaaacacaggaagaaattgttaagtgaaagtaagagcttatccaaaaaaagagaaaaaaaaagaaaaagaataaatctggtaggtattcatcgtcttcatcatgctctgattcttccagcagttcttctgattctgaggatgaggataagaaacatggaaaagggagaaagaaaaakaaccattcacataaatcttctgaaagctccatgtcagaaactgaatcagacagtaaggatagaaagacaataaggaagaaagacttctttttaaagaaaaagaaggacccaactgagaaagaaaaaggctattaaacgactcagcaaaaagaaacccat

SEQ ID NO: 498914 - DNA, 575 bp, Homo sapiens
ggaaggaaatgcaccaaactattaacaaagggaattgtgaacatttattggtatttgtttcacacctttctctcggacagcagccctctgtatctgaaaaactgttcctctttctactcttgtcaattggtccaaatggggatggccatctttctttcaattctattcctctggctgcagcagtcagccaattgtgccacccgagaactcctggtcatagtgattagtctagagattagcgtgtgacccaagccagactaatcagagtgctttctgagggttctgccaatttacttcctctaaggagagcaagatttcttccctctatagtcaccaagatgattcttgagctgctggtggcccttctyattcccagtggaagagaaccagtctgagataacaaagctaacatgcagagataagtggagatgagacagagccagtcatgaggccctgcttcccagggaaccaggtcccactcttacctctctgaagtcttggttatgtaagcaaataattttccctatttgttcaagatggatcagactaggctcttgttactagtatccttaaac

SEQ ID NO: 498915 - DNA, 624 bp, Homo sapiens
ctgggagaccttccagtttctgcagaataggcaggcacattggaaagatgatggaaagggtattaaacaccagtctacaaaaaycatcacaaccacaatcaaatgttatcttaaattcattggaatttaaatgagtatgcctccaagccttgtagtgataaatggaaatacttttacttttgtcatctttgtttcatttttttaaaaataaaattactatctctttcaatggcaagttataaatcaattttgttattaattagggttgaatcccttccttacaactcttaatgcaaatatacctccaatgatatttttatataggattaaatattacaacagctctctgtgatgagcattaatgaatcaattatgttctcatataataatatatgagcatctgctacacatattacatctaagtagacacagtagagattgaaaaaaatagacacatagcacattgctattttcctcaagcaactcacattaaaatgggaaacaaatacacatggaaagatgtgccttctaattcaaaaaaatctgggttcaaatctctcctactttatctatgaggtgtgtaacattgccatatatatgtgtatatgccagatatgcacatat

SEQ ID NO: 498916 - DNA, 624 bp, Homo sapiens
ctgggagaccttccagtttctgcagaataggcaggcacattggaaagatgatggaaagggtattaaacaccagtctacaaaaatcrtcacaaccacaatcaaatgttatcttaaattcattggaatttaaatgagtatgcctccaagccttgtagtgataaatggaaatacttttacttttgtcatctttgtttcatttttttaaaaataaaattactatctctttcaatggcaagttataaatcaattttgttattaattagggttgaatcccttccttacaactcttaatgcaaatatacctccaatgatatttttatataggattaaatattacaacagctctctgtgatgagcattaatgaatcaattatgttctcatataataatatatgagcatctgctacacatattacatctaagtagacacagtagagattgaaaaaaatagacacatagcacattgctattttcctcaagcaactcacattaaaatgggaaacaaatacacatggaaagatgtgccttctaattcaaaaaaatctgggttcaaatctctcctactttatctatgaggtgtgtaacattgccatatatatgtgtatatgccagatatgcacatat

SEQ ID NO: 498917 - DNA, 636 bp, Homo sapiens
gcttactcccttctctgcgttcaccaccaagcttccaagggacaccttcccctttcgggtcgccccctctcccttccacttcctcagccctttcaagactgccactctggccctgcacattctcaattcccccagaagtccgtgctctgatccacccrgcatcagccctttctcagcattgccccactcagagcaggccttgctctctctggggtcattgtttgtgtctacactcaggccttggctgccctctcctcttttgtatggagtctccaccggactgtgtactctctgggctccagaccttgttctgtcattttcagatgtttatttctctacttggttgtggaaggagtttgtagtgctccatccacagatgatgttaagggcagggtgtaggaatgactttctttgctctccctgttgttctgcatggctttggggggctatgcaaagaggctgggttacggtggctgccattatcctaagggagcctggaaggcagctcacgtcctctcagtgaacagcagtgaccgtcagcaagttacacgtgtgttgtcaagtcagttcctgttattttcttttacaatttttacatttattgcttaaattggccagcaggcatcctgctgtttg

SEQ ID NO: 498918 - DNA, 606 bp, Homo sapiens
aagcttccaagggacaccttcccctttcgggtcgccccctctcccttccacttcctcagccctttcaagactgccactctggccctgcacattctcaattcccccagaagtccgtgctctgatccacccagcatcagccctttctcagcattgccccactcagagcaggccttgctctctctggggtcattgtttgtgtctacactcaggccttggctgccctctcctcttttgtatggagtctccaccggactgtgtactctctgggctccagaccttgttctgtcattttcagatgtttatttctctacttggttgtggaaggagtttgtagtgctccatccacagatgatgttaagggcagggtgtaggaatgactttctttgctctccctgttgttctgcatggctttggggggctatgcaaagaggctggrttacggtggctgccattatcctaagggagcctggaaggcagctcacgtcctctcagtgaacagcagtgaccgtcagcaagttacacgtgtgttgtcaagtcagttcctgttattttcttttacaatttttacatttattgcttaaattggccagcaggcatcctgctgtt

SEQ ID NO: 498919 - DNA, 641 bp, Homo sapiens
ctggtggggggcggggggtgggataattatggccagagtgaaagcaacactgaggggcagggggtggggagagtggctgggtttgttttatctctcaataaaccatggcccatgttatcttcactttaattagttcattcattcattcattcattcattcattcaacaaaagtatattgaggattctgttctgtgttaaaaatttcagtggctcccacttacrgccgcctaaatacagtactaggtgctgggcatacattatttcattctgtttttatgaacaccttgtaagtagggccccagtcactagcccatatggtacctctgagaagatcagaaaaaggaaacccatcttttgggcagacacagccacaagtcaggatgtgtcacttgtcaagaccaaggcagggtgaatttgagctgtcctgagccccctcaactgggtggcctcttggcagtgaacgatgcacaccccatacctgcagttctgctttgagattagtgtcgtaatccttgttctacagataggaaactgaggaccttgagcaatgtgacccagacatgcacatgtgacacaggcgggtttgaacccaggcaggctgttcccaagaacactgcctctccaggaataacttgagttc

SEQ ID NO: 498920 - DNA, 626 bp, Homo sapiens
gccagttagcatctctgccccctgcctgcacacgggctagtagccgaytctcctccatcattgcaacaactgaaaatttgtcagcaggggcagtatggcccccagattggatttcactccaactcacccattttacagattttcctgagaactagcagggatgtgccttatctctagctactgcagcaggaccatgagattcgtctatggctcttatggtttctctcttctgaattacctggtacttgcatcagcaactcataccccacctcctgtcactatgcatagccatctaggacagagatctgataaattcattcacaggaaggaatgagtgatgatgacagctccatacaggtgcagctccccgccttgtattttaatggctcttaagccttcctcaaagcactggccttggcccctagtcctaggtccctggctcctggctccaggggagagggtggtattatgaaactttctgtcagcttcgctggggcttcccagtgtggctgacatggcttctagtcctggatgcatcttgatttgctgtgtgactttgggagaattatgtgatacctctgggctaccggttcacctgcagcatggggccagggagaattagtagc

SEQ ID NO: 498921 - DNA, 395 bp, Homo sapiens
ggtgagatctggtgaacccctgagaaggcagtcccaggccccagggagtgagtggagaggcagacagagggaagggrgcgctgagccctgggggccaccggggtcggatcagggagaggaggcaggacagcaaaggaagctgagaggaaggaggggacaaggagcgccaggagcgggaccaccaagcgaggaagggactaccgggtcaaatactgcagtggggccaagtgcaatgaggactggcatcggggagaggggactgagcatccccagccacagctcagcacccccagcccggccggtcacctagccttgcctccatcttccttccaagctggtttttgactcccctcccaggggtcaggacccttttccccagtggaagcccccagagc

SEQ ID NO: 498922 - DNA, 395 bp, Homo sapiens
ggtgagatctggtgaacccctgagaaggcagtcccaggccccagggagtgagtggagaggcagacagagggaagggggcgctgagccctggggrccaccggggtcggatcagggagaggaggcaggacagcaaaggaagctgagaggaaggaggggacaaggagcgccaggagcgggaccaccaagcgaggaagggactaccgggtcaaatactgcagtggggccaagtgcaatgaggactggcatcggggagaggggactgagcatccccagccacagctcagcacccccagcccggccggtcacctagccttgcctccatcttccttccaagctggtttttgactcccctcccaggggtcaggacccttttccccagtggaagcccccagagc

SEQ ID NO: 498923 - DNA, 306 bp, Homo sapiens
ctggccaaattgaaatcagaattgagcagccagtagaaagaggccactgtaccttgtagcctaatccctgtgaaagattaaagatgtctttggccgtatattgtattgattcrtactctgaagtataaatcatctgtgagttgctcagaggagcaccagagaggggagtggtggggagggcatgctggccaggctgggatgcatgttggaagtgtggtgagtgagtcctgggtgccaactgtgtgctggtctctgggtgcttcagaggagcatgactatgcccattttatagatggggaaatggag

SEQ ID NO: 498924 - DNA, 306 bp, Homo sapiens
ctggccaaattgaaatcagaattgagcagccagtagaaagaggccactgtaccttgtagcctaatccctgtgaaagattaaagatgtctttggccgtatattgtattgattcgtactctgaagtataaatcatctgtgagttgctcagaggagcaccagagaggggartggtggggagggcatgctggccaggctgggatgcatgttggaagtgtggtgagtgagtcctgggtgccaactgtgtgctggtctctgggtgcttcagaggagcatgactatgcccattttatagatggggaaatggag

SEQ ID NO: 498925 - DNA, 480 bp, Homo sapiens
attctgtgggtacagcctggaataggacagataagcctgccctcgtggagctgacatccatctatgaagccaacaatagggatgaaagaatgaacaaatgaatgaacatgctaggtggttaattaactaacatttgacctattgtccggaaggctcccggacccatctccagctcctgttcctctgcgcttcctgtcttcccctactctctcctgcccaccttctgcttcttctgtctcccccmaaatacacactctcttcgatcattgcacagcccctcatgttcacacagcactcccagtagagtaatctttctacgtgttgtctcctgagctccttccagtccacccaggtcctaggtatgatgaccattttacagataaggaaaccaagccccaccagccagagcccagtgctgcggtccacaccttcccttcttccaccccgtcttcttccccacctccacctttctatctcacc

SEQ ID NO: 498926 - DNA, 480 bp, Homo sapiens
attctgtgggtacagcctggaataggacagataagcctgccctcgtggagctgacatccatctatgaagccaacaatagggatgaaagaatgaacaaatgaatgaacatgctaggtggttaattaactaacatttgacctattgtccggaaggctcccggacccatctccagctcctgttcctctgcgcttcctgtcttcccctactctctcctgcccaccttctgcttcttctgtctcccccaaaatacacactctcttcgatcattgcacagcccctcatgttcacacagcactcccagtagagtaayctttctacgtgttgtctcctgagctccttccagtccacccaggtcctaggtatgatgaccattttacagataaggaaaccaagccccaccagccagagcccagtgctgcggtccacaccttcccttcttccaccccgtcttcttccccacctccacctttctatctcacc

SEQ ID NO: 498927 - DNA, 635 bp, Homo sapiens
gacaggccccaagttcctgctccctaccttatgcctccaggaatggatttctgtcctcagtgagtcagtagagagaggaaggggaacagccagggagctcagtagggcaggaggtggaggtcccagggtagcctggcctcacccccaatgcctacaccccgtcagcctcagtttgcccctctgtaggctgagagagcaacctctcaggtctaggggtgggaagagagctaaagaagaagtgagtagttgggggctggattttgcaattaaccattcattcarcaaacatttattgagcaactactatgtgccagggctgtgttagatgctggagatgcagcggagaacaaaacagattaaaatctctgccttggtggaccatatacaaacaaataaaaatgtattagtctggtgctataaagaaaaacagagcagggtacggggactggagagtaggacggaggcaggggctgtttcagataggctggtcagaggcctctctgaagggagacatccgagaagacacctgaagacaccaagaatgcaggccgtgtggacatgcaggagaagctttcccacaggaggaccagcccgtgcaaaggccctgaggcgagctggtgcctggaacatttgag

SEQ ID NO: 498928 - DNA, 601 bp, Homo sapiens
tccatcttgccaccacttccagtctttccaccccatccccacctcatccatccccaccctcacccctgatctgatctaggtctgctgatctaaatcagggtgcccatacaattttccatcccgcctgggcacttccaagaaccgaaggggatgctctcaataattacaccagaacacgggagacaggatgcacggtcaccccacccatgagggctcagcctccacacccaggcatctttkcacttctcacacctctattgtgattactgcctgatgcaggcatttgctgagcagcctcgggcaagtcacttggtctctctgactctccatatcctcgtctagagtgcaggaatcttaagagttcctagagttgctgtgagagtgaaatgtctttcacattttaaagatgatgtctttaaagtgtctgaacacagtggatacatagtaaacagcaatgtttatgtttagctcacccaggaatacataagccccacataagacacaggcacacacatcccttctctctcaggaacaccagctcacacacatgcaaagtcatgtgccacaggtgtatacacaaacactgccacactgggcacac

SEQ ID NO: 498929 - DNA, 473 bp, Homo sapiens
ggggaagtgggggattctaggaggtggaggattctaggaggtgggggattctaggaaaagggggattctgaacagacattgtccactatgcagggtgaaccctggataaccttagagcccagaggagaagcagcaggctcagacctgggtgagggcagggaggctgctgggcaaacaccagggttgggccttggagtgatgggcactccaggttgcctcaygtgcccctgccctgcacagcagcgggcttagaccagcctggtgttttctcccaggaacctggaagagagagagagagagattgactctaattgtgtgctgcacctgtcattcatgaattgggacactcaccgccctgcagcctgagaggaaatgaaaatctgcccacatatggagaaggaagagggaaaatgagcttgcctccttagacctggccgtgtccctgcccacctctgaccatggctccccttcat

SEQ ID NO: 498930 - DNA, 473 bp, Homo sapiens
ggggaagtgggggattctaggaggtggaggattctaggaggtgggggattctaggaaaagggggattctgaacagacattgtccactatgcagggtgaaccctggataaccttagagcccagaggagaagcagcaggctcagacctgggtgagggcagggaggctgctgggcaaacaccagggttgggccttggagtgatgggcactccaggttgcctcacstgcccctgccctgcacagcagcgggcttagaccagcctggtgttttctcccaggaacctggaagagagagagagagagattgactctaattgtgtgctgcacctgtcattcatgaattgggacactcaccgccctgcagcctgagaggaaatgaaaatctgcccacatatggagaaggaagagggaaaatgagcttgcctccttagacctggccgtgtccctgcccacctctgaccatggctccccttcat

SEQ ID NO: 498931 - DNA, 473 bp, Homo sapiens
ggggaagtgggggattctaggaggtggaggattctaggaggtgggggattctaggaaaagggggattctgaacagacattgtccactatgcagggtgaaccctggataaccttagagcccagaggagaagcagcaggctcagacctgggtgagggcagggaggctgctgggcaaacaccagggttgggccttggagtgatgggcactccaggttgcctcacgtgcccctgccctgcacagcagygggcttagaccagcctggtgttttctcccaggaacctggaagagagagagagagagattgactctaattgtgtgctgcacctgtcattcatgaattgggacactcaccgccctgcagcctgagaggaaatgaaaatctgcccacatatggagaaggaagagggaaaatgagcttgcctccttagacctggccgtgtccctgcccacctctgaccatggctccccttcat

SEQ ID NO: 498932 - DNA, 433 bp, Homo sapiens
cctcagcaccatcctggggcctgtcaaccccaggcagactcttcaggaaaggcctgtcctgtagccccggcagggcggctcccagcctctttcagcagcrgactctccacacaccttccaccccaaaaatgtctgagaagagaggagggaaggtcttgaatctggattcaaattctgctttgttgcacgtggcctaaaagaactcccagcccaaaacctcagaacataagaggctgtgggccaaggaagagaaaaggaaggatatggaaagaggcggagcagaaggggaaggaagccgaggagggatggcaggaggagcagtccaggatggtgccgaccacctgcacccgcccagccttacctcgtacggacatcctcttggggaggatcgtgacagcaccctcagccacctcctccaggtgcagcacaggtg

SEQ ID NO: 498933 - DNA, 473 bp, Homo sapiens
ggggaagtgggggattctaggaggtggaggattctaggaggtgggggattctaggaaaagggggattctgaacagacattgtccactatgcagggtgaaccctggataaccttagagcccagaggagaagcagcaggctcagacctgggtgagggcagggaggctgctgggcaaacaccagggttgggccttggagtgatgggcactccaggttgcctcacgtgcccctgccctgcacagcagcgggcttagaccagcctggtgttttctcccaggaacctggawgagagagagagagagattgactctaattgtgtgctgcacctgtcattcatgaattgggacactcaccgccctgcagcctgagaggaaatgaaaatctgcccacatatggagaaggaagagggaaaatgagcttgcctccttagacctggccgtgtccctgcccacctctgaccatggctccccttcat

SEQ ID NO: 498934 - DNA, 585 bp, Homo sapiens
gacctctctgtgatgaacatacatcacctataaagtggaaataatggtattacctatttcatagaactgttataaaacaagtgaggtaatgcatataaagacaacatccggtacctagtgcttagtaaatgttgattatttttattgtaacccgctcacaatgtttcttggagggttaaagctgggaatagagcccaccctgaggcatcagtccctgctacacccatatccatgtgcttctcaggactcctgtccctgggccccatgcccatcaccaggcccttggtaggagcagcgtgcatggccactggctggaaccatcaggagagggtcagtacttgatgttgtcaggattcacgaccaggctgggtggccatcagagaccctgggagcactttgtcccagccatccccagccccagatgtgcctctcaagtgctggcaggggacagatgtcattcacrtatttaaatctcacccgacctcgtggtacagagcatctgtgggccatgcttgtgtcagccactgcctttgacggatgaggaaactgaagctcagagaagagaagtggcttacccaaagccac

SEQ ID NO: 498935 - DNA, 571 bp, Homo sapiens
gctgacttcatgttgtggcctggcagcctcgggtggtgtcggcagatgcaggaagccacgggcgcagcaccctgcctgtcctggccgtgggtgctaatgcagagtgggttctgtggctggtcacacaggcagccgggtgggtgcaggtcatcccggggatggccttgcactgtctgatccccggggaggggagggtcttttcgctgaccacgctgtttgctgcgtgctttttgtttgccaagggctgcaatgtttgtcgtctgccgcggtgtttgctgccgggtgaagaatcgctggccctgtgttgtcacacctgggcccaccgtgacaaggtccccacctctgttgtgggactcgggggcaaagttccctgctgttcacgctgcaagtgacaagggccctggtctctgaaccaggagcctctgagtcctgccccacagggctgagccctggctgggagcaatgttmtttgggggagacagcagcttcctcacttccatgtacagccagatgccacgggatgtggggagtgcgacagggctgtagggagtgggacagggccgtggggagt

SEQ ID NO: 498936 - DNA, 603 bp, Homo sapiens
gaaccagatagcctttcaggtcatgcccaggaaatgagcaccctgtcaggtgagagcacaggaccagagccccatttggttgccatggtagcagggcagcaggatcacagggagcagtggcccattggacagtgagcagcagtgtggtcgaggttcctcactagtttacatccaatggttactgctgatttgtttcttcctaatgaaaacattgggcatttccagatctttttaaaaggtgaggaagtggaaattaaatgaagagggcctgaggccctttttaattaactctgaaagtctaaattacaagccacagtaccacgtttgggttctctctctctctctctctctctctctctctctstgtgtgtgtgcgcgcatgtataagtaccaattatcattactttcaaataataatagctagtacttacacaaatataaggttgagggaaaaaatgtctgcaactctttaacacaagtagagatttttaataacatgtaaggaaggtagacatttcaaaggaatgttaagctcaatagtaagcttgtaaaatattactttcctggtatcctttttatggtttcagtcactgaggaaataat

SEQ ID NO: 498937 - DNA, 290 bp, Homo sapiens
aaattagctgggcgtggtggcacatgcctgtaatccgaactactkggggaggctaaggaaggagaatcctttgaacctaggatgcagaggctgcagtcagccgggatcgcaacactgcatcccagcctgggcaacagaggctctgactccaaaaaaaaaaaaaaaaaagacatacaaatgggtcatacgaagtacaaataaacaattgtctgatttaaagtaactaatacatagaagatgacgaaataattagcaagaagaggctgaggatctgaaattttctgaattca

SEQ ID NO: 498938 - DNA, 519 bp, Homo sapiens
atcttagaggataatgtattcatcaaattaaccatgatgtggttaatttgtagcttgtgttagaatacaaagaaaaaagaacagttcagaatgtttaaaaaggattggctttgggtagagagttcgatacccgcactttaagccaggcagctgcagaatggggagaccttggtggtaactaaaatggagccataktaggtaaggatggagaggatatgggtgaaaatcctatgccaggcactgagcatgaacacatgcatgattaatttccgtgcagtctgatgaagtagatattcttactatctacattcaatactcagggaatttgaggttgaggcgcaattaaacaaattgcccaaagtcccacaactagtaagtgcatattttaatatttctcattgcatacaaaattagacaatggaagatttttagaaagaaaggattaaaactactatggctttaatacacacaaatagatattagtaaaaatgcagagatgcccaagataggcattataat

SEQ ID NO: 498939 - DNA, 519 bp, Homo sapiens
atcttagaggataatgtattcatcaaattaaccatgatgtggttaatttgtagcttgtgttagaatacaaagaaaaaagaacagttcagaatgtttaaaaaggattggctttgggtagagagttcgatacccgcactttaagccaggcagctgcagaatggggagaccttggtggtaactaaaatggagccatattaggtaaggatggagaggatatgggtgaaaatcctatgccaggcactgagcatgaacacatgcatgattaatttccgtgcagtctgatgaagtagatattcttactatctacattcaatactcagggaatttgaggttgaggcgcaattaaacaaattgcccaaagtcccacaactagtaagtgcatattttaatatttctcattgcatacaaaattagacaatggaagatttttagaaagaaaggattaaaactactakggctttaatacacacaaatagatattagtaaaaatgcagagatgcccaagataggcattataat

SEQ ID NO: 498940 - DNA, 575 bp, Homo sapiens
ggataatcccccacctcaaaatctgtaattgaatcacacatgcagagtccttgtgtcatgcgaggaaacatatttataggttccagaaattaggacttgaacactttttggaggcccctattctgtctcccmccccagggtttctcaaacttggcacaattgacgtgtttgcctggatcattccttgttacggtggcttgtcctctgcgttgtaagatatttagcagcgtcctgctgtgtgctccttagagcacatccccttcccctagttgtgaccaaatgtcacctgaggggcaatattgcctctggctgagacccattgctttatcctgttatagtgatctttttaaaaagcaaatccagtcatgtcactttcctgcatagaattgtgtgttgcctattattttcaaaacaatattcacatttcttaatatatcataatagattactcacagtcgggctgtgctcatttctcttggttatttctctgtcttgctgatttttctgactgccctctctttccatcttcttgtcctccatatattcttgcatttcccctgaatgtgaggttccct

SEQ ID NO: 498941 - DNA, 575 bp, Homo sapiens
ggataatcccccacctcaaaatctgtaattgaatcacacatgcagagtccttgtgtcatgcgaggaaacatatttataggttccagaaattaggacttgaacactttttggaggcccctattctgtctccccccccagggtttctcaaacttggcacaattgrcgtgtttgcctggatcattccttgttacggtggcttgtcctctgcgttgtaagatatttagcagcgtcctgctgtgtgctccttagagcacatccccttcccctagttgtgaccaaatgtcacctgaggggcaatattgcctctggctgagacccattgctttatcctgttatagtgatctttttaaaaagcaaatccagtcatgtcactttcctgcatagaattgtgtgttgcctattattttcaaaacaatattcacatttcttaatatatcataatagattactcacagtcgggctgtgctcatttctcttggttatttctctgtcttgctgatttttctgactgccctctctttccatcttcttgtcctccatatattcttgcatttcccctgaatgtgaggttccct

SEQ ID NO: 498942 - DNA, 575 bp, Homo sapiens
ggataatcccccacctcaaaatctgtaattgaatcacacatgcagagtccttgtgtcatgcgaggaaacatatttataggttccagaaattaggacttgaacactttttggaggcccctattctgtctccccccccagggtttctcaaacttggcacaattgacgtgtttgcctggatcattccttgttacggtggcttgtcctctgcgttgtaagatatttagcagcgtcctgctgtgtgctccttagagcacatccccttcccctagttgtgaccaaatgtcacctgaggggcaatattgcctctggctgagacccattgctttatcctgttmtagtgatctttttaaaaagcaaatccagtcatgtcactttcctgcatagaattgtgtgttgcctattattttcaaaacaatattcacatttcttaatatatcataatagattactcacagtcgggctgtgctcatttctcttggttatttctctgtcttgctgatttttctgactgccctctctttccatcttcttgtcctccatatattcttgcatttcccctgaatgtgaggttccct

SEQ ID NO: 498943 - DNA, 575 bp, Homo sapiens
ggataatcccccacctcaaaatctgtaattgaatcacacatgcagagtccttgtgtcatgcgaggaaacatatttataggttccagaaattaggacttgaacactttttggaggcccctattctgtctccccccccagggtttctcaaacttggcacaattgacgtgtttgcctggatcattccttgttacggtggcttgtcctctgcgttgtaagatatttagcagcgtcctgctgtgtgctccttagagcacatccccttcccctagttgtgaccaaatgtcacctgaggggcaatattgcctctggctgagacccattgctttatcctgttatagtgatctttttaaaaagcaaatccagtcatgtcactttcctgcatagaattgtgtgttgcctattattttcaaaacaatattcacatttcttaatatatcataatagattactcacagtcgggctktgctcatttctcttggttatttctctgtcttgctgatttttctgactgccctctctttccatcttcttgtcctccatatattcttgcatttcccctgaatgtgaggttccct

SEQ ID NO: 498944 - DNA, 450 bp, Homo sapiens
acttttttcatgtttttttaagtccacttaaattctattttaagccaccatctgcctgtgctgttagggcagttagccctcaatcattttaagatgctcccctctaagtactgtgatagtgatagagatgtcaccagtcaagtgtcctaggaagccgactccgagttggagatttgcatgcaaggaggttgaaatgatattcccaacacctgtggaagagcgaaagcaataggattgggtggagcaggaagtcggctggaatgcaatcactatcatggccgcagtgcactctacagggatcttggtgagtttacctaatgacctcaaattggagcaagcaaacaaggccattatatttctgtaccaagcagttctcggwtgtgggatgccttgagaagggacatggatttggatgaaggaactttactgtgctgtgagtattgttgacag

SEQ ID NO: 498945 - DNA, 372 bp, Homo sapiens
ttcaaacaaataaaatggtggttgttttttataagccagtaaggtttaattagttccttaaacagcaagtattaactgttacacctaagtgaacagaattcacttctgtgttttcaacaaaattatgtagggggagaaaatcttaaattacaaatcaaatacaatcaatagaacttcgcaatctaatgctaaatttggtgatggactaggtttaatatatytcagacgcgaaaaaacgagctaaaattgaaggaatgggactgtgtttggagagtattttaatcctctcaagtatgacaggtcactcctgaaccccagaccacactttcaggccccttcaaataaggaatatttcctaagtccttgcctgtt

SEQ ID NO: 498946 - DNA, 372 bp, Homo sapiens
ttcaaacaaataaaatggtggttgttttttataagccagtaaggtttaattagttccttaaacagcaagtattaactgttacacctaagtgaacagaattcacttctgtgttttcaacaaaattatgtagggggagaaaatcttaaattacaaatcaaatacaatcaatagaacttcgcaatctaatgctaaatttggtgatggactaggtttaatatatctcagacgcgaaaaaacgagctaarattgaaggaatgggactgtgtttggagagtattttaatcctctcaagtatgacaggtcactcctgaaccccagaccacactttcaggccccttcaaataaggaatatttcctaagtccttgcctgtt

SEQ ID NO: 498947 - DNA, 515 bp, Homo sapiens
atggatgaacctcctataaaaaataaagtaaaaattaacttggtgctatgtggaatcctattatatccaggaaattcatcctagaaaagttaaaaagaaatgcttgttaatacttatcacttggtttaaaactcattgtagaaaggacaggaaaatatgaatatgttggggaaaattaacaaaaaagaagcctctttatataaaagtgaaaaacattttagagccaatgccatgcacacggaagtatagtacactcaaagaaatgttttttccttattttttttgagttgcgtaggcttgagtatatactgatataacatgcctcatttggatatgtatttttatcacacctataaatattaactatatatagtgcatatgcagatgaaatgctaataaatttataaaagtataacatgctactaaagataaccattttgcaaacaccgcatagtcccaaattattctctgaagatttcccattttttwaaaaaaagtagaaacagaaccaataa

SEQ ID NO: 498948 - DNA, 606 bp, Homo sapiens
cccctcctgtatcaatagtaacaatatcattgattaaaaacaaaaatagctaatgacagctagtactatgattggcacacataggtcctcaataaatatttgatgaattaatgattaataattgaacacttcttatatgtaaaagtggatcttacataaacaacttaatattattttaccactttataaatgaggatatttagctattaagaagttaagtggtttatttaaaggtcagctttaaagtggtagagctaarattcaaacataatttatcttattttcattcttacagagctttctgtttctaaattttctacaaagacgtcgaacgtctctcactatctccatattttataggatggaaatagaaattctatcaggcactcatccaacccaattattttaaaaactacctagtttgtttcatagagtttgctgtaatggctttttatgtttaaataatatgtgtaagcactatgtaatgcaaaaagctctgccaaattttatctcatttgatagcttaatacaactatgagatagattgagatgaattactgttattcctagtttgacagataagaaaagtgatagaaagatcagcag

SEQ ID NO: 498949 - DNA, 568 bp, Homo sapiens
attatactttgtgcagtttactatattttatatcacaattaaattttttatttttacaaattaagggtaagcccattatttctctgtcttttgaaagccttaattaatatacaataatgaaacgaaaagtgccccatccttcttcaactcttgcttcttcaacttgacatttgaaattatagagttccaaatctctacatatctattcatgattcatttgaaaaaaatgtttgtcttatgtaataaggccattttataatttcccatgttatagtcatacaatatactttaaaataatattgtaacaggtttatgacatttcagtcataattgaaattataaaacttaatagtaatttgagagatttaaaggcaagatgacaattttccaggcattattttcttttttgcttaacatttctctccttcccgtcttgttttataatagtcccataattttttcaggttaaaaatcccatgttmtcacaaagtgaatgttctctctataaatagccagccctcaggggctaaattctatttttccacttaactattggtcttacttgaag

SEQ ID NO: 498950 - DNA, 633 bp, Homo sapiens
cacaacttgattgccttacaaatgacctgcttccaggatgcggaaattcctaatttcttctgtgacccttctcaactcccccatcttgcatgttgtgacaccttcaccaataacataatcatgtatttccctgctgtcatatttggttttcttcccatctctgggacccttttctcttactataaaattgtttcctccattctgagtgtttcatcatcacgtgggcagtataaggccttctccacctgtgggtctcacctgtcagttgtttgctgattttacggaacgggcgttggaggrtacttcagttcagatgtgtcatcttccccgagaaaggctgcagtggcctcagtgatgtacacggtgatcaccccatgctgaaccccttcatctacagcctgagaaacaggcatattaaaagtgtcctgcggcggccgcacagcagcaccgtccaatctccgtgtcttcttaactgttccattccttttgtagtgtgggttaacaaaggcagcaaggtcaaataagaatgatatcacagggtgaacacccaaagtgatattaggagtaatactccctaggatatagaatatactgtcacagagtacacacagatggggtacacccactgtcata

SEQ ID NO: 498951 - DNA, 633 bp, Homo sapiens
cacaacttgattgccttacaaatgacctgcttccaggatgcggaaattcctaatttcttctgtgacccttctcaactcccccatcttgcatgttgtgacaccttcaccaataacataatcatgtatttccctgctgtcatatttggttttcttcccatctctgggacccttttctcttactataaaattgtttcctccattctgagtgtttcatcatcacgtgggcagtataaggccttctccacctgtgggtctcacctgtcagttgtttgctgattttacggaacgggcgttggaggatacttcagttcagatgtgtcatcttccccgagaaaggctgcagtggcctcagtgatgtacacggtgatcaccccatgctgaaccccttcatctacagcctgagaaacaggcatattaaaagtgtcctgcggcggccgcacagcagcaccgtccaatctccgtrtcttcttaactgttccattccttttgtagtgtgggttaacaaaggcagcaaggtcaaataagaatgatatcacagggtgaacacccaaagtgatattaggagtaatactccctaggatatagaatatactgtcacagagtacacacagatggggtacacccactgtcata

SEQ ID NO: 498952 - DNA, 633 bp, Homo sapiens
cacaacttgattgccttacaaatgacctgcttccaggatgcggaaattcctaatttcttctgtgacccttctcaactcccccatcttgcatgttgtgacaccttcaccaataacataatcatgtatttccctgctgtcatatttggttttcttcccatctctgggacccttttctcttactataaaattgtttcctccattctgagtgtttcatcatcacgtgggcagtataaggccttctccacctgtgggtctcacctgtcagttgtttgctgattttacggaacgggcgttggaggatacttcagttcagatgtgtcatcttccccgagaaaggctgcagtggcctcagtgatgtacacggtgatcaccccatgctgaaccccttcatctacagcctgagaaacaggcatattaaaagtgtcctgcggcggccgcacagcagcaccgtccaatctccgtgtcttcttawctgttccattccttttgtagtgtgggttaacaaaggcagcaaggtcaaataagaatgatatcacagggtgaacacccaaagtgatattaggagtaatactccctaggatatagaatatactgtcacagagtacacacagatggggtacacccactgtcata

SEQ ID NO: 498953 - DNA, 633 bp, Homo sapiens
cacaacttgattgccttacaaatgacctgcttccaggatgcggaaattcctaatttcttctgtgacccttctcaactcccccatcttgcatgttgtgacaccttcaccaataacataatcatgtatttccctgctgtcatatttggttttcttcccatctctgggacccttttctcttactataaaattgtttcctccattctgagtgtttcatcatcacgtgggcagtataaggccttctccacctgtgggtctcacctgtcagttgtttgctgattttacggaacgggcgttggaggatacttcagttcagatgtgtcatcttccccgagaaaggctgcagtggcctcagtgatgtacacggtgatcaccccatgctgaaccccttcatctacagcctgagaaacaggcatattaaaagtgtcctgcggcggccgcacagcagcaccgtccaatctccgtgtcttcttaactgttccattccttttgtagtgtgggttaacaaaggcagcaaggtcaaataagaatgatatcacagggygaacacccaaagtgatattaggagtaatactccctaggatatagaatatactgtcacagagtacacacagatggggtacacccactgtcata

SEQ ID NO: 498954 - DNA, 590 bp, Homo sapiens
aaaacattctaaaaatcatagaaacttattaaaacagaccttatttcattttcccattttattttaattatgggtcagtggttgctctgctcaatgtcatctmatttgcaggactcaaatcgcaaagcagcttctatctatactatttccatacatcacagcagaagagaaaagacatctgcacttgattcatgcgtttctacctttcattgccaacaagagtcacattcatatttctgagtagaacacggagaaattgtagtcttgtgtggaaggcaactgccaggaagaaaaacacatgtagcatggtcacctatgcagaaggccaggtgttacgttgccacaattttactactaatatctatgactcgtcaaatatataaaatacagagtgttatggaacattttacacttattatctcagtgaattttcacgctaattttatgagtaaatttgcctagaccacacaaattttagtgacacttcttatataaacccaatcctgtgattcttggttttctgctttttgaaaaatgtctctacctcttatgttaatgaaatatgaattaccatatgctgcttcataatt

SEQ ID NO: 498955 - DNA, 590 bp, Homo sapiens
aaaacattctaaaaatcatagaaacttattaaaacagaccttatttcattttcccattttattttaattatgggtcagtggttgctctgctcaatgtcatctcatttgcaggactcaaatcgcaaagcagcttctatctatactatttccatacatcacagcagaagagaaaagacatctgcacttgattcatgcgtttctacctttcattgccaacaagagtcacattcatatttctgagtagaacacggagaaattgtagtcttgtgtggaaggcaactgccaggaagaaaaacacatgtagcatggtcacctatgcagaaggccaggtgttacgttgccayaattttactactaatatctatgactcgtcaaatatataaaatacagagtgttatggaacattttacacttattatctcagtgaattttcacgctaattttatgagtaaatttgcctagaccacacaaattttagtgacacttcttatataaacccaatcctgtgattcttggttttctgctttttgaaaaatgtctctacctcttatgttaatgaaatatgaattaccatatgctgcttcataatt

SEQ ID NO: 498956 - DNA, 590 bp, Homo sapiens
aaaacattctaaaaatcatagaaacttattaaaacagaccttatttcattttcccattttattttaattatgggtcagtggttgctctgctcaatgtcatctcatttgcaggactcaaatcgcaaagcagcttctatctatactatttccatacatcacagcagaagagaaaagacatctgcacttgattcatgcgtttctacctttcattgccaacaagagtcacattcatatttctgagtagaacacggagaaattgtagtcttgtgtggaaggcaactgccaggaagaaaaacacatgtagcatggtcacctatgcagaaggccaggtgttacgttgccacaattttactactaatatctatgactcrtcaaatatataaaatacagagtgttatggaacattttacacttattatctcagtgaattttcacgctaattttatgagtaaatttgcctagaccacacaaattttagtgacacttcttatataaacccaatcctgtgattcttggttttctgctttttgaaaaatgtctctacctcttatgttaatgaaatatgaattaccatatgctgcttcataatt

SEQ ID NO: 498957 - DNA, 590 bp, Homo sapiens
aaaacattctaaaaatcatagaaacttattaaaacagaccttatttcattttcccattttattttaattatgggtcagtggttgctctgctcaatgtcatctcatttgcaggactcaaatcgcaaagcagcttctatctatactatttccatacatcacagcagaagagaaaagacatctgcacttgattcatgcgtttctacctttcattgccaacaagagtcacattcatatttctgagtagaacacggagaaattgtagtcttgtgtggaaggcaactgccaggaagaaaaacacatgtagcatggtcacctatgcagaaggccaggtgttacgttgccacaattttactactaatatctatgactcgtcaaatatataaaatacagagtgttatggaacattytacacttattatctcagtgaattttcacgctaattttatgagtaaatttgcctagaccacacaaattttagtgacacttcttatataaacccaatcctgtgattcttggttttctgctttttgaaaaatgtctctacctcttatgttaatgaaatatgaattaccatatgctgcttcataatt

SEQ ID NO: 498958 - DNA, 548 bp, Homo sapiens
tttttttttttgaaatattttatccacatctgaccctccatattccattaaacactagtttccctttgttttgcattatcagtcactgtttcagaaatttgtatttgattcctgaaaaagacgttcttgttacctgtagtcatatataaccaagtcgttattaaataaagtgatttttttaagcagcaatgtatcagtaaatrtactgtgaggaataaactattctaagaatcttcgggatgaattagatcagagaataatttgattttgattacaggttgtctctctactcctcatttaatgttccattaagattattttttagtcaagccaggtagaatcaaaatatccaagaatatagttatgaattgtcataggaatctggcattaatcacatacttattattaaaatgcaaaggttactttatcttcctggaaatcataattcgcttttctctgccttttctgatgcaattttaaattttcccatgtagatgctccatcaaaagcatggaaacttaattttttgtatttagaaaaatgtctta

SEQ ID NO: 498959 - DNA, 548 bp, Homo sapiens
tttttttttttgaaatattttatccacatctgaccctccatattccattaaacactagtttccctttgttttgcattatcagtcactgtttcagaaatttgtatttgattcctgaaaaagacgttcttgttacctgtagtcatatataaccaagtcgttattaaataaagtgatttttttaagcagcaatgtatcagtaaatgtactgtgaggaataaactattctaagaatcttcgggatgaattagatcagagaataatttgattttgattacaggttgtctctctactcctcatttaatgttccattaagattattttttagtcaagccaggtagaatcaaaatatccaagaatatagttatgaattgtcataggaatctggcattaatcacatacttattattaaaatgcaaaggttactttrtcttcctggaaatcataattcgcttttctctgccttttctgatgcaattttaaattttcccatgtagatgctccatcaaaagcatggaaacttaattttttgtatttagaaaaatgtctta

SEQ ID NO: 498960 - DNA, 554 bp, Homo sapiens
aaactattgctgacaaatctcccattgatatttwatatatccaaaagaaaaacattgataatgatgaacatgcagaatatttcttaacctttgtcccaatcctagagtatatataagtgtactttttaaaaataatatttctaaagtgatatcctagggtcacttgtgtttgaatttcctttgggtatttgttttaaaaatgtggaatctttgacccccacctctgattcattgaatcagaatcactggagtggggggcgggtgccaggagtttatatttttagaaagccccatatgtgattctgatgtttactaagttggaaaacaatcattattctgaacttagctattggctggagtggaaggaaggggagggttgaaattgaccatattgatgtagtagagcaagatcacttacgtcctcatgggcacactttgtggcagtgtttcttgggcttccagagatcatatgtgtcacacctgggtatcttgttaaaatgttgattctgattcaggtctggagtggggcctcagattctgcagttccaacaggc

SEQ ID NO: 498961 - DNA, 624 bp, Homo sapiens
tacctttgctctgataaaaataacataaacgagactgtagaggttctgttcagaaattattaaggaaagacaactttttcaagtaccctcaagtgtgttcatgattttcagatacatccatttacatataaattgttgtgtgaattgtaagcaatttcatctactcattaaaagaggtttccctgaggattcccactggttaatgctttgcttggtttctgttggtgtatgtgtttcaaaataaaaccaatttaaaaatattccatgattcagacttttgatccataaagacaggctttccaaacaataacctcgatattattctgaatgttttctggaccatccctgtcatgccatcttcaacgtcgatggcargaaaattcaattactggtgagaacaaatgctaaggcgaagtttcatttgtaaaatgcacagacagaaccagtacccagagaatcaaactaccagcaagagagaaagttttcaatctactacttaagaaagcatgaatatggagaagtgatttaaatgataaacctaattaaatgttcataacaagagcgttgatttcccataggtagttgtatacaattgtaaaattaaataaatagtaattataatgt

SEQ ID NO: 498962 - DNA, 422 bp, Homo sapiens
attttaaatataaaaagtatatttgtattgttaacatcttcccttaggaaattttgttctattttagccctaagtaaaataggctccagcaataagctgcatttttttttatcataacctaaacaatattttaggtgttaaactctcttacaaatgctatttttgtttacacactatayatgtcattaagtatctaagtccagaattaaaatatgagaatgctactctcatgtggcaccatgaatctctctttaatagcacttagcagtaccagatttcaattgatttttaaatttctaattctaattaaagatggcagagtaaccgcctgtgtgtatcttctctctttcctaagaccccactaaaaccaaagaaaaggaaaacataagatctgaactcagaagagcaaagtacagaagtgg

SEQ ID NO: 498963 - DNA, 311 bp, Homo sapiens
gtaccctctctgttatcagtatctgaatctctttaagacctagctaagatcttcacctctttgagtctttcctgctgaactcccagcacaaaataatctctaatttatctgaataactatggaatctgtcctttattttacaagcatataaagtattatttatctctcagaccctgtgygctgaggacaaaaagactgtgtgtctgtgtgtgtgtgtgtgtgtgtgtgtgtgtgtgtgtattgagacacaaatctgattcaaaaacaggcttagtttaggctttctaacacttggtaggatatgttttttc

SEQ ID NO: 498964 - DNA, 510 bp, Homo sapiens
ttgtcccctccccaaaggtaggctggagtagcttgtgaataagttcaatacttgagttgggaacaggggtactgtttcttggctcttctgcttccaagggtggggctttctgaatgctcctcatactctctccatggcagctgaattttcccttgtatgtgtagcggtaaggtggtttggggagggaacagatttcctgccacattactctccccagcattgtgttttgtgcctayttcacagtgacagcttatccccagtctaaacctacactgcctagtgagtctctctctgtcttctcttgcactgtccccaagctttctcatgagcacccagtggaggaaattggaaaagagtgagtacaaattcccccaaatcctattgtgttagaggctcccagctcacataagggctttaacaaatagctaaaatctgagttgttttctgattgtctgcctgtatagcagctaccgtttcttcccctggtctgacaaatgtcagttaacatcc

SEQ ID NO: 498965 - DNA, 551 bp, Homo sapiens
atctctacaaaagacaaaaattaactgggcatggtggcactcmtcagtggtccaggctactcgggaggccgaggtggaaggatcgcttaagcccagggaggtcaaggctgcaatgagctatgattgcacccctgcactttagcctgggtgacaaagtgtgactttatctcagagagagagagaaaaaaagaattttagcaatgttgcctcttggaggtaattttggataaaaaagagtggataagtcaaatttcttgtccaggagtgaataagaaaaaaggccaagtagattgtgctggccattgtcactcagcaggacacacaactgagcttcaatcagagttcataatagagtagcttattggagagcatatcaaatagctcatttggtgaaatttaggcttatatctggcttatggcattgcacatagtaggcatccaaatgctcgttaaattgttttgactcaataacagtttatatcccattcactgtttgggttacattttttttaaaaaagtcaatatttgttttcactggataattcagaaag

SEQ ID NO: 498966 - DNA, 551 bp, Homo sapiens
atctctacaaaagacaaaaattaactgggcatggtggcactcctcagtggtccaggctactcgggaggccgaggtggaaggatcgcttaagcccagggaggtcaaggctgcaatgagctatgattgcacccctgcactttagcctgggtgacaaagtgtgactttatctcagagagagagagaaaaaaagaattttagyaatgttgcctcttggaggtaattttggataaaaaagagtggataagtcaaatttcttgtccaggagtgaataagaaaaaaggccaagtagattgtgctggccattgtcactcagcaggacacacaactgagcttcaatcagagttcataatagagtagcttattggagagcatatcaaatagctcatttggtgaaatttaggcttatatctggcttatggcattgcacatagtaggcatccaaatgctcgttaaattgttttgactcaataacagtttatatcccattcactgtttgggttacattttttttaaaaaagtcaatatttgttttcactggataattcagaaag

SEQ ID NO: 498967 - DNA, 629 bp, Homo sapiens
ctccaccactcaataaaaccttgcactcatcctccaagcccacgtgtgacctgatttttctggtacactagggcaagaaccccgggatacagaaagccctctgtccttgtgataaggcagaatgtgtaattgagctggttaacacaagctgcctgcagacagaaaagttgaaagaacatactgtaacacacatccactggggcttcgggaatcgcagacatgacacccctagacactgccatgggactggagcccaaaaagtgctccccatggcctctgtatctgcccatctgcatgctcccctttggggtttgagcagcggggcactgaaaatatgagccacaccctgtcgcacttcctgmgagggggataagggaacactcccatctcattactatggaactaggagtaaacatttccagattaaaacccaacaaaaaaagtttaaaaattcgtattatcaaaagtaccacccctccaaatttatttcattaaaagatgaaattccagtaaaattttactaatgcagaagaagtttagatgtcaacttaaaatgtgcaaacagattcagaggtgtgaagaccactaaccacacaacgcctttctagaatattctaacagaatgccac

SEQ ID NO: 498968 - DNA, 625 bp, Homo sapiens
ctgctgatacaagtgtcaggaaggcaaaaggctagaatgagctgaacccggcagaaaatgcaaagagctacaaaagggctatttttgttatgctcagggcaaggagaacaacaagacgacatagstctgacgcctggagagggtgttgtgatactaacagtgacagcaagtgcagttactcagcctccagtctgcatctgtgttccctcaagatagaggagatgctttccatacaggggagaggggacactgtttcagggaagtgagatccaaaataaggtaccacgattgtcagagtgcctgccctctctaaataagtctgaggctcctggccctgatgaattaaagcccaggctactcatggcatgaagtctgaagtagccacaacatcgatggtaaactctaaagaatccaggagaataggagatgtaccagcgaataaaaaggaataaaaatacaagttgtgccaatcacatatcagtaagcatcatgccaatcccagacagactgctgtaatgcattattaacaagggggacagggtgaacactcaatgcagcaacgattacttggaatcagcatggattcgctaaaaataattcataccagtcaatgctcattccattt

SEQ ID NO: 498969 - DNA, 517 bp, Homo sapiens
aagtgtcaggaaggcaaaaggctagaatgagctgaacccggcagaaaatgcaaagagctacaaaagggctatttttgttatgctcagggcaaggagaacaacaagacgacataggtctgacgcctggagagggtgttgtgatactaacagtgacagcaagtgcagttactcagcctccagtctgcatctgtgttccctcaagatagaggagatgctttccatacaggggagaggggacactgtttcagggaagtgagatccaaaataaggtaccacgattgtcagagtgcctgccctctctaaataagtctgaggctcctggccstgatgaattaaagcccaggctactcatggcatgaagtctgaagtagccacaacatcgatggtaaactctaaagaatccaggagaataggagatgtaccagcgaataaaaaggaataaaaatacaagttgtgccaatcacatatcagtaagcatcatgccaatcccagacagactgctgtaatgcattattaa

SEQ ID NO: 498970 - DNA, 478 bp, Homo sapiens
tcctagctgctgattccaatctatggcaggtatatctgactggcttagtctacgtcacacacgtgtggcctgaccaccaggaaaattgagaaggcaagtgtcttagtttgggtttctccaggtaaaaatcctgaggtaaggataatttacttgggaatgattccaggaagtgccagtaggaagtggggtattgagataggaaaagagagaagctgataaaggacaggtcatgaaactgtaggcatgtcaccgctgtgggcaactggggctcattcttgttggggacctctgggagatagtatagattctcttggagttatcctacctgaggggcagggaaactggagttttgattgaccagttcccacccatcattgattgagtgtggcgttaactcctgagcgaactcaccttccctgcccatctaaccttgtctgtatcragagttacatgtgcttacattggcatatacaggagt

SEQ ID NO: 498971 - DNA, 539 bp, Homo sapiens
  misc_feature (1)...(539): n = A,T,C or G
gcattttggtgggaagttttattgtagatgagacagtgagctctgatgtccaggccattgttgggaaaccaagttgtggtcctgaaatgactaccccanagtgttggtgtagtctcctttcccatgatccatactaataatagagatgaccacaggttggcacatgacctgtctgagtttgggttcccccaaaagcagatcctgagaaaggaatttgaatgcaaatagtttatttaggaaagaccaataaggaaatgaggaagyatattaatcaaggttcttcagataaacagaataggatgtttgtatgcagagatagagatatagagagagacagagatagagatagagacaggtttattttaaggaattagcttacatgatcctgggtcctggcaagtataaaatcttctgggcaggctgacaggctggagacccagggaagtgctgatgttgctgtctggacttgccataatccaagttggaaggcagtctggacgcagattccttcttcctctgggaacctcaggatttttaag

SEQ ID NO: 498972 - DNA, 539 bp, Homo sapiens
  misc_feature (1)...(539): n = A,T,C or G
gcattttggtgggaagttttattgtagatgagacagtgagctctgatgtccaggccattgttgggaaaccaagttgtggtcctgaaatgactaccccanagtgttggtgtagtctcctttcccatgatccatactaataatagagatgaccacaggttggcacatgacctgtctgagtttgggttcccccaaaagcagatcctgagaaaggaatttgaatgcaaatagtttatttaggaaagaccaataaggaaatgaggaagcatattaatcaaggttcttcagataaacagaataggatgtttgtatgcagagatagagatatagagagagacagagatagagatagagacaggtttattttaaggaattagcttacatgatcctgggtcctggcaartataaaatcttctgggcaggctgacaggctggagacccagggaagtgctgatgttgctgtctggacttgccataatccaagttggaaggcagtctggacgcagattccttcttcctctgggaacctcaggatttttaag

SEQ ID NO: 498973 - DNA, 539 bp, Homo sapiens
  misc_feature (1)...(539): n = A,T,C or G
gcattttggtgggaagttttattgtagatgagacagtgagctctgatgtccaggccattgttgggaaaccaagttgtggtcctgaaatgactaccccanagtgttggtgtagtctcctttcccatgatccatactaataatagagatgaccacaggttggcacatgacctgtctgagtttgggttcccccaaaagcagatcctgagaaaggaatttgaatgcaaatagtttatttaggaaagaccaataaggaaatgaggaagcatattaatcaaggttcttcagataaacagaataggatgtttgtatgcagagatagagatatagagagagacagagatagagatagagacaggtttattttaaggaattagcttacatgatcctgggtcctggcaagtataaaatcttctgggcaggctgacargctggagacccagggaagtgctgatgttgctgtctggacttgccataatccaagttggaaggcagtctggacgcagattccttcttcctctgggaacctcaggatttttaag

SEQ ID NO: 498974 - DNA, 645 bp, Homo sapiens
tccttaacctccttgagtgatgtttctccccgactgtcctcacatgcagttagctgtatagggtgcccaagaggatgatggggtgcaaaccactcccagatyaggtatgataaaggttaaaaggctcacaaatctgccttatccagtccagaatgacacaaaatccaggactttgtaatcatttccagtttcctaattagttcacccttctttccagccatgattcaggttgccagagaaaatacaagatgcccaggtaaatttggatttccaataaacaatgattttttagtataaatatgcccaaacaacaatttttagtgtaagtatgcccccaatattgcacagaacttacactaaaaatgtatctgttgtttatctaaaattcacatgtaaatgggagtcctgtatttatttgtacatctggcagcccttgtccaaggtcgcagaagcatctctcagtatcatcagaaaaacctggtgtccccttctgcatcaggttaggtatctcataaaggacttagatgcaggtggtttgactgggaggtgatcccaggaagcacagcaaggaatcagggaagtgaggcagggaagtgagggaagcaaataaaagaggtgttaatgaggacattacccctgtgggca

SEQ ID NO: 498975 - DNA, 645 bp, Homo sapiens
tccttaacctccttgagtgatgtttctccccgactgtcctcacatgcagttagctgtatagggtgcccaagaggatgatggggtgcaaaccactcccagattaggtatgataaaggttaaaaggctcacaaatctgccttatccagtccagaatgacacaaaatccaggactttgtaatcatttccagtttcctaattagttcacccttctttccagccatgattcaggttgccagagaaaatacaagatgcccaggtaaatttggatttccaataaacaatgattttttagtataaatatgcccaaacaacaatttttagtgtaagtatgcccccaatattgcacagaacttacactaaaaatgtatctgttgtttatctaaaattcacatgtaaatgggagtcctgtatttatttgtacatctggcagcccttgtccaaggtcgcagaagcatctctcagtatcatcagaaaaacctggtgtccccttctgcatcaggttaggtatctcataaaggacttagatgcaggtggtttgactgggaggtgatcccaggaagcayagcaaggaatcagggaagtgaggcagggaagtgagggaagcaaataaaagaggtgttaatgaggacattacccctgtgggca

SEQ ID NO: 498976 - DNA, 596 bp, Homo sapiens
tcagatagcttctacctactttcttaattcttacaaaaaaaaaaaagtagtgcttacttttgaggccctctggtatttcacgcctgcctctgatattcttaactttacgttctccttgaaaactcattatttcaaggtagtatatgttgaactaatagattttaatacttgcatagattggatacaaaaatcactaatatcactaatagtcaaggattcttcaastctactgaagcaaaacaaaataaaaaaaaaaaactgtccaaataacatttagcattcaaaatggaaaatagaaaaaaaattaaagtaaacccagattattcttaccactttacaacttgttgaatattcttgaatacccttggagagttgataatagtaattagagagcttgcatgcgaatgctggttagatcagttgggttaaattatgactctgcccttgttttagctaggccaccttggacaagtttctaaacatctctatgcccaagtttcctcatctgcagaactaggaaaatagagttgtaaaaattaaatgagctgatatttacgaagtgcttagaatagcaccaggtctaaaccccagtgtta

SEQ ID NO: 498977 - DNA, 564 bp, Homo sapiens
atctgcaaaggagtctcccttagccacattagagtctcctttttgacgtcytctgcaatggattacagctacttccttgggcagcaaaacagcatctaatagatttagaatttctaagtgatgttttacaggagaacccttagcagctcagagtccctgttccttctagatagcagcaagagcatgaagtaccagaaaggcatacttagaatcagtgtaaatgttaactcttaaatcttttcttaattgcagggctctaataagagctattaattctgccttttgagctgaggtagaagctggtaaggcctgagattcaattacctcatgttaactgacaacagcatacccagctttcctgtttccctggtgcacaaagctacttctatctgtaaaccattctacctcaggattatctagaggctcatcctttaaatccagacggctggagtaaacttgctccataacttgtatataagaatgatctagggtgcctgtgggtttaggcaaataggtagctggattcaaagtttggcatactttaagtgttatataaggagcatc

SEQ ID NO: 498978 - DNA, 618 bp, Homo sapiens
caggaccttctgtttaaccagacagtttgcctggaaatagttgataaattttaaaaaatcaatgtttcagacaaattgaaaaagactttcaggtgatctgtgagtctcaataataaagaaatagtggtaaagagaaaagaagagagaaaaaggagaagaattaaagaaaaggaaatgaatactaaaataaacactgcctattcaaagtacagagaactaacsttggtatattttaaggtaatctttttgtttcacataatttaggtatactatttgacactgtattttttctaaattgtattgcagtgatttttttaaaggaaacaaaatctttattttttccatcttagattgaataacgcagtgtaatggctcaaaacatgaaatctaatctcacatgacctccaaggtttttttgatcttttctcctcaagatgctaagagtttatgaaatgctaaacatgcaacccaaatctgccatgaccaagtcaatttcagatttccattgttaccaagcttgtgtactaggtggatatgggctttgatgagtggtttataatttatctggttgtctttctgtgcttaatccgtctgtgggagtgacagcttgacataatc

SEQ ID NO: 498979 - DNA, 644 bp, Homo sapiens
ctgctttcaggaggaagcatgcttttatttaagggactgtaactgatttataagagaataaagcactcttcgtttactcagctagaaattatataggcctttcctcatttcacttccaaaagaggaacatttggatattgcagagaaccgactttgacatctttagagagtggaatcacttggctgggctcatttcctggatcctgtgttttcatagcacagtttcaaagacagtgtaaagccaacacacacttaaaattcttggtttctatcaaaacaaatctgccatttcctgctttactttttcagtgaggttcattacagtgctaaatttgaacctcattaaaaaataacatctacacctgtccttagattattcctaaaaagtaacattctcctattttatagtaaatgctactgtatgcaaacttgaaatctatacttaatatcattgagtaaaaatgtgaccagacttaggttttaaactatgaaacatatgtgtataagttcttccccttttgccctttgagaaatcaaattgaaattcaactgaggaggaaataggctaatgcaaataagaaattgtcatctgggctyttgctactcaaaaggtgttttttgaaacaataacatcagcattaagt

SEQ ID NO: 498980 - DNA, 209 bp, Homo sapiens
atccaagccgttctcagccactggattggtgggctgctttgctcagaaactcctcgatcaggaatcccaagcatacgttagtgatgacggtcccaaaacaagggacatttcttaaccattctaaaaacccgtttgctcatyagtaacgcaatgaaagttgctttcgtcttggttcatatattttatatttgagcaaggcaatgtccgct

SEQ ID NO: 498981 - DNA, 209 bp, Homo sapiens
atccaagccgttctcagccactggattggtgggctgctttgctcagaaactcctcgatcaggaatcccaagcatacgttagtgatgacggtcccaaaacaagggacatttcttaaccattctaaaaacccgtttgctcattagtaacgcaatraaagttgctttcgtcttggttcatatattttatatttgagcaaggcaatgtccgct

SEQ ID NO: 498982 - DNA, 209 bp, Homo sapiens
atccaagccgttctcagccactggattggtgggctgctttgctcagaaactcctcgatcaggaatcccaagcatacgttagtgatgacggtcccaaaacaagggacatttcttaaccattctaaaaacccgtttgctcattagtaacgcaatgaragttgctttcgtcttggttcatatattttatatttgagcaaggcaatgtccgct

SEQ ID NO: 498983 - DNA, 669 bp, Homo sapiens
atgtacttaaaagtttaaaaaaatcaattcactatttttgcataaaactttatatcattaccataaatggaaaaacataatcattttatgttaacagaaggcaattgtacaaattaaaactttaaaaacaaaaggatattaaattttagcttgatgccattgtctgccagacttctatttaaaaatatgcctatcagttgctgagggaggtgttaagacaggctagcgcctaactgaatccttttccttgatctaatcagaagaactggaaggaaaatgaaagagaaataattttctgttgggtaagtttgacatcctttaaagtcacatacatgcccctcagcacccgtaaaacaatcttttccatatcagtgtcagcccactgcctccatctacccctgagactggctctgtggactgtatcagatcctaccctgtagtgcatggcagagagtggccagccctttattgaggggaaatattatgattaccaaagcaaccagctctgtggtcatttctcaaagcaaccagctccagggttgttattagttaacttctctgaaggcmtaaagtcgcctctgaatcgagttgattagtttgtccagcattgttaaggctaagaccagaaagaaaattaaaaaccaaagccaaaaccaaaaaacaacagct

SEQ ID NO: 498984 - DNA, 584 bp, Homo sapiens
ctgttcatgggaagctatataagcttagattcctttgtcccagttaaagagaaaatggttctagtaaagaaagatggatttaaaatagtggttacccatggagtgaacctaagtgataaaagaagacagataggataatggacatcgaccagcacattagaggatgcacatattatttcatatttgcagaagtgcacactttgggaattctgagctagacactcattcaaatgaatctttttattgcttttgattacacaatcttttagtccctccttgtcagttcccagttgtctcctattagagaattacaatcagtctttatgccagaaaagcataaacttgaggggagagaaaggacaaacagaatggggtggatgataaggaaaaggagatatatgagtcaagatttcattatgcaagttaaatttacactcctgtsccaggaataaataaacataaacaaggattgcagaccctcctcatatacaaaagattgtaacttcattcaaccctacagtctagctgtctgatttaccctgaatttgttcatcagctccctgctaccaggcttgtgtctcagc

SEQ ID NO: 498985 - DNA, 628 bp, Homo sapiens
gcctgccacccaattccatgatgcttgagttgcttgaactcaaatcttgtgagttttgtcagtaactttttttagaggattgcctaagctaaaatccatgcaaatagaacaaatataaatgacacttattctcacctttaatttgtagttgtggtgaaatccacaacctttaaaatttgacaaaagcctttgatattaggcttagagatatttataaagtttacctagtacatgaatttctctaggaaattcatatatagtaacttatataaccctcataacaaccccatgtggtaatattattgctcccactttaaagataatgcaaactaaggcatttaatacaaatataaactaaggcaagtttaaggaacttgcttctcactgcttaagtagtggagccaggctttgaatcttggaaatctggccccagagtctatgtttttaaccaatgcagagtgctcagttggaggagtcaagttctctgaatctctaataccaatacaggaaaaactgtagtttacttgacattgtgtatgatgttaaagctgaggtcaggacctgggagttaaaaactagacatggtggatcctgcttttttgcrgtatatccagaccaagcttaatgg

SEQ ID NO: 498986 - DNA, 358 bp, Homo sapiens
cacccagttcttttttgttttaagttgtactttagaagagaaaaaaattcatcaacacccttttttttaaaagatggaaaatgggttaagaaagtagcacgaggaactgtgagcccaacataattagtgtgatgaaagagaagttagccatttctgtatgtaacttttgattaatgatattcagctctaattaattatgtccaattctaattaatgacattagtgtgcaagcyggcattctcaaactatattctgaggattcccagcggatgttcttgaatataatagtccccggtcacattaggttgggaagtgctgtgtgtactgcccgtcttggacactcccaaagcaccatata

SEQ ID NO: 498987 - DNA, 573 bp, Homo sapiens
ttggagggtgcggcatggggtggaggcccgtgcaccagaggctcctcatagagtctctacagagagatgaccaggctagcgttttcatggcatggaggttgtcttcagaaactcgcttcacaatctacttaagatgagtcaaatctaccctccaaagaacatctgctgctactggagatagcgcttcaaaagctaatgcaggtgctgaatgtttttccaccatgagggttccttctgtgcatcaattagtctagactcttgctrtttgaggaaagaggctcagagtagttaagccactagctccaggtctcatagctggctgataggacatcaacctgcggagtctctatggaggtggaatagtttcagtggtgcactgaaacagtaggggatggataggagaaaggcttggtctattagtcaggttgagccagagaagcagtaagggatggatatgaggagatacattgtgaggaatctgcacacgcggttttgggacctggccaggcaagcctgaagcccgcagggcaggccatggggaagggcaggctggaactcccaggcatggctgca

SEQ ID NO: 498988 - DNA, 481 bp, Homo sapiens
ctgtttcaatgctgagtgtgaaggccaagatcccatggaccacaggcaatgctgctggagggcagcgtgaagctgagaggcagcatctggtgctaaaataaggaggggctgacttttgagccaactatacattatttccaactcgggaggagaggaggattctgcacaaacgctggtagggagtgatgagggggtgggagtctcaaccagccatatgggtcctcatttcatcaaaactcctggagcctgcaaaacccagatggagactgggattccaggctaagggagacaccaggacytccaggtcccagggaagcaacagggtcacagagtaaccaacaagacccgcctgttcttccttttcctgatgaatcttgacatttatgtcatacaaagagcatggactagggctctgaaggtacaaatgtgagtcgatctccattagctgcttgaaattagcaaaaatcacatcattgctcta

SEQ ID NO: 498989 - DNA, 578 bp, Homo sapiens
agctgtccccatataacagttgtatccctagaaggagtatgcagttaaagtaaytggagattctttgaccagacgttttgagagtctggcagcccggaaaggtgggatttggcagctatgtgggaccttccttcaggcactaaagggcttcctgaaaaagttgcttatacattgaggtgtgttaaatggaattctttatcataaggctgcaaactgcttctgtgcaaaaggcaatgtgttagttccttgcaggaatatgcttttagtgaactcaatgagataccagaaatccagtaggagaacactttctttgaaagaaccacttgtttctacctacgtttttgcccacctttccttctcacctccccttggccacaccccacttttgtgtcttgggaattatctgctgtgctctgaatagccccgtcctgccaggccacccacctttgcccttgtttgaagaagctggggacagttgtccttgctctccaccccctggagtaggggaagaaggcttggaatgtggtgggcctaggcttcttggtgagggccttgtatttgttgacaaggaggtcaga

SEQ ID NO: 498990 - DNA, 578 bp, Homo sapiens
agctgtccccatataacagttgtatccctagaaggagtatgcagttaaagtaattggagattctttgaccagacgttttgagagtctggcagcccggaaaggtgggatttggcagctatgtgggaccttccttcaggcactaaagggcttcctgaaaaagttgcttayacattgaggtgtgttaaatggaattctttatcataaggctgcaaactgcttctgtgcaaaaggcaatgtgttagttccttgcaggaatatgcttttagtgaactcaatgagataccagaaatccagtaggagaacactttctttgaaagaaccacttgtttctacctacgtttttgcccacctttccttctcacctccccttggccacaccccacttttgtgtcttgggaattatctgctgtgctctgaatagccccgtcctgccaggccacccacctttgcccttgtttgaagaagctggggacagttgtccttgctctccaccccctggagtaggggaagaaggcttggaatgtggtgggcctaggcttcttggtgagggccttgtatttgttgacaaggaggtcaga

SEQ ID NO: 498991 - DNA, 578 bp, Homo sapiens
agctgtccccatataacagttgtatccctagaaggagtatgcagttaaagtaattggagattctttgaccagacgttttgagagtctggcagcccggaaaggtgggatttggcagctatgtgggaccttccttcaggcactaaagggcttcctgaaaaagttgcttatacrttgaggtgtgttaaatggaattctttatcataaggctgcaaactgcttctgtgcaaaaggcaatgtgttagttccttgcaggaatatgcttttagtgaactcaatgagataccagaaatccagtaggagaacactttctttgaaagaaccacttgtttctacctacgtttttgcccacctttccttctcacctccccttggccacaccccacttttgtgtcttgggaattatctgctgtgctctgaatagccccgtcctgccaggccacccacctttgcccttgtttgaagaagctggggacagttgtccttgctctccaccccctggagtaggggaagaaggcttggaatgtggtgggcctaggcttcttggtgagggccttgtatttgttgacaaggaggtcaga

SEQ ID NO: 498992 - DNA, 578 bp, Homo sapiens
agctgtccccatataacagttgtatccctagaaggagtatgcagttaaagtaattggagattctttgaccagacgttttgagagtctggcagcccggaaaggtgggatttggcagctatgtgggaccttccttcaggcactaaagggcttcctgaaaaagttgcttatacattgaggtgtgttaaatggaattctttatcataaggctgcaaactgcttctgtgcaaaaggcaatgtgttagttccttgcaggaatatgcttttagtgaactcaatgagataccagaaatccagtaggagaacactttctttgaaagaaccacttgtttctacctacgtttttgccyacctttccttctcacctccccttggccacaccccacttttgtgtcttgggaattatctgctgtgctctgaatagccccgtcctgccaggccacccacctttgcccttgtttgaagaagctggggacagttgtccttgctctccaccccctggagtaggggaagaaggcttggaatgtggtgggcctaggcttcttggtgagggccttgtatttgttgacaaggaggtcaga

SEQ ID NO: 498993 - DNA, 556 bp, Homo sapiens
tacaaagccgttgagagacatttaagacttcaataaataggaagatttttttgggtgaaattgggtaaaaagactcagtattgtaagtatgaataatttctgaggccggggcacggtggctcactcttgtaatcccagcactttgggaaaccgaggtggctgatcacttgaggcaggagttggacaccaacccggccaacatggcaaaacttcatctctacaaaaaatacaaaaattagccggagggtgatgacacatgcctgtaatcccagccactcaggaggctgaggcacaagaatcactttaacccaggaggcagagactgcygtgagctgggatcgtgctactgcactttagcctgggcgacagagcgagaccttgtctcaaaagaaaaaaaaattccctaaagtaatttataacttaaagttactccagccaaaatttcagtggaatattggggatacttggaaccactaactcttaagttcttttgggagaataaatgtgaaaatagcaggggaagatgacaaaatgagaataatgagagagaacttgc

SEQ ID NO: 498994 - DNA, 674 bp, Homo sapiens
ttacttctgttaccagcagaagtgggtgagaaagccggccacagtccactaaacacrggctatgaccaaggtctctttgacaacataatccaacaaataggcttgttttagaatataaatctcaaggaatttggggggagttgatatactcttgttttttactttttattttgaaatatttttagattcacaggaggttgcaaagaaatattcaagaagatcctgaacactcttcacttagccccgcttcaatgttaacattatgcataacgatggtgcaatagtcaaaccaggaaactgacagtgatgtagtcaacagaaactagtcagactccagtagttataatgtatgtatgtgtgtgtgtatgtgtgtgattctgtccaattgcatgtgcaacttcatgtaaccaccaccacaatcaagatatttaattgtatcatcagcaaaggactgcctcatgctaccccattgtagccacatgcacagtccctcttccatcattcctaacctatggcaaccactggagcacatttggagtttccagtttggggctgttatgaacccagatctgctatatgaacattcacttacaagtttatatgtgaacacaagtttttattcctctatgatcaattatccacaattgctggagcgcatggtaaattcattttta

SEQ ID NO: 498995 - DNA, 674 bp, Homo sapiens
ttacttctgttaccagcagaagtgggtgagaaagccggccacagtccactaaacacgggctatgaccaaggtctctttgacaacataatccaacaaataggcttgttttagaatataaatctcaaggaatttggggggagttgatatactcttgttttttactttttattttgaaatatttttagattcacaggaggttgcaaagaaatattcaagaagatcctgaacactcttcacttagccccgcttcaatgttaacattatgcataacgatggtgcaatagtcaaaccaggaaactgacagtgatgtagtcaacagaaactagtcagactccagtagttataatgtatgtrtgtgtgtgtgtatgtgtgtgattctgtccaattgcatgtgcaacttcatgtaaccaccaccacaatcaagatatttaattgtatcatcagcaaaggactgcctcatgctaccccattgtagccacatgcacagtccctcttccatcattcctaacctatggcaaccactggagcacatttggagtttccagtttggggctgttatgaacccagatctgctatatgaacattcacttacaagtttatatgtgaacacaagtttttattcctctatgatcaattatccacaattgctggagcgcatggtaaattcattttta

SEQ ID NO: 498996 - DNA, 674 bp, Homo sapiens
ttacttctgttaccagcagaagtgggtgagaaagccggccacagtccactaaacacgggctatgaccaaggtctctttgacaacataatccaacaaataggcttgttttagaatataaatctcaaggaatttggggggagttgatatactcttgttttttactttttattttgaaatatttttagattcacaggaggttgcaaagaaatattcaagaagatcctgaacactcttcacttagccccgcttcaatgttaacattatgcataacgatggtgcaatagtcaaaccaggaaactgacagtgatgtagtcaacagaaactagtcagactccagtagttataatgtatgtatgtgtgtgtgtatgtgtgtgattctgtccaattgcatgtgcaacttcatgtaaccaccaccacaatcaagatatttaattgtatcatcagcaaaggactgcctcatgctaccccattgtagccacatgcacagtccctcttccatcattcctaacctatggcaaccactggagcacatttggagtttccagtttggggctgttatgaacccagatctgctatatgaacattcacttacaagtttmtatgtgaacacaagtttttattcctctatgatcaattatccacaattgctggagcgcatggtaaattcattttta

SEQ ID NO: 498997 - DNA, 674 bp, Homo sapiens
ttacttctgttaccagcagaagtgggtgagaaagccggccacagtccactaaacacgggctatgaccaaggtctctttgacaacataatccaacaaataggcttgttttagaatataaatctcaaggaatttggggggagttgatatactcttgttttttactttttattttgaaatatttttagattcacaggaggttgcaaagaaatattcaagaagatcctgaacactcttcacttagccccgcttcaatgttaacattatgcataacgatggtgcaatagtcaaaccaggaaactgacagtgatgtagtcaacagaaactagtcagactccagtagttataatgtatgtatgtgtgtgtgtatgtgtgtgattctgtccaattgcatgtgcaacttcatgtaaccaccaccacaatcaagatatttaattgtatcatcagcaaaggactgcctcatgctaccccattgtagccacatgcacagtccctcttccatcattcctaacctatggcaaccactggagcacatttggagtttccagtttggggctgttatgaacccagatctgctatatgaacattcacttacaagtttatatgtgaacacaagtttttattcctctatgatcaattatcyacaattgctggagcgcatggtaaattcattttta

SEQ ID NO: 498998 - DNA, 618 bp, Homo sapiens
aattaacgttctccaaagagtggaagagtccctaaacattctgaaatacagatatgttctatgcaaaagaaaaaagacagataccacaggcttgaaaaacattccacaaacttggcctttgatttgatattcatagcttgaagcaactgctctcagctaagcaatagatgagcaaagtggaaaaaaaaaatacagtagattccagtcagtagattctagtagcccagtgtcaacatatataacacctgatgacaagggctaagaaattcaatttgaattttaaaagtcattccatttgccagcaccaaaaatacgttattaggataaacttacaagaggattgctctgccttaactcagcaaactgatgcatctggtacaagtmaccaactgacttgatttcctctgccatactcaggtaaaatgccctataataatgtggcacgttattaaagtataagttactcaatcaagcatctctttctcaaagagatagtaaaatctttgaccacttatgtgcacctagcagcaacagacacaatcacactctaagaagacaggtgaaaaggagagcagataatacagcactgtgaaccacagtcacactacatatatacaa

SEQ ID NO: 498999 - DNA, 630 bp, Homo sapiens
acactaatccttctgaatttagtaaaaattttatttacctgacttcctataactcctcttcaatgcctaaataatccataatttctgatcttggcttctgcatacctttctcggcttctcagaaatcttgcataggtcctactcctgatcccactgcaggtcctagtcattttcttcatcctgatgacacctcattctggagttccaaaggttgtaagagtgttctcctgtgtggagtacaaaatggtaaggtggataaaggcatggctgctgacaagtgtggtttgaattatacccagttaacaagtattgaaactgcactgtatgtcattcaaatattttgaaaagggtgtaataagttgaagggatgggtgtgtttcatctgtataaactttaaaatttaaaatttaaaacactgagtamaaatttcaaaatagccaattccaacctgaagcatatttcctcagattatttataaaaatatggcatagatagctccacggctcaagagacaggtagataggtaggtggatagatagatgatagatagatagatagatagatagatagatagatagataagatagatgaatagattagataagggccctgcaaacaaaatctctgcag

SEQ ID NO: 499000 - DNA, 630 bp, Homo sapiens
acactaatccttctgaatttagtaaaaattttatttacctgacttcctataactcctcttcaatgcctaaataatccataatttctgatcttggcttctgcatacctttctcggcttctcagaaatcttgcataggtcctactcctgatcccactgcaggtcctagtcattttcttcatcctgatgacacctcattctggagttccaaaggttgtaagagtgttctcctgtgtggagtacaaaatggtaaggtggataaaggcatggctgctgacaagtgtggtttgaattatacccagttaacaagtattgaaactgcactgtatgtcattcaaatattttgaaaagggtgtaataagttgaagggatgggtgtgtttcatctgtataaactttaaaatttaaaatttaaaacactgagtaaaaatttcaaaatagccaattccaacctgaagcatatttcctcagattatttatraaaatatggcatagatagctccacggctcaagagacaggtagataggtaggtggatagatagatgatagatagatagatagatagatagatagatagatagataagatagatgaatagattagataagggccctgcaaacaaaatctctgcag

SEQ ID NO: 499001 - DNA, 665 bp, Homo sapiens
tgtttttccatttttaaatacttttaaatatttggtcttttttacttactgccattttagctaactccaaaatcaagctgtctttctcttttaagaacattttggaggcttttactttcrtaaataacagttgaggtataattaagctgtgataacagtcattattttaaagtgcacaattactggtttttaatttatttagagttgtacaaccatcaccattatctaattttatagcatcgcatttttttcacccccaaaagaaactgtacctgctagcagttactccacaatctcccccaaccccccaggttctgaaaaacactaatctttctttcttcatgaatttgcctcaaaatattcctttttaatgaaacttgctaattctctatagattttattgccatacaaacgggtagagtttgaaagatcaaggaaccaatcaaatcgtgacatcaaggaagaataaacactgaagaaacttagtgattattagttgactacagttaggaaagtcgcaagagagaagaattttctttaggggcgtattgtcctttgtataaagactacaagctagttagggattgtatcagagaaatggcaattgtccctttgacaaaccataaaaaaaagtgcttagggcaaatcaatcgtttgagcagcaa

SEQ ID NO: 499002 - DNA, 516 bp, Homo sapiens
ttcactcaaattttcacagattctaaaaaatttttataataatatatcatttctagcaaaaacctcatatgtgtaataaaataagatatatcttcaaaataaactagccaagtgcacagttaaaatgtccaacctagaagacttgcattctcgaagataattatttctctctgtcaaggragtacactttatatacaatctgggtgcatctgggaatgccatctgggcttaccatgtatctttcccctatggttcttggggaataaggggaactgataagaataggaggtgcatgatatttgctgtgctctgctgcaatgatgtcctttgctctacctccagagtctttgtcttatgctagcatccatgaaactggggcgtattaacttgttaggcttcaagcaggataaaatctgagtcctgttagatttcttgacagtatctattaatcactagctgtgtaatctgaaatatgctatctactggacaatatactttatgaatatcacagtgaat

SEQ ID NO: 499003 - DNA, 567 bp, Homo sapiens
cacatacattatcactaataatgtgattttgcattttctgtttcttcattacgtttttgaaagatcacaaatattattatttccttcaatacaggcacaggaatgacttgataaagcaattgttaagttactaaacctacttatatttattgtgcgaaaagtggctgttaattgtttaattgtggcctgagggaaattacttggagatacatttaattttgacttatagtcacatgaaaggtgayctctagacatgtctgtagaaaatgtggaaacaaacactgaaaaattattatgaacattatatttgtggggctccttttcattcagtctattagaaggttttccagcaaataaatcatctgaacagcaatataactagaggtgtagaacatagcatcgagttctgatattaaaccaacctgggagagatagagtttatattacctttctattactgcagtaacaaattactgcaaacttggtggcttaaaacaatttacatttattctcttacagttttggagatctgaattccaaaattatcttactggtttaaagtcaagg

SEQ ID NO: 499004 - DNA, 566 bp, Homo sapiens
ctcccacagccactgcccaagaacctactcctggaaaattctgagcctggaaacccgagctggaaacttgggctcgaaatgggcgcgctaggcgggactagccagacggggccacataccggaaggcaaaggatgctgggagagcgcggatccggaaagatcgggtcgctgtttcccggagtgacgggtttagataacggaccggatgattaccctctcaatcgcattgcccggggcgcacaaagtgtcaaaacttccggaaggggcgggtctcggatttcgccagcgcgggaggtgcgtggcttgctgcttagaaaaaaaaaaaaaaaaaaaaaaaaaaaggccgcttcttagcttggatcttttttcctgctcacttccatcacttaccaraaggtggcaacgtttccccacgtttccaattccaagccctaaaatggacacattttttcccccgttatttctgttatttctctccagtgatccgaattaattaaaccctcaattccaagacatttcattccatcaactttggagtgtaggaagggtgcgttggttgtgatagc

SEQ ID NO: 499005 - DNA, 599 bp, Homo sapiens
tctcttgtcagcaaataaattgcctgaggcatgccagtgaaagcacacacctgtgactggcaccaaaattaaaccctccaatgccatatggcttgctccttagcataaatcatgactaaccacgcatatgctttgaaggtcaacaaagttagaatctagttgttctgcaggaggcagtggaaagtaagaatgatgtggtagttaattatttctcagaacttctgtttccacaaacttccagatctgaacttggacctcattcaaaaaaatgggaacctcaaaatttcatgaaacgtatagargtcattttgagtctgatactacccagtctctttaggttgaagccccactcttgcaccaggctgtcagtattacatgaaggtcatgctcggatacccacattgaccatggtcttcaccctgacctgccccagcctgtgctctactccctgtatgtcctcctcacttttctctcctctcttttgcatgatgtctgacactacttaccgggcttcatcttctctgcttttttcttcagcctcagccagactgtccctctggccatgtcatgccttggacatcctgagtaataagcatatc

SEQ ID NO: 499006 - DNA, 619 bp, Homo sapiens
ctgatagggaagcttgacttgtaaaataattttgctttgatgatctcacccaacctattgattttttttgtcaagagttttattcagaaaaagcatgatataaaagatgaagtcaagatgagcagcagttattaaaccacattagaacccaggtctgtagtttcttttgctggagacatttacataagcagacatcatctttaatctttgtttatattgtcacagtcttgtttttagttcttttgcctcttaaaactaagctgtgattattagttggacatttttactggcttattcattccagttgggatttccttccaaccttgcctgggaaatccagttactaatgcaactacagagaatggtaagttcaacttccactaaagtagccatttctgtttatcaatttctaatttgtgaaatacagagctgacaactggagacacataaatgaaggagtctcttactacctgatgcagagagctgtctgtgctcatctgcattggcaggagttttaatttcaccgttttcactactatcttacttcmttgtctgtctttccctctctgtgcttcttttccttgtctacagggaagactatagatggctacagtctttt

SEQ ID NO: 499007 - DNA, 641 bp, Homo sapiens
agctgcagttttactaatctgtgtttcgagaaaaattaacaagcagttctatttttatttcatggagaaattcattttgagctattattccatcttagatctctagtatttgataggcttacagtggaaaaggttaatattgttttctggatagaattagcatccatcagatgcattgattgacaggacccatttcttattatcgatattttgagatattcacaaaaatcactgcaagaggcagaataaactgttctcttaytggtgctggtatctctgtgggggaaaaaaaagcataattgactgtagccatggggattcagacaattgtatggggactgataagagggatttatacaaggtttcatatttctaatctcatatggtttctttgtagacattattagacttattgttttgctattgttataattttttccagatgaaaagatatggctaatgtatgttcctatggaattaaaactactctcaaattaaccttaatgtatttaatcttaatgtatttaggctatgcttgaaaggaaagcactaataaacttgcttccatgaaacaatataaatgcccctatgtaagctacctaattttaaactggagtatgaatctataaattctgcattac

SEQ ID NO: 499008 - DNA, 660 bp, Homo sapiens
ttcaaatgtcctgtcatttactgagtcataacaatagtgttagcttccatgttaaggccactaaatattgaatcactttaggattcagcattttactcctttatctacacccactcccttagcgatcttatataacctcatgaatatacagtgtttatgtgatgattaatcttaattctatcacaaggccagtcatctattcagctagctactcggcaactctacatggaagtttatccatatttcaaacttgacttctgcaaaacctgatcctcttgaagatttccccattccagttaatagcaatttaatgtttcaatgcttgtgccaacaactgtggagtcatccttgatttctctctgtcatctacattccatatttttagcaaatctagtcgtaaccccatcaaaatatttcctgaggccctgcaagctgaagcttagtccttgttatacaggtgagaagaatatgtcagattgccagtgccttcctcttctataactaaaagttctttgagtctaacatctggataaattgtgcccaacattaaacttcatttttcttctrtctctatagaaatgcctcttattaaaaatcaatttgccttcatcacagacagaagcctagaccacctgagatgccatctcctcatattggaaa

SEQ ID NO: 499009 - DNA, 660 bp, Homo sapiens
ttcaaatgtcctgtcatttactgagtcataacaatagtgttagcttccatgttaaggccactaaatattgaatcactttaggattcagcattttactcctttatctacacccactcccttagcgatcttatataacctcatgaatatacagtgtttatgtgatgattaatcttaattctatcacaaggccagtcatctattcagctagctactcggcaactctacatggaagtttatccatatttcaaacttgacttctgcaaaacctgatcctcttgaagatttccccattccagttaatagcaatttaatgtttcaatgcttgtgccaacaactgtggagtcatccttgatttctctctgtcatctacattccatatttttagcaaatctagtcgtaaccccatcaaaatatttcctgaggccctgcaagctgaagcttagtccttgttatacaggtgagaagaatatgtcagattgccagtgccttcctcttctataactaaaagttctttgagtctaacatctggataaattgtgcccaacattaaacttcatttttcttctgtctctatagaaatgcctcttattaaaaatcaatttgycttcatcacagacagaagcctagaccacctgagatgccatctcctcatattggaaa

SEQ ID NO: 499010 - DNA, 555 bp, Homo sapiens
acacctgggaaattcatcgcaaaaagatcattgcctaggcacatagtcattaggttatctgaagtcaagacaaaggaaagaatcttaacagcagtgaggcaaaagcatcacgtaacctataaagaaaaacctatcagattaacagcagatttctcagcagaaatcctgcaagccagaagagattgggggtcctatttttagcctccttaaacaaaacaattatcagccgagaattttgtatccactgaaataagctttataaatgaaggaaagatacagtcttttccagtcaaacaaaagctgtgagaattcgccactaccaagccagcactacaagaaccgctaaaaggagygataagacttcaaaataaaccaaaatagaacctccttaaagcataaatctcacaggacttatataacaataacacaatgaaacaaacaaggtattcaggcaacaaatagcatgatgaataggataataatacctcacatctcagtactaatgttgaaaatgaactaatatagggactttagcactccactgacagcactaga

SEQ ID NO: 499011 - DNA, 382 bp, Homo sapiens
ggtcaaaatatttacattgagaaatatgtaagttctactaagtttggatagaaaaagcagaaaaatgctctattaagaaaatattaatggagaagatgttccataaggtgtaactgtttacttctcctgtttctcctgtttccccaggcggggggaacacaaagtcccaagcaatcttagtatctaactaaaatccrtgaatctaggtaatgtgatagtctctaaatgaagtctggatgtgattcctattgacctaagtgtcaatgatcccctttcccctaccaaatattacatagtgaagcagacacaagacaaccacagtgaccattttgacatgggaagaacaggagatataatggtcattggtcaacagcaattctga

SEQ ID NO: 499012 - DNA, 600 bp, Homo sapiens
aatatcatatctagccatagtaaaaataataaaacagaaatatagacgtgatctaaaacgaatacgtatgcaagtagaagataataaattaaaattattttcacttggcaagaatcaagtgccattgttaacattgaccaaatggtaagaaarattgggagaaatatttatataggaagtaaatccaattcatgaatagcaaataaagctcgtgctgaatcaaatgtgaaaactggtgattttgttctacttattgactagtttgaagaaatacacattatgttgtatcagtttagaaaagtaattgtaggaaaaagtaatctgttttgaataatatcaggaagattgattctttagtttttcttatggtgaaacaatccatgtttaatggtttctgtggggaattttagaaaaaacttcaagaattaactagcaaacactgtgctgatgcaaagttgtagaattttagtaaggaaaggtatatgaggaagtcaaaggataacatgtatagacacctgcagcatggtaaatgttttagcaattcatgtaatagaaaccagaaggtgccttgaaattcacaaaaaacagtagtgcacacca

SEQ ID NO: 499013 - DNA, 600 bp, Homo sapiens
aatatcatatctagccatagtaaaaataataaaacagaaatatagacgtgatctaaaacgaatacgtatgcaagtagaagataataaattaaaattattttcacttggcaagaatcaagtgccattgttaacattgaccaaatggtaagaaagattgggagaaatatttatataggaagtaaatccaattcatgaatagcaaataaagctcgtgctgaatcaaatgtgaaaactggtgattttgttctacttattgactagtttgaagaaatacacattatgttgtatcagtttagaaaagtaattgtaggaaaaagtaatctgttttgaataatatcaggaagattgattctttagtttttctyatggtgaaacaatccatgtttaatggtttctgtggggaattttagaaaaaacttcaagaattaactagcaaacactgtgctgatgcaaagttgtagaattttagtaaggaaaggtatatgaggaagtcaaaggataacatgtatagacacctgcagcatggtaaatgttttagcaattcatgtaatagaaaccagaaggtgccttgaaattcacaaaaaacagtagtgcacacca

SEQ ID NO: 499014 - DNA, 606 bp, Homo sapiens
tcagaatgaagtgacttgtccaaagtcacttggcatttttatttattccagttaattgtccattccgttcagaattgggactattaagatgattaagaaaatctgccctcggggagacagcttatgtttcacttgggatacccaggctgtgccatcagagtgcccctgggggaggtgtagggatgtggatgcgggaatgagggcaggcattgtgtaagtggctggaagaagggatgtgagagctggcttattcagggacctgtaagtggctctctagccagaggactagagtttattagagaaagctgtcaggataagaaatgcaaagataattatggcaaagtttcaaactggggagatgttaggtctgtgtgttagaaaaataattctgactggaagagagtgaggatggaggcagagcagtcaggaggtgggagacgctcattcaggcaagagaaccaggggctgtgtgtgggaggaggtggggctgcatgggaatggagggagtagactggagggatttttggatccctggccacgaagctgcccagggtagctggggcctgggcrctttctgggtcagggctggaggaggaggcatttgtt

SEQ ID NO: 499015 - DNA, 379 bp, Homo sapiens
attcctgtagtcccagctacttcagagactgaggtgggaggattgcttgagcccaggaaatcgtggctgtrgtgagctgtgatcatgctactgcactccagcccgggcaacagagtggaccttgtctcaacaacaaaacaacaacaacaaaaacccaaaaaaaccttttgttactctttataaaaccgcattttaaatatacacaaattaggaaattcaagtaacattttaaaggttaaactgtattattacccttgcaatgttgatgggtttttattagcaaaggttgttgtgtttataatttcttttaccacctggatttaacaaacttgtatatacatataatcacatatacatgtataaagagatatatttatga

SEQ ID NO: 499016 - DNA, 647 bp, Homo sapiens
cttaggcattgtttgttctttcacacatctgtcctctgtgcttgtttggagaagtagaccctgaagagtatggcctcatgcattttggttagtgccagggcaatgtcaaaaatatatatggtcatcggtttttgttgaagattattgttcagagtgaagatcagaagaacattctgaaccaggctttgcatgagttgwgttaccaatatgtcatgtagtgctaaaaactcaaagaaaactttgcaggttagaggggtagaggaaaaaaagttacttgtattttatatcacatactttaattatattaagaaactgctcaccttctctttcaacctgggaattttaggagacaggaataataaaggaccttctaacaccaggatgatttctatgcattaagtttcatcattcatttaatttcataaaggcatttttattcctgaaattattgctctagataagaaaatctcttatctgaaataagacccacagaacatattttggcagtgtccctttactaaagagtggtattcagtatcaggacttgtttttctcccaaagacagataccaccaatgttacactgcattcgcaatggaaatcatcacttgggcactgaatccagccacagaggatttggcaaaacag

SEQ ID NO: 499017 - DNA, 605 bp, Homo sapiens
ctgccagcattcccccgtgcaagcttctaacttccttatttacatttgcagctcaaattttcaggctggtctttgytagaaaagagatgatttgggggctgctttttgttagaaaagaagctctgctgaggactcttttgccctctatctgtctaaataatgactttctacctcctgtatcaaaatgacctttcttcttagaacaactctattgggattatgacctagactaggcatgctcatgtctgcctttgcagcagcagcccccattgtcctcacttctaagcagatgttaattatgacagttttgctacctttgtacagaactgtgcagtgtttcaggttttttttgtatatcttttcccatcctctctcacagtgaactcataaggtatgcatttaatgcaggaaataattattcctatttcacaaatgagataaaataagactcacagagttaacatgatttatccaactgttcatgtggtggataaaactagaacgaatatctggatcttcaaatttctagctctggtactctttccactatacctttatttatttgcttatttttttggagacagagtctcgctctgtcagacatg

SEQ ID NO: 499018 - DNA, 372 bp, Homo sapiens
  misc_feature (1)...(372): n = A,T,C or G
ctggcaaatacgttttccttgaccatgtggtatkttttaaagatattaaagatcctatttccagtgtctctttgacaatcgggagccagtgaatacgggatcctcttccctacangcaccaantgctttatgaagcattcattgtctattttgccatactccctgccagtctttggtacctgcaataactgctgttttctttatgatgcccacctggctcctgcgggcatttgcattttgactcttaacctataggaagagtcccagggtggtagggactgaagccatgtggctgcagaagagatggaggaggtggaaaagaaaaaaaaatagatgccaactgaggtgctgagtgagctaggagggatgaga

SEQ ID NO: 499019 - DNA, 580 bp, Homo sapiens
cctttgccagagatcccggagccagagtatctaaggctcctgagattctgtttgtgcctgagtagttgctctgccaagaccatgcagctctgtgtgtcagaccaaaagccctggtggaatgggttcaagagaaaatctcctgacccaaggatggcaaagatccatggaagaagtgtggttttccaggatcacacaktcactcatcacttccctgggcagggtagtttcccttggctctgtgtcattcatgagtggtcagtggccctgtcctgctttcctccattctccatgggttgagctgtttccttcatgagtcccaaggcaaatacttgggtgtttcagttgaagatgctgcatttactctcttcttgttcctttccatgagagccacacatcgtagctgcttctaatcaggtatctcagcatccttctctgctacaatattttggtagatggtttttatgctgtaggctgtctcatggcccaagatggctgtaggagcaccagcctgcaccaaccaccatgtgcatttcaaagagcaaaggaggagaaaaggtgcaaagtcaaagtgactcacaca

SEQ ID NO: 499020 - DNA, 653 bp, Homo sapiens
agctagtcattgtgactcagctctgcctgcgaagcgcctacagtctagttgagaaggtaaggtacataagtataactatattaaaaagcagttcgaggccacatttaaatatatcagcaagtgaacaatacagacagtaaaagcagaaatcctgtgagttggaaggttagaggaagcttcgtgggagaagtaggattctcgatgaatcctraaagatgggtagattgttggagaaacggagataattaaggtcccactgctagggagattgtatataagcagaggaggaaatgaacgcagcatgttgggaaaacctatatttcccaagctattttattattgattttcatcatctcctgaacttcagttgattggattggtttttgccattttgtcatcattccttaaatctccagcgcaatctccagcatttacctttctttatttctgtggacgagaaacagatctgtctttttgccttttggggcactggcttcctgagtgtagaagtcatgactgtgatgtgcagtatgcctgggaaaaataaaaggagttactccttgcacccagggttagactttcctcatggcaagagattttggggaatagttttcggcagtgatcccatcttcaaacacttctgggatactcat

SEQ ID NO: 499021 - DNA, 653 bp, Homo sapiens
agctagtcattgtgactcagctctgcctgcgaagcgcctacagtctagttgagaaggtaaggtacataagtataactatattaaaaagcagttcgaggccacatttaaatatatcagcaagtgaacaatacagacagtaaaagcagaaatcctgtgagttggaaggttagaggaagcttcgtgggagaagtaggattctcgatgaatcctaaaagatgggtagattgttggagaaacggagataattaaggtcccactgctagggagattgtatataagcagaggaggaaatgaacgcagcatgttgggaaaacctatatttcccaagctattttattattgattttcatcatctcctgaacttcagttgattggattggtttttgccattttgtcatcattccttaaatctccagcgcaatctccagcatttacctttctttatttctgtrgacgagaaacagatctgtctttttgccttttggggcactggcttcctgagtgtagaagtcatgactgtgatgtgcagtatgcctgggaaaaataaaaggagttactccttgcacccagggttagactttcctcatggcaagagattttggggaatagttttcggcagtgatcccatcttcaaacacttctgggatactcat

SEQ ID NO: 499022 - DNA, 531 bp, Homo sapiens
attactgactggatagtagtaattaatgttagcattattcatcctgtcaaatcatatgtaaaaagaaccaaatgaggacgtttattgcagtgctatttataaaggtaaaaatattagaaactacctaaataaccaacaatggaggactaagtaaataagttatgacaaatccatagtatgcacttagtaaaataattttgcagatatgggagatgtttgtaatatgttgcagatttaaactttttttttaacgagatgaggtcttactgtcacccaggctagagtacagtggcactaatcatagctcactgcagcctcaaactggggctcaagtgatcctaccayctcagccttctgagaagctgggactacaggtgtgtgccaccatgcctggctaattaaaaatatttctttttgtagagacaggagcgtctcactacattgcccagtttagtctcaaacatccggcctcaagcgatcctcccacctaagcctccccaagtgctggggctgggattacaggcgtgagcc

SEQ ID NO: 499023 - DNA, 641 bp, Homo sapiens
taaacattaggagacaattgaaggaaagtaatactggatttttgataataatgaaatacttttaaatctttagttgtaatcattgtggcatgattgtgtgcttcgaaaaatcattatcattataaatatagtgaaatatataccaacaaaatgatattactgagatgtgcttcaaaatctttgagaggatttagggggtaactgggtggggataagatgaaataagattggtcctgagttgataattgctgaagctaagtgatggatttttagattttcattatactattctatccttatacatgttcagaatattccataataagttaataatatacatgcatcaattccataaattgattgtggatgcaaatatttatatataaaattatgagaactagaatgcaaggaagggcacacaccaaactccttgttgttttcttttggagatctasggataggactaggtaagtggctaaagaggactatagctaaatacacaatgtttcattttcttaacaaacataaaacaactggaagcaaatatgacaaaatattaacagttgtaaaattcagagtgaaacaaatatggatttctgttataaaatttatcattattttcttttgagttctttacagat

SEQ ID NO: 499024 - DNA, 626 bp, Homo sapiens
tgccccagattcgtatgatgaagccctaacttccagtgttatggtactaagaggtgagacctttgggaggtaattaggtttagaggcaatcaggagggtggagcccccatgacargattagtgcccttataaggacaaagatactagagaatcctctctcctgtgagaatacaatgagaagatgatcatctacaagccaggaggaagtcccttgccaaacacagaatctgctggcaccttaaccttaggcttttaagcctccagaactgtgataaatgtctggtgtttaaaccgcccattctatggtattttgttatagaagccagagctgactaagactattttccaaatttattataatttttctaggcactgagaagcacaatgtctgctgaaggtgaaagtacctctagcgacagggagctaccaattcactaactataacaatgacctagaatgttttgtgaatgtattctttcgtgtttgtgactgcacatgtgagaacccacagctttgcctactcagaggtatatgaaggagtgggatggtatgaaaatggtcactgttagagtctaaatgccctaagtcaccaaatcagaacacatattcataaccaagactgtctg

SEQ ID NO: 499025 - DNA, 626 bp, Homo sapiens
tgccccagattcgtatgatgaagccctaacttccagtgttatggtactaagaggtgagacctttgggaggtaattaggtttagaggcaatcaggagggtggagcccccatgacaagattagtgcccttataaggacaaagatactagagaatcctctctcmtgtgagaatacaatgagaagatgatcatctacaagccaggaggaagtcccttgccaaacacagaatctgctggcaccttaaccttaggcttttaagcctccagaactgtgataaatgtctggtgtttaaaccgcccattctatggtattttgttatagaagccagagctgactaagactattttccaaatttattataatttttctaggcactgagaagcacaatgtctgctgaaggtgaaagtacctctagcgacagggagctaccaattcactaactataacaatgacctagaatgttttgtgaatgtattctttcgtgtttgtgactgcacatgtgagaacccacagctttgcctactcagaggtatatgaaggagtgggatggtatgaaaatggtcactgttagagtctaaatgccctaagtcaccaaatcagaacacatattcataaccaagactgtctg

SEQ ID NO: 499026 - DNA, 626 bp, Homo sapiens
tgccccagattcgtatgatgaagccctaacttccagtgttatggtactaagaggtgagacctttgggaggtaattaggtttagaggcaatcaggagggtggagcccccatgacaagattagtgcccttataaggacaaagatactagagaatcctctctcctgtgagaatacaatgagaagatgatcatctacaagccaggaggaagtcccttgccaaacacagaatctgctggcaccttaaccttaggcttttaagcctccagaactgtgataaatgtctggtgtttaaaccgcccattctatggtattttgttatagaagccagagctgactaagactattttccaaatttattataatttttctaggcactgagaagcacaatgtctgctgaaggtgaaagtacctctagcgacagggagctaccaattcactaactataacaatgacctagaatgttttgtgaatgtattctttcgtgtttgtgactgcacatgtgagaacccacagctttgcctactcagaggtatatgaaggagtgggatggtatgaaaatggtcactgttagagtctaratgccctaagtcaccaaatcagaacacatattcataaccaagactgtctg

SEQ ID NO: 499027 - DNA, 509 bp, Homo sapiens
ggttttgagatttttcttgttatctaaatgtttggagatttttttttatttttattttttaaattattatttttggagatggagcctcactctctcactcaggctggagtgcaatggcatgatcatgactcactgcagcctcaacttcctgggcttaggtgatcctcttacgtcagcttcccgagtagctgggactataggcacacaccaccacacatggctaattttcatattttttgtagagatgtggtcttaccatgttgcacaggctggtcttgaactcctgggctcaagtggtctgcccaactcggcctcccaaagtgctagatttacacgtgtgaggcatcactcctggctgattttaaaaaactttatttatttatttatttgagactagagtctcactatgtcacccagggtgaagtgcacratctcagctcactgcaacttccacatcccaggctcaagctatcctcccatctcagcctcctgagtagctgggactacag

SEQ ID NO: 499028 - DNA, 525 bp, Homo sapiens
gcacactattcttagtaggcatgccccttttgaagtcaatgggaatttacaaacaacaacaataaaaaataaacatgatccatctgccttcaaacattgatgcaatttaagaaaaaactagaagttggtagtctataaactatagtatctaatctctccttcttttgaaaaagcaatgtctagtgaagattttaggtcacattttttccccaaayctttctacatttttattttaatctagcatgttctccattaaaagtgtgttgaagtcaaccaatcaaactaatgtcaagaattacacacacattcgcatacccaaaatcagattctgtgattagtaactgggggtaaggagaaattgatttctgcatgcgtttttgaacaacagaatttcctgcaatattattataaatggttgtaaaaggtcacacaaagttaggtttagagtcgtgaggttgactagtcctttaatgtacttttattaaagacactcataaagtcatgtgtcacatttgaagactcagg

SEQ ID NO: 499029 - DNA, 429 bp, Homo sapiens
caggtccctattagttgctcgttatgcaggaaagaacggtggtttggagaaactgaacccagattatgtcgttttatgtcttccaagcatgcccagcttcacttcttgctgctggggtggttcattcacttctgtagaagatttgtttctccctattgggatacaagttacaaaaaagagaaggctctgattattggttgatatgcataccttctataattctgtatgttcatatcccagaaatatttaaggctttttccctgattagtgrcattatgcagttatgcaaataatctgttatatctaggcacattatgccgttatgtaaatgatctatttcatttatatttcccacagagtaatggggtagggaagaaatactcttctgcatttcccctggtttttaatgagttgttcagatatattcag

SEQ ID NO: 499030 - DNA, 507 bp, Homo sapiens
gaatagcagcctccctggcctctactcactakataccaggagcaccctcccaccccaccaccaagttgtgaccaccaaaaatgtctccagactttgccaaaagtcccctgggggacaaaatcacccgaggtgagaaccactgctctagagtttcccaactatgctctggggaacaccagttctggggtcttttctagttatttcctagagaaaaacaagataactgtggtcaaatagtttgtgaaacctggaattaaacaaagataaacaggactcttccctgatggattcctcagatcctgaaacagatcaaggtgcattgtgaatctccaagaggaaaacataatacacagtattttcccaaaggcatctggccacagaatccttttatctcagagcatttaggattagtattccacaggattaacttttggaaacacttgtgtaaggcaaaattacaaatacacctctagggcaaacacatcctgaggaagggatgaagaagaa

SEQ ID NO: 499031 - DNA, 504 bp, Homo sapiens
agcgtccttagcacctataatactttgctgagtatacttgcctacatgtctgtctccccagtcacactggaatcttccagaggcaaataccaggttcattcacttctagacccttagtgctcaacaccaacaagtgttcaatttctgcctctttaataaaagaataggaaagaaataygggcaggagggaaaagttcacatcatcaagcacttgccaggggtcagatgtagctatgcctctctgcttctaccttcttgctattcaagtaagcatgctttgtcttccagaaaagcaagaaacccctggctttcaagggctgtttcttctaagctttagaatcccacccccatggtgtgagtccagctctagaaacataaatgccaatgatgttctgtctggagaatttcaactatggtgctgccaagagggactgtctaaatgccatccccaaactcaaatccgtgctggagtctgtcattctgtctttatagaacggccccagc

SEQ ID NO: 499032 - DNA, 331 bp, Homo sapiens
gaagactagaagaggctggatcaaagaagaacasagggtgaatgcaagggaaagcgggggaataacgtcatgtgagacaataagtgaatccaagaggaaaaacggcttgatctgggctgatgaatgaaaccccacagtgcccaaagtacccagcagacattgttaagagtaacaagaaaatgacagagatttgggctgcagccaacctggtggaattgctgaggctcctttcctgaacttaatcagagacaccagagaagcaaggaagctggcccctaggatcaatgccaaaactgtgagacacagggtccctgttgtgggagagcaagca

SEQ ID NO: 499033 - DNA, 487 bp, Homo sapiens
agagggagggaagtgcataaataaatcatgagtgtcattaaaatttgtaaactaataacttctgggaagtcttagcaattattatcagggttttcttggcaaacaaaaaattcataaattcaaaaggtctccattttctattttaaaaaagcagcatccccgagaaaggtcactgacagaacaattaaggaggaaataagtggtccagacaacagcttgtgaaccagatgaaaagtcacagaatccccaagtggcaggagtatgagacaactcaatacatggaaagggacacggcaaggcggggctggtgctgggattggtttggggctattgaaaactttcgtcaggtctccaaatccttatttagtatagttgaaatgctaagcattgtcaatgatccagaaacaactaaggcacacggtccctgcccttgagaagttcacaggctaggaacraatcaccagtatggtgtaaggatataaagcta

SEQ ID NO: 499034 - DNA, 638 bp, Homo sapiens
aagaaaatgtggtatatgcatccaatggagtattattcagccctaaaaaagaggaaaccctgccatttgtgacaacatacaagaacctggaggacattatgctgagtgaaataagccagacacagaaggacaaatactacatgatctcatttatataatgaacctaaaatagtcaaacttataaaagcagagagtgaaatgctggtgtctgggggctgggatgagggggcaagtgggaggtatcagtcaaaggatacaacgtttcagtgatataagatgaataaatcctagagatggacagcgcagcatagtgcctgtggtcaacaattctctattatatacttaaacatctgctaagagggcagatcttgtgttaagagttctcattacaaaataataataactaataaaaagggcaggaggaaactytcggaggtgctggataggtttatagcatagattatggtgatggtttcaagggtgtacactatttcctaacttgtcattaaatatttcacatacttaaaatatgtaccgctttttgtatgtcagccataacttgctagtttcttcaaaagtatacttctatataagtatatactaatagatccttttagatgttttggtctacttttcta

SEQ ID NO: 499035 - DNA, 247 bp, Homo sapiens
ttggttttgaatccttgatccatttttatttgagccaccttgctagaatcctttctatcaatatttgtgaattgagcctgaggtacacgtgcccctgagacacaacttaaaggtgatcttgtttttgcccttcccagaaacctgtcgaggtgagggcagggagttcctggggtgatgggcagatcctggattgtgagatgcgcttgcttagtactctcarttcctgctgagaggactcagttttacc

SEQ ID NO: 499036 - DNA, 610 bp, Homo sapiens
gatgtttataaacatctgttaataagtaaatatttataggataaatgttagycagttgataaattccagttaatgacaataatgcaagtagtaccagaagtcaatatttacatctattttctcatttaacccttgcaacaatcctatgattactattgttcccattttattcaaggatgaaatagacttagattaggtaaccaagcaaaatcccacgacacgtaaatggcagcacctaatatattcttaccctaaaaaatctgttccctcctaatgtttcaaattccacctccttactgattagagggtgtcaattaaggcagcaattttggcacccctgaagttaccatgacagcttggtgcatatgagaacctccactagaatctccttaagactaagtttaaagtaaacccaacatcctcaagataagatcagagactcaacctcaagccaactttccattctaaacccagtggttaaggaaaacacaataaacggcaggtttgatttcatagctgcatgagcaatcttggctctggaagtgaaggccacgtcactgccttctgcatttccctcctgcctctccaccctcctaaaacctgagttcca

SEQ ID NO: 499037 - DNA, 592 bp, Homo sapiens
tctgttaataagtaaatatttataggataaatgttagccagttgataaattccagttaatgacaataatgcaagtagtaccagaagtcaatatttacatctattttctcatttaacccttgcaacaatcctatgattactattgttcccattttattcaaggatgaaatagacttagattaggtaaccaagcaaaatcccacgacacgtaaatggcagcacctaatatattcttaccctaaaaaatctgttccctcctaatgtttcaaattccacctccttactgattagagggtgtcaattaaggcagcaattttggcacccctgaagttaccatgacagcttggtgcatatgagaacctccactagaatctccttaagactaagtttaaagtaaacccaamatcctcaagataagatcagagactcaacctcaagccaactttccattctaaacccagtggttaaggaaaacacaataaacggcaggtttgatttcatagctgcatgagcaatcttggctctggaagtgaaggccacgtcactgccttctgcatttccctcctgcctctccaccctcctaaaacctgagt

SEQ ID NO: 499038 - DNA, 605 bp, Homo sapiens
ctgaggacgcatctccggctgcatttgggggcagctctcaaaagccacctggagtttcctgaatcccaagtaataactttcaaactattttctaagccaattttttgagagccctgaatggctggcataagtgccaagaacaatgcagcagcacagcttccctgggagcagcccggccccctgcccagccgacagtcaccaggcaggagagccacgtgaaaggcaagcggcagggaacagccccctctgggagcccttctctttcttgatgtgctttactgactcttgaatttacactctacccattctgttctggggaaataatttctaaaccaaatacattaaagggtagattttktttaattaactgcaataaaaaatggttttttaaaaaaagagatacctaacttgttagatgtattagtaataagttaataacaggccctgcacatacttcatctcatttaatactcccatcacatgtaggaggtcagtgttaattttatctctggtgatcagagagattaaatctttcagtcaagatcacaaagctataaagttccttagctaggatcaaacccaggtctggctagctccacccaaag

SEQ ID NO: 499039 - DNA, 591 bp, Homo sapiens
agctcatgcaatgggtggtaatttaaaaatggggcgtctgaactgctgtgcctagcaatgaagaggtagacgcctttctggtgtggaagccaggcttctgtgtgaccagcacccagtaaatacaacacccaagtgctttattgacattaattaatgatgtttatagtatcctttygggtaagtctgtatacatcccctttttaaaagtaagaaaaccaagattcaggggctagttacttgctccaagtctttttcatgtttaacatgaattataatatatgtgggggtctgtatcctgaaaacattatcaacctttgtttctaacacttctcatctagtgaattggaatgagaattcctagctcaggaaaatgatgcacttggaagcagtcacttgggatatttgactcttctgaagaggcttgactttactcttgtggatctggcaactgtacctttgcttccgacagtgtaacgtttagtcccactttatgataaaggtatggtaccgttttacaacacatctcactgaataagacaactaatttgcttccgacagtgtaacgcttactcccactttaatgataaaggc

SEQ ID NO: 499040 - DNA, 613 bp, Homo sapiens
ttagctcaggtaagttttgctgccagtgaatttactgcaaaatttcttagttcttgaatttcagaattatgtacctgtatgtcaagaatgtacaatacctatttgtcttttgtctcaatatcattttggcttctcatcattcaaaatcttattagcaaccctgacattttgtggtttgagtacctattttgaaaagtaaaggagccaagttagtgggagttgttaaaagttgcatttatgaactgttgcattcagctgcattattgacaaaaatggtccccgttaattttttaaggtctggaacaaaaagaatgcaaatgaaaaaggaagaagccagacttctaagcttcctccaagatttgccaaaaaacacgctacagggatccagcaagcacagtcttcagcctcagttccacctctagcttcggctccactttcaccttcaacctcagcttcagttccagcctcaacctcagctccacttycagcaaccttaactccagttccagcctcaacctcagctccggttccagcctcaactttagctccagttctggcctcaacctcagctccagttccagcctcacccttagctccagtttcagcctcagcc

SEQ ID NO: 499041 - DNA, 587 bp, Homo sapiens
gtcataaatgcaaatggttacatctggtggtacatgaaatgcttgagatctggatgtgaaacaaaagcatttctattgcacccaagcctaaaacctatcttgttaccttgccttttaaaacactgtgagcatgaagcagccaaccaaaagatgcctgccatttgccatttaagaagcattggagtaaaaagaaagaatggagagaatggatatttactgggggaaggcctttccttattcactggtagggataagggctcatgtttaaatgatacactctcacactcccaattttagtaatggagcaaagataaagaggcaaatggaaagtctgaaatccmtagggtcttagggtcttagattttctttaaatatctttgtgtgtgtgtggtttttgaaagattatatttggcacttaaatactgatacatgtatatacatacgtatattctgtattaacatcatttttttactataaaatgtccgttttattgcagatggagtctgcacgcaaagcatgggagaattctccaaatgtaagggaaaaggggtctccagtaacttccacagcacctccaattgcaact

SEQ ID NO: 499042 - DNA, 617 bp, Homo sapiens
ctgcccctggaagttgacattcctcagtttttgtccctccctgtctgcacttggccagactgctgtgctctggaagcacaagtgtgaggactggggagggttggcaggaggcgagtgaactgccacagttcaaggttgggcacatgctcccagggcagccagcagggaccttcattttcattaaagtcattcataattgtgcatacactatttggggtgtgaatactggtctaacagagggtgccccaagtttagtgcatgagctgcaaagccacctccaacctgtgcaggcaggcaaygtgtcatttcttaccctgcttcagggttgctcctcctggcttcctgtaggcagcccaagaagccaggagccactagggccaagggggcagccccagctcctcacatggaaaacagggtgggaggctgctgaggggcccattgtggatgctggtgctgctgtcacctctgccatgtctccaacagttccctgtggtgactgaggcacgtcctccactgagcctgtctttcttccatggtgatggccacccaagcacacccttgcttccatgatgacaggcaccactgctttctcaggatggggtgaagaagaagttcct

SEQ ID NO: 499043 - DNA, 693 bp, Homo sapiens
aagggattgtgtggttcatttatgcacataacagttatatagtgctccatgaataaaagcagaataatttgtagttcttaatcaagagaagcttaaatctcaggcagacaagtaaacaattaaatgaaattgaatgtttcaggtgcaagagtacgttattggggatagagaggacactgcagcccctcagccccagccccaaggccctcctgtcaaaatgtgtctaaccaggatgcaggaagcccacatctgtccaggaatagagcttgcagagtggctacgtgagggtggaaatgccagattgaagtccctgaagaacttcagttttggcagctarcagtgctgcagacagccctgcccaggcaagccccacccaagaacggagggccaggcagggctgactcagttgggcaaccattggctgcactcagacaagagttacatgattcatcctctagccaagagaacagagttttaatcacaacatttccccctttcctttgtcttattttaaagccagtgtgcaactccttccccaaaacagagttccttgctgtggccctggtcagtgccctttggggtactggttgctgaggagacaagggcttctccactgattttcaatgctattttcacctcctggctactccctcctctgcatccttattgcagaaggcctactggacacacagg

SEQ ID NO: 499044 - DNA, 629 bp, Homo sapiens
tttgtccttgtgccacctaaaatcatttttcatgctggtctttggaaatactgacctagaagttgaaatctaagccctatggtgtgatccctctagttcttcacatcttgctgctcttctctttccaccttacatatatgaaggctgaaaccctagcagttccccaatgtgatacgtttatttcaatctcctatgccttcgcttggagcaggccccctccccattctctccttaatgaactttttatccgtaggaaatcactccatcatttcaaagttttccctgaaagtcatccgttctatgcctgtatctatttctcttgtagtatttttcacatccaaggctgctaacacttgaaggcagggtctaagtcttctctctgttttacctgtccctcacatagaaccagggcatgtagtaggactcaaaaaaagtttcttggatttaackgaatcccagactttaaaagttaaaatcaggagaacccacagttaagggagtcattctaattcctaaaagtatttaattagctctgtatccataaaaggacagtggaactgatggatcctagtgttacttgtttaagatgagaccagtggctaatgagatgagttcaaattcataactcc

SEQ ID NO: 499045 - DNA, 609 bp, Homo sapiens
taaatgctagctcaccgttctcctcatctcctcactactaagcatcctcagctccctgcaacaaggctgctttctcctccccattgctgaaattgctttccccagaatcaaacaagtccttacctaccatatagccaaatccagcaggctattctcagccttcattgtccttgatgcttagcactggtagatgtggttgacggccccaccctcttgatgcctgcagaggtgggctccatgtggcaatgaactgaggattgctcacaatggagcccctagcccagagcagggcctggcacctaataggcaccctgtgaatgctcagtgaaagaaggcatccactgcaaggtcctggggaacaaggaattccaatgtggcccatatattttaagtcatagaggatcctagatgtaaaaggccttcaaaagtggccactcttttaaagcattatactggcagctgagccatgtttccccatcayggacacatctagagggcactgcctaaaaccatacacatctacgcccctccccaggaatgtgcaggggacttagcctggggcatatgggtgggcagaggggggtgaacgatgaaagctgaagaaaagaa

SEQ ID NO: 499046 - DNA, 492 bp, Homo sapiens
atttttgtatttttaaaaatttttagtagagatggggtttcaccatattggccaggctggggttagaccatattttctaaccagctttctttgcagtttggtggggctttgtgwctgaattctggccaatggaaccacgtggaggcctggcccagaacatctccctgtggattctctcatctggcaactggatgcctacacgaagggtgattttggagtcatgtgttggagatcacaaagcttttgtcagccaggttcctgaatgactgctagacaccatgggctgaactttatgtgagtgagaaatacattctatttgaagatatgggttaagctacagagatttaaaggcttatctgtttcaacatttggctttaccatacctaataacaaagtccttcatgatacggcccgggaagctctaattctttggtaaaccttccctaatcttgacctcttcctgaacatcccctccacctactagcctcagta

SEQ ID NO: 499047 - DNA, 599 bp, Homo sapiens
tgctgagccaagcccaggaggcagccaaggtcctaccagtgaccttaccctgggggcccctccaggtaggagcctggttggaaaagacagaccgacttcttctgggttggctggaaaaagatgacatactcaaagccttgtccttccacttggatgcacctggtgaagatgcgacagtcacctttgtctggggagagataggcagtgttgcagccggagaagggagggtatggtcaggatgcagcaccatttggttgagtcttgcctctggtacaagattaaggagagaaaaccagaggacaccaggtccacccccagggagccttccctctgggagcagaggcacagttgctgtcctcacagagcctttctgtctagggcagaaacatgcaggaagtgccctggctgagaatggagataggatcagggccagggcaagactttaagagaccataagcattgaaaattgaaaatgtaattactcatgtaactcacatataattcaaaagaataatastaaacagtaaaataagagcagaaaagtccatcaaagttctgattttttttttccaagacagctaccactactacatcctttt

SEQ ID NO: 499048 - DNA, 635 bp, Homo sapiens
tgctttattaataagctccttcagatttatttgcttcaaccctcatcacagcctaattcttgaacccgcctggattaggacttaccaacttccttggtgatcatcggctcacccttccacacaaatgattgctgctgtgatgttaccatttttgttggaaatatcaaaagttgtctcaaaacagaatataagccaggtgcagtggctcacacctgtaatcccagcactttsggaggccaaggcaatgaaatcgcttgagcccaggagttcgaaaccaacctggacaatatggcaaaaccccgtctccacagaaaatacaaaaattagccatgcatggtggtgcatgcctgtggtcccagctactcaggaggctgaggtgggaggatcacttgagcctgagaggtcaaggttgcagtgagccaagacagccccattgcaatccagcctggacgacagggcaagaccctgtctcttaaaaaaaaaaaagaaaagaaaaaaattaaattaaaaaaatgttttacacaaaatataaaactccagtattttctcttacagtaacaactattaaacaatgtcctatttcattttcctatggagagtatttttttatttgtttaggctctactctaaaatga

SEQ ID NO: 499049 - DNA, 514 bp, Homo sapiens
aaggagaaatcctaaatttgatggattcttttatactgtgaatatatttccatcagtgttggtaagatatcaaatgactatcagttgatcccagtcatcagtgacttatttgcatatttaagccctattcacaagagaccataatcattttaatcttatattttccctcaggaaatttagggactctgaagcccctattttattctcttggagtaaactgttgagtgtagttacaaaaacttttatttatgacttaaaaaaagtttagctgctatttcagtgaaagtgtaaaataaaacggtcatgatttttttcaatyacagaatagttacaaattttaccatgttcatctattccacagagcatgttaaaaacaacaacaacaaaaacctaacagcaattacaactttggtgttgcgtttattctaatcagagtgaatgattataatcacactttgctattttaacataaattggtgctttagagcattaaagaggaagcagcaggccctgt

SEQ ID NO: 499050 - DNA, 514 bp, Homo sapiens
aaggagaaatcctaaatttgatggattcttttatactgtgaatatatttccatcagtgttggtaagatatcaaatgactatcagttgatcccagtcatcagtgacttatttgcatatttaagccctattcacaagagaccataatcattttaatcttatattttccctcaggaaatttagggactctgaagcccctattttattctcttggagtaaactgttgagtgtagttacaaaaacttttatttatgacttaaaaaaagtttagctgctatttcagtgaaagtgtaaaataaaacggtcatgatttttttcaatcacagaatagttacaaattttaccatgttcatctattccacagagcatgttaaaaacaacaacaacaaaaacctaacagcaattacaacyttggtgttgcgtttattctaatcagagtgaatgattataatcacactttgctattttaacataaattggtgctttagagcattaaagaggaagcagcaggccctgt

SEQ ID NO: 499051 - DNA, 651 bp, Homo sapiens
ctgctggcatttaccagtgcaagcttctagcttgcttttccatttctgcagcttgatttttcagtctgctctttgttagaaaagaaaygatttaggggctgctttttgttaaaaaggtagccttcctgaggatctcttacccttactaactgcttaaataatttctttttagctcctgtatcaaaatctcatcttgaattgtagctcccataatccccacatgtccccttgttgaatatcttaggtcaggtagattagatttatccatatgagccctttttaaatatcttattgttatatataaagtttcagtgccacaaaagaaacagcactcgaatataaaattttctttttaattctcagcaaggcaaggtacttctatagaagggtacgcccttacagatggagcaacggtgagcgcacacttggacaagggaggggaaagggttcttatccctgatgcacgtggcccctgctgctgtgtcattcccctattggctagagttagaccacacaggctaaactaattcagattggctaatttaaagacagtgacagggtgagtggtttggctggaaaaatggttatgacagagcaagtaatgggtcagggtggagcaggtaatcagaatgagtcagggtggagcaggta

SEQ ID NO: 499052 - DNA, 651 bp, Homo sapiens
ctgctggcatttaccagtgcaagcttctagcttgcttttccatttctgcagcttgatttttcagtctgctctttgttagaaaagaaacgatttaggggctgctttttgttaaaaaggtagccttcctgaggatctcttacccttactaactgcttaaataatttctttttagctcctgtatcaaaatctcatcttgaattgtagctcccataatccccacatgtccccttgttgaatatcttaggtcaggtagattagatttatccatatgagccctttttwaatatcttattgttatatataaagtttcagtgccacaaaagaaacagcactcgaatataaaattttctttttaattctcagcaaggcaaggtacttctatagaagggtacgcccttacagatggagcaacggtgagcgcacacttggacaagggaggggaaagggttcttatccctgatgcacgtggcccctgctgctgtgtcattcccctattggctagagttagaccacacaggctaaactaattcagattggctaatttaaagacagtgacagggtgagtggtttggctggaaaaatggttatgacagagcaagtaatgggtcagggtggagcaggtaatcagaatgagtcagggtggagcaggta

SEQ ID NO: 499053 - DNA, 611 bp, Homo sapiens
tgaaccccaaattcctgtgtaatgtatcgcagaatctgtcctttgctcacttcgtatctgtcatcaatcaacactgcagactctggaagcaagcatgttatggttttactcttgtgactaagcggagacaagaaggcatttttctcctccttgggctgtttggaaagcatagaatgaaatccagggcatggtcatcatgaattatagcgcagccaggctggtctataatctctcatcttccaggcaaccccagccttggcagcaccatcaaagggtcatggataacaattttaaaatgcagtgaatgaaagtgttcatatgatgctaatggaatcataatttttaaagtgtcctcatcctttagagatatagactaaaatactggcagatgaaatgctatgattatgggacttttgtcacagtaatactacagagagaagtgcgtgcgtgcgcgtgtgtatgtgtgtgtatgcatgcatgtgcgcacgtgrgggggatacacatggaataagattggttatggattggcaattgttgaagctgagtgacagacacataggctattctatttttgtatatgtttaaatttttccataataataggtcaaata

SEQ ID NO: 499054 - DNA, 387 bp, Homo sapiens
tatttttagcttcagataagatgattttgaattagcagaaaaagacagtagtgttaagctctatattactttctgaggtaaagtcatctacgtggtctaaatgtgtcttactaaggcaaatcagatttaatgtttgcattatgaagaggccaagtatgaaacagaacaaaattctatctagtctgttaaccgcattaataaaaaactctacttatgagataatctatctgataatttcatgaaccattaaaagtatttgagaggtttatctgcaatatgcttttgaggtcctttaacttaaaatctttatgggggrgaaaatttaatgttccttctggtgaattctaaactactccttcttcagaattctgggtcaggttttacatt

SEQ ID NO: 499055 - DNA, 641 bp, Homo sapiens
ggcatatagttaagaatttttagttgtccactttgtggacattgattcgataatgtagttgctggggtcaataaaatgttacataaaaattgaaatgccacaaataagctttttgttgtactgcaaaatagatacattttgaaagtgtagaaaatatcatcctttctaattttctaccttttggaggctcagttggtatccaactgtcactatttacatctcatgctatcattgcaagaaataattacctgaaccctaagagagcatttatctgaaaaaaggtaaggtcatctaccacaaaaatgtaactatttcatttgtaaagctattctttgagaaaagtttaaaaaatcaaaggtaaactttatatttacacagtctctgatcaagatattaatggatagacactgatgaaggtttatcactgatttctactctgtatctttcctatattgtcttagttttactttcctttcttattttatcttcttttttcttctttagctttctttctccaggrctagatggattttatttatcttagatgaaattttagagattcactggaattgaaggcggttggaaggaacatgaaagctcaagtaaagaaacaattattaacaacaacaaaaatacttcca

SEQ ID NO: 499056 - DNA, 640 bp, Homo sapiens
tgcctgcttccatgcctggttgggamctgctgcagcctgcaaagcattaggctgtggctgcttacattcagccttgcaggtttctgattgctctgtttctgatgctgtccaaagttacagagccagtcagtcagaaactctctcctgtgccttctgctgctggaggatttcatgacctgctctcgtctttccactgtggtagctgcagagatgtttttagtggtgggattgtgagagaaaaagtaagaatcggtctttttcttaaaaattaaaaatatcttctgaagtctttcctttggccagattgccacctaatcaacaagagaccagacattgttctttctctgggccatgtttgcagaaatagccatgcaggcaatctgtaaagaacctttagaaacttgatttgatttaaatcatataaattactgtattacacttgtattctattttggtttattgtaattagtacattttgtcttagaagagcataacactagatactttttagttttcaacagatttgagtagtctatataatcaaatcacagttattaattgtaatgctgttgcaacctgaggctaggaaaagtctttgtttaactatattgaaacatttccatcacaaggtggaggccac

SEQ ID NO: 499057 - DNA, 362 bp, Homo sapiens
cctgccccttccccagtggactgttacagacatgactatggttatttccaatggagcatgacgagtgcacactgggcaaggttgctytccccacttctccaatgactttatccctgctgaaggcaagcacaaactaaggagggttctttctgcacttaagtagctctaccctaggtggggatgaattcatgctgacagcctatagcctatctaccagctcctacacttaagtaccatctactggactgcagcctgaagtataccaccaaacaaaaatacattgctatgacatacagcatctgaaaaagcaactgcatgaacctatttgcaaccaaggaacccatacagaaccctggtcctct

SEQ ID NO: 499058 - DNA, 652 bp, Homo sapiens
taaagatctttctgattttaaaaacgtaaacttgctgattcccacctcccccgtttgctataagagccttgagttttgtagtattactgtattacccccagcacattagctatagaaaactgtgtgcacatgcaggtatgcatatggacccacaaattcatggacctcacgtgtgttcctgtataaccgtgtccactcagctagggacttacacgagtgggtaagccatagaggcaatgcctctgtgcctgactttccagactattttacatctgagttggtcagaatcccttcaatgtgggataggcaatgttttcttgagggatgagcccttctgcccaatgaggtcagaatctccctagtgcctaaccttaaatggatagactaatttatttgactggatgaattacatttgacagtgcctgtccctggtatatgaaaatgaatattatactcacattttaggcatgtttatgaaaattgcctttaaattatccctaattgcagagaacaatgtactcataatgattggagttagatatatgtcttcaaaatcaacttttcatattatttttaccattttttctaaamatgtacatactacttgttatactccttaatatgtttatatttgctacattttaacatttta

SEQ ID NO: 499059 - DNA, 652 bp, Homo sapiens
taaagatctttctgattttaaaaacgtaaacttgctgattcccacctcccccgtttgctataagagccttgagttttgtagtattactgtattacccccagcacattagctatagaaaactgtgtgcacatgcaggtatgcatatggacccacaaattcatggacctcacgtgtgttcctgtataaccgtgtccactcagctagggacttacacgagtgggtaagccatagaggcaatgcctctgtgcctgactttccagactattttacatctgagttggtcagaatcccttcaatgtgggataggcaatgttttcttgagggatgagcccttctgcccaatgaggtcagaatctccctagtgcctaaccttaaatggatagactaatttatttgactggatgaattacatttgacagtgcctgtccctggtatatgaaaatgaatattatactcacattttaggcatgtttatgaaaattgcctttaaattatccctaattgcagagaacaatgtactcataatgattggagttagatatatgtcttcaaaatcaacttttcatattatttttaccattttttctaaaaatktacatactacttgttatactccttaatatgtttatatttgctacattttaacatttta

SEQ ID NO: 499060 - DNA, 581 bp, Homo sapiens
tgcttcctctggcggtatgtgcatatagattttcttttgtacagttaaaaaatgtagattcatgcttgccaaggtagataagtctgggttttgtctcagcatgagaagccatcartaagttgttaaaataaataagtaaacaaattaaaacaacaggtgatggtggtgttctgcatagcttgagggggtcaatgatggggagagaattacaagtaaatataattgaaataaaaactgagacaatctaggaaggggagccagttcttctgacctcacactttacatacatgttaatacctttctttgaaactgtataaattcactttggccagaaattccccagtttttccccccaagtgatcaggcccattgctcatgcttcctcccatcccatctggagcttcttctctgaaactaaatgatgtggcaaattgacatttctgcaatagcatagaaaaaaagaacaagacttgtttatgatttatgcactgcattttcatgctccggggcatagataatttagcagaggcttgaaatgaaggagaaagcatttaaagtcatgtgggaatttgataatacca

SEQ ID NO: 499061 - DNA, 414 bp, Homo sapiens
gagttacagaaaaaggaaaggagggaaacatttactgagcatttactatatgaattttattcacataatcccatttataatccttagaacagttctatcagataacttatttccattgcatagctaagaaacttgaagttcggrtaggtttaaaaaactggatcaatatcacacagctagtattctgaagaactctagttcttaagaactggaactggagttccaactgggaacagccagaccctaaaattcctgtttgtcccatagttcttgttgcattcccagcccctgtgttttaagagtaggctgttacatgtttgaagatccataacaattgaataacagagtctttacactagtaaaaaagctctgctgttaaaaccaaaaccaaaccaaaatcataacccagctgat

SEQ ID NO: 499062 - DNA, 530 bp, Homo sapiens
ttttagcatgagccaccctttctactgccatgtacaccaggctttgaaggacagatgggggaaaattccaggaaagctactagtttgaaattatgcccattatcagcttcagtgatgaattcaactttctctattgtttggatctcaatcaaatattgagcttaggttataccctccttgaagtcataaatttgaactaatccaaaccttaaagtcctgtaaatgttcttaataaattattcatccagctttcacttaacaaatattctctgagtagcaactatgtgccaggcagtgttgtaggcctgaaaaaagcaactcaaaatgcctactcttctggaggtgaccttcacaaggacatctatagtgtttgtatatgctgtatttttttgtctgtaaccataatgagatcatgaaatgtgaaatgtgaaccaagaacaaaaggcactgatggagaaggaggacccaytaggggcctcagcagggaatgcttcccagatctggccgtgcatgagaaatagcaggggagg

SEQ ID NO: 499063 - DNA, 461 bp, Homo sapiens
actaataccacataagagtggagagcactgagcctccaagttcaagcaaataaatcaaagcgacttctaattttaggatatcctgaatgtttccttcaatttacacaacacacacaggtgcgtgcacmatttatttatgtttaatgaaagtcatgtgaatatgattttaagagtcaaataactctgtgattccctgattctcagagacaagtattttgaactgatttagctggttcttttggtatttttcacttatttctaaataacatgattataatactacttcttggtttctcacttttattgatttacaaaagcaaagaatgaagatttatcagggttgtccaatcttttggcttccctgggccacactggaataagaagaattgtcttgggccatacataagatacactaacactaacgatagctgatgagctaaaaaaaaaaaaatcacaaaata

SEQ ID NO: 499064 - DNA, 635 bp, Homo sapiens
tcatttgtgactccttcctcatcccacaatctggcttcacctcccacttcttgatgctgggttccctccacctctttggacaaccctatcagagaggacctaaaagagccccatgctgaccttcactcttgcatgtctcactatggttcatgggaaacacacacatccattgccctgacaaacactagacatacaggctattctcaacacakaactcattcagggctctactaccggagctgtggccacaattctaggcaagaatcagacttccatcagccatgcatcctaattgttgtggttctgagaaatctgagctatctgagctatctgagaaatcttctctcactaaatttgaggtcaaggagcagacattcctccttctctcacttttgtgggtaggtagagtgagaaggctcatagagcagttttctgcaaagaagtctttctcataaaattctgttgactctcatacatatttctggggtatagaaccatctaactgatcctcagtcatttcctttgaacctctcactttcatatttcatgtgtgctgcaccttggtgccttgtggaagtctaactttgaatttctctcaggtatgcttatttaatctaccaccactaactagaagt

SEQ ID NO: 499065 - DNA, 624 bp, Homo sapiens
gtctgagtctgcaggccagagaactaggagaaccagtagtggtagctccatgctttagctcaagcagtcagatggataacgttccctcttattcaggagagtcagactgtgtgttatattcagaacttcaactawtgaaggctacccacacagggaaggcagcctgctttactcagtctaccaaatcaaatgttaatctcaccctcatagaagaatgtctgaccaaatatctgggcacttcatggcctagtcaaattgacatattaaattggccattgcgcccaagttaactaactacaaactgtccagcccaaaggtttccaatctgtgggtctagatttttgatgttgctcttctgagattctacatgattaagttttaccatgttctttgaaaattataaaattgtactatattattgagacggatctatttcactaaccagaaataaagaaaaatcagtgaggtgatgagtattatacagaagacaccaatgggccaagagcctgccatcccttgtctattgtatggaaaatttctagcacttcatttgggtcaccttggccacccagatcccccgatatctgccacaacatggtatgtaacacttgaagagccaatgct

SEQ ID NO: 499066 - DNA, 229 bp, Homo sapiens
acaaaccaaccaaccaaacaacaacaacaamaaaaactctgccaccaacacagagaataaaaaaagaagactcccgagttcattttacaaggttaaaataaaaataaccttgatatcaaaacccaacaaggcaagtgcaagagaaaatatttacaggccatcattattcaacgtggatcagcaattatttttaagatgtactggccaggtgtggtggtcatgcctataa

SEQ ID NO: 499067 - DNA, 401 bp, Homo sapiens
gacaaaacaagcttatgagtaaaataatagaaagcagagccacagagaggacgagaggcaggagtcatctcccaagtccaagttcaacttctatattattagacaaggcctcagtgtctttgaactgcaaggaattaatattgattgtagcatgagtaaaatctatcttctactcawcatgaaaagtcacagtcgttttgtttaaagactccagaattattataggcagaaacaagcaggttccacacctatttggtgaaacgaggaatcaggaatgagcattcccaagagaatacaattacaaaagtaaaatcacctagagtttttgggctgcttaaaaaacccagaaagaagtgccaaatgggaaaataatcaaattcagtggaaaaactcacttgaag

SEQ ID NO: 499068 - DNA, 611 bp, Homo sapiens
agctgtcagtccaataacacacttaacaaatgatatacctagtcctcaaggttaacaaacacatgaagaccagcccaaccctgaaaatcagtttgcaaaccttcgctatrtctgatgccattcctaaaaatttttagggacaagttttgtttgtggtaaacaacataaggtggggtgtgtgctgagcccaaagctgaccaattgctcacaattactcataactacccattgacttgattttatcaaacttcagacagtcttgtctcctctcctcaggcccctggaccttggctcaccacctaagactgaacaagcactaaaggacagaccagcccgctaacagctcactccaaaaatgagcgggactcccagagaaactatttttattggagcatcctggttttgccacctgctcaccccactgcctgttcttctctccaaggaggcttctgccagccctgcttgtccttccctagaaaaggaaagccttttcctgtttgatcctgagacacctgtagattgagtttggaatattctccctattgcaatagtatttttgaataagttttatttttccctacctctggttgatttttaattaataccagtaa

SEQ ID NO: 499069 - DNA, 607 bp, Homo sapiens
gtcagtccaataacacacttaacaaatgatatacctagtcctcaaggttaacaaacacatgaagaccagcccaaccctgaaaatcagtttgcaaaccttcgctatatctgatgccattcctaaaaatttttagggacaagttttgtttgtggtaaacaacataaggtggggtgtgtgctgagcccaaagctgaccaattgctcacarttactcataactacccattgacttgattttatcaaacttcagacagtcttgtctcctctcctcaggcccctggaccttggctcaccacctaagactgaacaagcactaaaggacagaccagcccgctaacagctcactccaaaaatgagcgggactcccagagaaactatttttattggagcatcctggttttgccacctgctcaccccactgcctgttcttctctccaaggaggcttctgccagccctgcttgtccttccctagaaaaggaaagccttttcctgtttgatcctgagacacctgtagattgagtttggaatattctccctattgcaatagtatttttgaataagttttatttttccctacctctggttgatttttaattaataccagtaa

SEQ ID NO: 499070 - DNA, 611 bp, Homo sapiens
agctgtcagtccaataacacacttaacaaatgatatacctagtcctcaaggttaacaaacacatgaagaccagcccaaccctgaaaatcagtttgcaaaccttcgctatatctgatgccattcctaaaaatttttagggacaagttttgtttgtggtaaacaacataaggtggggtgtgtgctgagcccaaagctgaccaattgctcacaattactcataactacccattgacttgattttatcaaacttcagacagtcttgtctcctctcctcaggcccctggaccttggctcaccacctaagactgaacaagcactaaaggacwgaccagcccgctaacagctcactccaaaaatgagcgggactcccagagaaactatttttattggagcatcctggttttgccacctgctcaccccactgcctgttcttctctccaaggaggcttctgccagccctgcttgtccttccctagaaaaggaaagccttttcctgtttgatcctgagacacctgtagattgagtttggaatattctccctattgcaatagtatttttgaataagttttatttttccctacctctggttgatttttaattaataccagtaa

SEQ ID NO: 499071 - DNA, 607 bp, Homo sapiens
gtcagtccaataacacacttaacaaatgatatacctagtcctcaaggttaacaaacacatgaagaccagcccaaccctgaaaatcagtttgcaaaccttcgctatatctgatgccattcctaaaaatttttagggacaagttttgtttgtggtaaacaacataaggtggggtgtgtgctgagcccaaagctgaccaattgctcacaattactcataactacccattgacttgattttatcaaacttcagacagtcttgtctcctctcctcaggcccctggaccttggctcaccacctaagactgaacaagcactaaaggacagaccagcccgctaacagctcactccaaaaatgagcgggactcccagagaaactatttttattggagcatcctggttttgccacctgctcaccccactgcctgtycttctctccaaggaggcttctgccagccctgcttgtccttccctagaaaaggaaagccttttcctgtttgatcctgagacacctgtagattgagtttggaatattctccctattgcaatagtatttttgaataagttttatttttccctacctctggttgatttttaattaataccagtaa

SEQ ID NO: 499072 - DNA, 238 bp, Homo sapiens
gtttataaaattcttaaatgaacctggcaaatttagagcaataataaaatkatttaaattagaaaagtcttttttaaaaaggataaataacaaatgtctcattggaattattaaagttgtttcaagttcagctctgaggttcttagaaactaaagtaaaaaagtatgaccagtttctgaagtcaagataaaatcatacaatctttaacttagaaaattatcttctgtgttgtgtccta

SEQ ID NO: 499073 - DNA, 238 bp, Homo sapiens
gtttataaaattcttaaatgaacctggcaaatttagagcaataataaaattatttaaattagaaaagtcttttttaaaaaggataaataacaaatgyctcattggaattattaaagttgtttcaagttcagctctgaggttcttagaaactaaagtaaaaaagtatgaccagtttctgaagtcaagataaaatcatacaatctttaacttagaaaattatcttctgtgttgtgtccta

SEQ ID NO: 499074 - DNA, 580 bp, Homo sapiens
aattatttaaatctaaccctactgcattcattatctttataataaaataaatatgtataacaatgaaacatagtttttaagtatttgggacataaattaaacattaatagattacacctcttaaacttggtactttagtatcccatytctctgtgagaactctgaaagcttcatcttccacagtttaggtaattctttggtgtcttattttgttattttcttgccctgagattagcaatgtcagatctccaaactgctaactcttctctttggcagatcaaatgcttcttcttaaaaaaattaagtttttaaaatgtatttcataggatttttgttctctccctctttttgtgcatatgtgtgtgtgtctgattagtctttactatcttaaaatggttagtcctgatagacctgtttcttcaaaatttctctcagttctttggcagtttgctcttagcttataattaaagatcaatttctgacttgtcttgttctagaaaacctcaatggaaattacagcaagctgaataggatattaattaaaaacataaacctggtgaaacccgaacatagaggctcc

SEQ ID NO: 499075 - DNA, 644 bp, Homo sapiens
tccaatagttgacatggcccttcattccttaaaaccagctatttttcttttgaattacattacctttaattctgtaaattggatgttatatagtaccatgaaaactgctgtgagtaattataatactcattgctgagtgatgtgacttctttctcaaggctatttctgagggaaattgtacaattagatctttaggtattgtgacttgttttggaaatyatggtggccctccagggagctaatgaatctttaattatttagaggttcacatgagaccccttacagatataagcacattagctctgtagctaagggaacatttaaaaacagtaacatgaaatgtgtcagacatagaggaaagatgaagaagcaagtagaagctaatgcaaacagaggaactgccagctctctgtggcactctagctctctctgtcagtatttggttggcaatgtagacatagtggatgagtgcaattacatatgttaggctcattctgaaatgcaggagcattttagattttcatgtagaagcctgacaagcaaactacatctaggatatactttgataactttgagttgagagccaaattttttgaaggtaaaccatctccctgttttaaagtagtgtttaaaattataaaaat

SEQ ID NO: 499076 - DNA, 644 bp, Homo sapiens
tccaatagttgacatggcccttcattccttaaaaccagctatttttcttttgaattacattacctttaattctgtaaattggatgttatatagtaccatgaaaactgctgtgagtaattataatactcattgctgagtgatgtgacttctttctcaaggctatttctgagggaaattgtacaattagatctttaggtattgtgacttgttttggaaatcatggtggccctccagggagctaatgaatctttaattatttagaggttcacatgagaccccttacagatataagcacattagctctktagctaagggaacatttaaaaacagtaacatgaaatgtgtcagacatagaggaaagatgaagaagcaagtagaagctaatgcaaacagaggaactgccagctctctgtggcactctagctctctctgtcagtatttggttggcaatgtagacatagtggatgagtgcaattacatatgttaggctcattctgaaatgcaggagcattttagattttcatgtagaagcctgacaagcaaactacatctaggatatactttgataactttgagttgagagccaaattttttgaaggtaaaccatctccctgttttaaagtagtgtttaaaattataaaaat

SEQ ID NO: 499077 - DNA, 644 bp, Homo sapiens
tccaatagttgacatggcccttcattccttaaaaccagctatttttcttttgaattacattacctttaattctgtaaattggatgttatatagtaccatgaaaactgctgtgagtaattataatactcattgctgagtgatgtgacttctttctcaaggctatttctgagggaaattgtacaattagatctttaggtattgtgacttgttttggaaatcatggtggccctccagggagctaatgaatctttaattatttagaggttcacatgagaccccttacagatataagcacattagctctgtagctaagggaacatttaaaaacagtaacatgaaatgtgtcagacatagaggaaagatgaagaagcaagtagaarctaatgcaaacagaggaactgccagctctctgtggcactctagctctctctgtcagtatttggttggcaatgtagacatagtggatgagtgcaattacatatgttaggctcattctgaaatgcaggagcattttagattttcatgtagaagcctgacaagcaaactacatctaggatatactttgataactttgagttgagagccaaattttttgaaggtaaaccatctccctgttttaaagtagtgtttaaaattataaaaat

SEQ ID NO: 499078 - DNA, 444 bp, Homo sapiens
tggtggtgcaggatacatccttgtatctgggaattaattcctttccgaggtgtatactacttagctttgtgagtaaaatctacgggcttcagtttcctagtcttgctaaattggaaacatgttaatatctatgaytgtagcacatcacaagtaaagataaatgagaaaatgaatgctttggctgggcatggtggctcacgcctctaatcccagcactttgggaggccgaggcaggtagatcgtgaggccaagagattgtgaccattctggccaacatggtgaaaccctgtctctactgaaagtacaaaaattagctgggtgtggtggcgggtgcctatagtcccagctacttgggaggctgaggcaggagactcacttgaacctgggaggcggaggttgcagtgagccaagatcacgccactgcactccagcctggcgacagag

SEQ ID NO: 499079 - DNA, 544 bp, Homo sapiens
gtggtggtgcaggatacatccttgtatctgggaattaattcctttccgaggtgtatactacttagctttgtgagtaaaatctacgggcttcagtttcctagtcttgctaaattggaaacatgttaatatctatgattgtagcacatcacaagtaaagataaatgagaaaatgwatgctttggctgggcatggtggctcacgcctctaatcccagcactttgggaggccgaggcaggtagatcgtgaggccaagagattgtgaccattctggccaacatggtgaaaccctgtctctactgaaagtacaaaaattagctgggtgtggtggcgggtgcctatagtcccagctacttgggaggctgaggcaggagactcacttgaacctgggaggcggaggttgcagtgagccaagatcacgccactgcactccagcctggcgacagagcgtcacttcatctcaaaaaaagaaaccaaaacaacaacaacaaaaaaaaaaacaaaaaaaaaaaggacaatgtacgttttgtaaactttaagtctggga

SEQ ID NO: 499080 - DNA, 544 bp, Homo sapiens
gtggtggtgcaggatacatccttgtatctgggaattaattcctttccgaggtgtatactacttagctttgtgagtaaaatctacgggcttcagtttcctagtcttgctaaattggaaacatgttaatatctatgattgtagcacatcacaagtaaagataaatgagaaaatgaatgctttggctgggcatggtggctcacgcctctaatcccagcactttgggaggccgaggcaggtagatcgtgaggcyaagagattgtgaccattctggccaacatggtgaaaccctgtctctactgaaagtacaaaaattagctgggtgtggtggcgggtgcctatagtcccagctacttgggaggctgaggcaggagactcacttgaacctgggaggcggaggttgcagtgagccaagatcacgccactgcactccagcctggcgacagagcgtcacttcatctcaaaaaaagaaaccaaaacaacaacaacaaaaaaaaaaacaaaaaaaaaaaggacaatgtacgttttgtaaactttaagtctggga

SEQ ID NO: 499081 - DNA, 331 bp, Homo sapiens
cagtgatgtagttgagagaaccaaagtatcgatggtataagacccagtcaagaacagcacagggggctratgtgtcagctcaagcagttaggcagagggtgaagtcacccttcctgtgctttctgttctattcgggtctcaatgaatcggataatgcccactcacacggtggaggaccacctgctttactcagtctgctgattcaaacgctaatctcatacagaaacagcttcacaggcataaccaggacccatgtttagtctgggcacctcatgtctaagtgaatttgacacaaaaattatccatcatacccagagttcttaatcaaagt

SEQ ID NO: 499082 - DNA, 331 bp, Homo sapiens
cagtgatgtagttgagagaaccaaagtatcgatggtataagacccagtcaagaacagcacagggggctgatgtgtcagctcaagcagtkaggcagagggtgaagtcacccttcctgtgctttctgttctattcgggtctcaatgaatcggataatgcccactcacacggtggaggaccacctgctttactcagtctgctgattcaaacgctaatctcatacagaaacagcttcacaggcataaccaggacccatgtttagtctgggcacctcatgtctaagtgaatttgacacaaaaattatccatcatacccagagttcttaatcaaagt

SEQ ID NO: 499083 - DNA, 648 bp, Homo sapiens
acaatacattctttgagtgttataataacattaagtcaatgcacgaattataatccctatttcacaagtacaaaaacacattcaaagaaattaacttccttgctcaccaaacagttattgacaaaaattacaatatttatgtttcttttgaaaaatattataaagattctcaaattgtctaaccaatcatattatccgtatttgtctcttctcaagctgctaataaagacatacccaagactgggacatttataaaggaaaaaggttkaattgactcacagttcggcatggctgtggaggcctcaggaaacttacaatcatggtagaaggggaagcaaatatgtcctttttcacatggcggcagcaaagagaggtgggaaaaaggagggaaaagccccttataaaaccatcagatctcatgaaaactcacttactatcaggagaacagcatggaggtaactgctcccatgataaaatcaccttccaccaggtccctcccatgtcaggtggggattatgggaactacagctcaagatgagatttgggtggagacgtagccaaacatatcgttatcttgataagatattgctttggattgaatcgtgtccctgcaaaaatcttatgtataaaagttctgatccctgatgt

SEQ ID NO: 499084 - DNA, 648 bp, Homo sapiens
acaatacattctttgagtgttataataacattaagtcaatgcacgaattataatccctatttcacaagtacaaaaacacattcaaagaaattaacttccttgctcaccaaacagttattgacaaaaattacaatatttatgtttcttttgaaaaatattataaagattctcaaattgtctaaccaatcatattatccgtatttgtctcttctcaagctgctaataaagacatacccaagactgggacatttataaaggaaaaaggtttaattgactcacagttcggcatggctgtggaggcctcaggamacttacaatcatggtagaaggggaagcaaatatgtcctttttcacatggcggcagcaaagagaggtgggaaaaaggagggaaaagccccttataaaaccatcagatctcatgaaaactcacttactatcaggagaacagcatggaggtaactgctcccatgataaaatcaccttccaccaggtccctcccatgtcaggtggggattatgggaactacagctcaagatgagatttgggtggagacgtagccaaacatatcgttatcttgataagatattgctttggattgaatcgtgtccctgcaaaaatcttatgtataaaagttctgatccctgatgt

SEQ ID NO: 499085 - DNA, 648 bp, Homo sapiens
acaatacattctttgagtgttataataacattaagtcaatgcacgaattataatccctatttcacaagtacaaaaacacattcaaagaaattaacttccttgctcaccaaacagttattgacaaaaattacaatatttatgtttcttttgaaaaatattataaagattctcaaattgtctaaccaatcatattatccgtatttgtctcttctcaagctgctaataaagacatacccaagactgggacatttataaaggaaaaaggtttaattgactcacagttcggcatggctgtggaggcctcaggaaacttacaatcatggtagaaggggaagcaaatatgtccttyttcacatggcggcagcaaagagaggtgggaaaaaggagggaaaagccccttataaaaccatcagatctcatgaaaactcacttactatcaggagaacagcatggaggtaactgctcccatgataaaatcaccttccaccaggtccctcccatgtcaggtggggattatgggaactacagctcaagatgagatttgggtggagacgtagccaaacatatcgttatcttgataagatattgctttggattgaatcgtgtccctgcaaaaatcttatgtataaaagttctgatccctgatgt

SEQ ID NO: 499086 - DNA, 337 bp, Homo sapiens
tgcaataccagtaaacccagccaaaggcattctagtgagcaacacaggaagactcctatacacttcaattttccagcaatccataaaattgaaacataaaaataggattctatttcccttgttcattctatatcttaccagwacttatatttgcatatgtgtagaaactcaaggtttacaaagcatatccacggtctttattgtatttgatgctccacaaaatgttgcaagggactcagacaaagtcttgtttgtactatgttacaggtgagaatgctgacatgtagaggggcaagtacttacctgatcacgttgtcttagtatgatgaagcctcac

SEQ ID NO: 499087 - DNA, 639 bp, Homo sapiens
gctaccaccagaattttggattagctgggataccagtttttctcttctgatttgatataatttcagccagaaacaactttgatgtcttagttggcctgtgctggcccaaattgggctaggtacatataaaatttccactggtgctttcaaaatactgaaaatatctcatggacgactcttcttactatcttgaaaggaaactggaaaatatagccttggattgtcataaaggtcacttatggattttattacatgcttggaaccctcttcaagttagaatatggagttcagatgtgttttgggattaacttgggtacaaaccatatgcagaaaggtaattataaatgcatttttgttcccattttaatgtaacatgggttaatttcaataaaaactggttttagtattatataaaaatagtctctgaagccaggggcagtggctcaggcctgtaatctcaacactktgggaggccaaggcatgagcatcacttgggcccaggagcttgagaccagcctgggtaatatagtgagaccctgtctctacaaaaaatataaaaattagccaggcctggtggcaggggcctggaagtctcagctacttgggaggctgaggttggaggattgctttagcctaggc

SEQ ID NO: 499088 - DNA, 639 bp, Homo sapiens
gctaccaccagaattttggattagctgggataccagtttttctcttctgatttgatataatttcagccagaaacaactttgatgtcttagttggcctgtgctggcccaaattgggctaggtacatataaaatttccactggtgctttcaaaatactgaaaatatctcatggacgactcttcttactatcttgaaaggaaactggaaaatatagccttggattgtcataaaggtcacttatggattttattacatgcttggaaccctcttcaagttagaatatggagttcagatgtgttttgggattaacttgggtacaaaccatatgcagaaaggtaattataaatgcatttttgttcccattttaatgtaacatgggttaatttcaataaaaactggttttagtattatataaaaatagtctctgaagccaggggcagtggctcaggcctgtaatctcaacactttgggaggccaaggcatgagcatcacttgggcccaggagcttgagaccagcctgggtaatatagtgagaccctgtctctacaaaaaatataaaaattagccaggcctggtggcaggggcctrgaagtctcagctacttgggaggctgaggttggaggattgctttagcctaggc

SEQ ID NO: 499089 - DNA, 516 bp, Homo sapiens
tatctttggttagatcaacacacatcataaccaacatgagcagtaagagaagagagcactggcccctggaatgtaatggatggaagccagggtcacagactgaccagacttctcagtaactggccctgcacatagagttggctgtcactgagaattttaaaaatggctattagaaaatgaacactgcacttggaatcagaagaccaagacttgagtcccaagactggttctgattagctttgaaacctcaggcaagtaagtcactgatctctctgagacctagtctcttcatctagaaagtatcaagtttattatcttgaatcttttcccgatctaacattctaggatgttgcacattatttgaattcagttcttatttcagactcagagctatacacttaggaatgagaaatttcacagcattataattacagctactcattgagtwttatgtatgagctctgggaaaaaaggttttctgtatgtatttgttactctttccaacaatccttaatc

SEQ ID NO: 499090 - DNA, 291 bp, Homo sapiens
atctgaaataataacgcttttcaactattgaaaaatttcgttaatttatttactgactcttattaaatccccactactgccaatacaagccaaggagatttttaatagcacgacttcttggagatgaaactcaataatttgacaccagatgcatcagaaatttctggacatggaattactgaagccgatccaagtgctattacaacattccattaccataytccaggataacctgccaaattcacctcttgtccttcaactttgtcattcatcatccttaatgatgcagtt

SEQ ID NO: 499091 - DNA, 625 bp, Homo sapiens
actacagaaaaccaccttacttggactggatggatttgatagtggaaatgagtggcctgtgaggatggaagtttttgtatttatacaggtttatgcatcagaagttggcactgtctaaaaaatccaaaataaaaaaggctaaaaaaagtttcattttattttgctttaaaacaaaaattcctacatctagtgtgatgtwggtggtacagctacttcagtatctacatgttgacattaaaagttgcatgactattttcatattaaatgttatccagaaagtatgacccacctaatattgttattgaaacaccatttccagtcgtgcaattaatcctaattaaacattagcacaaaatttggaagatcagaaagttgttagtaccatcttgaatctcatgattgcagaattaatttaacaaccctgtttgggcataatacattccaaaaaaatatttaaagaagcatcgatttattcagaaggtttatatttgcttcatatgcattcttcagtggtattcaggaaacagctgtcagataaattataaaaatacgtgataaacaaaaccaactcatctttttaattgattttaatctagcttcatctaggcagcataatgctcttcac

SEQ ID NO: 499092 - DNA, 625 bp, Homo sapiens
actacagaaaaccaccttacttggactggatggatttgatagtggaaatgagtggcctgtgaggatggaagtttttgtatttatacaggtttatgcatcagaagttggcactgtctaaaaaatccaaaataaaaaaggctaaaaaaagtttcattttattttgctttaaaacaaaaattcctacatctagtgtgatgttggtggtacagctacttcagtatctacatgttgacattaawagttgcatgactattttcatattaaatgttatccagaaagtatgacccacctaatattgttattgaaacaccatttccagtcgtgcaattaatcctaattaaacattagcacaaaatttggaagatcagaaagttgttagtaccatcttgaatctcatgattgcagaattaatttaacaaccctgtttgggcataatacattccaaaaaaatatttaaagaagcatcgatttattcagaaggtttatatttgcttcatatgcattcttcagtggtattcaggaaacagctgtcagataaattataaaaatacgtgataaacaaaaccaactcatctttttaattgattttaatctagcttcatctaggcagcataatgctcttcac

SEQ ID NO: 499093 - DNA, 625 bp, Homo sapiens
cactatactataatggtagatacccctcattatacattcgtcaaaaccatataatgtacaccaagagtgaatcctaaartaaattattgattttgggtgataatgatgtatcaatataggttcataagatgtaccaaatgtatcactctggagcacgatgctgagagggggggaggctgtacatgtgtgagggccggaggcagacaggaactctactttctcaattttgctgtgaacctaaaactgctctaaaatatttttgaaattttatatatatatgtacataatgtacatatatgtaagctatcttccccagcttatataatttataagcatacaaccttacccacacctcattgtaaaaaattgtctgtgccatcattttaggaacaaattaaaatgaaataaaaaaacacattcattcaacaaatatttatcaaacacttaccatgcactacccattattctagattctctgttgtaaagattacattctaatgaaatttctattctaccttctatttctaaataccttctaaaccacctctactttctaaaccaccttctattatcagaaatcattgtcaatacctgcctgaaggattattttcaaaactagcaaaac

SEQ ID NO: 499094 - DNA, 556 bp, Homo sapiens
ttgtcactttctaactaataattgatgacaacactgagctatatataagtgtaactgctaacatttttgagcacttaatatgtggcaggtactcttattaattcatttaatattcagaacaatgtttggaataggtgttagactactcatttaatgaatggagaaactgggatacagagaagttaagtgacttgctcaaggtcacatggctgtagcctattatatcattttgtagawggcaaaatgcatatgattaaatacgagatatgactataaagtgatggcttatggaatcacaactactaggcagtgtggtttagcattgactaaatcaggagttgacaagctatggcttgtgctgcctgttttagtaaataaagtttgactggaacatagtcacatttgtttacatgtcatctacgactgcttcctcactacaacagcagagttgaccagttgccacagagactttattgcccacaaaacttaaattatttagcatctgattctttgcagaaaatgtttactgattcctggtctagagcataggaatctc

SEQ ID NO: 499095 - DNA, 602 bp, Homo sapiens
gatctcagcttactgtaacctctgcctcccaggttcaagcaattctcctgcctcagcctcccgagtagctgggtttattaggcgtgtgccatcacgcccagctaatttttgtattgttagtagagacggggtttcaacatgtttgccaggctgtcttgaactcctgacctcgtgatccgccagtcttggcctcccaaagggctgggaatacaggcatgagacactgcgccgggccaatatactttctattgggataaaaatcacttttaatggtcacaccactgcctctgcaccaaaaggagaggtaggaaaacagacaaagtgttaggtcactttatttttttaaaagagattctgctcaattaaaaattcatattcttggcatgctaatttgttttcctaaaagaaagattgtggatatcaacttctgaatacagtatgctttaaagctaaatggaaaatagtgaatactatttcaagccttaaggaaacctttgcaaagcatcattacaagcttagaagaaaatctgattttctgcatcaggttttcaggarttaacccgaagtatttgctaattgcagtgtcaccagcagaaaagttt

SEQ ID NO: 499096 - DNA, 526 bp, Homo sapiens
acggtaacctccaactcctgggcgcgagcgatcctcccaccttagcctctgtactatctttacaaagttttatgtaactatcaactgttgtaaaattaaaacttaatatatgcataaaataaagaaccccctgacttcagtggagagagcagactgagatggacaagagtgaagtcagagagacgtgtgggggccccacagtggtccaggtgggcgctgtgagygacttgttggtagcagtggagatggagaaagatgagtcgatttcagtgtcaggacatgcttatagctggcgaggaggtgagggaacacgaggaagcctgaatgatgtgtggttggagccagtggatttttttcaatagatttttctttttggggaaaagatagatgaaaggcaggtttgaggtgggtggccaaaggttctcttttggctggaatattactgacccccctgggatgttactgagatcactggtcctcatggaaatgccattacagggaccggtgagcgtgaagacccaggcga

SEQ ID NO: 499097 - DNA, 324 bp, Homo sapiens
cgcggcccaggcgctgctccgcgggcgcgccgtcctcgtcgtcgtcgccagccatggcgtggtacaggtccagcatgaagagcggcgcggacgcgggcagccgggaggcggcgggtggcgcgcggggccggggccgcccgggtagcccgagcaccgccaggatctcgcgctgcacgtcccggcgctcgcgcgcgcccagacgtcgctggggacagccgggcgggggtcgcaggccggggccgcccccgcccagcgcgcacaacgtcaggcccagragccagagcggtccggggcgcgcggccatggcgggccgggggcgctcag

SEQ ID NO: 499098 - DNA, 324 bp, Homo sapiens
cgcggcccaggcgctgctccgcgggcgcgccgtcctcgtcgtcgtcgccagccatggcgtggtacaggtccagcatgaagagcggcgcggacgcgggcagccgggaggcggcgggtggcgcgcggggccggggccgcccgggtagcccgagcaccgccaggatctcgcgctgcacgtcccggcgctcgcgcgcgcccagacgtcgctggggacagccgggcgggggtcgcaggccggggccgcccccgcccagcgcgcacaacgtcaggcccagaagccagagcggkccggggcgcgcggccatggcgggccgggggcgctcag

SEQ ID NO: 499099 - DNA, 222 bp, Homo sapiens
ctggagccacgaagccgccagcttgaacttggatgatatcccatagactgggctctgcttcatttartcaatcaagaagaatgtatttatgtttcatgtgtcttctaatggccagacaattgttggtagggaatgtgtggcaattcacaacaaacaatagctgacgtcatttccaccacagatattgccatggaattaatgtttgtttaaaacttctattaa

SEQ ID NO: 499100 - DNA, 411 bp, Homo sapiens
tagaactggactacctggggcaaaacactcagctctgccacttttwagctgtgtgtgacaggagtgaattacttagtctctctttgtgtcaagtctccatcagggaaatcaaaacaatataacagtaactacctcatagcgttgttgtgatgattcaattgaataatctagaatagtatttgacattttgtaaatgtaaacaagttagcagttatcattgttcctgttattgttgctattatgtaaaacaatctccaaaatattgtaactgcccagagcaagattctctgactactataccatggcaacaaatcagtatgatctggatttttaaaatttgaaaacaaaaacatctggtatgttattttagcaagctacagataatacaaaaaaaaaaggtagatctcaaaa

SEQ ID NO: 499101 - DNA, 602 bp, Homo sapiens
ctgatcaagttggattcacctaattaaaattagtttaaatcacagtcctttggtttttcactccaccaaaaataattgtaatgtgaaatgtcaagccctctcattttcatatgcaaggcagaatgagtgcatttttaaaaatagtttatcgaatgaatgccttgctagaaacggayatcttgacataacaaaggcattgttcctttccacatctgttaactttttcaaatcaaattgcaatattttgaaaaagggccgtttaaatgtaaataagactccagataacacatgcagttatttgttacacttgctgctattgataatttaggaacaatgttagagggagggagggagagaggaagagagagagggagaggtagaaaaagagcggacgtgcagacaagcaacaatgagaagaaagcaaccacactgatgagacttttgtctcattctgccccatcattttttcagcaacttttggctaaaatcacggcctacatttctattatctatacactgaaaacaatgaaacaatataatgctggcttaatctagccaagcaaattagaaaagctctggtttctcccaacccattaaaaaaa

SEQ ID NO: 499102 - DNA, 582 bp, Homo sapiens
cattgttgttccacgtccttgttcagctacctccattgagatttcagaaatcctagaaacagcgagaatgtacttagattactatgacagtcagttaagatcacctagtaaacaatcaatcctacagcaatatccttctcacgtttttgtcaacctcaagtatgttctattgtctttttgtttttaattgacaaataataattgtacataagttgacccttgaacaatatgggcttgaactgcatgggttcacttgtacggggattttcttccacgtctgctacccagagatagcaggaccaatccctcctcttcttcctcctcctctttagtctgctcaaaatgaagacaacgaggatgaagacctttacaatgatccacttccacttaatatatttgctcttcctattcttttcttttyttttttctttttatttatttatttatttatttatttgagacagtgtctcactctgtcacccaggctggagtgtagtggcataatcttggctcactacaacctccgcctaccaggttcaagtgattctcctgcctcagcctcctgagtagctgggattacag

SEQ ID NO: 499103 - DNA, 571 bp, Homo sapiens
taaatctttttgactaattcacatagtgaaagccacaatatctgtggacactggagcctttcacactaacacaaattgaatctaaatgtagaaagagttaaaggaaaatgaaaaatgaacatgttttcactccaaaaatcatgattgcctaaggttggttggaatgaatgtgtgacaagtcctggttctcattggtgtgttagctcatatcaacattcatgctctggtgccctcactcttcccatctcaaaacrtaatgcttcccggacaaggttcctctttttcacttggcatctatttccttatcaataagtgaactacttttaagaacaaataagaaaggcatttactccaactctctaatggcacgtgacccctttgctgttcctaaatgttcacagaggaaaaggttacttaaatgttttgccattttctactacccctcagtgcctgactaaaagacaccagcaggaactaacattataccattacatggctcagcagttccctactcacccacgtccggatcagtccttttgcttcagagcactgggtagtagtgccgaagcaa

SEQ ID NO: 499104 - DNA, 529 bp, Homo sapiens
aaaggcaaaatgtgaaaatagtcttagctacttacatatgcacacatctatcctttatcacttctgttgcacaccagagacccaaagtctctgttttcatgtacagacaagtgttgaggaacatggcatgggtaagttatgttataattttgtttacaaatataacctaaaacaatcatggtatctttatttttagtttatttccagcaaacatagaaaaaactatttgagatagagaaacctattgatttatgtatgacaattattaaacatgctttatctcaagtaatcctcagatccaccctatgaaaagcagaacctaccaytgattgagtgcttactatctcctgtacacttcctaatacagttacaccaacatcatcgactataatttatgatccccattttacgggtgagagaattgaggcccatgatcacacacctacacagcaattcaaacctcaatgaatctgtttccaaaacctaggtaaacttgtactcaactattatattatgcagtcatgtgctg

SEQ ID NO: 499105 - DNA, 610 bp, Homo sapiens
gttcttaatctgatattttttctggcttagtcagcaatcacttttctttcatcaatgggcataagatttttaagtgaaaaaaaaaaaattctacttaaccaaggtggtaaaatagtccccttgtaattctccatgggatttgaaaaactgactcctaccttttattcataaatcaagcaatgtctgcagctatgcatgaggagaggactgagcctgaaacacaagacggttytcatcttcgtgccagagctgtggactaccttccagaaagccagagatgtttgttgatacattttcataataaacccaaatgaagatggaagtcttgattttgcatatgtcagcttcactagaagttttctgtttgctttcagatttttattgcaaaaagaaaaaaattatatcagggaaagataaattttattggtggtctaatagtcgcaagacatgtacagcttttattattttggatttcttacttttatagtctttaaattatatcagtataaataatgcatccataacacttttatttagttttttgctgtgtttcattggacatttgctagttatccatcaagcacagtaaaagcagattttaggtgttaaa

SEQ ID NO: 499106 - DNA, 576 bp, Homo sapiens
cagaagtttagattttgttctggtgccaaaaatatttttcagataatttataatcaaattttaaagcaagttaagctttataaatttataaatttatttttcatgctaaaaaccatgctacttaatgstgggttaaaaccatgaaaaataaacaagaagctaaaatgcagggtcagctgaacagtaagaatgcccttgatgagcaacattcaaatattctcctctttgtgtattgtatcagaacccatatactcaaaatggaatatcagcacttagttatcaatacaattttggagaaagggcacttgaaagtcagtatatcctacatgatcacctatttactagctatgatggaaaattcaggaaacaccagattctgtctttatcatcaagatgtccactgtttcctcaagatcgctctgttatttgaaggagacctcctatctccctgttcatgaaacaaaatcagtaaactaggcatcattagtagggtctgttctctcccttccttctctcaaaattatgctgaatgacactgttttattagttaaaaaaggcttctagttttagaaatat

SEQ ID NO: 499107 - DNA, 641 bp, Homo sapiens
tcatctcctccttgtatttttattctgatataaatgcaattatatgtaccattaaaaatatagggtacatagtaaacaattaattactattctatttgtgaaaaggtcacttaagctttagactgatttactctacgttttagaataacctcagacagctttataacaaagcaaaaaagacaaaagattacttaaatgaaatatgttttgtatgtttggagatagcatataaactgtaaaataaaagtgattcttaaatgttataatgctatagtcttaagatacttgaaatgatgtttttgttgtcttttaaacttctgaatcttaaaaaaggcataaatatttcacctcaaaccattttttaaacttaacacaaaaccggcacacagtaaatcattaaatcaaaaaaactaactaaatttttctagattaatagtaacattaaaattttgccaggggtgctattaattttgaaaattcctcaaaaytattttagttctaaagtcagtatgcattacttacaatgggataatagtattttaagtgttaccctgatgtatctgtaaagaactaaaacagcgttacaccttgagtcaagaactccaagttcctgtcacgttctggactcacctatatgacac

SEQ ID NO: 499108 - DNA, 584 bp, Homo sapiens
agaagacacctgaggcgtggcctcgggcaggtgagaagacacctgaggccgtggcctcgggcaggtgagaagacaccttcaggcgtggcctcgggcaggtgagaagacacctgaggcrtggcctcgggcaggtgagaagacacctgaggcgtggccgcgggcaggtgagaagacaccttcaggcgtagcctcgggcaggtgagaaagacacctgaggcgtggccttgggcaggtgagaagacacctgaggcatggcctcgggcaggtgagaagacaccttcaggcgtagcctcgggcaggtgagaaagacacctgaggcgtggcctcgggcaggtgagaagacacctgaggcgtggcctcgggcaggtgagaagacacctgaggcgtggccgcgggcaggtgagaagacaccttcaggcgtagcctcaggcaggtgagaaagacacctgaggcgtggcctcgggcaggtgagaagacacctgaggcatggcctcgggcaggtgagaagacaccttcaggcgtagcctcgggcaggtgagaaagacacctgaggcgtggcctcgggcaggtgagaagacacctga

SEQ ID NO: 499109 - DNA, 589 bp, Homo sapiens
ttgtgcaaggctgatcctctgcctaatcagggttgcggtggtctgggttgtgaatcagagttagggattttcctgatggctcccgttgttagggagtttagcaagagtgtggtttttcttgtagccacaggaatttaggaagctgtcaggcagccaagccctgaacctctgactcataggtaccttttatttccttaatcttaggatccatcttagttgataaagaagcatctattggtctctcagatcacatttccctgttgtggtcagtcatagcttggatttctgtgggcccacaggccctactgcatcactcttatcttaaatggcctgagagagaacttcatggatttgttgttctttcctttaatagaacattctctttagtttactttatggatttggcctaccttatgaaggaatactgtatggatttggcctaccttatgaaagaatttcttccttgaagccaaaagagattcccataaaaycttttcctgaagcatttcctctgtgttttcttccagtagtttaatcactttgtgtctcacatttaggcctttgatccattttgagttgatttctgtat

SEQ ID NO: 499110 - DNA, 597 bp, Homo sapiens
ttacgggaccgccattttaaatgcagtccatacgccaccaaaacaggaggtggcacctgactgtattgctttaacaatttcactgacaattccattgctactgcttcaacagagcaccgtttctctatgataattagcaaaatccatctagaaatacaatggttccataaatgctgtctaatttgtcgttactctcaatggaacacagattgtgtgaacatcttaattacagcaactgaattagtatttgttgaaagaaaggcaagaaagagtatagaataaatatataattattatgtttatctgcccccatgtttatccaaatatcaccaactgctcaacaaaatattcagatttgtgctataataactaaatttagtcatttttgatattttatcaacattttaattatatgaaacctatatctttaaatactttttaaaaatgttgttattataaaggttcatctgtcaagattttraaaggagagagtgcggctcatttgcttttcttttcataacctctaactctttacaactgtggcttgtgaccttacggaaaccttgtctgagacacgcccctcctaacccttcatgc

SEQ ID NO: 499111 - DNA, 597 bp, Homo sapiens
ttacgggaccgccattttaaatgcagtccatacgccaccaaaacaggaggtggcacctgactgtattgctttaacaatttcactgacaattccattgctactgcttcaacagagcaccgtttctctatgataattagcaaaatccatctagaaatacaatggttccataaatgctgtctaatttgtcgttactctcaatggaacacagattgtgtgaacatcttaattacagcaactgaattagtatttgttgaaagaaaggcaagaaagagtatagaataaatatataattattatgtttatctgcccccatgtttatccaaatatcaccaactgctcaacaaaatattcagatttgtgctataataactaaatttagtcatttttgatattttatcaacattttaattatatgaaacctatatctttaaatactttttaaaaatgttgttattataaaggttcatctgtcaagattttaaaaggagagagtgcggctcatttgyttttcttttcataacctctaactctttacaactgtggcttgtgaccttacggaaaccttgtctgagacacgcccctcctaacccttcatgc

SEQ ID NO: 499112 - DNA, 471 bp, Homo sapiens
aaacggcctctgaagcacgcacgcagctcacactgggaacactgcgaagccgacgtycgggacgtgctgccacaccacatcgcccccttccaccgtggtgtccccgctctcacagacgagaagagacgcggcggggggtcttgaaactcccaccattctctcccgctttctacctcagttccccagggctcttgcctgagcctttgttttttctacctcagttccccagggctcttgcctgagcctttgtttctggaacttaaagagtttgcttagcagaaggaaaaatgactggttgaatatttaatgacatgcaccatccatgcaagctcgaactcctgaccttgtgatccgcccgcctcgacctcccaaagtgctaggattacaggtgtttgaaccaccgcgcccggccactgagacgactttttactattttatttttccctagaactaactatgttggtgaaatca

SEQ ID NO: 499113 - DNA, 508 bp, Homo sapiens
gttgtagtgagtctattagtctgggacctggggttgcagaacagaggccgttttgtttctgggtgactgcgtttcgcttccgcggagtagcatcccagcctgtctgtctgaggagctatgattcggttccagcccgtgggcctctactgggcccatgtgtcactcggaggccgtgttctcagggtccctgggccggcagcaccagcacttgctagatacacagatgctggggccccgccaaatgcagttgccrgcctctcccagggtttctgcatcaagatccgcccaccggctccagagacactgctctgtagggcgaggacgcccagtggagatccaacctgagccatcctgctgacacctgaccgaggccacggagtccccaggagcctgaccctgagacaagaggaggggcgaggacttgaggaggactctgctgggggcctggggagacagagatggctctgggcagtgacacaggtggaaaggacattccaggcagaaaaac

SEQ ID NO: 499114 - DNA, 508 bp, Homo sapiens
gttgtagtgagtctattagtctgggacctggggttgcagaacagaggccgttttgtttctgggtgactgcgtttcgcttccgcggagtagcatcccagcctgtctgtctgaggagctatgattcggttccagcccgtgggcctctactgggcccatgtgtcactcggaggccgtgttctcagggtccctgggccggcagcaccagcacttgctagatacacagatgctggggccccgccaaatgcagttgccagcctctcccagggtttctgcatcaagatccgcccaccggctccagagacactgctctgtagggcgaggacgcccagtggagatccaacctgagccatcctgctgacacctgaccgaggccacggmgtccccaggagcctgaccctgagacaagaggaggggcgaggacttgaggaggactctgctgggggcctggggagacagagatggctctgggcagtgacacaggtggaaaggacattccaggcagaaaaac

SEQ ID NO: 499115 - DNA, 508 bp, Homo sapiens
gttgtagtgagtctattagtctgggacctggggttgcagaacagaggccgttttgtttctgggtgactgcgtttcgcttccgcggagtagcatcccagcctgtctgtctgaggagctatgattcggttccagcccgtgggcctctactgggcccatgtgtcactcggaggccgtgttctcagggtccctgggccggcagcaccagcacttgctagatacacagatgctggggccccgccaaatgcagttgccagcctctcccagggtttctgcatcaagatccgcccaccggctccagagacactgctctgtagggcgaggacgcccagtggagatccaacctgagccatcctgctgacacctgaccgaggccacggagtccccaggagcctgaccctgagacaagaggaggggcgaggacttgaggaggactctgctgggggcctggggrgacagagatggctctgggcagtgacacaggtggaaaggacattccaggcagaaaaac

SEQ ID NO: 499116 - DNA, 508 bp, Homo sapiens
gttgtagtgagtctattagtctgggacctggggttgcagaacagaggccgttttgtttctgggtgactgcgtttcgcttccgcggagtagcatcccagcctgtctgtctgaggagctatgattcggttccagcccgtgggcctctactgggcccatgtgtcactcggaggccgtgttctcagggtccctgggccggcagcaccagcacttgctagatacacagatgctggggccccgccaaatgcagttgccagcctctcccagggtttctgcatcaagatccgcccaccggctccagagacactgctctgtagggcgaggacgcccagtggagatccaacctgagccatcctgctgacacctgaccgaggccacggagtccccaggagcctgaccctgagacaagaggaggggcgaggacttgaggaggactctgctgggggcctggggagacagagatggctctgggcagkgacacaggtggaaaggacattccaggcagaaaaac

SEQ ID NO: 499117 - DNA, 582 bp, Homo sapiens
ctggagcagttttggggcacagagagcagagtccgtggaagaggattcagagaaggggcatctccacctgcagcctggccctgtgtcgggaaggcgcacactgcagggtctccagccccggggctccttggccttttattatcggctggcagtacccattttagttaccaggaagttgggtggaaccaggaagaaggtgtgggctatcttttgtctttttgcactaagctctgaaaagtttgcagttcacattcatgatcattttcgcggttcacattcataaccccccatagtttacaggcaccttctccccacggagcccagggcagagagcggagccgggagtccgcttgggtggccagtgagggcttcctgccgacctgaggtctccagcaaatggcctggatcggtgggcaagcctcgaatggaaaccaggagacctggattttggagctggcttcgtgagccccgattggcagatcagtaaaatggacagagtagcccccaagagggcggctgagaatcacrtggaagcaccgtgcatggtggacgtgtgccctgggtgtcatctgtttcctccaa

SEQ ID NO: 499118 - DNA, 422 bp, Homo sapiens
aatgctgagataatcaaatagtgaacctgtcctgtcttgccagaggtgagaggccgygggaatccccggcgtgtctctcagtggggcagctcaggaagcaatgacggaacgccagcctcagccccgcgctgcctggggacagagcctcggctgtgcctcgtaggcagccttgggttgctccctgccccatgcccactgctattgtccagtgtaatgaaacagcgccctggctatcccctaactggcctctgcctccagtccagcacccctcccacctgtcctttatgttgttgctgtagaaatctttctcaaatgcaaattagaaaagaagaaagcagatgaagtcaccgaagccaaagaaagaaagttaagagggagggagtgggtgacgcagaatgccacctgttggggagaggtcgctt

SEQ ID NO: 499119 - DNA, 608 bp, Homo sapiens
ggacagaagccagcctttccctcagcgcrggtggccccggccccttctgtgcctcaaagtagaggcgagagtgcccctgtctcagtctcctccttccctaatctccgcctggagcagaaccctagctccatctcagggctgctctgggggctgtgggacccctgggcggtgtggaaggaggaccctggggggcagagggaataagatggggtccagcaggccagcctttctgatgtgacctcatgcatttagacccagtcctgagtcccccaggggaccctgagtggacaccatgagcccctgagggcaggtgtggatctggggcttcctgtgtcagactctccaggcagggtggggagcagggagagctggagggcgcctccctttgctgctgtgtttgtcaggcagcccccacccgattccagcctccagcagcttcacttggtgttgcaggggggtgactgggggtggggaggtgggaaactacacccagcactgggcttacacccgggagcagcagatgtcagtcttgctgtcaaggttgaatactggtggacttttcccagttttcagggaagttctagcccagttaatatgtttgtccacag

SEQ ID NO: 499120 - DNA, 555 bp, Homo sapiens
ctggagactcatcctcccctagactaatgagtgaaagtgggtgggattagtattaagttgtgcaaaaagcaattgtggtttttgccaaagttgtgtcaaagactggaattgcttttgcaccaacctaagcactgggccataggaaggcaccaaaaatacctagctggtggctctggcgtgactttttgcttaagcttagtggctaaattctcatcctgtccctaatgacgaaagtccttcctcacatcccaggttcaatttgctagagactgtctagtctccttgaactttgaatcttggctttagctcctgctgataacctcattcctacaggactgggccacggaactgctttataccagtctctcggtggcctggagcccagaccctgaacctaagtcatatggccagcccagaccctaacttcaaggcttccttatgccagtcaggtayctgcctttctgcctattgcctggagctgagccccctgcgttcttcaatttcatagagttgactaaggattaaatgagttaatgtatgaaactccttggcaaa

SEQ ID NO: 499121 - DNA, 460 bp, Homo sapiens
cctgaaaacagcgccaacaccaagaatagagatggagaaccaaggcaccgcgtgacggcgagccctgatcaaaccacacctgatgctagggctctcccggggctgttttgccctgtgaggcaaggaactgcctttttccttaagccagatgacatcgggagctgggctttctataacctccctaaaaaagagccctaagtgatacgtgtctctgaatgaggctgcacacttgttttgcgcctggaaatgctcagctcacccagcacacgagtagcagtatttttctgttgcattacacatatcagcttctcaaaatcaccccttyctgagacactgaaaagctgggctggggtcccctcaaagaccccagtgctaggtccatgggcttctctccgaggactaagaggtttccatttactatgttacatttccatggaaaatgaaactcttgatagatttc

SEQ ID NO: 499122 - DNA, 457 bp, Homo sapiens
aaaagtcttaagaagtgcttttctgaataaactatgttgtaggactaagaattaaaaatgataagcaaatactatatttgtatcagtatgaaactaagtcttctcttttatgaatgtgtactcctgtactcccatgtccaaattgtgattaagaaactgcactactatgagtattcagaatgtacatctcccttactttagtagaaaaatataatactatgggcagcatttaaaatttaacactgcccatactatttctaacagtgaaaaatatttcactgcatcctctccagctctatttttggcaactaattaaaagcatatgcctgaaccttttatgtattttrcccttataatgagatctattactatggctcactctatgcctctgagttccaaagtatctttggagttaccatggataccagtgacaagtattctcccataactgctctgt

SEQ ID NO: 499123 - DNA, 508 bp, Homo sapiens
aaaataaataatcaaaccaaactaatgtagttttgactccatttattctttattcagtaagcatgctgctatttttcatgactgtggtgtacatagtattttgggttattcatagcatgcttaatacctgaatatttcatgggaacacagctagaaagtttaatagaaacttaagctagattttttaattgaaaatatatctccaatttgtatgagtaatgaatgctttaaaaatgatgtagtaccctcttaatttttcaattattatatattcaaattcccataagatataatttatggttcttcatggactgttcattattgaacttgtaaatacaattcatttcttcagctaatagcaaacaatgggatataaataatggcacacagcaatccctgaaagatactatttcttaacttattaatatatagwgagatttttcccagtattcaagctactacttgtttcatgttggtactttcagaactcagatgcaatgtggtgaaa

SEQ ID NO: 499124 - DNA, 614 bp, Homo sapiens
tctgcttttcctcttctgagtcttatgacaatgatttttctgagctatctgcttttgaacttagaccattatcaatcatgctaaatgcattattgtatgtatttgttgaaaacacattttttaaaattagattttttgtgatttatatagaagaatttgtgtctcttcaatattatgtcacaaagagtggaagcttgttttttttaggaaaaaaaaaataaatttacatgtgcagtcatccctcattgtcctcagaagttggttccagaacctcagctttaccaaaatccactcatactcagtcctgcagttggccttgcagaacccttgtgtttgaaaaactgggcatataggtgggtttcacatactgtggatactggattttccatctgtgtttagttaaaaaacaaccccacatataagtgaacccatgtagttcaaacccstgttgttcaagagacacctatatttatttttaattagtggtcatggccgtggcttcttgaatatatgtctttctccttaacatgagtgtgcatgtctaggttctttcttgctaacaattaactttatttttttttacactacggccatggtgagtgcaaagattagtt

SEQ ID NO: 499125 - DNA, 640 bp, Homo sapiens
tcctttcagaattataaaacccccacctagcaatgctaggctcctgacataaattactgaaaaatagtcagtaatgaattttaaagccaaaacagaaagtgttagtccctttctaccaaaaaggtatttaacacatcttaaaacaaaaatcgagtaacccrgggaggataaaataaatttgtgtcacaccaaaggaagatgtaaaaattgtttggtttgcagaaaaatcattcaaaatcatttcaatccttggctcataaataatgcaaacttaatgagatattctatcctaacatgtatagatgaagttcttaattatttcaaaggggattgtgcctacatacctgaaatttaaactttccctgtagaaaacaataaaaacatacacttctttatagatatatttagaatgtgttatccccaactaatattttctaaactacacacatacttaaacactgaatttaagatataaactgagatccttaccaattttgaatggagtttaatcacatcaacccacataaaagtctcacatgaacacatatttttatgtgacatatttttcttcaaataaatattgcttctcagactttttagcaactgtggcaaaaacactcattgtgaatttatttttctt

SEQ ID NO: 499126 - DNA, 582 bp, Homo sapiens
taattatgatgaagtcttggcttaaaaaaagaaaagttgtttagttagaacttcataattggcaatgaaacatttaaccaaagtgccagctttcaaatttgttaaattttgtttttttatttgaactatgagaacagcatcatggtgatctgcagaatttgatattgggaacttaaaatgttaggatggagatttgtaaaataattccaaacaaaaccaaccccattatgaattacctttaaaattgcaaaacagataagattctgaacgtgtttggataatacaacaaattataaaatatgaaaaaaagtggatgatacaggtttttctcttttgtgatttgtgaagcaagaatcagccactaaattaggaactggaaagtccttaaagtayctatgggaattcttttgcataactgaattgactagcatatgcagccctaaagcagtattttaagaactgattttttttgatcatagaattctcaaaaataacgatgttagcaatccatacaatattctcacaactaacatttgatataactgatttttatttaaataaatatcacacatttaaaaagaa

SEQ ID NO: 499127 - DNA, 584 bp, Homo sapiens
aagactccatgggtgtaggaccctccgagccatgtgcgggatataatctcctggtgtgccatttcctaagcccatcggaaaagagcagtattcgggggggagtgacccgattttccaggtgccctctgtcacccctttccttgaccaggaaagggaactccctgaccccttgcgcttcccgagtgaggcaatgcctcgccttgcttcggctcacacacggtgcactgcacccrctgtcctgcgcccactgtctggcactccctagtgagatgaacccgttacctcagatggaaatgaagaaatctcctgtcttcttaggttgccttctgggactttataatgtaatgctgacactctgatgagcctagaaaactgccctaatgtgaaacaaataagaaaatacaattccaactctagttgctctattaagtgatttaaattgtataatggttaagtcataaaaaagtactaaattctgacccaaatattagggtaagctaatatttttaaaaaattctataaagaatagctaatattcaaagtttcaattttgaacttaaagattacaggaagaggtggttctt

SEQ ID NO: 499128 - DNA, 410 bp, Homo sapiens
tgagttagtaaattacctactttgggacattgtaccgtgaacttayttgagatataatagttaaaaggacctgctaggcaaaaaatattttgcatgaagtttaaatatggatatattttcattttaatatattttcaataaacattttattatatgctcaattttcaaacaactaacttggaaattcttaataattggagataattttttaggtagctaattctttggaaaagaaaaataacatttctaatatgctttctgtcacctaaggaaaggtccatcagaaaaggtgaagtttaggtttaaaagttttgacaaagataacattatgacaagacagataaggcctaagtctagtggatgaagacttgggaacatgtgactatccttgaaggtggcaagtcatgggt

SEQ ID NO: 499129 - DNA, 651 bp, Homo sapiens
tgggcgtggtggctcacgcctgaattcccagcactttgggaggccgaggcgggtggatcacaaagtcaggagatcaagaccatcctggctaacacagtgacaccctgtctctactaaaaatacaaaaatttagccagrcgtggtgacatgcacctgtagtcccagctactcgggaggctgaggcagaagaatcacttgaacctgggaggcggaggttgcagtgagccaagatcgtgccactgcactccagcctgggcgacaaagcgagactctgtcccccccccaaaaaaaaaaaaaaaaaaaaaaaaaaagcataagaaatcattttgctacataaggagtagctttcttcagttgccacctttacttctgagctgcaattcccttttctgttgttcatgtcccaaattcaacttgcagaactctgctatttggcagctcagatttttagccttccacagcctattgctggcttcttggcagagtatcaaacctgtccaggcaggacatcagaccagtccagattaaactagcttgatctaagaaacaagccagtgcaaaatagcaagatactcattaattttaattaacagttccaaacagagttgcacaacaaggtcattttccctaaatgaattattagagataata

SEQ ID NO: 499130 - DNA, 651 bp, Homo sapiens
tgggcgtggtggctcacgcctgaattcccagcactttgggaggccgaggcgggtggatcacaaagtcaggagatcaagaccatcctggctaacacagtgacaccctgtctctactaaaaatacaaaaatttagccagacgtggtgacatgcacctgtagtcccagctactcgggaggctgaggcagaagaatcacttgaacctgggaggcggaggttgcagtgagccaagatcgtgccactgcactccagcctgggcgacaaagcgagactctgtcccccmcccaaaaaaaaaaaaaaaaaaaaaaaaaaagcataagaaatcattttgctacataaggagtagctttcttcagttgccacctttacttctgagctgcaattcccttttctgttgttcatgtcccaaattcaacttgcagaactctgctatttggcagctcagatttttagccttccacagcctattgctggcttcttggcagagtatcaaacctgtccaggcaggacatcagaccagtccagattaaactagcttgatctaagaaacaagccagtgcaaaatagcaagatactcattaattttaattaacagttccaaacagagttgcacaacaaggtcattttccctaaatgaattattagagataata

SEQ ID NO: 499131 - DNA, 651 bp, Homo sapiens
tgggcgtggtggctcacgcctgaattcccagcactttgggaggccgaggcgggtggatcacaaagtcaggagatcaagaccatcctggctaacacagtgacaccctgtctctactaaaaatacaaaaatttagccagacgtggtgacatgcacctgtagtcccagctactcgggaggctgaggcagaagaatcacttgaacctgggaggcggaggttgcagtgagccaagatcgtgccactgcactccagcctgggcgacaaagcgagactctgtccccccccmaaaaaaaaaaaaaaaaaaaaaaaaaaagcataagaaatcattttgctacataaggagtagctttcttcagttgccacctttacttctgagctgcaattcccttttctgttgttcatgtcccaaattcaacttgcagaactctgctatttggcagctcagatttttagccttccacagcctattgctggcttcttggcagagtatcaaacctgtccaggcaggacatcagaccagtccagattaaactagcttgatctaagaaacaagccagtgcaaaatagcaagatactcattaattttaattaacagttccaaacagagttgcacaacaaggtcattttccctaaatgaattattagagataata

SEQ ID NO: 499132 - DNA, 524 bp, Homo sapiens
tatgctagaagatgttatgctttattttctaatagccataatttgttgaatccttaccatgtcctagactatgtgctaatcactttatgtagattagctctcctcatgctcacaacaaacccttgcaatttatgttattattatcagatcactgattrgataataaattagagaggagtcacgtaagttgctcaaattcactaaaatagctgggaaaggaattgaccttaaatttgccatatttgagagcttgaactttccccttcattacgctgctttgtctctcaaatccaattatttgaaccactgaagtaattactatatttttaatagtagcactcattgacgcttgaatgcaactcatcagtaatacatgaaatctatttagggagtagcaaacagaatttagaggatggatagagcagaatagaagtaaatatcagattgcattatatattaatacttttcaggatatattatatggttatacatatgggtgtactgggttattatgtaaaaatata

SEQ ID NO: 499133 - DNA, 524 bp, Homo sapiens
tatgctagaagatgttatgctttattttctaatagccataatttgttgaatccttaccatgtcctagactatgtgctaatcactttatgtagattagctctcctcatgctcacaacaaacccttgcaatttatgttattattatcagatcactgattggataataaattagagaggagtcacgtaagttgctcaaattcactaaaatagctgggaaaggaattgaccttaaatttgccatatttgagagcttgaactttycccttcattacgctgctttgtctctcaaatccaattatttgaaccactgaagtaattactatatttttaatagtagcactcattgacgcttgaatgcaactcatcagtaatacatgaaatctatttagggagtagcaaacagaatttagaggatggatagagcagaatagaagtaaatatcagattgcattatatattaatacttttcaggatatattatatggttatacatatgggtgtactgggttattatgtaaaaatata

SEQ ID NO: 499134 - DNA, 580 bp, Homo sapiens
gccaggcgcttctcaaaatatctcacagtcttctccatagtcctttaagacatcattgttatccccattttatgtatgaaaaagctgagatggagagtttaagtaactttttgaaagtaataaaggttgttaatagcacaatcaggatatgaactcaggacatcaaggccctgctttctgtacatcctctcaaatggtttgtttggacttggtgatacttttggaaagattgcccctcttccctgcccacccacccaattccttccataatatcataaagaaaatctcatgttgggatgtctttctcatttgcacttgtctgcatttcttgtaaaatgttatttttggcaaaatatttgcctgcagatgaagatctatgcaataatattaatataagagataatcagttctttttttctcatttgacttactcttaattataataaagaaaaacttgacacaatagttttgatttctgaaagaaccattatctaaaccaacattctgttctacctgtacattagtgaggtagtcagtacatgtgatcagcagtaacygttatttggcattagaagtttag

SEQ ID NO: 499135 - DNA, 568 bp, Homo sapiens
tgaccacttgcctgatactgttcattgcaatacagacttccaygtatgaacacatcacagtttgtataaccatattgccattgatagctattacattatatctatccttcagttattacaaatgatgccactctaaacattcctgaatgtgtatcctggtacacataagcatgcattttctatgcaaaaatgagtggaattgaaaccatctttgcaaaaattatgacagtgagaaaaatctaacatagctgactatcttgcttctaacttcacaaactgtccttgttcattcctgggcataggccaagctaactatggaggaattcatagtttaattttaaaacaaagatgataatagctgcttcccaaaagtaacccctccctgctaagggactgaaactacctttgtaaaactaacaaattaggcataaggttaaaattatggttcaggaataatgtagctggaagtcacaagattgtagcctcctcagttgctcctatagataacatcactactgtaaagcctaagattggtgcttgatgtattttttagaccctgtattttgat

SEQ ID NO: 499136 - DNA, 568 bp, Homo sapiens
tgaccacttgcctgatactgttcattgcaatacagacttccacgtatgaacacatcacagttygtataaccatattgccattgatagctattacattatatctatccttcagttattacaaatgatgccactctaaacattcctgaatgtgtatcctggtacacataagcatgcattttctatgcaaaaatgagtggaattgaaaccatctttgcaaaaattatgacagtgagaaaaatctaacatagctgactatcttgcttctaacttcacaaactgtccttgttcattcctgggcataggccaagctaactatggaggaattcatagtttaattttaaaacaaagatgataatagctgcttcccaaaagtaacccctccctgctaagggactgaaactacctttgtaaaactaacaaattaggcataaggttaaaattatggttcaggaataatgtagctggaagtcacaagattgtagcctcctcagttgctcctatagataacatcactactgtaaagcctaagattggtgcttgatgtattttttagaccctgtattttgat

SEQ ID NO: 499137 - DNA, 568 bp, Homo sapiens
tgaccacttgcctgatactgttcattgcaatacagacttccacgtatgaacacatcacagtttgtataaccatattgccattgatagctattacattatatctatccttcagttattacaaatgatgccactctaaacattcctgaatgtgtatcctggtacacataagcatgcattttctatgcaaaaatgagtggaattgaaaccatctttgcaaaaattatgacagtgagaaaaatctaacatagctgactatcttgcttctaacttcacaaactgtccttgttcattcctgggcataggccaagctaactatggaggaattcatagtttaattttaaaacaaagatgataatagctgcttcccaaaagtaacccctccctgctaagggactgaaactacctttgtaaaactaacaaattaggcataaggttaaaaktatggttcaggaataatgtagctggaagtcacaagattgtagcctcctcagttgctcctatagataacatcactactgtaaagcctaagattggtgcttgatgtattttttagaccctgtattttgat

SEQ ID NO: 499138 - DNA, 660 bp, Homo sapiens
caggacagattatattcacattctcagttcccactgatttcaataatttagatggtgagatttgagacttttgaatttatgaatttaaatgggagtttagactttcagttgatgcaataatgggatgagaactttgagatcttgggatggggtgaatatattttacatttggaagagacatgaacctttgggcaatgtagggaagactgtggtaaggagaatgacagaccctcataaagagtccacacccagctcctgggaacctgtgwatatgttacattgcatagtaaaggggtttttgcagaaattaaggtaacagatgttagaatagggagattatcatggattaccttggtggaccaaatctcatcatatgagtctttgaaaacagataactgtctccagctagagaagacatgtttcataaggggaagacaggaacatttgaagtgtgtaaaggacctgaaatgctgtctttggtttgaagatggaaggggcagtgtgatgagagatgcaggtggccttaaaaagctagaagagtcttcagcaaggaaagcaggacctcagccctatagttgtaaggaggtgaatcctgccaacaacctggatgatgtcagaagtggattctcccctagagcatctagaaaaaagccatggcca

SEQ ID NO: 499139 - DNA, 480 bp, Homo sapiens
aacctctgctacctcccgttagaggcgtgaatcaactgcactccaggccattcctagtttaggaaggaagaatctaatctgtgattcaaatgtgatctgagttcacagggcccagaactacttcttagcttctgtgttggcctgtactcacatctttaacattaagcaagcgttgacatagttgcaacaagtcagattttcctaatctgatgttttcttacatccaaaatagtgaaggcctcttcamtgatactccactccacataaggatattagaagcattccacaaggaatagctcaaattgcatgcaattaagagagaacatcatgtatttcaaatctcctcctaaggctttacgatttcccacataaacaaagtgtatgttacttcaaattaaccactcacttcattgcacaaaatcttagaactagatttcctttatcttcttccccaaattatcaccttttcatagttaaaaa

SEQ ID NO: 499140 - DNA, 638 bp, Homo sapiens
cccttgcttctgatttgtccctttcacatctagtctctcccacaaagccagaatatttttgatcaaatacacacataaatccctgctatgttcagaatatagtccaaactccttaatataacctaaaaatggccctcataatcttgtccctctgtatttctcaaatcccatttgttaacttgttgctccctgcattaatttagccactttcagctttctgaagatgcctaatggatattttatctcatttctggttctctgcacatgcaattctctacatattcttttctcctttgcctacctcaattcaattcaatttccaggactcaattttgatgcatttcctccaggaatcattccccatccacttcaacctccttcctaagttaaatatctcttttatattgtcacacaatgttctatataatagcatttatcccactgtgtcataggtgcctstttattagtttgactgttcacacagcctgtaaaatccgtgagagtaatgatcctgccagtcttgtttaccactatttaaccaacatctttgtgcccagtctggtacacaataggtgctttctctctctctctctctctcctctctctccctgtcctctctctccatatatatgtattta

SEQ ID NO: 499141 - DNA, 638 bp, Homo sapiens
cccttgcttctgatttgtccctttcacatctagtctctcccacaaagccagaatatttttgatcaaatacacacataaatccctgctatgttcagaatatagtccaaactccttaatataacctaaaaatggccctcataatcttgtccctctgtatttctcaaatcccatttgttaacttgttgctccctgcattaatttagccactttcagctttctgaagatgcctaatggatattttatctcatttctggttctctgcacatgcaattctctacatattcttttctcctttgcctacctcaattcaattcaatttccaggactcaattttgatgcatttcctccaggaatcattccccatccacttcaacctccttcctaagttaaatatctcttttatattgtcacacaatgttctatataatagcatttatcccactgtgtcataggtgcctgtttattagtttgactgttcacacagyctgtaaaatccgtgagagtaatgatcctgccagtcttgtttaccactatttaaccaacatctttgtgcccagtctggtacacaataggtgctttctctctctctctctctctcctctctctccctgtcctctctctccatatatatgtattta

SEQ ID NO: 499142 - DNA, 230 bp, Homo sapiens
taagaaatatggatgactgtttattattgttactaaatgaaaaaagccttttttccttggatacaatagataaatgtttaaagayaaacaaaatgtccttcttatgttgtacaatctacatgagacagatgataggatatttctctaactgatggctgagtaaatcacttcattttcattgtttccacagtgttgaccaacatgctgccagtctgacttcccacttctga

SEQ ID NO: 499143 - DNA, 230 bp, Homo sapiens
taagaaatatggatgactgtttattattgttactaaatgaaaaaagccttttttccttggatacaatagataaatgtttaaagacaaacaaaatgtcyttcttatgttgtacaatctacatgagacagatgataggatatttctctaactgatggctgagtaaatcacttcattttcattgtttccacagtgttgaccaacatgctgccagtctgacttcccacttctga

SEQ ID NO: 499144 - DNA, 606 bp, Homo sapiens
tccctacatgcctgagctggcagcagcaagcctgcgagatgaagctcctgccccttcacaagaagattcatcatgttctttgaaaaagcctttgcagccttcatttttgtccctcttgcctgccatctccctcgtcttttggttctattatatgtattttttagcagccttggtgttccctgcatttttttttttaaccacaaagttgactgttatgtaacagtctcatggacctgcctcccagaatctaaagtgtctgttgctataactacaacgctcataaattcagcctcccttaaaattatgcattttccaaactccccaagtggagactcagaagggttaggttagctggattttaaaccataaaattcaygtctagacccccaaatctgtactgtatatttttaaaacatttataaagggacctgggtttcttttcatttctgcagacactttaaaggataagttttatttctgcatctggaatcgcagactttctcaactctccaggaaagaggtttttgccatactaccagatcctactgaatcatactaccagaaacccactgaatagcggggaatgagaggaaaggtgtgacttgg

SEQ ID NO: 499145 - DNA, 578 bp, Homo sapiens
cttttcccagtcccgtcagtgcctgaagggctttggtaaaagggagaggacatccaggtcctcggtggcttcacattcatcccaccctccatcactgggttggccacaggtgtcgtcatccccagccttactttgttctcttcccttcctgtcatcctcaacttttttcttctgttcttcttcattcacgaacattttattccttcttccttttgccccttcttccatccagatagcaagragggtgttcagaaagaggagagagaggaagctaaagagaaaagtaaatgaaaccagaatggccttctccccaggacctccatcctgagccttgcagcgagagtgaagaagcatctgagctgtcctccagggacaagcaaggaaaaggatcccccattttggggagaatcacgtggtaagatgggcattcctgtgggagtggggcctttctcctagaatgtaagctccaggagggcagggaccatgtccccagtccatccctaaagcctggtgtggtgcctgcactcagatatagagcaaagagttgctgaatgaatcagtgagcagagctcttgcag

SEQ ID NO: 499146 - DNA, 578 bp, Homo sapiens
cttttcccagtcccgtcagtgcctgaagggctttggtaaaagggagaggacatccaggtcctcggtggcttcacattcatcccaccctccatcactgggttggccacaggtgtcgtcatccccagccttactttgttctcttcccttcctgtcatcctcaacttttttcttctgttcttcttcattcacgaacattttattccttcttccttttgccccttcttccatccagatagcaaggagggtgttcagaaagaggagagagaggaagctaaagagaaaagtaaatgaaaccagaatggccttctccccaggacctccatccygagccttgcagcgagagtgaagaagcatctgagctgtcctccagggacaagcaaggaaaaggatcccccattttggggagaatcacgtggtaagatgggcattcctgtgggagtggggcctttctcctagaatgtaagctccaggagggcagggaccatgtccccagtccatccctaaagcctggtgtggtgcctgcactcagatatagagcaaagagttgctgaatgaatcagtgagcagagctcttgcag

SEQ ID NO: 499147 - DNA, 296 bp, Homo sapiens
aggggtgaattgctagatgcaatgtaccattttctctttatgtgaggttgttcatgtcaaatactaaaggtatgactactactactattaatgatggcttactgtaggccgggctcagtggctcacgcctgcaatcccagcactttgggaggctgaggtgggcggatcacttcaggtcaggaaayagagaccagcctggccaacatgatgaaaccctgtctctactaaaaatacaaaaattagctgggcatggtggcatgctcctgtaatcccagctgcttgggaggctgaagcag

SEQ ID NO: 499148 - DNA, 475 bp, Homo sapiens
cgaacaccatgcatgtaagagtttggaaatatatttttagtctctaatgcagttttggagccatatacaacttttacaaagtgcaatgtaatttctatgtagcatttctgggacttagagttcaatttaatatatcagaaaaatgttttagggagtaacactaccttgtaaacttggtccaaaacttagctgtacagtgtaggatatcataaaacagtggtaacccaccagagacagagtgttgtgtttatgtgagtatacaatttaggagctgcaagggccccttgaggttaactaatgattcgtgtccctccttttaactgacctggaaagactcctggacttgctcaactacatagaggctaagacagtggtctcctcaytcctctcgttctgtggattttctcgttctgttttgttttcgtttttgttttgccacgctatatttcataatacttagcagttagatttataa

SEQ ID NO: 499149 - DNA, 612 bp, Homo sapiens
aaatggagtgaaaagcctggtggataatcttgacgggtggtccccctcatgcaaaacccatgtacgtcctaataggatgcaatcccatctcagtgagagccatgcatcacctggccagtatttgattagaaggttgattgattgattgattgcatttcgaggacagactgtatccaggacagctgtggcctccatgctactatgagtttgcctagaggcaatggttaaatatgagtaacaagtctcctaggcctttatgcaaaaagcttaatgcaagttgtttggtcagaggatctgagattgtacctctgtaattaaagttttatagactatggaaataaatcataacagcatgtactaaaactaatttttaaaaatcagtttatcctcatttccctgagaatttgatcaactggtaaaataaacaagtataataaaatctgatttttttaaaaaaatgtaaagatgtgagctggacacggtggcacacayctgtagactcagctacttggaaggccaaggagttccaggccagcctgggcaacatcacaagactccaacttctaaaaaaagttaaagatgcaagacttaaaaataagtttttcagtccag

SEQ ID NO: 499150 - DNA, 388 bp, Homo sapiens
tgtaagtagttgttttgtattktttactgctgacggtgtcagggtgagtgtggcctgggtgagctgcagcttcctgttgctaaggaagcagacatctttgcctttctgttgcccaggtgcctctggctggagctcagacacctcagtttctctgcatggacacacagtggttcaataggaaaccatttatcatctttgtagaatgtaataattatagttactgaatgctccaactggattttaatgttcctagactagcttagtgttaatgctccttcaaaacaatcatttagttgttctcggcaactgattgcacatactgttttctaaaggtagatatttatttgccattttaaaactttctcagttataagaaaaggtaattttg

SEQ ID NO: 499151 - DNA, 388 bp, Homo sapiens
tgtaagtagttgttttgtattgtttactgctgacggtgtcagggtgagtgtggcctgggtgagctgcagcttcctgttgctaaggaagcagacatctttgcctttctgttgcccaggtgcctctggctggagctcagacacctcagtttctctgcatggacacacagtggttcaataggaaaccatttatcatctttgtagaatgtaataattatagttactgaatgctccaactggattttaatgttcctagactagcttagtgttaatgctccttcaaaacaatcatttagttgttctcggcaactgattgcwcatactgttttctaaaggtagatatttatttgccattttaaaactttctcagttataagaaaaggtaattttg

SEQ ID NO: 499152 - DNA, 624 bp, Homo sapiens
gctgggactactggtgcgtgccaccatgcctggctaatttttttgtatttttagtaatgacrgggtttccccatgttagccaggatgctctccatctcctaacctcatgatccgcctgcctcggcctcccaaagtgctgggattacagacgtgagccactacgcccggctgggtaattagattgtttactagtattttcccctgtaattaaaagaaaaaaaaaaacagcgatcaatatccttgtgcatgactacccgtggacctgtataaaactttctctggggggcaaataactactaagctgaaatctatttaatagatctcttctaatttattaataataacacatttccttttagagagggagtaagaatttacatttcttccagtaaaatttgaaagttctcattttatacatttattcatacttagtattgtcaggctcttcatttattaccaattttataagttgtgaaatggttctctaataacattcttagaattccccccaacatgacaaatctttcaaatgttagtcatttgggttttcttgtcaatgaatgatctgttaatttttttataattggagttattctcttttatttgttctgtagtaactctact

SEQ ID NO: 499153 - DNA, 624 bp, Homo sapiens
gctgggactactggtgcgtgccaccatgcctggctaatttttttgtatttttagtaatgacggggtttcmccatgttagccaggatgctctccatctcctaacctcatgatccgcctgcctcggcctcccaaagtgctgggattacagacgtgagccactacgcccggctgggtaattagattgtttactagtattttcccctgtaattaaaagaaaaaaaaaaacagcgatcaatatccttgtgcatgactacccgtggacctgtataaaactttctctggggggcaaataactactaagctgaaatctatttaatagatctcttctaatttattaataataacacatttccttttagagagggagtaagaatttacatttcttccagtaaaatttgaaagttctcattttatacatttattcatacttagtattgtcaggctcttcatttattaccaattttataagttgtgaaatggttctctaataacattcttagaattccccccaacatgacaaatctttcaaatgttagtcatttgggttttcttgtcaatgaatgatctgttaatttttttataattggagttattctcttttatttgttctgtagtaactctact

SEQ ID NO: 499154 - DNA, 624 bp, Homo sapiens
gctgggactactggtgcgtgccaccatgcctggctaatttttttgtatttttagtaatgacggggtttccccatgttagccaggatgctctccatctcctaacctcatgatccgcctgcctcggcctcccaaagtgctgggattacagacgtgagccactacgcccggctgggtaattagattgtttactagtattttcccctgtaattaaaagaaaaaaaaaaacagcgatcaatatccttgtgcatgactacccgtggacctgtataaaactttctctggggggcaaataactactaagctgaaatctatttaatagatctcttctaatttattaataataacamatttccttttagagagggagtaagaatttacatttcttccagtaaaatttgaaagttctcattttatacatttattcatacttagtattgtcaggctcttcatttattaccaattttataagttgtgaaatggttctctaataacattcttagaattccccccaacatgacaaatctttcaaatgttagtcatttgggttttcttgtcaatgaatgatctgttaatttttttataattggagttattctcttttatttgttctgtagtaactctact

SEQ ID NO: 499155 - DNA, 624 bp, Homo sapiens
gctgggactactggtgcgtgccaccatgcctggctaatttttttgtatttttagtaatgacggggtttccccatgttagccaggatgctctccatctcctaacctcatgatccgcctgcctcggcctcccaaagtgctgggattacagacgtgagccactacgcccggctgggtaattagattgtttactagtattttcccctgtaattaaaagaaaaaaaaaaacagcgatcaatatccttgtgcatgactacccgtggacctgtataaaactttctctggggggcaaataactactaagctgaaatctatttaatagatctcttctaatttattaataataacacatttccttttagagagggagtaagaatttacatttcttccagtaaaatttgaaagttctcattttatacatttattcatacttagtattgtcaggctcttcatttattaccaattttataagttgtgaaatggttctctaataacattcttagaattccccccaacatgacaaatctttcaaatgttagtcatttgggttttcttgtcaatgaatgatctkttaatttttttataattggagttattctcttttatttgttctgtagtaactctact

SEQ ID NO: 499156 - DNA, 624 bp, Homo sapiens
ctcaccagcatctgctgctagagactatgaacttgtttttctcacaataattaggtgaactgaattatcctcccaggagtattataccagtctgaggtagtcaaaccatcacaaacacacatacatacacacacacactctcacacacacacaccccccaaagataattttcacaggaggaaagccctgagaaaatctgtttatgaaaataaatgtaacctactataacaagttcgtataaataaaaatggaataaaatgatgtatttcctgatgtgaatgacaatagaaaaagcaccattctgccctgttaggtaaaagaaaacttaaatgtgtgctaatagagggggaaattaggttatattctcaaatagaaggtccaatgttcctttatgtccccaaattagaggaaggcatatgaggaccatagaacctttggattcataccactttcaactgaagatattctctactaaaataaycctttacatattatagagaacactttacaaggaagtttacattttattgaagaaacatagaaatactcgtatacattattacttatataataaagaaacattttatagttttgagggaaacactgaaccatgtttttccttga

SEQ ID NO: 499157 - DNA, 568 bp, Homo sapiens
ctgacaataatagaggtaggaaaagttcttaaaagttagtcgtggggatctaaaaacacccagacataactgaagatataaagatatgaattgggattattaaatgcattttctacttacaatattttcaacttatgatgggtttaatgagtggccctatcgtaagtcaaggatcatttgtacttaacaagtggtatgacataagtactgaaaaatcagaatggagtgtggtattattatggccactcctcacaaactgccagcagggccatagcagacagtattgatggcatattagtcctggtcttctggagatgtctgtgagttcccaaaggctcacattttgataggcagatcttgctccaattttctgcttctatacaatgactatgtcattgtatataarcatttagaggtacttaaattctgtacacgaatccgtctcatttacccaatggatagggtactgaaaagtagaagatagtacaaaaatacctatgtaaaaaagaaaattttcttataaaaaagtaaaaggagaagacaagcctcagaggactgaaggagaagt

SEQ ID NO: 499158 - DNA, 515 bp, Homo sapiens
agagatttacccacgtatttattaacagcaagccagtcattagcattgtttctatagatatttgattaactaaaattatcctttatgggaaacgaaaggatgggccaaaacaaaggggtgggtcttgctagttatctgcagcaggaacatgccattaaggcacagatcgctcatgctattgtttgtggtttaagaactcctttaagcggttttccgccctgggtgggccaggtgttccttgccctcattctggtaaacccacaaccttccagtgtgggcrtcagggccctcttgaacatgccacagtgctgcagagattctgtttatggccagttttggggccagtttatggccagattttggggggcctgttcccaacaataggaatttcttaagcctatagagtctcaaatggttgtttaccatacagaactctcttggaaaataatgttggatgaagtagtccaataataaagataaatccagaattcttcaagacatatgggtatgccaaa

SEQ ID NO: 499159 - DNA, 445 bp, Homo sapiens
ctgggtgcccaagtgtgcactgtttcagcttgactttttattatacaagtgcatgcacaatatttgctacttctgtacaagcgggcagggttcaccaggtgttatattaaattattgattcctagtctaggtatgcagcactgggtttactttcctaaagtccgcacgtcattaagcctcacaagaggaaagtatgttgaaatcaaatttagaggcatatggcttgccacaggcttcagtattaccctctctgcctggtcccattgcgacactggattggttagttacagagaagaaagtaatgttcgtgaaatccaggtttcatacctaagttttattgttgtttatttgtttattttaggcaagaaacratgacaccatgttctataccacaagcccaagagagtctggaagctattttttttttttaaagagaatcttctct

SEQ ID NO: 499160 - DNA, 519 bp, Homo sapiens
tataaatattattgtggagataatygtttaactttatttagcaaatctgcaaacatattgaaccacaggaatcatgattctctttctttctccctaaattaattagtgcattgtgaagcacccttgggatccgatactagtgcattactatgttttgcatgcaatactttttgaagatattataatagtgacaagagcttatagataaactaggactaaattataaagtaggactaaattactacctgtacacagatggatgtgatgagtagaataaaatctttagcagggattgcctagaagtaattgggaagagaaaacatgcttagagcagaagaacttgctccattgtagaacttgtactgtcaggagaaagtctaggaacacttttgtccaagtgttaaaaagaaatataaaacagacaagaagagaatgtatgaagtttccaaaaaaaaaaagtttatctactttactcgcattttttagaactattcttggtgatagttctccataatctta

SEQ ID NO: 499161 - DNA, 562 bp, Homo sapiens
ataaacctgtgattgcattagcaaaatgaagtagagaattaagggcatcatacagatcataatttcaataacctatagtttcaatgttctaataataagaaatggccatgcacacaaatgtatttttatcatcacgaaagtatggggttgaaatacttatcctgggagtagctgtgggwtctaacaatgaacagtggatcagcagcaaccactggtttgttcattcaaatgctgcttgttgaactcctacgtgctaaggcactagacagtaaacaagtgagacaagcctggcagtcatgccaattatttcctagaaaataaacaagtaaataaataaaacaacaacagatagtttaaaaaaaaagtactgtataactaaaatgggtgatattgaagagagtaagggaaagagttataaattaagataatatgttcagggaggccctctttcataaagtgccacttgatcagaaacctacaaaacaaggagataatccctgaatctagaacagaattgttcaacagaggttaaaaaaaaaaaaaaaaccggttggcatttctg

SEQ ID NO: 499162 - DNA, 398 bp, Homo sapiens
ctgcttcctatcggattcagccagtagsgggtgctagaaggacactggaaagctggagggaagccctctttttcttgtttacttctgttcttgtaagcggctccggtagtacttcttcaccccggcagcagcagttccttaccatagcagcagctaaattcagtttacaatctttctaacacttgtagaactaacttcacccctaattcagaggccaacaccagccggcaggcaccccccacctcaccagatgtctggttccagccccacaaggtgctcctgtctctaagttttaatcattccaaatgcacccctttgctgcctcgtccttggggtggtagtgcttcctccatgataccttcttagcatctctgacattagtgttaaggggtcccaac

SEQ ID NO: 499163 - DNA, 579 bp, Homo sapiens
aaaatctttggcaccagcaagacattgataactggtgacaaatcactggcaaacctctagtagttaccagcagacagctgtgcgtttgtcggtttgtttgcttgtttactttttgtatacagatgggctctcaccatgctgcccaggttggtctcaaactcttggcttccagtgatccacccacctgggcttccaaagtgctyggattacaagtgtgagccacagcaactggcccagatgattgtgttaactgaaggcagacagagataaagtaaaatataaggtaaatatagtgaattatcagatcccaggaggaaatgtggaatgtgccttacaagttaaaaggaaactttcaagcaaaaaaggacatgagtaccaagaaactagaaacaaattctaagcaatgatatgtggactaattcgatgatctacatggaggtttactgcctttgaaagaagcagtgatgactcgaagcctatgtggcctcattagtgaaaataatttcagaggaactttatctttgacaggatttacagctggatagattaggaaaaataattcaatggcataggatattt

SEQ ID NO: 499164 - DNA, 521 bp, Homo sapiens
tggctgagccgaaacaggaaaccacacaatggaacagcctgcatttcttccatgtgggatggcaagtacatgtgcgtttcatgtatttggacagcacagaaagtggctgacctggagtcatgtgcttgaatggtagatctcacaacaagtggttgtggaatgggggtgggcagtggaggaagtgggcccagagccaggtcccccatggtaggcaattatgctatggagagaacctgacaagggcctcagaaatatctatacctgtgcccatcagagagccagcaaatcagtatctgccacatagaggactcttaacaggtaaccattgcctgagaagcatcaagtctagcagtaagaaaaccttgccctcaccaggggcaagcccagaataaacctctgtctccctactccttcctctttgctgccacaactgaggaatcaaaagaagaaagggcaggacwtgtgtgggactcacattaggcttcctccccactgcacgttgctagagtcacagaaagtct

SEQ ID NO: 499165 - DNA, 553 bp, Homo sapiens
gggtttcaggcatcccctgggcgtcttggaacatatcctcgtggataagggggaactattgtattgctgttcttgcaactgggacgayactaggaaagttgaagtcatggaaaggatgtgaccatatcactgagttgcctactgactgttctaaaaaacctttttcttttctcatttagcgtgaactacattaaatgaaaaaagaaagtctatctaaatgttatcataagagtagggcaaacaatttatttaaaatatcagcttaataatatcgtgtaaaaagaataaactctgaacgtaaggcagatctattttattttttcatattagaaaatgaaagagaaatgttaccttaaaaaaacgaaatgttttctagccttctgacatttttccaattcatatccccatacaactattcttcaaagcaacacacagaattatctgcaagtataaaactactaaaaattacttctcctggggatgaatgaacagaatgtctagttttctgaatattaatggcagaggaatagttaagacatgttcatgtaaaact

SEQ ID NO: 499166 - DNA, 665 bp, Homo sapiens
ataatcacctagagcaaaccaggtgtgatgtgcattttcatgtagatcaagcctgaaccatcccacccgcctcccatccccartagaagacagttctacaggctctacaaaccacagaatgccagcatctagaaaactggcagagtttccaaatgttaatcccatcataaaagatgaacatcatttcagtccagctaaattagaaatataagatgatggaaatggcatgcattactcctataaccagtcatccaaaataaatgggctcatttatatatagctttgctatttaagagatatttgaaggcagtcaagcttaaagtataagttagaacatgtcatgtcaagcaacttagagaatctcataactaatgttatttttaccctgaatgtacagttcacattcattattccaggtagaagcttcatcagcatcccctagcacattatgaattcctaatccaagactctctcgtctataagcaatgtgtttcttctttttgctgtaaatgatatatggactccagagagcaaagtttctctgtaacacatcattccaaaaaggctcttcccacctccatccccagtagtaagcagattctttgcagagtttccatttacctacttgaacacaacggtgatttaaaaatctttatgtttattat

SEQ ID NO: 499167 - DNA, 665 bp, Homo sapiens
ataatcacctagagcaaaccaggtgtgatgtgcattttcatgtagatcaagcctgaaccatcccacccgcctcccatccccagtagaagacagttctacaggctctacaaaccacagaatgccagcatctagaaaactggcagagtttccaaatgttaatcccatcataaaagatgaacatcatttcagtccagytaaattagaaatataagatgatggaaatggcatgcattactcctataaccagtcatccaaaataaatgggctcatttatatatagctttgctatttaagagatatttgaaggcagtcaagcttaaagtataagttagaacatgtcatgtcaagcaacttagagaatctcataactaatgttatttttaccctgaatgtacagttcacattcattattccaggtagaagcttcatcagcatcccctagcacattatgaattcctaatccaagactctctcgtctataagcaatgtgtttcttctttttgctgtaaatgatatatggactccagagagcaaagtttctctgtaacacatcattccaaaaaggctcttcccacctccatccccagtagtaagcagattctttgcagagtttccatttacctacttgaacacaacggtgatttaaaaatctttatgtttattat

SEQ ID NO: 499168 - DNA, 525 bp, Homo sapiens
gtggtggattagaatcgatgctttatctgcccagttttgagtatcttattttaagtcgtaagagtgttaaaagctatgctgctgagcaaatccttcccagtgagaagaataaggagaagttctgtttttgtaatatcgtacttctattgattggcaaaagagtattgtatttatcattaccctcagtatttaaaaaccatccaaagccttcttgggtgaagactctaaatatatctcaggcatatactctgtttattgtgttctgtgtggcctgggaaagtcataaacaaatgaattacatctgtttgtgaggcatttactgatttyttaagacagaggctgggaaacacaaagggaaagtacctgaccttccgactataatatgctcgtaagttcctctgggtcacatttatttttgcatacctgagacagagctacacagacagtagatatcaaataggtattgtgaaatagtgaaaaaaagaattcatagattgacctgatttattatgtgaggaacagcat

SEQ ID NO: 499169 - DNA, 480 bp, Homo sapiens
tttgttaagccattgaaaaatcattttaaaatggaaaaatagtacttctttaaaatcccatgtagtataagaaaagatatataacctttgtagagagggaggccagctcttattagctacatgaccttgggcaggaagcttaacctctctgtgtcctagtttcgtcatctgaaaaacaagaatcacaattctgtggacttgttggaagtctacatggatgaataatgccaaaattcccagtgctcagtggctgcccaataagtggcatccactcttttgctgctgtcctcataaacagaaaataaaacaaaatcctatgwcgttaatttgttttcatgttgagcaagcactaaataccttaaaaagaattataactctgaacttgtgacaagattctttttctcctgaagtattctttttttcagatttactctttagttgagaaataaatgttgtatacatttatcatgcatgacatga

SEQ ID NO: 499170 - DNA, 608 bp, Homo sapiens
ccatgcatttgtctaaaaattttgaaactagaccctgaaaaggtactcaaaactgagggattgtgattcgaccttgagcatgttgagattaggcacgtgcaggacattggagaggagaaagctatttgacaagagggtctggttgtcaggagagacatcaaaattgtrggtaaatattgcctgggaaataattcagtttatcattcatttgtccagtgtctactctgtgataggcacttgtaaaaactgttaagacaggcatatgtccttgtctgtttcttgtcatcctttcctccattgatttttgactctatttacccctccacttagcccctgaaacttatgtttctatcctatatcctgttattatcaatgacttccactaactccagtcagtcacaattttaagttttccactctctgctcaccaactcctatcattctactttcctccatctgttaccctgactccagagaatccttagcctcctagaaactacaattctacaattattttcattgtccttaataccctaatatcatcatgttgtctcttatctagattaaattccaaccacttctcctttgatgactcctgtgacagtctt

SEQ ID NO: 499171 - DNA, 604 bp, Homo sapiens
ctcctggtgctgtagagatttccggcgcacagaggcccccattccctgccaccaggaagccatctgcctggccaagagtcttctctgcccactacaccctgacaccaccaacacccacccgagcccgaacgcatcgtgtttctcattttttaaagaaatgtacttaaggctatgaatttcatccttagttacagtttagctatactccgtaagacttcacagataattattcattctattttgtagttttaattgtttttatgcctttaacccatacaaaacatttgtgcacattattaagtttttaaaatatcagtttccaaaatttaagcagggtttgtttctttaaaaatatttaattgaatcaaaattagagaatatggcatgcatctcattaatttttcaagamatttttatggccttttatgtggttattttaaaaaacgatgaaaactcgggctggcaaaaataaacaaataaataaaaataaaaaatagaaaaatgaaccatctggttttctttatggggcaaatatattgatatacttaatatttaaatagcataaataaatgagagtactatagaatataaatattatataata

SEQ ID NO: 499172 - DNA, 583 bp, Homo sapiens
atgaagcccacatacttatgacctacttatgacaattttgatgagcattaattttttttaagtcattcctcacacagagacaaagactgtcttgacattaacttagttgtggtgactatttctgttggttggttggtcctcagaactccaatttcaacattacctagcaatatggttccatatgttgagaaattaagtacccaagtrgaaaattcttaaactctacaatattgttatgtttagggccaattcttcatgattttccttaccagcaaaaataccagactggttctctttatttccaacctttaatactctgcatctacaggccttagtttttactacaaaaagacacactaactcacctctaatttaacttgaaaatacagtataacttcaacaggaaaggaaatcttgacaaatttaagctttggttatgccctcttgtggagtcttatgtgtgtaactattaacagacaaataactagaaaagaacaaacactggagaagaaatattaagaagcagaagttcaaaatcttaatattggtttcacaaaaatgacaaaagattagcttccagact

SEQ ID NO: 499173 - DNA, 583 bp, Homo sapiens
atgaagcccacatacttatgacctacttatgacaattttgatgagcattaattttttttaagtcattcctcacacagagacaaagactgtcttgacattaacttagttgtggtgactatttctgttggttggttggtcctcagaactccaatttcaacattacctagcaatatggttccatatgttgagaaattaagtacccaagtggaaaattcttaaactctacaatattgttatgtttagggccaattcttcatgattttccttaccagcaaaaataccagactggttctctttatttccaacctttaatactctgcatctacaggccttagtttttactacaaaaagacacactaactcacctctaatttaacttgaaaatacagtataacttcaacaggaaaggaaatcttgacaaatttaagctttggttatgccctcttgtggagtcttatgtgtgtaactattaacagacaaataactagaaaagaacaaacactggagaagaaatatyaagaagcagaagttcaaaatcttaatattggtttcacaaaaatgacaaaagattagcttccagact

SEQ ID NO: 499174 - DNA, 605 bp, Homo sapiens
ttggctgtcaactctcccatctggcaggcgaaccttcaccctctctactccttctagctgcctcctggaacaggtcatggagcccgccagcttcctttacaaacggggaaacagaggttccaagcaggcaagtgcctggccaaggtgaggcagtcccgtgggcctcagctttcccaccagtgagatgaaggtgggagtagattcctagttccttctgctttccaagatttagtggttctttatgtagcaggttaatcttgccattctaaatgttttcccctgggaagcaagaaacataaataaaagcttgccttgattctcagtctgtgggtgtcatgggaatggccagttaggatatcgaagcaagaggcaactggccacagggcagaatgatatggaggcggttccagccagcgggcaaagcccctaggtgaactctcagagcagatgggctgatgsgcttttctaggtgtgggaaggagaagggaaggggaagcattctgagcatccttggtccagcccatcctgaacacccactaaggactgagacccaaagcaggcacatttacagccactgccctccttaatcctcgtaatgtgtgcta

SEQ ID NO: 499175 - DNA, 551 bp, Homo sapiens
agttcatgttggcatcgtgtgtacagggctcactttggttcacattggtgccatgtgcacagggctctccctggttcatgttcccaggtggacagggctcaccctggttcatgttcccaggtggacagggctcaccctggttcatgttggcaccatgtgtacagggttcaccctggctgatgttggcgtcatttgtacagggctcaccctggttcatgttggcaccatgtgtacagggttcaccctggctgatgttggcatcatttgtacagggctcaccctggttcatgttattgccatgtggagagggcttgccctggttgatgttgccatgtgcatagggctccccctggttgatgttggtgtcatgtgtagaggactcccctggttcatgttggctccatgtttagtgggcttattctggttcatttggccccatgtgaaaagggctcaccccaggttaatgttggtcacatatrgagagggcattctctctgtgtccacgataaagtaatggtggtggtgtctcccatttcccagaggaagctgag

SEQ ID NO: 499176 - DNA, 565 bp, Homo sapiens
tttcagctgctgcactttaaaatcaagtgttatatttgaaccaggtcacactttcattagctgtttccagtcaatggaacagctcatgaaacagctcatgaaatgagcattgcagactgagcattgcagtgatactaagacagaactgttcttgggagaaaayggactcctttctaactttgtttctagcacttcccaatatcattgccaaatctttcttagaccacaaagctgtctaagatgcttgcgatgagctttctatttatccttcaataatggtcaggaaacagtaaagtggaaaatatagcgatagaaataatgaaaaataaaacagaaaaacataagatgtaaaagagcaccattgaactgttgaacaactaaaggggcctaatataaatgtaactggagttgccaaaggagaagactaatacaaggagacaaaatgtatgaagaaataatattaagttaaaaatttgatgaacaattatatacacctatccagtaatctcaacaaaatacaagttcaaaaacatgaagaataactaaaaaggcacattatcatcaa

SEQ ID NO: 499177 - DNA, 539 bp, Homo sapiens
ctgtaagtgataactagtttccagctttgcaaattattaagtatataatttgtataagtacttaatttctctaggtcactttctttatctttgaaggcagaaaaaaatttactatatagaattgtggtaatacccaaatcaaatagagatgacagaattgtttggaggtctgtaattgaacatacagaactatctcttgtagaaccaaaacagtttgctcttgaaaaagggcctagtttttcatttattttatttaacaagcccttgtattttattaacttttaggrgaagttctgagtactttacaaataataacccatttgatctccttagtcacttaataaggtattattattctcattttagtgatgaggaaactggggcacacaaaggttaactatgtagtttaaggcaatgagactaataagtagttaagagctatgttattcacaggtagaacaattagaaaatggcactacatcctttctgctgactgatctgtgcgagggtacaggatctatcaaacggagcttgagtgg

SEQ ID NO: 499178 - DNA, 550 bp, Homo sapiens
gtgctgtggtcctttcttagctgtattcttgtcctgtgagggtccagtggtccagtctttaactgaactgttgtcctgggatgtgaagattactattgggtggcattgaaaggccccttatagagggtctttgatatttcttggccactgccagacttgaaacgttagttttggggatgtgtctccttagcagtcactaccgaggggatacaatcaacccagtgctctcttttggtggccagatggcaacaaaactggtgtatcagatatgtaatcctcctctccctcagctcagaagggctggaggaaatccactctcrgggagttaaggctgctctgatattataagggtgtatgttggccaaggctcagagtgagtcctctgggaaccaaaagtcctgaatgatggtattgttgcacttgattgcctctgaggagtggtctgaaagaaaagaagagataaagtagaaatgttaaatgtttccaacaaaagctattaggggagaatttcctgactcagtacttgttggcattttttgaggttttttac

SEQ ID NO: 499179 - DNA, 566 bp, Homo sapiens
tttcttagctgtattcttgtcctgtgagggtccagtggtccagtctttaactgaactgttgtcctgggatgtgaagattactattgggtggcattgaaaggccccttatagagggtctttgatatttcttggccactgccagacttgaaacgttagttttggggatgtgtctccttagcagtcactaccgaggggatacaatcaacccagtgctctcttttggtggccagatggcaacaaaactggtgtatcagatatgtaatcctcctctccctcagctcagaagggctggaggaaatccactctcagggagttaaggctgctctgatattataagggtgtatgttggccaaggctcagagtgagtcctctgggaaccaaaagtcctgaatgatggtattgttgcacttgattgcctctgaggagtggtctgaaagaaaagaagagataaagtagaaatgttaaatgtttccaacaaaagctattaggggagaatttcctgactcagtacttgttggcrttttttgaggttttttacagacaacataaggttactcttttttatg

SEQ ID NO: 499180 - DNA, 546 bp, Homo sapiens
tgactcacttccacaggtgatttcttggtaatggtgggtcaaggtttgcccctccatttcccctactgtctcactaatggagaaagcgtccccttaggaagtacctgtcttggagcaatttgtcaagggaaaattgcaggtgggaatagccactgacaagaaaatatttctcttagggaaacaaggtgagtagcatarcatggtgattataagcataggccctacctttgagagttgttgtaggattaaattacagaattaaataaagcacataattcagtgtgtgacatagtaagtaggtctgcgataaatagtgaatatttactacacccctttacatgccagacactgtactgaggacttttgccatcatttgagccacatcatatttcattgactgagctattatttccctctggtttacagacggggaaaccaagatgctacgtgacttgctcaagatcacacaggtagtaagagacagaaccaggatttgtacccatgtaatctgactctgaagtgcatgttccaatcactacacatgct

SEQ ID NO: 499181 - DNA, 613 bp, Homo sapiens
ctggagttggacctggagttactaatattagaggtgggggtgggagaggaaggaggtttagtgattgtccagttctgggcggagagatctttattaccagaaggtctgaaataataaatgaaacaaatataaacctggccatatggtagatatataaatgcatttgaattaataaatttaatcttaaagattaagcatttttatgcctaaagaattataagcattaaattgaattacatagccagraaaatagtacagttgtttattcttaggttgttctctcctgtcctttgtccacagaacagagctgtgtctccttgaattgagaattaattttgtactttatctcagttaatacaattttaaatgtaaatactgtactttaatgagcataagattggagggtggaaaagggatccaaaatcgttagatagttggtcataatttatgaagttgtttgccttagaaggtgcactgtttactttttttttttcttttgatagagacagggtctcactatattgttcaggctggtcttgaactcctagccttagcagatcctcccccttggcctcacagagtgctgggattacaggtgtgagccactgcatcc

SEQ ID NO: 499182 - DNA, 613 bp, Homo sapiens
ctggagttggacctggagttactaatattagaggtgggggtgggagaggaaggaggtttagtgattgtccagttctgggcggagagatctttattaccagaaggtctgaaataataaatgaaacaaatataaacctggccatatggtagatatataaatgcatttgaattaataaatttaatcttaaagattaagcatttttatgcctaaagaattataagcattaaattgaattacatagccagaaaaatagtacagttgtttattcttaggttgttctctcctgtcctttgtccacagaacagagctgtgtctccttgaattgagaattaattttgtactttatctcagttaatacaattttaaatgtaaatactgtactttaatgagcataagaytggagggtggaaaagggatccaaaatcgttagatagttggtcataatttatgaagttgtttgccttagaaggtgcactgtttactttttttttttcttttgatagagacagggtctcactatattgttcaggctggtcttgaactcctagccttagcagatcctcccccttggcctcacagagtgctgggattacaggtgtgagccactgcatcc

SEQ ID NO: 499183 - DNA, 523 bp, Homo sapiens
ggagggagagagggaggggggaagggaggtctgcggccctgtccgctgctccgggggcggggcggtggttccccactgtgtctccgggcgccagggaccgcgcgactcctgctccgacccagcctccgccgcctgccttcccctccctgccgtgtgatgcggcgcacacgagggcaaactccaacctgcgagccgcgctctgcagcagggcggaagaggagcaaatgcaaaagcactgggagacgtgcaccgcggggcgggtgggggacgcgcaggcggggcgtctgcctgggcttggccaagtgccaagtgatgatgggtgcggggaggtgagaggagcggcctctccgcggcctccccctccatccscttgaccgtccctctgcaggcctgactcttggctcgcgctgagccaagagggtagaggttatcatcactttggggtgccaaacttgtgttctccatttggcgagagggactcccgtccgcagcggaaggacagatggagtcaaaggccgatgca

SEQ ID NO: 499184 - DNA, 523 bp, Homo sapiens
ggagggagagagggaggggggaagggaggtctgcggccctgtccgctgctccgggggcggggcggtggttccccactgtgtctccgggcgccagggaccgcgcgactcctgctccgacccagcctccgccgcctgccttcccctccctgccgtgtgatgcggcgcacacgagggcaaactccaacctgcgagccgcgctctgcagcagggcggaagaggagcaaatgcaaaagcactgggagacgtgcaccgcggggcgggtgggggacgcgcaggcggggcgtctgcctgggcttggccaagtgccaagtgatgatgggtgcggggaggtgagaggagcggcctctccgcggcctccccctccatccgcttgacygtccctctgcaggcctgactcttggctcgcgctgagccaagagggtagaggttatcatcactttggggtgccaaacttgtgttctccatttggcgagagggactcccgtccgcagcggaaggacagatggagtcaaaggccgatgca

SEQ ID NO: 499185 - DNA, 523 bp, Homo sapiens
ggagggagagagggaggggggaagggaggtctgcggccctgtccgctgctccgggggcggggcggtggttccccactgtgtctccgggcgccagggaccgcgcgactcctgctccgacccagcctccgccgcctgccttcccctccctgccgtgtgatgcggcgcacacgagggcaaactccaacctgcgagccgcgctctgcagcagggcggaagaggagcaaatgcaaaagcactgggagacgtgcaccgcggggcgggtgggggacgcgcaggcggggcgtctgcctgggcttggccaagtgccaagtgatgatgggtgcggggaggtgagaggagcggcctctccgcggcctccccctccatccgcttgaccgtccctctgcaggcctgactcttggctcgcgctgagccaagagggtagaggttatcatcactttggggtgccaaacttgtgttctscatttggcgagagggactcccgtccgcagcggaaggacagatggagtcaaaggccgatgca

SEQ ID NO: 499186 - DNA, 610 bp, Homo sapiens
gggcgtatggaacacagaaagttcacatagctgccttggagaggccaccagagagcccagtgactaagaggcttttgcaaatcttgaggggctagatcgctggaatttccagaaattctagtcagcacaatttaatgctgtctgcagcaatacttggcaacctggaaaggtttgttgcaattgttggaggtgcagtcctacatgtaagccaagctgagctcaccataatggatctaccacatatggagttgtaacaatgggataaactcacacctcatagaagaatcatctcacgatgatagaaacaactctaaagacaggctttcatcaaaaaaatcataattaatccaccctgcttattttcctaacaatggagccaagttgtactattcataccaagatcttcagggagttccaggtggaaggaatattggaagtcaacttgtccaacctgtcacctattatgactttcatttttagaaatccatggaagaaactatcagtgggcactggcatacccgggctcctctacatttctcagcctcctttgcagtacatctgacgctgcatggctgggmtctggctaatgtgacattggcggaagttgtgt

SEQ ID NO: 499187 - DNA, 570 bp, Homo sapiens
taaagcaaagcaataggtagcactagaattcacacttattttaatccaaagtctatgttctttataatgtgattctctataactgtgattctgcatgctaactaatagttaatatgatgtggtagagatcactttaaattgatgtcatcctttatttctaggaacattagaatgtaagataaagtgtttatttttcattgtgtttatatttatcctcaatttggacattggcmttagaatcttaaccttggatatttttcaagtgaaagaatagagatttaaagattatactctaagattatactaaatatagcagtctatatttgacatagtgctttcctctacctgatttcatttgattcttagactagaacattgtaggtggaaaagaacattgtagatggaaagactagaacattgtagactagaatattgtagatggaataatatatatatattattttttttgagatggaatttcgctcttttcacccacactggagtgcaatggcacgatgtcagctcactgcaatttccgcctcccgggttcaagcaattctcctgcctcac

SEQ ID NO: 499188 - DNA, 631 bp, Homo sapiens
aacccccttctgcagcttctgagcctaaactgagttggactgagatagaagaagaaaggagaccaaaaatttgaaaatggaatggattagacagttttaatacctggaaaaaaaagaaacagggacgtggtaccatttaagagtgaaaagcgctgggcgtggtggtgcacgcctgtaatcctagcactttgggaggccaaggcaggtggatcacctgaggtcaggagtttgagatcagcctgtccaacatggtgaaaccctgtctctagaaaatacaaaaraagtagccgggtatggtagtgcatgcctgtagtcccagctacttgggaggctgcagcagaattgcttgaacctgggaggcagaggttacagtgagccaagatggcaccattgcactccagcctgggcaacaagaacaaaactccatctaaaaaaaaaagtgaaaagctttaagaacctgctaaagctgttgtccaggggcagttactgacagaaataaaaacatgttataaattattgctcacaagtctaccatattcaataaaatgcttacatgagagttttctttttaaagggaagcatagtttatattctaggtccagggtaacagaccactgatgatctgaactaa

SEQ ID NO: 499189 - DNA, 631 bp, Homo sapiens
aacccccttctgcagcttctgagcctaaactgagttggactgagatagaagaagaaaggagaccaaaaatttgaaaatggaatggattagacagttttaatacctggaaaaaaaagaaacagggacgtggtaccatttaagagtgaaaagcgctgggcgtggtggtgcacgcctgtaatcctagcactttgggaggccaaggcaggtggatcacctgaggtcaggagtttgagatcagcctgtccaacatggtgaaaccctgtctctagaaaatacaaaagaagtagccgggtatggtagtgcatgcctgtagtcccagctacttgggaggctgcagcagaattgcttgaacctgggaggcagaggttrcagtgagccaagatggcaccattgcactccagcctgggcaacaagaacaaaactccatctaaaaaaaaaagtgaaaagctttaagaacctgctaaagctgttgtccaggggcagttactgacagaaataaaaacatgttataaattattgctcacaagtctaccatattcaataaaatgcttacatgagagttttctttttaaagggaagcatagtttatattctaggtccagggtaacagaccactgatgatctgaactaa

SEQ ID NO: 499190 - DNA, 623 bp, Homo sapiens
tctcagtatgttttgtgtctccctgcaaccatcccctcccaccccagtccactgtctctgggaatatttcagtactaggacttgcctaagtrttgcagtacgtatggcctaggctgcctttcaaggttatttagagacacaaagcactatagccctctgcggtgaggtttgtgggaactcagggtctgaccattgggatcagggattcccctctagctagggctggtttaaatactccttctgccggcacgagtcagttgagtttggtccagtttttctttctgctctaacaggacagcactgggttcaatgcctcacagtttctgtgatatccctcccccagtacccagagaagctctccacatcacactgccactgctggcatgtaggggagtagtgatgattattagagattgttttttataaatctcttcagtttgtctttcagcaatgtggttaaaactagatcctatgactgttcacctgatttttggttgttatgaagtttttttttttctattttgctggttgttaaattggtgttcttgtggaaggaaaacttggtggagtcttctattctgccattttgctttgccttgttttttatgtcatttattcttatg

SEQ ID NO: 499191 - DNA, 623 bp, Homo sapiens
tctcagtatgttttgtgtctccctgcaaccatcccctcccaccccagtccactgtctctgggaatatttcagtactaggacttgcctaagtattgcagtacgtatggcctaggctgcctttcaaggttatttagagacacaaagcactatagccctctgcggtgaggtttgtgggaactcaggstctgaccattgggatcagggattcccctctagctagggctggtttaaatactccttctgccggcacgagtcagttgagtttggtccagtttttctttctgctctaacaggacagcactgggttcaatgcctcacagtttctgtgatatccctcccccagtacccagagaagctctccacatcacactgccactgctggcatgtaggggagtagtgatgattattagagattgttttttataaatctcttcagtttgtctttcagcaatgtggttaaaactagatcctatgactgttcacctgatttttggttgttatgaagtttttttttttctattttgctggttgttaaattggtgttcttgtggaaggaaaacttggtggagtcttctattctgccattttgctttgccttgttttttatgtcatttattcttatg

SEQ ID NO: 499192 - DNA, 623 bp, Homo sapiens
tctcagtatgttttgtgtctccctgcaaccatcccctcccaccccagtccactgtctctgggaatatttcagtactaggacttgcctaagtattgcagtacgtatggcctaggctgcctttcaaggttatttagagacacaaagcactatagccctctgcggtgaggtttgtgggaactcagggtctgaccattgggatcarggattcccctctagctagggctggtttaaatactccttctgccggcacgagtcagttgagtttggtccagtttttctttctgctctaacaggacagcactgggttcaatgcctcacagtttctgtgatatccctcccccagtacccagagaagctctccacatcacactgccactgctggcatgtaggggagtagtgatgattattagagattgttttttataaatctcttcagtttgtctttcagcaatgtggttaaaactagatcctatgactgttcacctgatttttggttgttatgaagtttttttttttctattttgctggttgttaaattggtgttcttgtggaaggaaaacttggtggagtcttctattctgccattttgctttgccttgttttttatgtcatttattcttatg

SEQ ID NO: 499193 - DNA, 580 bp, Homo sapiens
taaaaaggtaatattcatctccttatttcacaaatacttgtaaatttagacaatatttttgcttgaagaattaaatctttcatttactggatctagtaaaactagttgagatttgttaatccaattatggaagaaggcccatccaacaatgcaatcagttcactccatgtaatgaaaggaatgaaaaaactgaaggagaaggaattgttctagaagcacacacctggcatgagctcaaaatggcacagtggaaacagcaatagctctgcacgacactcatcttcccatcgaatttttgctttcaccttcacaaacacaagaatacattggaacatccacaaaatagttgagctccttaatgttcactgactgaaaaaaataactaatgacagcaagctattctaaattcagtaggacttttggatgaatttgcatttattaatcttaatgaatagcatctttgcatgtttacctagaggttgaacatgtgtacatgacatattaatttgttcagwctatatacaatgcttgataagtatgtggatttgaggacccttgtaagcaatccatatctccccag

SEQ ID NO: 499194 - DNA, 580 bp, Homo sapiens
taaaaaggtaatattcatctccttatttcacaaatacttgtaaatttagacaatatttttgcttgaagaattaaatctttcatttactggatctagtaaaactagttgagatttgttaatccaattatggaagaaggcccatccaacaatgcaatcagttcactccatgtaatgaaaggaatgaaaaaactgaaggagaaggaattgttctagaagcacacacctggcatgagctcaaaatggcacagtggaaacagcaatagctctgcacgacactcatcttcccatcgaatttttgctttcaccttcacaaacacaagaatacattggaacatccacaaaatagttgagctccttaatgttcactgactgaaaaaaataactaatgacagcaagctattctaaattcagtaggacttttggatgaatttgcatttattaatcttaatgaatagcatctttgcatgtttacctagaggttgaacatgtgtacatgacatattaatttgttcagactatakacaatgcttgataagtatgtggatttgaggacccttgtaagcaatccatatctccccag

SEQ ID NO: 499195 - DNA, 628 bp, Homo sapiens
tgtcactttcagaggtaatgtgaatccaaaacaacacaactctgacctcttccttatgggaacacacatggcattataggaaaagcattggtttcgggactagcagttcagattcaagtctcagctcttagaattaagcagttgtgcgatcttggacaaaatgtttagcttctctgaacttcagttttcttaactgtagactaagaaagcatgccttactttatatgaaaaggccagctatctcagggtggatgtaagcagaaattagatagtgcaaatgaartgaaataaaaacacactgctagtctaaagcagtgagcatttagactgcatgagaaataattaaattattttaaagtatgaaggaagatgtaatctgcttctcccatcctgccccctgcagtatccagcagcaatgttcataggcactagtcaatgtctttgctgttgagtctcccacaagtatcacagttgcttcctgtcagggactgggaccatgtgcactcagagagtgtgtcatctctgcctcacaggcacaagggagaagggttttgggcactgctggctgcagtcacagtctctgatgcctttgcattcctctgtatagtggcaaatagtcaagatggtg

SEQ ID NO: 499196 - DNA, 628 bp, Homo sapiens
tgtcactttcagaggtaatgtgaatccaaaacaacacaactctgacctcttccttatgggaacacacatggcattataggaaaagcattggtttcgggactagcagttcagattcaagtctcagctcttagaattaagcagttgtgcgatcttggacaaaatgtttagcttctctgaacttcagttttcttaactgtagactaagaaagcatgccttactttatatgaaaaggccagctatctcagggtggatgtaagcagaaattagatagtgcaaatgaaatgaaataaaaacacactgctagtctaaagcagtgagcatttagactgcatgagaaataattaaattattttaaagtatgaaggaagatgtaatctgcttctcccatcctgccccctgcagtatccagcagcaatgttcataggcactagtcaatgtctttgctgttgagtctcccacaagtatcacagttgcttcctgtcagggactgggaccatgtgcactcagagastgtgtcatctctgcctcacaggcacaagggagaagggttttgggcactgctggctgcagtcacagtctctgatgcctttgcattcctctgtatagtggcaaatagtcaagatggtg

SEQ ID NO: 499197 - DNA, 617 bp, Homo sapiens
gcagccatcctccatgtcccacctctcttatttcaccttctctgtccctacccagctcctagaggcaggacgagcactgctgggtcccaaaccctcgcctcaggagccagagctgcggggagtgaaaagtcgactggcaagaacacacagagagaaatgggcagatgcatatggcaagaggggctgggggaagggcaagaactaaacctgcaagttgcacagcacggggtgagcaccgcgcagggaaggggtcacaaaagtttgcagactattgtatagcagccggctgaacaggagcgaagagggtcgactctctctctccaggaggaggtctctcccagggtctgcgcaaaagggatcagggaggcttagacaggcacggcttagaactggtgtaatagttctcctctacttgttccttggagggacggcctakgtacccgggcagagggatgatcccgcgctctgcgaaaagcaacaggcggctgcaccttaccttgcgccagtcccgggccggggtggctgctccatcctcgtggctcagggaggaggcgttgggtgcgtatgcttaggggtgtgcccgctgccagggctgcagcggccgccacctccaacca

SEQ ID NO: 499198 - DNA, 331 bp, Homo sapiens
aggcctggccctccccctcctggccatacatctgcaaggcacccttcccctcccgagcccagtttcctcatgtacaaaatgggaaaaatgaaagcctggcaaagcaattgccttcccgtccccacasagtgggcaccaacatctatgtgctccctcccccaaacccagcccctctgtcctgtcccctcacagcctttagaaaagcagccaggcacccgtgtctgaaggggccttggcaccatcagtgcccctcgttcttgctctctattgctctctctctcctggatgtaggccccatctcctggaggggagatggttcaagcctgcagca

SEQ ID NO: 499199 - DNA, 564 bp, Homo sapiens
ctagcaggtcaccaggggcctccaaggtctccgcgcccagcacctggtgttgagtaagcccggaggcctcgccctggtgttcacatgcagaggggcctgcattcctctgcctgcttcattcaccctcgttgcctgctgctgtgcccttgccttagtggctgggactcatgtctgccacttgcagtaggtagagttgaagaggacgaagctagttgtgtcttctgtgtgcccctgagcctctcactgcttagtgggactctagcctctgagctgctgttccttggcagggctgaactttcacttcaaagcagggctgccttgtgggatgtgcccctgatatctctgttgggggaacgcatgctcagtagctgcatagcaaacagccgggttcaaggaaatgtyaccctgggtgcttttatgttgcggccattcaaggctgcttaatgtctctgcctgatgaggtttctgcaacattaactctggtggtggtggagggagaaggagggggctgccacaggagggtttgtggcttcgcggtgggcagggaaggggcgcacctctcca

SEQ ID NO: 499200 - DNA, 453 bp, Homo sapiens
caggggcccagtcgccagagtccagtcaacatccagtggcctcttcactgctccttcccccagacaagttgagagcccatagcacagagggttgcggtagacaggtttgggtgctgccagtggtgggcctgggtaggagtgagsctggggactgaagggcaggagctcaacagggctggagtcctgcatcttctcagggccttctgctggcgagcggtagaacaggcagttggtcagcaggttgtctgcctgaagtgggggtcctgccataccggtagagtacaagggtgggtatggggtccaggacgccaactgctcagactcggccttaggagtacctgccatggggcaggagaagtaggaccccttgtaggtgcagggatcctggttaccaacagagtggggcaggctgtgctcgagcccggagtctgtctctaagcggggcagcttgcc

SEQ ID NO: 499201 - DNA, 611 bp, Homo sapiens
gcaacaggggcccagtcgccagagtccagtcaacatccagtggcctcttcactgctccttcccccagacaagttgagagcccatagcacagagggttgcggtagacaggtttgggtgctgccagtggtgggcctgggtaggagtgagcctggggactgaagggcaggagctcaacagggctggagtcctgcatcttctcagggccttctgctggcgagcggtagaacaggcagttggtcagcaggttgtctgcctgaagtgggggtcctgccataccggtagagtacaagggtgggtatggggtccaggacgccaactgctcagactcggccttaggagtaccygccatggggcaggagaagtaggaccccttgtaggtgcagggatcctggttaccaacagagtggggcaggctgtgctcgagcccggagtctgtctctaagcggggcagcttgccatacatcacaggccccagggttctcaggggtcgcttctctgccatcgctgtgaaggcttcgagccctcctaggcccctgctactcaacttctgacctgggatagagagagaaaggcaggggctgtcaggaaaacaggctacaggcaaagcaaca

SEQ ID NO: 499202 - DNA, 569 bp, Homo sapiens
attcccctgtccagcactagtgtattagggggctggagaagggctccttgatctgtcccctcatttcgttgtagtcaatgagggcaatttccagactcctgctagggcacggcaactgtctgaggaagcggcaatctccccatccctggaagggccgggaatgagggtgctgggggatttgcaaagtagcctgggtgaggctccctccatgaggcagacsggcgcgcagcctgtgaggcgggtggagtggagcacgcccagccaggaatggtgtgttgcaaagagaggctggaggggggaaggggtgcctctccctggaccatctgactgtggatgagagcccctcagtgctgctactttatctgaaggaatctggtccgtcaaagctcctgggctgcccgaggactgggaacaggtgtgtgcagtggggaaggggagggcaggtggacatgccaaaggtcagagtcagttcaggaagcaaaactatcccctcagatcccaaaggtaagttctgcctgagtcagagcagagcaggcctgaggctgcaggttccaagaatcaccaagcag

SEQ ID NO: 499203 - DNA, 517 bp, Homo sapiens
agggtcctctgtaccacactgtgtgcttctacacacccaggctgaacaccccatgggaggccctccactttagcaccttgacaagaagggtggggacactgggatcaggcccagccccctggccccaaaccstgcaaccccagctggaggatgaggagatgctgggcttgggtgggggaatcaggggtgtaaaggggcctgctcacccctcagcttggcttaaaggctcaagaggtcaaaggcttaggctgcccctcaggaaggcgcccgggcccagccagacactcaccaggacaagggccagtgtgacgagcaggaggcccaggatgaggagagccacggcatagcaagggatggaggcgtccagcggactggagacttcagggctgggggtgcctggagcagagcaagaaggccatggccaggcggggccctgcctcccagacttctgagaaggcagaatctgggctcagaaggtgctgcgggaccagggagctggggctaggagcaccttgga

SEQ ID NO: 499204 - DNA, 517 bp, Homo sapiens
agggtcctctgtaccacactgtgtgcttctacacacccaggctgaacaccccatgggaggccctccactttagcaccttgacaagaagggtggggacactgggatcaggcccagccccctggccccaaaccgtgcarccccagctggaggatgaggagatgctgggcttgggtgggggaatcaggggtgtaaaggggcctgctcacccctcagcttggcttaaaggctcaagaggtcaaaggcttaggctgcccctcaggaaggcgcccgggcccagccagacactcaccaggacaagggccagtgtgacgagcaggaggcccaggatgaggagagccacggcatagcaagggatggaggcgtccagcggactggagacttcagggctgggggtgcctggagcagagcaagaaggccatggccaggcggggccctgcctcccagacttctgagaaggcagaatctgggctcagaaggtgctgcgggaccagggagctggggctaggagcaccttgga

SEQ ID NO: 499205 - DNA, 307 bp, Homo sapiens
atgcgcagaccccagggggcttcctgttccacaagctcccctctctttttcctctccacccttgctgttgggcctyccttccaaatctgcctaacaaaggcagcaggatctttaatactgttcagctttgtcaatggagacaggatactctagaaagttgagagattccctggtccagtctgggggaggaaaaaatatgcagtgtagcatagatggttgtacttgtccactcagacacatgctcatacttattagatggatgtatcagatgcttcaaaagtcctgatgtgtaatagcacaaaagctg

SEQ ID NO: 499206 - DNA, 561 bp, Homo sapiens
ctgctactcttcatacgtgtcattattcctttccctttattttgtgaaatatttaagtatttttataaattgtgatattagctgcttaaagtattgtaaataaaattaaatattgtaattraagatgtatatataactcccaaggtggcattttgctgtacatttcccacagcccagcttgaattgactttgccactcatttttccattaccatggaatagagaaagaatatggtctatagggcaactaatgagcctcttcaggacttgcccaactcccaaataatgaatacatcattatttcattcctttttacatccacacttccttaaatgacctgtatgaaatgataaattatctctgaaaattgatttctaattaaaagcatcaattttgttagagatttccagcgatgtttcaaaaaaaaattctgtgactttacttccttgcctatgcattgtcttcttcccaaaaaaggtttcattctcagtagttgcaataatcaagcaataaaataatgtctgaacaccttttattgaaaagttgagatttaaaaaatatt

SEQ ID NO: 499207 - DNA, 665 bp, Homo sapiens
cttagagagagatgaaaatagaaattgtgccttgaaaaccttaacctaagaaatacagtctttattgatctgaattgctaatgcaaaaatactgtgtttttattttaaaatctctgtctctgccttaaaatttttcataaatattgtagcagaatattagctttcattatttatgratctgttgaactttgcaaggattttctgtcagttaaaggataacaattttaaggatagttcattttacatcataaataacctaaaaggtcattcagtattttacaataacatccaaagagagtagatattgagagtaagtattagaagctagatagaggaggcagagcaaggtggctgaatagaagcctctatcaatcatccttcctgcaggaacatcaaatttaacaactgtctacacaaaaaaaacaccttcataagaaccaaaaatcaggtaagagatcacagtacatggtttttaacttcatatcactgaaaggggcactgaagagggtggaaagacagtcttgaattgctgacaccacccctcccccatctcctgacagcagccacatggtacagagagagaatctgcgtgtgtgagggagggagagcacagctattgtgagactttgcattggaacttatactgccaacactgggcagaactc

SEQ ID NO: 499208 - DNA, 665 bp, Homo sapiens
cttagagagagatgaaaatagaaattgtgccttgaaaaccttaacctaagaaatacagtctttattgatctgaattgctaatgcaaaaatactgtgtttttattttaaaatctctgtctctgccttaaaatttttcataaatattgtagcagaatattagctttcattatttatggatctgttgaactttgcaaggattttctgtcagttaaaggataacaattttaaggatagttcattttacatcataaataacctaaaaggtcattcagtattttacaataacatccaaagagagtagatattgagagtaagtattagaagctagatagaggaggcagagcaaggtggctgaatagaagcctctatcaatcatccttcctgcaggaacrtcaaatttaacaactgtctacacaaaaaaaacaccttcataagaaccaaaaatcaggtaagagatcacagtacatggtttttaacttcatatcactgaaaggggcactgaagagggtggaaagacagtcttgaattgctgacaccacccctcccccatctcctgacagcagccacatggtacagagagagaatctgcgtgtgtgagggagggagagcacagctattgtgagactttgcattggaacttatactgccaacactgggcagaactc

SEQ ID NO: 499209 - DNA, 665 bp, Homo sapiens
cttagagagagatgaaaatagaaattgtgccttgaaaaccttaacctaagaaatacagtctttattgatctgaattgctaatgcaaaaatactgtgtttttattttaaaatctctgtctctgccttaaaatttttcataaatattgtagcagaatattagctttcattatttatggatctgttgaactttgcaaggattttctgtcagttaaaggataacaattttaaggatagttcattttacatcataaataacctaaaaggtcattcagtattttacaataacatccaaagagagtagatattgagagtaagtattagaagctagatagaggaggcagagcaaggtggctgaatagaagcctctatcaatcatccttcctgcaggaacatcaaatttaacaactgtctacacaaaaaaaacaccttcataagaaccaaaaatcaggtaagagatcacagtacatggtttttaacttcatatcactgaaaggggcactgaagagggtggaaagacagtcttgaattgctgacaccacccctcccccatctcctgacagcagccacatggtacagagagagaatctgygtgtgtgagggagggagagcacagctattgtgagactttgcattggaacttatactgccaacactgggcagaactc

SEQ ID NO: 499210 - DNA, 584 bp, Homo sapiens
tttgcattgaggcaagcattctccaaacaaatactttattcagttgatactgggaagtttaggaagatctctcacaatcacaaatgcatatgccttgtgcccctttgagtcattctacctgtattttcttctatgcatattcttgctcaaagtacataatgatttttatacatgactcatcatatataacatgttttctatctatctatctatctatctatctatctatctatctatctatctatttaaatgattttaaaggatttcacttgtgggtaatagcaaaagtgttgaaataagccaaatgtctgccagcaggtgactggttaaataaatcacggtatggataggaaatagagctgagaaaaaagcaagaagaagctctttgtataatgaaatgaaaaactcttaagaaagagtcaggaaaaagctgagtgcagatcattgtacatagtaggctaccttttyttctgttttgtaaattgggagaaagaatatatatctgtgttgagttgcttatgcacaaaggaactttggaattacaaggaagtaattctagcggttacctatgacaggtggtggtg

SEQ ID NO: 499211 - DNA, 594 bp, Homo sapiens
ctgtttttaaccttttttttttttttttttttttttttttgagacagggtcactctctgtcactcaggctggagtgcagtgctgtgatcttggttcactgcagccttgatcttgcaggctcaatgaatcttcccacctcaacctcttgaatagctgggactacaggtgtgyacccccattctcagctaattcttttaatttttttttgtagggctgtggtctcactatgttgcccaggctggtcttaaactcctgggcttaagtgatcctcctgccttggcctcccaaagtgatgggattataagcataagccaccttgccccaactgtttttaacattttaaagctacttcagacctctgctaaaaatactgctgtcctttctccccctaaatatctttaatcttttaaaataatcacaattgcactataatagtataaccccttggttatgtgtgtgtatgtgcaatgtattactagaaagaaaacagttttacatttagttggtcataaacacacacggagtccagagaatgaaggtgagcaaacatttccttaagttctttccttttcctgttgagctgccactttgtac

SEQ ID NO: 499212 - DNA, 601 bp, Homo sapiens
gatgaggctgagcaagtagccacagtcagagccagattttaaccggttcttgyaggccatattgatttggttgttttgaaagttacgggaatctattgaaagatggatattttaggctggctattgacactataagatttggattcaagaccagatttaagtccattcattcattcagcttcacatgggggttacataatagggtgttgcattagctgaggtcacctttatggaagtcagagaaaagattagggaaattgcctaaaacaagcttaattgtctgtagcttgctttgatgtggcagccagagtgtagggcatgtgatgaattttgtacaacggctaggatggataagagtgggcctagtcctcttaatatattgttccagggacaggctgcatcctaaaagacagattcaataagccataacaaagcaagtttttaccttgtcttattaccaagattttactttcataagaccaatcacaagtagaaaatatgtttggatgtggaaggtagtacagtttaccgaaggaggtcaccagttcatatcgaagcatattgtccaggactcctacaagctctccttgatgtttggtag

SEQ ID NO: 499213 - DNA, 657 bp, Homo sapiens
ctgattttatgtcattgtcataaatgaayaaacaccgaattaatgggtgagagtgaaggcatcctggcaatgttctaactctttggttgggtggtgggtctagggatattcattgtattattctttattattattattattattttgagacagagcctctctctgttgcccaggctggagtgcagtggcacaatctcagctcactgcaacctccgcctcctgggttcaagcaattctcctgcctcagcctcctgagtagctgggattacaggcgcacaccaccacgcccagctaatttttgtgtttttagtagagacagggtttcaccatgttggtcaggctggtttcgaactcctgaactcgtcatctgcccacctcggcctcccaaagtgctggattacaggcatgagccactgcgcccggcctattctttattattaacatagaggtttatatattcttttgtgcatcaaatactgcacagtgaacaagctcaacagtgaatgaatgaatgagtgagagagggatgtggcagtgcctgagtccatatgtctggggagagccagaggccagccaagactatcttctgtagctgccaccaggacagaggtgggagttttgaggtcacccacctgccataatgggagccccaggtgg

SEQ ID NO: 499214 - DNA, 483 bp, Homo sapiens
ttatgtcattgtcataaatgaataaacaccgaattaatgggtgagagtgaaggcatsctggcaatgttctaactctttggttgggtggtgggtctagggatattcattgtattattctttattattattattattattttgagacagagcctctctctgttgcccaggctggagtgcagtggcacaatctcagctcactgcaacctccgcctcctgggttcaagcaattctcctgcctcagcctcctgagtagctgggattacaggcgcacaccaccacgcccagctaatttttgtgtttttagtagagacagggtttcaccatgttggtcaggctggtttcgaactcctgaactcgtcatctgcccacctcggcctcccaaagtgctggattacaggcatgagccactgcgcccggcctattctttattattaacatagaggtttatatattcttttgtgcatcaaatactgcacagtgaac

SEQ ID NO: 499215 - DNA, 483 bp, Homo sapiens
ttatgtcattgtcataaatgaataaacaccgaattaatgggtgagagtgaaggcatcctggcaatgttctaactctttggttgggtggtgggtctagggatattcattgtattattctttattattattattattattttgagacagagcctctctctgttgcccaggctggagtgcagtggcacaatctcagctcactgcaacctccgcctcctgggttcaagcaattctcctgcctcagcctcctgagtagctgggattacaggcgcacaccaccacgcccagctaatttttgtgtttttagtagagacagggtttcaccatgttggtcaggctggtttcgaactcctgaactcgtcatctkcccacctcggcctcccaaagtgctggattacaggcatgagccactgcgcccggcctattctttattattaacatagaggtttatatattcttttgtgcatcaaatactgcacagtgaac

SEQ ID NO: 499216 - DNA, 538 bp, Homo sapiens
tgttgggggtcttgggtccggaaggtgaagagtgtctgatgccagcggccatcttggacctgaaggcagaaggaaaagtgcacacgtacatccatcgtgattcttatcatacatcatgagcattttcccttccatctttcctcacaatttttaatggctatactgtatttcattgtagcaatgacctatatggcacatttagattgcttccactctttttattcttgtaagkaatgctgtcatgaacatcactgtaactaaacctttgtgtgcattcttatttccctagaacaaattctagaaggattgttctagattgctagaccaaaaaacaagtacatctcatatacatatatatatattttttaatttattttttcaataagtttttggggaacaggtggggtttgggtacatgaataagttctttagtgtacacggtacccaatgtgtagtcttttacctctcacccctctcccacccttttccctaagtcctcaaattccgttgtaccattcttatgcctttgtgtcttcat

SEQ ID NO: 499217 - DNA, 586 bp, Homo sapiens
tgctatttttaggaaacaaatattttcccacaaccatagtttgttgcaggctaacttggatctgtcctaggttagtcatgtaaacacttcaggggggamaaacagtgtcaagagcaggcctgaatcaaactgggctgctttgcctaggtaacaacgtcagtctctccgcttgagggatgaagagtgaaaatgacaccccagggagactgggatggcagcagaggcgtgagttctcaccacctggttggctcaaggtagatgccagcaggcctgtgcatttgggcattttgtctacgaggccacctaatccacgggtcccaaggagttcaactgaaccgacccagcactcctgggtcacacaaaccctgctcaactgtacaagactaccactgccccccactaccaagtcaagttccgagtcatcagtccagtatttgcgacactcaaaaatcaagcttccacctgcctccagctcatcctcacagccccacagccaagccctggattccaactctgccagagcacaggggcagtatgcgtagagtcatgcaggcctaagttcaaattccagctttgtcatttctca

SEQ ID NO: 499218 - DNA, 586 bp, Homo sapiens
tgctatttttaggaaacaaatattttcccacaaccatagtttgttgcaggctaacttggatctgtcctaggttagtcatgtaaacacttcaggggggacaaacagtgtcaagagcaggcctgaatcaaactgggctgctttgcctaggtaacaacgtcagtctctccgcttgagggatgaagagtgaaaatgacaccccagggagactgggatggcagcagaggcrtgagttctcaccacctggttggctcaaggtagatgccagcaggcctgtgcatttgggcattttgtctacgaggccacctaatccacgggtcccaaggagttcaactgaaccgacccagcactcctgggtcacacaaaccctgctcaactgtacaagactaccactgccccccactaccaagtcaagttccgagtcatcagtccagtatttgcgacactcaaaaatcaagcttccacctgcctccagctcatcctcacagccccacagccaagccctggattccaactctgccagagcacaggggcagtatgcgtagagtcatgcaggcctaagttcaaattccagctttgtcatttctca

SEQ ID NO: 499219 - DNA, 423 bp, Homo sapiens
ctgcgctgcgaggaaaggagagaggtctgcactgcactcagagctctggaggcatcagcagtktctgctaggcctggaagacatgggtagagattgaaaaagccagccagaagggccagagggggaaagcaagaagagccatgttagaactgtgacactcacgactctcggcctggtctccaatcccaggtgggccagtgaggatgctggagctgggccagctcattcccagcaggggcagataggaggttgttggggacagaaggaaacttttcctaaactggcagtacccacagttcccaatctcctgttgcacaactgagtgtcaggaaacagtcaggtggacttcacaggctgggccaactccaggggaaagcccaggccagcctgtttgccctgttcacaatgaatcaaaccctagct

SEQ ID NO: 499220 - DNA, 548 bp, Homo sapiens
tgcgctgcgaggaaaggagagaggtctgcactgcactcagagctctggaggcatcagcagtgtctgctaggcctggaagacatgggtagagattgaaaaagccagccagaagggccagagggggaaagcaagaagagccatgttagaactgtgacactcacgactctcggcctggtctccaatcccaggtgggccagtgaggatgctggagctgggccagctcattcccagcaggggcagataggaggttgttggggacagaaggaaacttttcctaaactggcagtacccacagttcccaatctcctgttgcacaactgagtgtcaggaaacagtcaggtggacttcmcaggctgggccaactccaggggaaagcccaggccagcctgtttgccctgttcacaatgaatcaaaccctagctatggtcacaacccataatggccggcagcccaggattggaaaaatgaggaaaagaagagcgagaaaaagagaggctggcaggcagattccagttcctgactgggacatggccctgggtaggtcattc

SEQ ID NO: 499221 - DNA, 612 bp, Homo sapiens
  misc_feature (1)...(612): n = A,T,C or G
nnnnnnnnnnnacccagggtgtgaaagctctggcttctctaggcagcctctgagctagggtaggcagccccccaacttcataagacatgtacacttttttcctcttctcagttgagggagctttttccctccattgtttatggagggccttgcactgctaatgaggtcagggtcgggttcaattctgaaatgggggttaactccttcatatcccaagttgaggggtgcaggagcccacacccagccctgaagacttctcstgcaccgtgcaccatctccttcttagaacactatgccagaatgccaacccacgagcagtgggaagggagcatcatctctgacagcaacccagagtcctctagttacctgggaagtaaatttgactcctcgatttgtaaagggcagaagaaaccaaaagattcagttaacattagcttttattgcaaatctggttagaaataggagagaagaatgtaaatttggaatttaaaaaaatcaaaaacacttctcctagtgaaaaaaagttcatttttctgagaagcaaaatttattatatttctgttgtaatgaaaacgctgtgggtgcttcgatgggggaggacaaaaagtaaaa

SEQ ID NO: 499222 - DNA, 517 bp, Homo sapiens
ttccgcagacatggctgtgcagaacttcgtgggagatgcctgtcgcggagccacctgggtcgcccttcacaacggagggggcgtgggctggtaagaaggtttcagaggacagggtgtgggctgatgtggaagttttgggggttcctttggggcagggccaggctgaggttcctgaagtcctgggccctacctccctggtcacctcccctgccctcacctttgtggaaaatgtgttccttgcgtgagcggagacagttgacagaacttcaggagaggacttgcattagccaccccacctctctgggtctcccctgccacatgggtctcaggggcctcttaggctctgcaagaatggcagccgccytcctcatgtcagtttccagtgtgcagttagtttccagcatgtcagtttccatgtgttcccatggaattcccggcgctttcatggccagggtcttctccttcctgctctgaccacctcacttgagagtgcaaaacccagccaaggctcccaggg

SEQ ID NO: 499223 - DNA, 550 bp, Homo sapiens
gccagaagataggggcagcttctcaggtctctcaggcccggcccatctgtcctgagcagccagtcctgtgcaattctggagacaaattgtatacaaaaccccttttaaaaaccatggcttgtttttctgccagagggcagggagagctttggggagctctggcagtgacttcaaatacctcacgatctcgataagggtctcaaaccacagtgtgcacagcacccctggaggccttgtgggaacatgggctgccaggcttcaccccagtttcagacccagcagttctggggtggagcttcgagtctgcgtttctgcagttcattgttcttgaaggtgccagcggcccaggcttgcyttgagtcatcccagggttgttccctttaaagtaggagccacgttcctcactccagccagtacctccgggcctggcacctgctggagaattggtgcccaaaagtgtttgttgaatgaatgaaagaacaaatgaataaactctgcttacccagacggagaggcttctggagagcagccatcagttctgctttgccag

SEQ ID NO: 499224 - DNA, 482 bp, Homo sapiens
ctgggtttatacattcatctaaccatctcaacaacactacgaaatacagatgaggaaactgtccacagggagagtggccctcctttggagccatgtttcacacctcagcctgttgattccaaactcattctttttccactttatcaaggcagcatgagataatgttaataaattaatagataggactcagtttatatttcatgtgatcagaacattttacccgtttttggacaggtttaatttgtctgccatcttttgctcatgaaaattgccataaaaaataaacagtttgaaaggtatacattatttaaaagcagagacctatcytcacttagtatttcttctactgatggaagtctcaaagtgatcaaagaccatgctgtgggttttacagctgttcatacaaagccctcaggcataacttctctgccgtctgttctggttgtgatcttcaatataaagagccaggactcaagtcattc

SEQ ID NO: 499225 - DNA, 568 bp, Homo sapiens
acagtcctgttacactgcaactgctgttcttggacttattacaggtccatagtctctcaatcacaaatgttgaaaccaaaaaatcccaaacccaattttttttccctaaacttaatgccaaaagtaatttagcaacataactgacctgaactgatgtaaagctatttacagtctcatttgatcccacttagatatattttgctgaaaagtaccaatgtagtaactagtggtattaataatatatgtaccatattatctaaaatttgaaatagcctgaatccaaagcacagcgtgggttaacatacataaatactagcactgaccactgaaaccctagtataacaaaaccccagtaacaataagtccaccragtgtctgcatgttggattctatataccatcctctaacaaaagaaaccagggctctctggaggaggagtcgattccagggcagggacagggataatacaagagcctggtggtgctaggaaggaaggaagtgctcaaaacaaaaagccaggatggagaatgttgatggaaaacaagaatccaactgaaggattggccac

SEQ ID NO: 499226 - DNA, 583 bp, Homo sapiens
gcctgcagagggcaccgggggtggccagagagcaggagagcagcctgcagtgctgggctcttggtttggctctcatagacctgtgtgtggcctacatgggctgttggacaccrtcagacaaggactggagggacatgtggctggggtggaggacaagggtcggaagggagggcaagggaggaatagaagccagacacacaccctcactgcctcccctcacacagcacagggcctcctggaaggggctgggctggcagaagcggtcggggaaaccatccacagccaaggcctgggtcttgaaagcagtctggagagatggcggcagactcatttcatgggctcagaggccagggaggctccttggcagctcataggccctgtcaactggggctactagaaggacgaactgtgttcagggccctgcttggtggctgacagcacactgggccctggagccgcctcacctttccgtcccttcaatgttcgtgagtctcccatacgcgctactctctgctggtccatcactgtgtgtcgtcgcattatttcatgcggtttaaagagtcaagcagttcacatataagga

SEQ ID NO: 499227 - DNA, 591 bp, Homo sapiens
ggtcactgaactttgaatttccgaaagctgctatggagattattgcctttatagaattaaagagcctatcaaggaatggtttccatatacattaattctgccctttttctctcttttatcttccagatatatcatactttgttctggcctcttgaatggacagtagctggcagagagaacaacacttgttaygcaaagataatctgcaataaattcgaccatgtatgtaataccactagaagccaaaatgctgtgatttttaaatgtagcttttatttttagtatttggatttctataatttttttttttagagacgggatcttgccatgttgctcaggctggtctccaactcctggcctcaagtgatcctcctgcttcagcttcctgagcagctgggactgctgcacttttatagtctttctaaggtagctttcaggacaatgcagagcacctccacgttgtcatttagttaacatgtcacagaggctgagcagtgacagtttgtgattgagccctaccagtgtcctctcaaaatacatcactgaaagctgccttttcccagggccatcttgatagcttgatagtttaaa

SEQ ID NO: 499228 - DNA, 427 bp, Homo sapiens
tgctagttctgacctcctcatgagggtgtgggctgcacctctgtggctgtcagccccgtttcccatctctgagcccctctgctatgtcccacgccacccttctggctcccgcccagrtccctaggccacactcttgtccttgctctttaactatggggagcatgccccttccctttaccctggccacatgcctatttcttgagcagaaccctcgaacttacgaaatggaaatacttgactccagctctagggtcaaaattgtaaatgagactttcctcactcaggaccttcatttacaccccttttctgcttgctgagcaacccaccacctcaggttccaatgcagtagtcttctgtgggccctgggaactcactctgaagtcccagccctggcagcttctgcctgcctcccctctggagtgcccgt

SEQ ID NO: 499229 - DNA, 493 bp, Homo sapiens
ctttgaaagtttacttatgagacaatgggattcccacctcccaccacctttcagggcattttctgtactgtccagaaggttatttgctggagagggttaaaaccaaggatctcttgactacaaggcactaggcacaaatagagacatggatgctacactagcacaatattgagatgaacaaatacttcctgaatcctcagacctcttctctcactcaccttccacaactctggcaatgagcccttcacccttgctctagccagagattggtagtcttatargcccctaagggaagacttaaagatactgagtaaacgtccttaagtaaacttacccagttagattatctgacaaggaagctcaaattcagtaagccatgaacgcatgcttagagccttcaaatgctgtttttctttttaatttttaaaaattaagacataatttacttataatcaaattcagtttttaggtgtacagttctgagtccagaaaa

SEQ ID NO: 499230 - DNA, 609 bp, Homo sapiens
ggggtgctaatacaccgcagggacaaggatgaccacaggtcatctctatagtccaggggttaagaaagaaccatctccagagcctttatcagactgagtcagagaagaatggacattgcaaggtggcactcctgcctaggaaaggccccaacttgggagaagagagggcctctctggctgtgtggagaggagctggaatactttggtgggtgaaccatgaaaccatgtgcatggagagaaagctgtgtgtaggtggcagagaaaaggtggaaggtgcctgctcagccacagcccccttcaaaagacacmaccatccacagcactgtatgttccccaatccctgccaatggccacaagtgattagactggggacagccatctgatctcacaagagccaacacataagctggccagaaatctacagaatggcagaaaaaggtgggctgagtcaatccaattctttcttttataggaaaattaactagaaggaaagagaattttccaggtggtagaggaacgggaagaaatggacctgcagagttgtcgccaagttaggccaaggaggagcacatctgtacaaaccccccactgtgctgctgggccccagag

SEQ ID NO: 499231 - DNA, 625 bp, Homo sapiens
cctctgggaggactctgcgscccttctgatccaaagcacatgcttacccagtcccgtattcccacctctgtctgatctgtttgctcttagagctctcatcacccgttgttttgttgagttccttccctgctccttcactgtctctccctctctggaatgtaggctcctggagcccaggaactgtgtcctattcactgtgtgtgcccaggaagactcttgctgcgtattcggtaaacacatgaatgctttattattaagtgtatttttttaagtgacgccggttataatattaaaaagaataggatacatctattatatatatcagtttatgccgaaaacatattgttcctagcccattcagtagaggaaagaatagtcatttcaataatggcggcactgggacaactggatctccacatgcaaaagaaccaatttggacgtgtatctctcattttaggcaaaaattaactcaaattagagcagaagcctacacgtatgacataaaactatttgaagaaaagtaggtgtaaatctatgtgaccctggattagggaatagtttcttagatataatattgaaagcccaagaaagaaaaatagataacttggacttcatcaaaattaaa

SEQ ID NO: 499232 - DNA, 466 bp, Homo sapiens
attcgaattggaaaggaagaagtgaagttacctccgttcacagatggcmtatagaaaaccctaaataatccataaaaaccctgttagcactaataagtaaaaagccgtagggtatagcagacagtggcacaggtgaacagcactaataagtgaaaagtcgtaggaaaacaatagacagtggcacaggtgaacggctgaaccacttccagttcagctccttcactgccttctccttcctcaaccccctgcaacctggtgtccactcctccacagaaacagcttttctgcagcctcagtgtctgtacctatttctgggcgtctcttctgtatgcagaacctgaacagggagaggtctctgctatgaagagtgcagatgtggatgcttctgtctgggtgcgtggagctgagaggctggccagccctggcccatgtgctgctgactttgcagtcactccctgggccagag

SEQ ID NO: 499233 - DNA, 577 bp, Homo sapiens
tggggtcagagcagaggcctggggctgaacccctgctgctgggaacatgtcagggagctgaagggggcagtgggctgagccaaggctggggagagataattgaccagggaccaagcggctcccagggcccagccacagcagggagttggtcccatgccagggctgggggagtgggcattggtgggtttccacatctctacggccgggcccatgagcacaggaggtagggagggggctgtgggtgtcagcctcagtcaaatggcagcaaaacaatggggagcaggcagaagggagctttcccacgccatcctgtcggggagctgcggagacagtcaagcctgtgggtggcatgctgggtcctgcatgtagctgctgggagatgggctggaaggaggagtgggagacagagggtgkcctcacagtcaggttggcatggcagagaagtaagtatgcctccggcaggtgctaaaaataaagcttgcttagtggttgggcaggacttgagaccacgtccccagccacttatgggctggggctcaggaggcactggggaggctcctagattctggcttggatg

SEQ ID NO: 499234 - DNA, 579 bp, Homo sapiens
tgtggggtcagagcagaggcctggggctgaacccctgctgctgggaacatgtcagggagctgaagggggcagtgggctgagccaaggctggggagagataattgaccagggaccaagcggctcccagggcccagccacagcagggagttggtcccatgccagggctgggggagtgggcattggtgggtttccacatctctacggccgggcccatgagcacaggaggtagggagggggctgtgggtgtcagcctcagtcaaatggcagcaaaacaatggggagcaggcagaagggagctttcccacgccatcctgtcggggagctgcggagacagtcaagcctgtgggtggcatgctgggtcctgcatgtagctgctgggagatgggctggaaggaggagtgggagacagagggtgtcctcacagtcaggttggcatggcagagaagtaagtatgcctccggcaggtgctaaaaataaagcttgcttagtggttgggcagracttgagaccacgtccccagccacttatgggctggggctcaggaggcactggggaggctcctagattctggcttggatg

SEQ ID NO: 499235 - DNA, 472 bp, Homo sapiens
tgtctaagatacactaagtgggaaaaccaaagtgcagaacagggcttaacatttatgttgaaaaagggaaagaaataaaaaacgtttcacaaagggtgggtggagggagacttattattttagagatacgttcagacatagtcacagaatccacaaggctgggactggcttcrcagtcatcccaggtgggagtaggtggtgggaaggtgggggttccttgaactattctcccttcttcttgcatatgcttgaatttttcaaaatgaaaagacagaggcagacagacataggacatacatgcctgtaggtgagattctcaagaagttactgtaagcacacggcaaagcagtggatactacttacacgcctagagcatgtctggaaggacacccagggatctggtggcctccgagaggacaggtgctggacaaggagacctactcttcactgtgtctacccttctgtagtgtca

SEQ ID NO: 499236 - DNA, 678 bp, Homo sapiens
taagatacactaagtgggaaaaccaaagtgcagaacagggcttaacatttatgttgaaaaagggaaagaaataaaaaacgtttcacaaagggtgggtggagggagacttattattttagagatacgttcagacatagtcacagaatccacaaggctgggactggcttcgcagtcatcccaggtgggartaggtggtgggaaggtgggggttccttgaactattctcccttcttcttgcatatgcttgaatttttcaaaatgaaaagacagaggcagacagacataggacatacatgcctgtaggtgagattctcaagaagttactgtaagcacacggcaaagcagtggatactacttacacgcctagagcatgtctggaaggacacccagggatctggtggcctccgagaggacaggtgctggacaaggagacctactcttcactgtgtctacccttctgtagtgtcaaatgccatgtcatgtgcttacatttttaaaatctcaccattttgagaaacagtgaaccctgaggacatcatgctaagtgaaataagacagtcacttagccacactcaccatgggaaggctgccaggttcagctatgccatgggggtatggggacacctgggagaccctgtttccaccgtcaggactgaccttagaagcctagctccacat

SEQ ID NO: 499237 - DNA, 678 bp, Homo sapiens
taagatacactaagtgggaaaaccaaagtgcagaacagggcttaacatttatgttgaaaaagggaaagaaataaaaaacgtttcacaaagggtgggtggagggagacttattattttagagatacgttcagacatagtcacagaatccacaaggctgggactggcttcgcagtcatcccaggtgggagtaggtggtgggaaggtgggggttccttgaactattctcccttcttcttgcatatgcttgaatttttcaaaatgaaaagacagaggcagacagacataggacatacatgcytgtaggtgagattctcaagaagttactgtaagcacacggcaaagcagtggatactacttacacgcctagagcatgtctggaaggacacccagggatctggtggcctccgagaggacaggtgctggacaaggagacctactcttcactgtgtctacccttctgtagtgtcaaatgccatgtcatgtgcttacatttttaaaatctcaccattttgagaaacagtgaaccctgaggacatcatgctaagtgaaataagacagtcacttagccacactcaccatgggaaggctgccaggttcagctatgccatgggggtatggggacacctgggagaccctgtttccaccgtcaggactgaccttagaagcctagctccacat

SEQ ID NO: 499238 - DNA, 572 bp, Homo sapiens
gctgtctaagatacactaagtgggaaaaccaaagtgcagaacagggcttaacatttatgttgaaaaagggaaagaaataaaaaacgtttcacaaagggtgggtggagggagacttattattttagagatacgttcagacatagtcacagaatccacaaggctgggactggcttcgcagtcatcccaggtgggagtaggtggtgggaaggtgggggttccttgaactattctcccttcttcttgcatatgcttgaatttttcaaaatgaaaagacagaggcagacagacataggacatacatgcctgtaggtgagattctcaagaagttactgtaagcacacggcaaascagtggatactacttacacgcctagagcatgtctggaaggacacccagggatctggtggcctccgagaggacaggtgctggacaaggagacctactcttcactgtgtctacccttctgtagtgtcaaatgccatgtcatgtgcttacatttttaaaatctcaccattttgagaaacagtgaaccctgaggacatcatgctaagtgaaataagacagtcacttag

SEQ ID NO: 499239 - DNA, 678 bp, Homo sapiens
taagatacactaagtgggaaaaccaaagtgcagaacagggcttaacatttatgttgaaaaagggaaagaaataaaaaacgtttcacaaagggtgggtggagggagacttattattttagagatacgttcagacatagtcacagaatccacaaggctgggactggcttcgcagtcatcccaggtgggagtaggtggtgggaaggtgggggttccttgaactattctcccttcttcttgcatatgcttgaatttttcaaaatgaaaagacagaggcagacagacataggacatacatgcctgtaggtgagattctcaagaagttactgtaagcacacggcaaagcagtggatactacttacacgcctagagcatgtctggaaggacacccagggatctggtggcctccgagaggacaggtgctggacaaggagacctactcttcactgtgtctacccttctgtagtgtcaaatgccatgtcatgtgcttacatttttaaaatctcaccattttgagaaacagtgaaccctgaggacatcatgctaagtgaaataagacagtcacttagccacactcaccatgggaaggctgccaggttcagctatgccrtgggggtatggggacacctgggagaccctgtttccaccgtcaggactgaccttagaagcctagctccacat

SEQ ID NO: 499240 - DNA, 620 bp, Homo sapiens
ttgagaaacagtgaaccctgaggacatcatgctaagtgaaataagacagtcacttagccacactcaccatgggaaggctgccaggttcagctatgccatgggggtatggggacacctgggagaccctgtttccaccgtcaggactgaccttagaagcctagctccacatggtgccaggagaggctgtgcccccggggcccacagccaaggtctgctttcagcttttagatgacccaacacatttcttgtggcagggaatgttggccatccggccacctgtcagtcttcctccttccttgctggccgaccccggctgtgtcagggcatgagcccagcttcagggagccakatcttcagcttcgtgtgtcgttgctgaagcactgggtccgggggttcggggggaatgtggcctggctctgcctgaggcgatatcaggggattagccagatgactcccaggaaagactcccttagggtgaaaagtcaggggaaacccttaccccaccactcactttctgcctgggatgccctcctgtgaggtgtctgcagccctggcagtcctcttatagtcaggaggccagctctatgacagaagtcaacatccggaggacgatggtgggc

SEQ ID NO: 499241 - DNA, 551 bp, Homo sapiens
gggaaggctgccaggttcagctatgccatgggggtatggggacacctgggagaccctgtttccaccgtcaggactgaccttagaagcctagctccacatggtgccaggagaggctgtgcccccggggcccacagccaaggtctgctttcagcttttagatgacccaacacatttcttgtggcagggaatgttggccatccggccacctgtcagtcttcctccttccttgctggccgaccccggctgtgtcagggcatgagcccagcttcagggagccatatcttcagcttcgtgtgtcgttgctgaagcactgggtccgggggttcggggggaatgtggcctggctctgcctgaggcgatatcaggggattagccagatgactcccaggaaagactccyttagggtgaaaagtcaggggaaacccttaccccaccactcactttctgcctgggatgccctcctgtgaggtgtctgcagccctggcagtcctcttatagtcaggaggccagctctatgacagaagtcaacatccggaggacgatggtgggca

SEQ ID NO: 499242 - DNA, 620 bp, Homo sapiens
ttgagaaacagtgaaccctgaggacatcatgctaagtgaaataagacagtcacttagccacactcaccatgggaaggctgccaggttcagctatgccatgggggtatggggacacctgggagaccctgtttccaccgtcaggactgaccttagaagcctagctccacatggtgccaggagaggctgtgcccccggggcccacagccaaggtctgctttcagcttttagatgacccaacacatttcttgtggcagggaatgttggccatccggccacctgtcagtcttcctccttccttgctggccgaccccggctgtgtcagggcatgagcccagcttcagggagccatatcttcagcttcgtgtgtcgttgctgaagcactgggtccgggggttcggggggaatgtggcctggctctgcctgaggcgatatcaggggattagccagatgactcccaggaaagactcccttagggtgaaaagtcaggggaaacccttaccccaccactcactttctgcctgggatgccctcctgtgagrtgtctgcagccctggcagtcctcttatagtcaggaggccagctctatgacagaagtcaacatccggaggacgatggtgggc

SEQ ID NO: 499243 - DNA, 680 bp, Homo sapiens
tggctgctgctgaaccgtgggctgccagtctccgagcagctcaggaatgggcactaactctcctcatggctggaagcagcttgggctgccactgctgttgctcataggcacatgaatacccattttacagaagagaaaactgagactcaggggaaatgagttgcctgaggtcacacagctctctttggggaagccggggctccaactcaggccccttgggactctaaagctggacctatgtccactgtccggggctgcacctacagctcctgtcctcacccccacagtgtggctgcctggattcctygctggctctagtccatagaagctctgtgacctttgcagggcacttgcctccccatgcctgtgtccttgtctgtaaacagggacaacggccccaccttatgggttgacgtaattagtccacagaactaaagggcctggcacgtgatcagcacttgttggccagatggtttttactatgttatttctccagccgcaaggtgctaagcctccagggagttgacacccaacggtcacagggtcctcaggctgtgaggggccatctgcccctcagaagccgccagagctagtggaacccagggccctactgagtgcctgtcctaccgtcagcctgctgtgtggcccagagtcagtcagtcacactctgcgaaggaagg

SEQ ID NO: 499244 - DNA, 544 bp, Homo sapiens
ctggacgggccttgcactggcctccagaaccctaaagcccattgtccagaaccctgctgcgtgtamctgaagcccactgtccagggtcctgctgccccctgcctgcctcaggccccctctgcgcccaggccacatcctgtaaggcccaggaacaagggccagactccagtggccagggcatgcagaggaggctgaggaggttcagggccacctgtgtctccaggccactgaccagcccagcatttgaccttgcgtctccagacagagtcagagatctgaactgccggacatgtcccaggaacgacaccgtcatcagaaaaggagctgacaggagagggcagcaatgttggctggtcatgctggtgcagggagacccaggctgggtgtggcctgagtctagcagcaaccatggggagctccgctggtgccacaccaggcagggcagggccaggcaacccatgagaggaggccaggccttctcgccgtgttgcagatgagacgtgtccctttcctgggaactgtggctggggactgaggaagaact

SEQ ID NO: 499245 - DNA, 573 bp, Homo sapiens
ttggtgatctctaaacccacagggcttctcactccttgcagcaatccctggttccccccaaggcccaccagtgcactaccacccttcctggttcactgctcagctccagccacggcactctttattgctgaaatcttttgagttctgtgtaggttgatcactctggaaggtcagwtctacatggaaggggactttttgcttttctgtgacccctgcaaccttgcccagtgccagtgactatttatttaaagactgatgccctctgacagccataggaagagcaccccagcccctagcatcccattcaagactattcatgactgagccccaacttagagtatcttcctgccttccatcccaccattctctctcaaggacccagagccccacccacagcacatccattcacaccccaggccatttcactcctccatgcttttctctgtgccattccttctgcttgcagtttcctctcctccttttcctacctgttaaactcctatgcagctttcaaagcccaacacaaatgcccctgccctgtagaatggaaagaaaaaggatttggggtttcag

SEQ ID NO: 499246 - DNA, 487 bp, Homo sapiens
caattcctgttctgcagagccacccacctgccagcttgcctcttctcacggtactttctggaggtcctctgaactygggacactccagcagtacctgaagatggacagcagcatggggagcatctaccaatttggctccagcagccacttcccctccctttgcccacccaccagaggaggatgcctgccaggccttcagcccatgtgattccgataggctcccctacgcctccaccacctgctgggataggcatgtggcctaggcctgtccaatcacagcctcccagcccttcctgccacctgactggctcagagacgggcacttgagacccagaccgggccaatggatgcctccttgggactttggctggaatcagtggcaaaggaaccctctctagctttgggttggagttgctgaactggtgcagctgagagtgaggctatggcagagaaaagctaaaccacagctggaggtgtgatctgaacc

SEQ ID NO: 499247 - DNA, 487 bp, Homo sapiens
caattcctgttctgcagagccacccacctgccagcttgcctcttctcacggtactttctggaggtcctctgaactcgggacactccagcagtacctgaagatggacagcagcatggggagcatctaccaatttggctccagcagccacttcccctccctttgcccacccaccagaggaggatgcctgccaggccttcagcccatgtgattccgataggctcccctacgcctccaccacctgctgggataggcatgtggcctaggcctgtccaatcacagcctcccagcccttcctgccacctgactggctcagagacgggcacttgagacccagaccgggycaatggatgcctccttgggactttggctggaatcagtggcaaaggaaccctctctagctttgggttggagttgctgaactggtgcagctgagagtgaggctatggcagagaaaagctaaaccacagctggaggtgtgatctgaacc

SEQ ID NO: 499248 - DNA, 552 bp, Homo sapiens
ccccaccctcacccaatggaatggggccgaagtccagggcgctagggcggagactgattggggaagcccctcgcctctgggccccgcccctagggtttgcccaggggtgccattatccacccaaggccaagaggcattgtcgcggtggcgtgccccaccccgggcggtgtccccttgcctttttgctgccttagatgccaggggcccaagggctgatctgggatgaaccaaggagcctagtagagcgttgccctgtccatggctctccgggacccccgccstcagtaagaggcctaagagtgtccctccctccccgacccaaggctaccctgcagccttgctttcctccagggtctccaggtcctgcctgaatctagctcatgcaggtggcactagcctttgcacagagaggtagggtctcagcttacatcccccggggaatggagcttgtgcctcatcgtgtcacccacaacttctctgggcaccacgtgagctctgaggacttgccagggactgtgtgtgtgtgtgtgtgtgtgtgtgtgtgtgtgtgtg

SEQ ID NO: 499249 - DNA, 415 bp, Homo sapiens
ggcccatagtacttgttttctagcaaattatatattttacgtatttattacattcartttttattgcttgtttttctgagttacaatataagctacatgagagcaggaaattctgtctatttgtccactgatgtttctgagtccctgcaatagtgcctggcacataggtgctccataagtatttgctgaatgattaaataaataaatggatgaatgcatatgagcatttctcactggagagggtccagaactttcattagattttccaaggtgtctgtgacacaaaaaagggtaggaaccattgacatagtaacccatcaaaaagtttgctggaaattctttgcttgccaggaagtctgcctaatgaagcaggagatcctgagggatttttctccttttttgatttgtgtctctc

SEQ ID NO: 499250 - DNA, 592 bp, Homo sapiens
tctagtgttgctctataatttctgtttaattggaatgtgaagttcttcataaattaaggagtgtagctgaagctcatgtctctaagttaggacactgaactaacttgactgcccaccctgagatcaatcaatggccaagagaactgagatgactacgacaatttagacccattatcattcatcttctggcactgagatagaaaaaaaagcctagccctgaaatcaaagcatctctctgtactgccaaaacaactcaggactctgttagcagggaaaaggggatggttgttagggaagcatccgacagggtctgccccagggcaaaataagaaaaactagacgctctcaaaatgtggttcccatacgagcagcatctgggaacttcttaaaaatgcaaattcttgccccctgccccgccccycaacacccagacccactgaatcagaaactctagggttgggggcacacaaactgtgttttgataagcatccaggtgcttctgatacttgctcaggtttcagaacctgagcaagtctaagaaaagtctaagaaaatgcttagcaatcatgccagatgactcagtgacattacg

SEQ ID NO: 499251 - DNA, 508 bp, Homo sapiens
ctcatgtcttctgactccaagtcctgtgctgctgcaaagactcagatggtttttaataaatttatagcataaaatatatgctctcacaatataaaaagccttaaaggatgtgttttatagacctctgggtaacaaggcattgcatttaagtgtttaacttcctctacaccaacagcccctctgaaacaacccagagaagcataaaaaaggaaaagctttggtgaaaggggagaaaaagtactacagcaatgttgggaacaaggcaagtgcaccttccacatggtagaaattgkcaccatccttttcaatatggcttagatgggaccagaggacgggagacactgtggacagtcttgcagctcttcttcctcaaaaacagcagtggttataggaagtaaagggcagaaggaccttgagatccccaccaaacatgactgccccacttcagttttggagggctgagggagtgtcgtgtgcaggttaggtaagaagaccaggacttgcttca

SEQ ID NO: 499252 - DNA, 709 bp, Homo sapiens
ggtaagggaagctacgcagcttctcaacacacagaggggtccttcggacggtacctatagcaggcctcgctgttggtcataaatattgactgcccctccctgaaagaggatgatatttctccttcttcttgacattagacttggccatgctatttgccctggccagtgaaatgtgcagaaatgacatctctcacttccaggcagaagatctaagagccagctcaagttttaccatgtgctcttctccccatccacgaggctggcaggattctaggcctactgcaccctcagtgaagggaacgtggggcagcgctgcagtcagcctctcaggcatcaggtgagtgcaagaaaatatttttgatattgtaagcctgtgagattttggagttgcttgtcactgccgcagagccaagcctaacttcctgatatactaccatcctcctttgggaaggaagagagayggattgcagcaccagccagcgtctgaaggaactacgtgcaccctcctctttccatcctccccactcctgacgctgttaacagcactctcctgtcatggttagtgctaagtgtcaatttgattgggttgaaggatgcaaagtattgttcctggatgtgtctgtgagggcgttgccaaaagagattaacatttgagtcagtgaactgggggaggcagaccaaccctcaaagtggctgggcaccatctcat

SEQ ID NO: 499253 - DNA, 627 bp, Homo sapiens
ttggggcattttccaagtgaaagttcattagggagacacgaaagcacgttccactaatatccatcaaagaggggttcagtttcaaagcgcagaagaaatacaatagcgttgaagcaaactacrtgaaaaagatcttatgcgcctgagaagcgaaagagaagcagggactggtgacttggattttcttttttaagctaatctttatttgggacaaaatatgtaagtccaaggaaaacgagtgtctcctgggcactctcttatttacatggggcgtcttgaactaaacattttgaaatgtttataaatgtttgggtttcctcttccatattttctctggttggcaccaaagctgcagggcttggcatgtcctcacgctcgggtcttcccctctgtggcgacagttactgatgagcattaatctggaggacacacagagacaagatgaagtgcagactggagcccggggattaggtcctttggcgaataaaatgtaaacaggggatgtctgagaggtgaggagtggaggggctcattaaaggcctggacttgggatcagggtggctctttgtgtccgtcctcaagccagcgaatgggctcagatgctggtgagcactagtcaggcccctg

SEQ ID NO: 499254 - DNA, 459 bp, Homo sapiens
tgggttcaggccagcacatagacamcatgttcagaaagtttagaaagtctctctagggagacttgatgtctctggaggtcttttatgccgattttactggcctcgttgagaaggcagtttcttgacttcttggcaaagggattgaccttaagtctgtttctagagggcaaatgtctgtcaagatgaagccgtggctgaggctcaccactcagggattcacctgatctgaattctctttctccatccctgagatagctcccatggatggtgagtgaaactctgaaccaggaattatagatttggtcatcttataactagaaaaagaccctagaggacatttagcttagcactctcccttccaacgtattggtgacccccactgtccagcagaaatgagttttctagaaaacaaaatgctttctctcaatacacatgttcaaaatctcatgcatattttaa

SEQ ID NO: 499255 - DNA, 459 bp, Homo sapiens
tgggttcaggccagcacatagacaacatgttcagaaagtttagaaagtctctctagggagacttgatgtctctggaggtcttttatgccgattttactggcctcgttgagaaggcagtttcttgacttcttggcaaagggattgaccttaagtctgtttctagagggcaaatgtctgtcaagatgaagccgtggctgaggctcaccactcagggattcacctgatctgaattctctytctccatccctgagatagctcccatggatggtgagtgaaactctgaaccaggaattatagatttggtcatcttataactagaaaaagaccctagaggacatttagcttagcactctcccttccaacgtattggtgacccccactgtccagcagaaatgagttttctagaaaacaaaatgctttctctcaatacacatgttcaaaatctcatgcatattttaa

SEQ ID NO: 499256 - DNA, 611 bp, Homo sapiens
ctgtatagctttgctttgccttctttagaggatgtggaagaagtattttttcctcttgattcttttgaaagtatgggtttgtttggctttaatactgtcatttaggcgtttcttatatgtatgtgtttatggtagtttcaaattgtccttcaaactataattttcagctcattcacctgttgtagagtcttcacgatgatttttctctgaccaaactaaataagaatcagaccagaacccaagctcaacaaatccaagacaactgagcacattggctagtttcattrtctatgcgtccctctggttctcagaagataactgactaaagtttctttcctactgtttctttttttaaaaaaatatacctatgcacatcaacgaatatcagtatttcaagttttgtttcaaaagatgcttcaactccattatgtaaatcatgacttaaaaatgtaaaagaaatatttgtacatagacattcaaatcaaaccctgattccacaagctcctccttattttgttgactttatttttaagagggaaggccatttaattaaaaaaattctcctttactttccttgtttccctgctcccttcccccacccctccgattgt

SEQ ID NO: 499257 - DNA, 531 bp, Homo sapiens
tatttaaggggtgggggtggggaagggaagtagaatgcttacagaagcatcctctctgatgaaggtgttactgatccctggagacacccaacagccatctacaataggcttctctgtttatctgcacatgacaccatcccgtttcagagcccagagcagagaccttccacctcagatccaggagagtggaaaagacgctcccccaaaccatcaccttccctcaaacccccaacrccctcagcctccagcgcacgatgaactcttttcttcctctgtgctatgccctgctgccgcctgccccataaggatttcttcccctaaagatgggctggtttctaaggccaactgcccctggaggagggagggggctgtgttttgcagtgagaggtagtgttggcttagagaggcccgagttgttttgcagatgggaaaacagtcctgggggtgcggtgtctggcccaggccagcccagggcgccaggacagaggtcaagccgtctgtctggagcttggagcactagaccatgcttcc

SEQ ID NO: 499258 - DNA, 647 bp, Homo sapiens
ctggcctcatggtgtgggaaggggcccagacagctaaagtcagatctggccaggcaaagccttgaggtcccagaaggccctgcccagagccaggtgtcctcacagtgaggccttgggcttacagacctgagtacttcccatgggagatacctggtcccagaggtaactcttgataagggcytatggattctccctctggctttgagctgtgttgcacccgtaggtgctgatttacgtgaggattaggaaaatgctacactttgaggtagccttagggaggggctagacatctttatcacctctgaaggtggctcaagaatcagagtaagggtttgaacagtatttccacaggtcaaggggcaactctcttccttccaatcacccccacagatctctgtttcacctcaaaataaatgctgaacaaaaatttcaagaagaactgaagggaagggagcaaattatggatcttcctggggcaattgtaggtcttggtctgaacctgactcaatatgagtccttaaaacaaactgtggcagagactgctagcagccaaggccatcttgttctcgtctcccttgtcatccatacaaaatatatttcccatactcccttgcagctaggcatggtcatgtgactgagtggtagcc

SEQ ID NO: 499259 - DNA, 647 bp, Homo sapiens
ctggcctcatggtgtgggaaggggcccagacagctaaagtcagatctggccaggcaaagccttgaggtcccagaaggccctgcccagagccaggtgtcctcacagtgaggccttgggcttacagacctgagtacttcccatgggagatacctggtcccagaggtaactcttgataagggcttatggattctccctctggctttgagctgtgttgcacccgtaggtgctgatttacgtgaggattaggaaaatgctacactttgaggtagccttagggaggggctagacatctttatcacctctgaaggtggctcaagaatcagagtaagggtttgaacagtatttccacaggtcaaggggcaactctcttccttccaatcmcccccacagatctctgtttcacctcaaaataaatgctgaacaaaaatttcaagaagaactgaagggaagggagcaaattatggatcttcctggggcaattgtaggtcttggtctgaacctgactcaatatgagtccttaaaacaaactgtggcagagactgctagcagccaaggccatcttgttctcgtctcccttgtcatccatacaaaatatatttcccatactcccttgcagctaggcatggtcatgtgactgagtggtagcc

SEQ ID NO: 499260 - DNA, 542 bp, Homo sapiens
gggccagctggctgaagcttattcctgccaacttgagtataacaatggagccctcgagagactgtcttgcatgggatagccatctgagacttctggccgggactctgtaggggtctcctccaccaagcgactgggatgggtgagggggttggatttagcaagtgcttcccaagagctgctaaataattgcaaagttcctccctrggtcttgctatgggggcctcctaagacccgctgtccctaggcgatgagttcacagctttgtgggagagagagacaagagaacatgcagctaacaacctgggctaactgcaaaaagagaagcgcaaacattctcctcaccctccaccacccccgaatatggtcaaaacatttataccaggtgagagcatagtataaatatgttactgcatctgcagtgctagagaagagccattgaatttttttttttttttttttagtttttggtttcttacccttaacccgaaaggatggaaacggaacaggaggtgacctgccctgcatgactgagggtgcttgca

SEQ ID NO: 499261 - DNA, 652 bp, Homo sapiens
gtcagagccagggtgtcagataaattagtcgtgcacagaggtttcgtgggcattttgttcttccataaaaactgtggaaagtagttatatcagcagagcagagaaagggttaattatctgtctggtcctagaggagtttttcaagctgttgccacgtccactaggacrttagaagttttgctaagaagggaagtcagagccaacactacaaaaatcttcaattcttcttttcccaaatcagagcagcgctaactgtggaaatacaattctagaatgttccagaggcccttggacggagtcaggggcatagcagttttctcttcattgtacaaatgagaccttggaaagcgaaggtctcatatgtaatgatgtaaaacaaagaaagaatctataatgcagaaatcttacctctctccagagaagtcttggattttcttcccaaacttccctgcttttcatcaaagtttgaaacatatctgtaatggataaggcagctctttgactttaagttttaaggtgtcaaggaccgaacaaggaattgagagtcaaaacccagagttttaatctccctctacctctgaccttgggcaagccacgttccctctccagaccttgctttcctcttctgaaacatgagaagttggactggttg

SEQ ID NO: 499262 - DNA, 652 bp, Homo sapiens
gtcagagccagggtgtcagataaattagtcgtgcacagaggtttcgtgggcattttgttcttccataaaaactgtggaaagtagttatatcagcagagcagagaaagggttaattatctgtctggtcctagaggagtttttcaagctgttgccacgtccactaggacattagaagttttgctaagaagggaagtcagagccaacactacaaaaatcttcaattcttcttttcccaaatcagagcagmgctaactgtggaaatacaattctagaatgttccagaggcccttggacggagtcaggggcatagcagttttctcttcattgtacaaatgagaccttggaaagcgaaggtctcatatgtaatgatgtaaaacaaagaaagaatctataatgcagaaatcttacctctctccagagaagtcttggattttcttcccaaacttccctgcttttcatcaaagtttgaaacatatctgtaatggataaggcagctctttgactttaagttttaaggtgtcaaggaccgaacaaggaattgagagtcaaaacccagagttttaatctccctctacctctgaccttgggcaagccacgttccctctccagaccttgctttcctcttctgaaacatgagaagttggactggttg

SEQ ID NO: 499263 - DNA, 666 bp, Homo sapiens
ggagacagggatggtgccacaacaaagaggcttagaaaagtggcatagggctcagaggagacatggtgaaggcttcatggaggagctggccggcctttgagctgagttctgaaggggggatactgtgtgaaggttaaggggatatagggragacaacaggagcaatgcacagagacaagaaagtactgtttccagttccccagtactgttgcctggggaacaccagagagtcaaacaagaagttcagatcgggtgtggtggctcatgcctgtaattctggcactttggaaggctgaggcaggagtttgagaccagcctgggcaaaataatacaaccctgtctctacaaaaaaataaaaataaaaaattagccaggtgtggtggcatgctcctgtagtcctagctacccatgagctctgaggtgggagaatcatgtgagcccaggaggtccgggctacagtgagctatgatggcaccactgcactccagcctgggcagcagtgtgagaccctgcctcaaataagaagactgaaggcacatgaactctgaggagcaaggcaattaaggagagtagctcgaaatattttggagggccttggaagcagcaatttttccagcagaaagtgtgaaggagaatgaagttacggggtgggaggggtggggagca

SEQ ID NO: 499264 - DNA, 691 bp, Homo sapiens
cttcccagactgtttatgtacaagggagggagacagggatggtgccacaacaaagaggcttagaaaagtggcatagggctcagaggagacatggtgaaggcttcatggaggagctggccggcctttgagctgagttctgaaggggggatactgtgtgaaggttaaggggatataggggagacarcaggagcaatgcacagagacaagaaagtactgtttccagttccccagtactgttgcctggggaacaccagagagtcaaacaagaagttcagatcgggtgtggtggctcatgcctgtaattctggcactttggaaggctgaggcaggagtttgagaccagcctgggcaaaataatacaaccctgtctctacaaaaaaataaaaataaaaaattagccaggtgtggtggcatgctcctgtagtcctagctacccatgagctctgaggtgggagaatcatgtgagcccaggaggtccgggctacagtgagctatgatggcaccactgcactccagcctgggcagcagtgtgagaccctgcctcaaataagaagactgaaggcacatgaactctgaggagcaaggcaattaaggagagtagctcgaaatattttggagggccttggaagcagcaatttttccagcagaaagtgtgaaggagaatgaagttacggggtgggaggggtgggga

SEQ ID NO: 499265 - DNA, 691 bp, Homo sapiens
cttcccagactgtttatgtacaagggagggagacagggatggtgccacaacaaagaggcttagaaaagtggcatagggctcagaggagacatggtgaaggcttcatggaggagctggccggcctttgagctgagttctgaaggggggatactgtgtgaaggttaaggggatataggggagacaacaggagcaatgcacagagacaagaaagtactgtttccagttccccagtactgttgcctggggaacaccagagagtcaaacaagaagttcagatcgggtgtggtggctcatgcctgtaattctggcactttggaaggctgaggcaggagtttgagaccagcctgggcaaaataatacaaccctgtctctacaaaaaaataaaaataaaaaattagccaggtgtggtggcatgctcctgtagtcctagctacccaygagctctgaggtgggagaatcatgtgagcccaggaggtccgggctacagtgagctatgatggcaccactgcactccagcctgggcagcagtgtgagaccctgcctcaaataagaagactgaaggcacatgaactctgaggagcaaggcaattaaggagagtagctcgaaatattttggagggccttggaagcagcaatttttccagcagaaagtgtgaaggagaatgaagttacggggtgggaggggtgggga

SEQ ID NO: 499266 - DNA, 610 bp, Homo sapiens
ctgttatcctaagtaaattaatgcaggaacagataatcaaatattgcatattgtttcttaggsgtaggagctaaacactgggtactcgtggacatcaagacggtaatagaaactgaggactactggagggggagagggggacaagggttggaaaacgaactattgggtactatgctcagtacctgggtaacagggttaattgtgtccccaaacctcaccatcttgcaatatacccaggtaataaacctgcacacgtaccctctgaatataaaataaaagttgaaattatagaaaaaataaaaaaataaaaaagactgtgagatattgggaatggaaatattttggacattgaagagtgcattttgaaaataatgctctaatgtgagaattttctcccgagcgttaacgaactcaccacagaggcaaccttggttatagtgaaggggtctgaggaacaaggagaaagtacacaagatgctccctcaaggaggcaagagtatacaacaacgtcttgattgattatccattttagagagatctatggtaaatgctcacgggctttgtctggcccctccgcatacctctctctttgcagagttttggaaactca

SEQ ID NO: 499267 - DNA, 610 bp, Homo sapiens
ctgttatcctaagtaaattaatgcaggaacagataatcaaatattgcatattgtttcttaggcgtaggagctaaacactgggtactcgtggacatcaagacggtaatagaaactgaggactactggagggggagagggggacaagggttggaaaacgaactattgggtactatgctcagtacctgggtaacagggttaattgtgtccccaaacctcaccatcttgcaatatacccaggtaataaacctgcacacgtaccctctgaatataaaataaaagttgaaattatagaaaaaataaaaaaataaaaaagactgtgagatattgggaatggaaatattttggacattgaagagtgcattttgaaaataatgctctaatgtgagaattttctcccgagcgttaacgaactcaccacagaggcaacyttggttatagtgaaggggtctgaggaacaaggagaaagtacacaagatgctccctcaaggaggcaagagtatacaacaacgtcttgattgattatccattttagagagatctatggtaaatgctcacgggctttgtctggcccctccgcatacctctctctttgcagagttttggaaactca

SEQ ID NO: 499268 - DNA, 314 bp, Homo sapiens
ctttttagattcgagagcaggagcagccagcrctgctgaggcagtcacacgtatacagcttcacggagcaagcacccagccagggccttgctgactgtggctgctaataaaacagcagcaatttagtttcataaaattgctaatagttttcttaaaatgccattgcacttaagcatacacagggacacccccatcgtctctgctctccagcgggaggatatgaagctggagactggagactggccagggacagaggcaactactccctgaaatgatgtcaccctgtgcaagcaccttccccaggccaggccagg

SEQ ID NO: 499269 - DNA, 314 bp, Homo sapiens
ctttttagattcgagagcaggagcagccagcactgctgaggcagtcacacgtatacagcttcacggagcaagcacccagccagggccttgctgactgtggctgctaataaaacagcagcaatttagtttcataaaattgctaatagttttcttaaaatgccattgcacttaagcatacacagggacacccccatcgtctctgctctccagygggaggatatgaagctggagactggagactggccagggacagaggcaactactccctgaaatgatgtcaccctgtgcaagcaccttccccaggccaggccagg

SEQ ID NO: 499270 - DNA, 587 bp, Homo sapiens
agctgctgctggggtcccaggagcccagcctaggtgttcttccrtcctcaccaccccatggcctccatggagccccacggcagcctcaggaaggagggcagtatcgtcagaacacagtcctcatggaccccccaagagacccttgggcagaatgccccatcccacccaggtccagcttcactcagcacgtaaacaggaacacggctgcaggcaggctccacgcaccccgtccccagggaagccgcagcccccgtcccacgtatcccgggcaggcatctgtaactgagggctgcatggtcgggtgagcagcgaggcacatgctggctgggcggggaggggcggccctgagtggtcgtcttgctcagtgctggaggggctctgagccgaaggtctgagggtcctggagctgccatggcagatccccacagtctgggcagctcaaaacaacagggactcattctctccccgctcagcagggaggggtctgaaatcgagtccatgggccgtgctccctccagaggctccaggggaggaccctgccacctccaccagcttctgtggctccaggcgtccctgggccgcggcca

SEQ ID NO: 499271 - DNA, 587 bp, Homo sapiens
agctgctgctggggtcccaggagcccagcctaggtgttcttccgtcctcaccaccccatggcctccatggagccccacggcagcctcaggaaggagggcagtatcgtcagaacacagtcctcatggaccccccaagagacccttgggcagaatgccccatcccacccaggtccagcttcactcagcacgtaaacaggaacacggctgcaggcaggctccacgcaccccgtccccagggaagccgcagcccccgtcccacgtatcccgggcaggcatctgtaactgagggctgcatggtcgggtgagcagcgaggcacatgctggctgggcggggaggggcggccctgagtggtcgtcttgctcagtgctrgaggggctctgagccgaaggtctgagggtcctggagctgccatggcagatccccacagtctgggcagctcaaaacaacagggactcattctctccccgctcagcagggaggggtctgaaatcgagtccatgggccgtgctccctccagaggctccaggggaggaccctgccacctccaccagcttctgtggctccaggcgtccctgggccgcggcca

SEQ ID NO: 499272 - DNA, 587 bp, Homo sapiens
agctgctgctggggtcccaggagcccagcctaggtgttcttccgtcctcaccaccccatggcctccatggagccccacggcagcctcaggaaggagggcagtatcgtcagaacacagtcctcatggaccccccaagagacccttgggcagaatgccccatcccacccaggtccagcttcactcagcacgtaaacaggaacacggctgcaggcaggctccacgcaccccgtccccagggaagccgcagcccccgtcccacgtatcccgggcaggcatctgtaactgagggctgcatggtcgggtgagcagcgaggcacatgctggctgggcggggaggggcggccctgagtggtcgtcttgctcagtgctggaggggctctgagccgaaggtctgagggtcctggagctgccatggcagatccccacagtctgggcagctcaaaacaacagggactcattctctccccgctcagcagggaggggtctgaaatcragtccatgggccgtgctccctccagaggctccaggggaggaccctgccacctccaccagcttctgtggctccaggcgtccctgggccgcggcca

SEQ ID NO: 499273 - DNA, 548 bp, Homo sapiens
gggtgggccttaaagttagttgaaacctggaacataaacgctgccaggaccgtatccctggcccttaacgctgtcaggaccgtatccctggcccttggctttctgtgcatgtaggttcggctcccagaccaaccctctccaccaagctcaggataccatctagtttcacatttcccggcatcatctgctgctgcctgaacccgaactcaccattggaggctttggcatcaataatcccaggggagggctctgactggccccgtttggcccagatagtaatccttggaccaatcagtgaggcccaggcaggagggggtctcccacaggcccggcttgtcttcagtctctggcacggagggtggggtcacgtgacaacacggaagtagccctcgcccccgcaatgaggcagtgtggtgggtggggagatggtttttcagaggaagggaggatttggactggccagaaaaaaaaattgcggtctacctaccctgcccagcctgtgagaatcrcacaggcccagcagaggggaagtaagtgaggcagaagct

SEQ ID NO: 499274 - DNA, 619 bp, Homo sapiens
aatttctccatttgtaaaatgtatataatgatagtacctaccacgcatggttgttaggaagattaaatcaattaatatttgtaaagtagagcagccggctcattgtaagtattgggagtattggttaaaataattacaaaataaacaatctcacttagatacatcccttaccccctgtggattatgtcaagggtgaaagaaacagtgtgcttgaaatcctgctgtgcgccgagctgtatatcagaggtgttatggtgattcgtcatcattctcctgaccactttccatttttcttttagagtcaacactggccaatctttagggaggagctctgatcattgagaaactgacacygtggaagggggcatttctgactctctcttcctagctccatttgatcttcctaaatctttcaataatgtgtcattggggtaggaccaaagaaaaacggggtgaatgtacggttgctgctttgtttcccatagtgggagtgactctgatgtttcacaaaggcaggggtggagaggcagcgcctcgcaggaaagccttcttgctaaatcgaggacttctgcacagaaatagatacaaacttgcttactgtttaaatagaatattagcg

SEQ ID NO: 499275 - DNA, 576 bp, Homo sapiens
agttcccaggcaggcccagatggagggtttgcaggcagggtgagtgagcatggggctgcaaagggaacaatcatctgtctttgtccttcattccttccacaactatttatccagcaccgtttctgggcacagggctccagcgatggtcccaacaggtacaatgacctctggggaccaagttcagttcttggtgagttctccagtgcctctcgatgtaggatgaaccgttggcatgctccactgacgctggctccttctgttgtttctcttggctccaggacccccgcagcaaacacaagtttaagatccacacgtactccagccccacgttttgtgaccactgtgggtcactgctgtatggactcatccaccaggggatgaaatgtgacagtaagtactttttctctctgggggcatctgctgatggcagaagcaatgggaagggctgcttccacttggtttggggtccaggtctgccatacattcccccctgtcctsgttggggctggtgtaccagttatctgttgctgcataatgatcctcccaccccaaaacactgtgactgaagacaataaa

SEQ ID NO: 499276 - DNA, 582 bp, Homo sapiens
cattgaattaaatatttttttctatttactgtatatgcaaaaatattttaatatgaactctctggaattttctaacctgtagtttttgaataaatgtttttttctaaatttattacatttacagggtttttcttygatataaattctctgatgttgaacaaagtttgagcaattgcctcagggtttgctctaatacagaatgaatacaacaagatctgtgttacaagtaaagttaccacaacttcgtttatatttgtaatgtttgtcttcaaaataaatcctcttcagcactttaaatgcttattttttgaactcttttgacagtaattgcacttttaatgctattaatataaactctgatgttgaataagatgtgcacagatattaatcacttttttactttctttatatttgtacatttgttctcaagtataaaggctttcctgtgcaataaggtttgagcattgtgtaagttttgccacactgttcattcacacttgtagaagttttctccagaatgaattaccttacctacaatccagtgtgataaccatttaaaggctttgtcacattcatatttct

SEQ ID NO: 499277 - DNA, 582 bp, Homo sapiens
cattgaattaaatatttttttctatttactgtatatgcaaaaatattttaatatgaactctctggaattttctaacctgtagtttttgaataaatgtttttttctaaatttattacatttacagggtttttcttcgatataaattctctgatgttgaacaaagtttgagcaattgcctcagggtttgctctaatacagaatgaatacaacaagatctgtgttacaagtaaagttaccacaacttcgtttatatttgtaatgtttgtcttcaaaataaatcctcttcagcactttaaatgcttattttttgaactcttttgacagtaattgcacytttaatgctattaatataaactctgatgttgaataagatgtgcacagatattaatcacttttttactttctttatatttgtacatttgttctcaagtataaaggctttcctgtgcaataaggtttgagcattgtgtaagttttgccacactgttcattcacacttgtagaagttttctccagaatgaattaccttacctacaatccagtgtgataaccatttaaaggctttgtcacattcatatttct

SEQ ID NO: 499278 - DNA, 582 bp, Homo sapiens
cattgaattaaatatttttttctatttactgtatatgcaaaaatattttaatatgaactctctggaattttctaacctgtagtttttgaataaatgtttttttctaaatttattacatttacagggtttttcttcgatataaattctctgatgttgaacaaagtttgagcaattgcctcagggtttgctctaatacagaatgaatacaacaagatctgtgttacaagtaaagttaccacaacttcgtttatatttgtaatgtttgtcttcaaaataaatcctcttcagcactttaaatgcttattttttgaactcttttgacagtaattgcacttttaatgctattaatataaactctgatgttgaataagatgtgyacagatattaatcacttttttactttctttatatttgtacatttgttctcaagtataaaggctttcctgtgcaataaggtttgagcattgtgtaagttttgccacactgttcattcacacttgtagaagttttctccagaatgaattaccttacctacaatccagtgtgataaccatttaaaggctttgtcacattcatatttct

SEQ ID NO: 499279 - DNA, 582 bp, Homo sapiens
cattgaattaaatatttttttctatttactgtatatgcaaaaatattttaatatgaactctctggaattttctaacctgtagtttttgaataaatgtttttttctaaatttattacatttacagggtttttcttcgatataaattctctgatgttgaacaaagtttgagcaattgcctcagggtttgctctaatacagaatgaatacaacaagatctgtgttacaagtaaagttaccacaacttcgtttatatttgtaatgtttgtcttcaaaataaatcctcttcagcactttaaatgcttattttttgaactcttttgacagtaattgcacttttaatgctattaatataaactctgatgttgaataagatgtgcrcagatattaatcacttttttactttctttatatttgtacatttgttctcaagtataaaggctttcctgtgcaataaggtttgagcattgtgtaagttttgccacactgttcattcacacttgtagaagttttctccagaatgaattaccttacctacaatccagtgtgataaccatttaaaggctttgtcacattcatatttct

SEQ ID NO: 499280 - DNA, 629 bp, Homo sapiens
ctggttagaagcacaggcaaaacaacctggaccttctaattggcatctgaactgagggggcagtcttggggatgaatgcttaactttggggatcacacactatcttcaggtagaagtttcagaattgaattgaattagagaatacccacctagtatctgctacagaattgatttctttcttgttggtcagaaaaagcctcatatatatggtcacagaagttttctctgttgattgctatggtgtgagagcagaggaaaattcatttttccagakttgttataattttttgcaactcagacatacataaagatttcaatttatttttatcatcttttacctctctcagtgctgaagtaaaaaataaaatatgttttctgctgtaatttacttatttctttttttaatttgtatttcttttgctaattcttgtcaaacatttcccactatactcaataacattgtgtttataaatctaacatgccaacaattataaaaacacactattattttatgtatgactgagtgacaaaataatgccaattaagttatgtcataatactttgtatcacttgcagtttaactttatattactataaaagctcatttgaaattatttaaacatatattt

SEQ ID NO: 499281 - DNA, 590 bp, Homo sapiens
cgtgctgttttggttactctaattcgtagtgtattttgaagtcaggtagtgtgatgactttagctttgttccttttgctcaggataactttggctatttgggtttttttgtggttccatatgaattttagaattttttttctatttctgtgaagaatgtcattggtattttgataagaattacattgaatctgtagatcactttgggtagtagcgattagtgtccttttaagaacaggaggaggccaaagccctctttttcttcctcatgtgaggatacagcaagaaggcagtcatttgaaagccagaaagagagycctcaccaggaactgaatctgccctcaacttggtcttggactttccagcctctagaactgtgagaaataaacatctattgtttaaaccacaccatctatggatttttgttagtagcccaagctggctaatacacttcttttttctctaagagcttgtccacaaatgattctcatttcattctatatcttttttttcctcttcactaattgtttctcttggtatataagtgcctttctatttcttcttaaaaatccctctcctaacatgacacct

SEQ ID NO: 499282 - DNA, 527 bp, Homo sapiens
atagaacttctaaagtagaatgtaattggatgaaattgagatgagaggtagtaaactgaaaagtagatctaaaagaattatccagaaactatcattgagagataaaaaatggagaatatgtaagatgggtaaaaatcattgtaggatagaattgaaaggcttatttatgttaatcataaaggaaagaatcatgaaggaaagagtaaagagagtaggtgaaaggtaatacttgaagagaaaatgattaaaaattttccagaattagggtagacctatgtcctcatattcagaaagtacaacaaatcccaagtagattaaataaaaaaaaatacatagactttctgaaaggaaatttcagaactcaaaagacagagaggaaatctcagaaaccataaaaaaggaacagtatattacttataagcactgacacaactttcataacmaaaagaatatttttaaaatgccagatacattttgtttattttaccttcactcttaaatgataatttggctgaatacagaatttt

SEQ ID NO: 499283 - DNA, 467 bp, Homo sapiens
cagaaggaaatctgcagcaggctgagccagccgggtgaatggcagaragaatagaggctatttgaatactgatgtggccctcactttcttctatttccattaatgacatgctcatcaagggcaaacaatgggaccggctgccggcgcctgtcacagtgtgtgggtgctgggatgccaggctgtcatccccgggctgcatttagagacctgcacgctaataagaagtgctctgtgccgtcaatgcagacaggtgcttccgcggctgggacatgctccattcccttccccctgaaaccctcctctctcagcccccctgacagacaccatgaaatgcacaaattaacagccccatcatgttgggctgctgctgcctgcggtgaaagcagaaaatcaagttgtcacccagggtgcagtgataaagccacagcctcatttctctgttggtgccctataatagcaaatgccag

SEQ ID NO: 499284 - DNA, 565 bp, Homo sapiens
ttatgcctccccatgactggctgcagttaactggttcagggatggacatttggcccaatgagttcctttcctaggatttttggatttggtacctagtaatttgagccagactctctcaagcagctaaaattctgagatttaaaactctaattttgtctgtggccacatttcctgccacattgttcagtgagaaaaaaaaataataaagcaaatttcaaagaaaagcatagatgagagacagagaaactagctggtaactttgagctggatggttcttgatgcccagacacattactgtccttgctgaagttgttttctctgaactgtagctgtaatttcctatttatttatttactacttaacctagttcaaattgggattctatcatctatctcccccactctactactggttgggattagtcagatttcaggacactaattagaaggggaaataagcttgtaatgggagaatgccccsttcccccactttctctaaagtcctggtagatatggagccaggagatcacagactcaggtaaggcttttgattagactgaaccata

SEQ ID NO: 499285 - DNA, 417 bp, Homo sapiens
gtcccacaagggaaatgcaacatgaacaagaaataaatctctgttattttaagctacaggtattttggggtttaggatcctgactgacacagtttgataagcaattctcyattcaagtgcttctctagggactaccatacgagaatttaaattgtatgatgtctgttttacattgactgaggttgggagtgttacagcttgagagtttactattttcaaatgaatcaagatgttgctcttaaaaacctacgttttggtctttaagggcagaataatttattttcttacgcttttgaaggtcagaaggggtcaaaaagccattagatgatctgcttcacaactgctctaatgctactgtgtcatcttggacagatcacctcctaatttttttttttaagatggctatgcattttctct

SEQ ID NO: 499286 - DNA, 668 bp, Homo sapiens
atcttgatgctaaatgtgctatagtcatgctgaagtgtctttgctcatgctcttaagtggacaaaattaggaaacttatgtatatgtaaatatacacagtatacagacacgcatagacatattttagaaatgggtttacatttattcctccgattccagttcgccccacaaaagttrtttctttcctttccatgttccatattagtttgtcccttcttcttcagtaaaaactctgaatcttaacaatatcaatacatttattcatttgctcaatcttataatacatccaaatttgtttcagaattttgttgcccgtaccactatattttaaaatgctacgaaaaagagttaaggatttgtttgaaattctctcccactatcccacccaatccaagactaggtaaaaagtaaaatagtgggttcaaagtaactaggataaattcattctttttttcctcttcattgtggttatggtattcatttaaaatacatgcgggaccatttggtccagtttgctttacattttaggacttcttttttctcttctcacccctattgatttaattttttaaaaaacatgtagaacattagcatgcttccaagaatcaaaataatactaaaagatatatttggagaggtatcactcactcccatatcccttctgcatg

SEQ ID NO: 499287 - DNA, 668 bp, Homo sapiens
atcttgatgctaaatgtgctatagtcatgctgaagtgtctttgctcatgctcttaagtggacaaaattaggaaacttatgtatatgtaaatatacacagtatacagacacgcatagacatattttagaaatgggtttacatttattcctccgattccagttcgccccacaaaagttatttctttcctttccatgttccatattagtttgtcccttcttcttcagtaaaaactctgaatcttaacaatatcaatacatttattcatttgctcaatcttataatacatccaaatttgtttcagaattttgttgcccgtaccactatattttaaaatgctacgaaaaagagttaaggatttgtttgaaattctctcccactatcccacccaatccaagactaggtaaaaagtaaaatagtgggttcaaagtaactaggataaattcattctttttttcctcttcattgtggttatggtattcayttaaaatacatgcgggaccatttggtccagtttgctttacattttaggacttcttttttctcttctcacccctattgatttaattttttaaaaaacatgtagaacattagcatgcttccaagaatcaaaataatactaaaagatatatttggagaggtatcactcactcccatatcccttctgcatg

SEQ ID NO: 499288 - DNA, 495 bp, Homo sapiens
atctgatcacatttccaagcatcctcctccaaggtgtttgttacagtacctggatgaacaaatttactggtcccactatactcgaatgtaaaggttacttgagcaaacagggaagctgagctaaaaagataaaactctaagaataacaacacttgaaaggacattaagcatgtatgcttaagaatgggtamgttagacgaattatactcatcttttctacttcctatttgaaacttgttgctaaaaaggatgtattttgcaagaaataaaatgtagatattaaatgtttaaatttctataagaatgtctttctttaaccctaaaataattttttttaaaagaaagagcccaaacttatttttctgaatgggaatatggaagtgaaaatacttgcactctctgaagaatgcttatataaaatgaaggtatagtctacaatcataatggtcccatatgttgtcctattagggtactgaaaaccagccccttgctctt

SEQ ID NO: 499289 - DNA, 526 bp, Homo sapiens
cactgcagccttgacgtcccaggcttgggcgatcctcccaccttagcctcctcagtagctgggaccataggtgcacgccacaacaactggctaatttttaaaaaatcttctgtagaggtggggtctaaccatgttgcctagggtggtcttgaactcctaagctcaggggcttctgccacctcagcctccaaaagtgttgggattacaggygtgagctaccatgcccagctttaagaggattcttgcttactgaaaacacaaactccattcttttagcttgttttctttatggcactgaaaactattgacatccaagacaatctgaaattcctggtgcaaagaccagtatcagggaccaacccaactccacagagggaagaactgccagttagctgagtaggggaccattggccaataggggaaaaaagagtagggaggagggactggtagggaatcctggctaagtccacccttagaaggaggtgggggctgctccaaagagctgaaaatcagagatgttggtctt

SEQ ID NO: 499290 - DNA, 526 bp, Homo sapiens
cactgcagccttgacgtcccaggcttgggcgatcctcccaccttagcctcctcagtagctgggaccataggtgcacgccacaacaactggctaatttttaaaaaatcttctgtagaggtggggtctaaccatgttgcctagggtggtcttgaactcctaagctcaggggcttctgccacctcagcctccaaaagtgttgggattacaggcgtgagctaccatgcccagctttaagaggattcttgcttactgaaaacacaaactccattcttttagcttgttttctttatggcactgaaaactattgacatccaagacaatctgaaattcctggtgcaaagaccagtatcagggaccaacccaactccrcagagggaagaactgccagttagctgagtaggggaccattggccaataggggaaaaaagagtagggaggagggactggtagggaatcctggctaagtccacccttagaaggaggtgggggctgctccaaagagctgaaaatcagagatgttggtctt

SEQ ID NO: 499291 - DNA, 133 bp, Homo sapiens
agaaaatcagagtactgagtgcattgtccaggtccctgmattctgtcatgtctgatgtaacctcatgagcactgaatgagttaaaccatctggcaatacaagagatgctcaataaatgttactttccatctct

SEQ ID NO: 499292 - DNA, 534 bp, Homo sapiens
tgcagggtgattttggtcatggctgccaagaggcagaagtcgagtgaaaacattatagaatttttattattcactgagacagtgtgtgcatggccaaacaaagagggcaccagttgaacgcagmaaaaaaaaaaaaaaaaaaaactttgggtctgtttcttttttgaaaggctcactaatgtcttttcattgccagaaagtgaaacacaacaaaaggaaacagaagacacattgaatattttagtctcagcctatcctgcctagtttatacatcctttgcctgagaagctgaatactactgctgctaataataacacctaccatttatggagcacttaccagataatcaggcatcactgtttataacaattgtctgaatttatcttcccaatatgcttgtagagtagctgccatagctgccattttagagctgaaaaacctgagatttagggaggtgcataagttggccaaggttgcatagccagtagcttgtaaaacaggacccaaactgagaccaactcaaacacggactta

SEQ ID NO: 499293 - DNA, 257 bp, Homo sapiens
attatatataacataaacaactaattacatctgtatatacarcataaacataaagtacaaaaatattgtatataatcatatgtaatataaatataccagtgtaagatattagctattaaaatatacatgtgtgtatgtatgtgtatatgtgtacatataatatatatacatatataacatatataatatataagatatagcataataatataatatattatatataatatgtaatatgtaacatatataattaatat

SEQ ID NO: 499294 - DNA, 652 bp, Homo sapiens
ctgctcaaactctacctcttccacgaagatattcctagtagccctcaatatgatagctgctacttgcccctctactataggacctttcatttttccttgtgcattagacccttgacgtttgagaagaattcagaaaaagctctcaggaacactcaaatttgcacaaatcactgaagtgtagatatgccccatcaaaatgtgtatgctgcaaggcaatcagacaccacagaagaggtcrcaagtttcatccacccctcactcctgatagcaccttgacaaggaggattcaaatttatgccttagcaaattatactccacaataaccaaagacatgagtgttgcagatgagcctggtcacagtcaaatttatgtagactacaaaactatctgctaaaaataatctgctcttatcagattataaattccttgagaaaaggaacttggaccctggtcaacatagtttatccctgaaactttcagagcatcgcacattcaattaaggtattttggaaagagaaaaaaagaataaagactggacaagaagaatttagagtggactaggtttgcctgatcattttttaaagaatattaattaaaaaatggtccaacatggccctggagggtcctgccaagagacacttgcaagggggtg

SEQ ID NO: 499295 - DNA, 606 bp, Homo sapiens
agacagttttgagatttgcttttcctagtaattcgcctccaagcagtgggtcttgtttagtagggacaatcttgaaatggctaaatttcttctaagaacagtattggcaacttgaagagtcgttgggatcagtgttatgttcttgccttaactccaaaattaaacgggttatagttattgttgtgtatatttggtaatgtacattaaaaataaaaacctctagacatgacacataacattagcaacatataaccttaataagtcaaataaatgaactatctagcagtttaagaggtaatttttttttttttttttttttttttttttttttgacgggagtctggctctctcgcccaggctggagtgcagtggcgcgatcgcggctcactgcaagctctgcctcccgggttcacgctattcttctgcctcagcctccggagtagctgggactacaggcractgccaccacacccggctaattttttgtatttttagtagggatgaggtttcacggtgttagccaggatggtctgaatctcctgacctcgcgatccacctgtctcagcctcccaaagtgctgggattacaggtgtgagccacggtgcc

SEQ ID NO: 499296 - DNA, 632 bp, Homo sapiens
agaaagtataaaattatttactcttcccctccagaaaaattcatggtggttgaaacgagaaagagaatgaatttgattgaaagattaaaaatgtttcttggagacagtggtttcaaaggtgggataggatcacaggaagaaaggacaaatgctggaggaagtaacagcaacagccaagctacaaagaaagcaatgggggatgacttaggggacaggtcctatgttctccattttggctgctgtgttttggtgcatcttatrtaacacccaagtaagtttgtattttatttggtgtccagggaagccactggagattttgaatagagaaatggcataaatcaatagttttttaggaagttcatgctacaaaccgtactctcattttatttttctgttggtactagttacttcccaaatatatcctgtatattttgtgtgtgtgttgtctaccctttcctcttcattgtaagctgtttgagggctgaagctgggtcagatcaggcacacacctttcctgttgtcctccagcactctctctctcggagctctgcgctgctgtgtaagttgtctgactacactgagagtgccacactgaagggccctgtgcagaagctgtgactcagagtcccagc

SEQ ID NO: 499297 - DNA, 579 bp, Homo sapiens
ttatatacatgtattactaattatatacggggtctctagttatacatatgtattactgtacacatacatgtatcactgctctggaccaaaatattaagtgcattataaaacacatataaatgtagaagtttgaaaagcatgagatgaacaataaagatgaagattttaaatattttctccctgttgcttctggatcttcttgtaaatctttctgctttctggaggtccagagagaagaataatatgcgcttgttttgttccaaagtaggtttctctaaggccataggtaacagtgcggggggttgggggacgtagcctcccgtatyacaccacgctccccacagatgtctgaggtgcaggggtagtgtggcgggggaaggggggactagtaactgtctgaaagattgggttgctcccccacccacctcaccccacccctttgtgctttccatccctgagagtggccactgctgggagagtgaaaagatttgcagaccaatagctttggaattcctttcaaagtggttgaaaaatctgtcttcaaaataggtgggcagtggtggaagggtcagaagcaca

SEQ ID NO: 499298 - DNA, 628 bp, Homo sapiens
catccaaaaagctcttaccaaaaaaagtaccatattcagaggttctagggattatgaccgtggacatcttttttgggggatcattatgcagcctgctacaactacccaatgaacttcatgctctttgttaagggctttgttttagtgctaaagccacgacctgcatataaatataaaataaacatatcacagatttagtttaastcattaaggaacagttaaaatgatacaactgtttcaaaggaaaattgaaaattcccacacatctaaagactttcaggaatgctgacagaatttggagacagatgtacattggtcaatgtgggacactaactgagtacatcacacaattcacatttttatgaacaaaatagtaatagtttgcattactatcatcagtactctacaatttacagagctgtggtttccttgaaaaacagataacccagcctgcgatcccagactccagtcattgtttttgcccctttcagtcttttgaaatgtttcctgataccttctacaacaaaaaaattccctttgatcctcagagcccctcctttgtagccttccacctcagaacagtttctacccttcttaaccacctgcgttctctccacccctacatcac

SEQ ID NO: 499299 - DNA, 515 bp, Homo sapiens
ggccttagacgagtaacttcagtgccttactttccaccaggacagagtgggagtggtaataatagtattgacctcagcgggaaggctcttaatgctttcattttagagccagagcagacctcaacagatgggtgtaaagtaaatggaaagggctctggagccaggccctttcctgggccttggccttggcactgtctcttccacttctgtgaccttggacatgtcacttcccttttcccaggttcaatttcccttcagttgtctaaaaacgagagcaagttcacaattccctgagtaaatgtartccatccaggcggctgcacaggccaggccctgtgctgggcatgaggtcacacatggtcttggcacagcactgtcctgtgagggcccagatgaggtgcctggcccagcctgggtgaagagagggatctcaaggcccttctgtgcaagcacaaggtagagtggtgctccgtgctgggcagcctggcaggaatcatacagtccctgtcccagag

SEQ ID NO: 499300 - DNA, 560 bp, Homo sapiens
ataaatctcttctcagaggtcctagttcataggaagcactcagtaagtattatatattaatatttgcccagcctcctcaggtgcctgttgcaggtacaactgcaggattttccaagcrcaacggcgaattatctcctgcccaagcctctgacactccagcgaggctttctctgtgtgagtgggtctgttaacgttaatgggggtgcagggggcatggaggggaggaggctgactaggaaattcctatcatggctacaagttcctgtggaagtgttacagtgtttaatgtcattgttctaatatcacccatatttgatatcattgtttgagattttggctcagagtccacaatttactattctgtggagttgttggactcttggactgacctaaacatttctagagtgagatatgaattctacaccttgccttggataattattacctaattagcaacttagtgaaatactgtttttgtttgtttgtttgtttgtttgctttttttgctagtatttccccagcacagaatttctccacacaaattcacttaagccttttga

SEQ ID NO: 499301 - DNA, 562 bp, Homo sapiens
taaataaatgaacagagctgagtatgaaacaataggaaagaaaggagactgtgtagaacaggagagttcaggctccaactggtcattgccttgctggaatgctatgttgtacctaaattgtgacattttattcaacaaaatccagaaatcttcatgtaaatgtggtattcccctcttgtttctaaaacactggacaggctaaacaaaatgcatctgagagatacatgtgcctcccttgcccctactcatggcctttgcatttgtatacatcacacactcctgtcctgttaaaggcaacctcctattatgtacagtgggagaccctggctttggaatgcctcatgtaggagctgagtgacctctctgactagggaytcagtttccttctgtgtaactccttacctcctttgcaaccagaactttcccttagtaagcagttcagctattccatcctccttgagatggttttcctctcctacatttcttccttattgtatcatgcccagtgacggcagagggtcaacaggcttgccttgaagatgcaggttcttcatccctggat

SEQ ID NO: 499302 - DNA, 297 bp, Homo sapiens
gcccaaaaggacggctctcccttctctttcactctcttctctaggtgtgaagctgatgcagcacaggcgagccccaaaattgaggcttagcccgggggggttcttggcttctcctagaaactaattcaagaagccgggcgcagtggctcacgcctgtaatcccagcactttgggaggctgaggcggatggatcacttgaggtaaggagytcgagaccagcctggccaacatggtgaaaccccatctctactaaatatacaaaaattacccgggcatggggacgggtgcctgtaatcc

SEQ ID NO: 499303 - DNA, 398 bp, Homo sapiens
tacaggcacccgtccccatgcccgggtaatttttgtatatttagtagagatggggtttcaccatgttggccaggctggtctcgaactccttacctcaagtgatccatccgcctcagcctcccaaagtgctgggattacaggcgtgagccastgcgcccggcttcttgaattagtttctaggagaagccaagaacccccccgggctaagcctcaattttggggctcgcctgtgctgcatcagcttcacacctagagaagagagtgaaagagaagggagagccgtccttttgggctgccttgaaataaaggttgacccatgggttcatgtattgtcattcattctcattttctcttcctctctttctctctctcccctgccccttaagttagcttttcta

SEQ ID NO: 499304 - DNA, 301 bp, Homo sapiens
tcgcctgtgctgcatcagcttcacacctagagaagagagtgaaagagaagggagagccgtccttttgggctgccttgaaataaaggttgacccatgggttcatgtattgtcattcattctcattttctcttcctctctttctctctctcccctgcccctkaagttagcttttctacaccctacctggataaggataagaaatagaaggaggggacactttaggatgctacaaaataaaatacaacaacaacaacaataacagcagcagcaacaacaacaacagcaacaaaaggggaagaaa

SEQ ID NO: 499305 - DNA, 301 bp, Homo sapiens
tcgcctgtgctgcatcagcttcacacctagagaagagagtgaaagagaagggagagccgtccttttgggctgccttgaaataaaggttgacccatgggttcatgtattgtcattcattctcattttctcttcctctctttctctctctcccctgccccttaagttagcttttctamaccctacctggataaggataagaaatagaaggaggggacactttaggatgctacaaaataaaatacaacaacaacaacaataacagcagcagcaacaacaacaacagcaacaaaaggggaagaaa

SEQ ID NO: 499306 - DNA, 484 bp, Homo sapiens
atttcccagacaccactaagttctcccccgtctgcaggacaggaagccrcccgcacaggcccagcccttctctggctgcccagatttgcactctgcagcctcagccacaggatcagcccaggcccctcacacctctgtccctgctcaccttggagatgaccagggtcttgcatcctgagtcctgatctgttcccaaacacaagtgtgtactgacaagggcttggctcttaaatcacttctctgctgtgcccaccctggcccaccctgccaggaccctccgtttcccaccctgccctgcagtcccgccccctggaggagttgaatggtggattaatccctcatcactgatcaggtactgcctgctgagctgtgctaggagctggggaacctcagtggacaacacagccttggtttcaccctcatgggccctagcccaggcgaggtggtattccacatgggatcgggggagtcaacatcatgacct

SEQ ID NO: 499307 - DNA, 484 bp, Homo sapiens
atttcccagacaccactaagttctcccccgtctgcaggacaggaagccgcccgcacaggcccagcccttctctggctgcccagatttgcactctgcagcctcagccacaggatcagcccagrcccctcacacctctgtccctgctcaccttggagatgaccagggtcttgcatcctgagtcctgatctgttcccaaacacaagtgtgtactgacaagggcttggctcttaaatcacttctctgctgtgcccaccctggcccaccctgccaggaccctccgtttcccaccctgccctgcagtcccgccccctggaggagttgaatggtggattaatccctcatcactgatcaggtactgcctgctgagctgtgctaggagctggggaacctcagtggacaacacagccttggtttcaccctcatgggccctagcccaggcgaggtggtattccacatgggatcgggggagtcaacatcatgacct

SEQ ID NO: 499308 - DNA, 484 bp, Homo sapiens
atttcccagacaccactaagttctcccccgtctgcaggacaggaagccgcccgcacaggcccagcccttctctggctgcccagatttgcactctgcagcctcagccacaggatcagcccaggcccctcacacctctgtccctgctcaccttggagatgaccagggtcttgcatcctgagtcctgatctgttcccaaacacaagtgtgtactgacaagggcttggctcttaaatcacttctctgctgtgcccaccctggcccaccctgccaggaccctccgtttcccaccctgccctgcagtcccgccccctggaggagttgaatggtggattaatccctcatcactgatcaggtactgcctgcygagctgtgctaggagctggggaacctcagtggacaacacagccttggtttcaccctcatgggccctagcccaggcgaggtggtattccacatgggatcgggggagtcaacatcatgacct

SEQ ID NO: 499309 - DNA, 633 bp, Homo sapiens
ataatttattttaaatgtacctttatagttatagttgctacaacttttcagaatcttttgatcctgttaggaacaaagaaatcataccttgtgatctgccacacctaagaaggcaatggctgtgtaaagcatatgagttagagcactgtcatgatgtccttcagctaagtgagttgaagtaaaggaaaaaaattccaaaaagtcactctttgacacctgaagttctcctgaaattttagttacattattttggattgcatatagactgatctggaggcctcaaacttaattactttcaataacatgtttcacttaaaaacaaaacaaaataaaacaatctaacatttaattccaggayctcatttataaactggaatgcctgtatttcttttgttgtctccaaaacaattataatagtgcttaagataaacttgccagattttagtagttaacctctaaaagacacattgcatacatactttaagaacgacaaaggtacaagagcaaggaatctccctggaccactcctgtccagtggaattaaggttgccctttaagactgacatgtaaaatgagtcctaaatctgtcttctaagtcactgaccacataagtcttagcaaattaagtggcaa

SEQ ID NO: 499310 - DNA, 623 bp, Homo sapiens
gctgcgtgactccaaaaccataatktctaatcttgtggctaatgttagtcttacagaggtagtctagtccccaggcaagaaggaggtctgctttgggaaagggctgttatcgtccttgttccaaactataaactataaactaagtttctcccaaagtttgttcagcttatgcccaggaatgaacaaggacagcttggaggttagaagcaagatgaagtcgattaagttagatctctttcactgtctcagtcacaattgtgcaaaggtggtttcagacatgagaaagggaactgacttctttgggagagcacatcattaaaattcctttgcagagcaatttggcatcatttagtaaagttgaagatgcacaattatttgatagcaattttactccaggatgaacatcctagggcagttgttctaaagtgcgttcttcaggccaacagcatcaacatcgcttaaggacttgttagaaatgaattagaaactctgggggtggaattcaacggtctattgtttaataaaactctcaggtgattctgatgctttctaaaatttgagggccactggcctagagaaatacttgcatatcaacacaaggagtcagatttggggttcatttt

SEQ ID NO: 499311 - DNA, 623 bp, Homo sapiens
gctgcgtgactccaaaaccataatttctaatcttgtggctaatgttagtcttacagaggtagtctagtccccaggcaagaaggaggtctgctttgggaaagggctgttatcgtccttgttccaaactataaactataaactaagtttctcccaaagtttgttcagcttatgcccaggaatgaacaaggacagcttggaggttagaagcaagatgaagtcgattaagttagatctctttcactgtctcagtcacaattgtgcaaaggtggtttcagacatgagaaagggaactgacttctttgggagagcacatcattaaaattcctttgcagagcaatttggcatcatttagtaaagttgaagatgcacaattatttgatagcaattttactccaggatgaacatcctagggcagttgttctaaagtgcgttcttcaggccaacagcatcaacatcgcttaaggacttgttagaaatgaattagaaactctgggggtggrattcaacggtctattgtttaataaaactctcaggtgattctgatgctttctaaaatttgagggccactggcctagagaaatacttgcatatcaacacaaggagtcagatttggggttcatttt

SEQ ID NO: 499312 - DNA, 547 bp, Homo sapiens
aacatttttggctgggcccagtggctcacatctgtaatcccagcactttgggagactcaggcrggtggatcacttgaggtcaggagtttgagaccaggctggccaacgtggtgaaaccctgtctctattaaaaatacaaaaaattaagggggcatggtggtgcatgcctgtaatcccagctactcgggaggctgaggcatgagaatcacttgaacctgggaggcagaggttgcaatgagccaaggtcctgccactgcactccagccttggggacagagtgagactctgtggccaaaaaaaaaaaaagagaaacattttttattaacttagctgattaccttcagtttattgctggcctctgggctaccacagtatattaggttgtaatcgttagtgaatagtcatcagtggccaacagttcctcttcttaggttgtaactgacatcttgtagccaactgatcatcgtccaagagtaatttatattcatttcccttaaatgcatgccattacagttgcccacatttcagcttctgtgccactgttcta

SEQ ID NO: 499313 - DNA, 490 bp, Homo sapiens
tgggtgctcaataaacatttgttaaacggatttttagaaaataaacatgagttggccgggcgctgtggctcacgcctgtaatcccagcactttgggaggccgaggcgggcggatcataaggtcaggagatcaagaccgtcctggctaacacggtgaaaccccgtctctactaaaaatacaaaaaattagccgggcsaggtggcgggcgcctgtagtcccagctactcgggaggctgaggcaggagaatggtgtgaaccccggggggcggagtgtgcagtgagccgagatcgcgccactgcactccagcctgggcgacagcgagactccatctcaaaaaaaaaaaaaaaaaaaaaaaaaagaaaataaacatgagttaaagttttgtcttgacttgctccccctggatcatgtgtagactaccagcaggtggcagagtggtttgaaatgtgcatgctggagcagggtggaggaactggctggtgtcccagc

SEQ ID NO: 499314 - DNA, 561 bp, Homo sapiens
  misc_feature (1)...(561): n = A,T,C or G
nnnnnnntcggaccacaagagttggacagcaaacttatcaatcatctctgacatgacaatggttgctgcatcacccaacccacttcctcttcttcatgggcctgcagtctacatcttccacccttccttgcagtggctgtgccagtgcaacagagttctagccaacaagatgtgtgtgcaagtgatgagcagctcatccaggtctgccttgtccatccctcctatgagggatcttctgtgcttctttctcccctctatggattgatgaagacaaacaccatgatcttaaaggcttcatgttgaagacagtggagcaacagggtaaaagaagcctggagctccaaatcactgcttggaggaaagccatctgccatccaggaagttgcatttacaaaaatragaattgaacactaaacatttggcaacctacaatttgagcttgtatgttacagaagccagctttaccctaataaacctaggttactgtttttttcaaaatatctttttcagctccagattcctacaattcaaaaacttttcatttgttatatagtgtccgaa

SEQ ID NO: 499315 - DNA, 600 bp, Homo sapiens
ctgttgcagatgtactctgaagctctcctcttaaatgaaccacaaggtatctttgaaaaaaacatttgaatttgcctgcattcagcatcactaggttatttctaagcatttcaaaacctatgcttgcatttgaaacattttctttttatatgactgcrttggttcagactccaaccccacttgatggctagacagagtaatgctcagaggctttaaagtttctactttacattgatgtttttcaaaatttagcatatgtaagatttgcatcaggaacacaataaaaatgagtttgctatgtcagtttccagtttctttctctcaggtcagatgtcagcatacctagcgcgggacaactgaggaatctgcattctcaaagagaagccttcatggtgccactcctctccacttcccatgccttgtttatgtaggtggctccatgctttgagaaatactgcaacaggggtaagagagtctatgaatagaatttaggattctatgaacgtggatgggaaagaattttgcagcctcattttcaacatcttcaaattgaaaattagcatttcccttaataataaatataggccacaaacgacagtt

SEQ ID NO: 499316 - DNA, 597 bp, Homo sapiens
ctgctcttggcctgcactttgcttccggtcacagtctggaaggtcctgcgtcccagagagaagtaataatgctcagcctcttctttcctgatgcactggggctgcaactgctcattccttccccctttaaccccgtagaatgcatcatcctttgctttggcctccagttggtcatgcaaatgaacaagggtcctcactccagtaggcaacaggcttcagaattgactcagaaaagcgtttgctcttgggcattacctaatccaatcagcctccacctgttgcagatgtactctgaagctctcctcttaaatgaaccacaaggtatctttgaaaaaaacatttgaatttgcctgcattcagcatcactaggttatttctaagcatttcaaaacctatgcttgcatttgaaacattttctttttatatgactgcattggttcagactccaaccccacttgatggctagacagagtaatgctmagaggctttaaagtttctactttacattgatgtttttcaaaatttagcatatgtaagatttgcatcaggaacacaataaaaatgagtttgctatgtcagtttccagtttctttctct

SEQ ID NO: 499317 - DNA, 600 bp, Homo sapiens
ctgttgcagatgtactctgaagctctcctcttaaatgaaccacaaggtatctttgaaaaaaacatttgaatttgcctgcattcagcatcactaggttatttctaagcatttcaaaacctatgcttgcatttgaaacattttctttttatatgactgcattggttcagactccaaccccacttgatggctagacagagtaatgctcagaggctttaaagtttctactttacattgatgtttttcaaaatttagcatatgtaagatttgcatcaggaacacaataaaaatgagtttgctatgtcagtttccagtttctttctctcaggtcagatgtcagcatayctagcgcgggacaactgaggaatctgcattctcaaagagaagccttcatggtgccactcctctccacttcccatgccttgtttatgtaggtggctccatgctttgagaaatactgcaacaggggtaagagagtctatgaatagaatttaggattctatgaacgtggatgggaaagaattttgcagcctcattttcaacatcttcaaattgaaaattagcatttcccttaataataaatataggccacaaacgacagtt

SEQ ID NO: 499318 - DNA, 600 bp, Homo sapiens
ctgttgcagatgtactctgaagctctcctcttaaatgaaccacaaggtatctttgaaaaaaacatttgaatttgcctgcattcagcatcactaggttatttctaagcatttcaaaacctatgcttgcatttgaaacattttctttttatatgactgcattggttcagactccaaccccacttgatggctagacagagtaatgctcagaggctttaaagtttctactttacattgatgtttttcaaaatttagcatatgtaagatttgcatcaggaacacaataaaaatgagtttgctatgtcagtttccagtttctttctctcaggtcagatgtcagcatacctagcgcrggacaactgaggaatctgcattctcaaagagaagccttcatggtgccactcctctccacttcccatgccttgtttatgtaggtggctccatgctttgagaaatactgcaacaggggtaagagagtctatgaatagaatttaggattctatgaacgtggatgggaaagaattttgcagcctcattttcaacatcttcaaattgaaaattagcatttcccttaataataaatataggccacaaacgacagtt

SEQ ID NO: 499319 - DNA, 600 bp, Homo sapiens
ctgttgcagatgtactctgaagctctcctcttaaatgaaccacaaggtatctttgaaaaaaacatttgaatttgcctgcattcagcatcactaggttatttctaagcatttcaaaacctatgcttgcatttgaaacattttctttttatatgactgcattggttcagactccaaccccacttgatggctagacagagtaatgctcagaggctttaaagtttctactttacattgatgtttttcaaaatttagcatatgtaagatttgcatcaggaacacaataaaaatgagtttgctatgtcagtttccagtttctttctctcaggtcagatgtcagcatacctagcgcgggacaaytgaggaatctgcattctcaaagagaagccttcatggtgccactcctctccacttcccatgccttgtttatgtaggtggctccatgctttgagaaatactgcaacaggggtaagagagtctatgaatagaatttaggattctatgaacgtggatgggaaagaattttgcagcctcattttcaacatcttcaaattgaaaattagcatttcccttaataataaatataggccacaaacgacagtt

SEQ ID NO: 499320 - DNA, 565 bp, Homo sapiens
cacagcttggctcaggcacatgtctgaaggtttctatcctgaaagacaaggtcaaggccagatggcaggacattgttttgctgtccttcagcctaacacatgatccaaggagttctgttgtcttctsttgtgacacaaagctcagtccacggccctctaggacagggcagttctgatggtgacatttcactaggtaagaaggtgtttgtttgtagcaaagcgttccatcagaaaattcccttactgagagccaagaaggagctgagagatgctcccattttcacttgcaagatgaaagcagtatccattgaagaaggtggaatatgcaagacacacaggaatgtgtatgggcaaaatctcgaagtttagaaagctgggcataccctcaatttgcccttgactcttcacaataaaatctaggagctgaatgaataaaaaatatccaaattttatagaatgtaaaaagtgatctgaatctcgagtaataataagagattagtcacctgttctaaactgacagcccctgatgtcatggtttccagtgtttttcaaatcacccaggata

SEQ ID NO: 499321 - DNA, 565 bp, Homo sapiens
cacagcttggctcaggcacatgtctgaaggtttctatcctgaaagacaaggtcaaggccagatggcaggacattgttttgctgtccttcagcctaacacatgatccaaggagttctgttgtcttctcttgtgacacaaagctcagtccacggccctctaggacagggcagttctgatggtgacatttcactaggtaagaaggtgtttgtttgtagcaaarcgttccatcagaaaattcccttactgagagccaagaaggagctgagagatgctcccattttcacttgcaagatgaaagcagtatccattgaagaaggtggaatatgcaagacacacaggaatgtgtatgggcaaaatctcgaagtttagaaagctgggcataccctcaatttgcccttgactcttcacaataaaatctaggagctgaatgaataaaaaatatccaaattttatagaatgtaaaaagtgatctgaatctcgagtaataataagagattagtcacctgttctaaactgacagcccctgatgtcatggtttccagtgtttttcaaatcacccaggata

SEQ ID NO: 499322 - DNA, 649 bp, Homo sapiens
acagtagcttaaagaaggtagattttgtgtttttctctttcacactaaagtctagaggaaggcaggccagggtggagagatgcgtttccctccagccgtccagagamatggcttctttgtctgttgctctaccatgtgggtcctctgtccccaggcaccttctcaagactggccacttcagcttcagccctcccatctgcattccagccagcaggagagaggaccactgagaggaaaggacccaggggcttgggcccactgtgtttcttttgtttgtttttgaaggaagggccccccacaccctgcatagttttgttaaccagggtgcaatcacatggccacagctagctgcaagggaggcaggaagtgcagtttcatgcctgggtggccacacccccgactaaacacggggctttattaatgtggaggtgacagcagacaagacggaaagccacggtcctggccacaccattcatgcactcctagggtgcagctcagtgccagaattgtcagaggtactcggtaaacgagtgatgctcgaatgagtgaatgaatgaatgaactgccaggtggagccactcagacgtggggcttctttctggacggggtctcgcgggactgtgggcctttgcgaagcagccccaggggg

SEQ ID NO: 499323 - DNA, 649 bp, Homo sapiens
acagtagcttaaagaaggtagattttgtgtttttctctttcacactaaagtctagaggaaggcaggccagggtggagagatgcgtttccctccagccgtccagagacrtggcttctttgtctgttgctctaccatgtgggtcctctgtccccaggcaccttctcaagactggccacttcagcttcagccctcccatctgcattccagccagcaggagagaggaccactgagaggaaaggacccaggggcttgggcccactgtgtttcttttgtttgtttttgaaggaagggccccccacaccctgcatagttttgttaaccagggtgcaatcacatggccacagctagctgcaagggaggcaggaagtgcagtttcatgcctgggtggccacacccccgactaaacacggggctttattaatgtggaggtgacagcagacaagacggaaagccacggtcctggccacaccattcatgcactcctagggtgcagctcagtgccagaattgtcagaggtactcggtaaacgagtgatgctcgaatgagtgaatgaatgaatgaactgccaggtggagccactcagacgtggggcttctttctggacggggtctcgcgggactgtgggcctttgcgaagcagccccaggggg

SEQ ID NO: 499324 - DNA, 476 bp, Homo sapiens
ctgtgacgagggcgatccctggtcccagaccctggcagtgaatctcctcttagctgaacaatatagagacrttcattagtttggtcatgaaaaaaaaaaaaggaaaaaataaaagaaaaaaaaaagaaaaaggataaaaagaaaggaaaagaaaataaaaggaaaaaagaaaataaaaggaaaaatgtaaaagaaaaaagtctggtgcatgtgctgccgcagcccgagctcaccccttccaccggcccttttacccaaatgtacgcattttccatgatgttcttcaaggaagtatttgacaacattgcagcccaggaatctccagccctcttcccggtgagattttcagaagatttcttgcatctgcagtacacgtggctctcagaaacagaaagcgcctgagacagtgagcttcccggcgctcccttgctggacgcccggcccatctgcagctctgtcttcccacaggggcagtg

SEQ ID NO: 499325 - DNA, 510 bp, Homo sapiens
gttgggatcgccaaatgcagcctgaccggggtccccctccagccctctgagcccgcttcccattggagggaccctggagactagattaaaataactaaacaggccgggcacggtggctcacacctgtaatcctgcactttaggaggccgaggtgggtggatgacttgaggtcaggagttcaacaccagcctggccaacatggcaaaacccagtctctactaaaaatacaacaattagctgggtatggtggcgtgcgcctgtaatcccagcttctcgggaggctgaggcaggagaatcacttgaactcgggaggtggaggttgcagtgagcggagatcatgccactgcactccagcctgggtgacagaacgagactccctctcaaaataaataaataataaatatttaaaaaacccaaaactaaaaaactaaaaastaaataaatattaatggggaaaaatacaggtagacgaaccacaaaaacccaggaaaaaataatgatccagcactg

SEQ ID NO: 499326 - DNA, 415 bp, Homo sapiens
ttgggggctcaggaacatagcgcctcactccttcattcatggctttcacagacactggcattcccttcccgggtgccacgtgccccgggtcctggcagaaatacaaatggatccagagtgagccccactatccatgggctcatggtccagtgtggtgacacacaggccacgcgtaatctggttgtagcagggccgacagaagcaatggctgtcccggctcagggagcaagggtgaggrgctggggtcagggatggcagcgctgaggggcagaaggaagggcaaggacacacagtacccggtctggaggagtcccaggctgtgtgtgggaaggggggtctggggatgccgtggtgggcaggggtggtctgtggagacaagtgactgggctggagaacgcagggcctttccctctca

SEQ ID NO: 499327 - DNA, 626 bp, Homo sapiens
  misc_feature (1)...(626): n = A,T,C or G
gatgtcacctgggggtgggtgggtggctgaacttgggatcactgggtcatgccctggaattatgagttggagtgcttcctggaaagagatggacacctgttggatatagtggagagaatggcagctccagaaagatacctccatgtcctanacctagaacccgtgaagctgaccttatttggataaagagtcttgcagatgtaatgaaattagaatctcagatgagatcatcccaggttatccagcagccactaaacccgaagatcagagacacacagagmgaagaccaggagagcatgccaggaagacagagcccagactggagcgatgcaccacgtgccaaggggcgccagcagccaacagatgctggaagagggaaaaggcgtccagagggagcacagctctgcccacaccctgatttgagacttctgctctccagaaccgggagagaatacatttctatcgtttggagctcccttggtttttggtggttacagcagccacaggagactcatacctaataacgagacccataaggccgttcttgtacttatttgtgtttctctgaacaaggttgttccagctcttggtgtcgggggagaaagcctatgtcagatgatgccagg

SEQ ID NO: 499328 - DNA, 286 bp, Homo sapiens
attcctcaccagtccccagatccactacctttgtcgtaagacattgcagttccccagcaccacaaagacagaatgtatttccccgcctcttaactttgagctcatcatgtgacttgctttgttcaacagawagtggtagaagcagtggcatgctggttcccagcccaggcctcaagggttccaagcccaggccttaaggggcctcgcatgctgctccggtgtgcctctgctattgccatgagaggaacacactcaggttagccaactgaccccaggggcaggatga

SEQ ID NO: 499329 - DNA, 624 bp, Homo sapiens
aacttcaattgctccccagttcccgacagagtgtgtagcctgactgatcacttggacagtgggtaggaatggaatcatggtcaaggtagaagctgggaggagacaagatgagcagggctgttccttggctccttgtggtcactggctccaggacaggtctttcttgggactgtgcatgcctgctgggactgaacaggaaacaagcctgttgtttctctatcagcagggctgggagacctccagaaagctgtggtgagtgcagaaatgagcagctgttcttcaagaaggctggctgctgctgactstgaaccagcggccctgctatgtgcagggtcctgaccatgatgcaaccagaaccctggtccgctctggcctgtgtgctctgggcccccagtgctcctgcctctgactctggggagccatggactaccttgctttagtctcatccttctttgttctttaccgggcaatcctttcaaccacaaagtctgccttcctggtgggttagtgccatcctgactctgttctgctggagggctttcctggccactgcatctgaaggagagcagttgggtggggagtactgggggcctggaggtctggctagaatgccagctctgagtg

SEQ ID NO: 499330 - DNA, 640 bp, Homo sapiens
cgttgtagatgtataggaaagaaggtctctcattggatcgaatggttgtctcttagaacagtagcaatttatggtcttgtgtagtccctgtttagaaaggctgttaagagaaactgggcacttagcttttccttactcaatgggctccctaaacgtttccatcttcctaggatcctccagtttcaataaccatgggcaaaatacaaaccatgccmaaagtccctcatcatccacaggccttgatacaatgtatagcctgctttggctttgtttcacaatgaactattaatagtaatgtccagtaaaaaaatgagcattaaaaagccctgagtcctgagaataaaaatgtttatgtaaatttaattaatactaaatacattttatgtgcatataactgtgctaatttcataaggaaaaagagtattgcgataagccagttcctgcccaccacccacattattattcagctaagatgtaaagattttattcataatatatttagaaacaaaagaggaggatagaatacaactaaatgccatcatgataaaaataaataaatatcaatttacaagataaaattcaatatgtaggtattcatatattggatctcccaaaaagcccagattttggatagaatata

SEQ ID NO: 499331 - DNA, 481 bp, Homo sapiens
gctgtaatttagaagcaaaagcaattattgaagggtatgaatgtgaggaggcagttttcatggtgaattaaagtgctttgataatgaaatagttatttcaagttaaattaaccattaaagcatttcagattttatatctaaagttacagtgaaaaatataaagatctgcagctatatttttctagaataaatatatttgctagaagcaaaaaggaggaggtagtatatgatctggcaaaaacaaaacgaagacaagattgaattggaccatcagaaatctcatcttgactacagcgatagtctaggtgaccttgggaactaataatgatctaatattagctaacatctatgcagttccttgttgttctctttctctcctttcacactctgtttataacacatctattcaccaatataattgtctaygccccaagcctcccttcttggtacatacctgttaaaattgctatggaaaataact

SEQ ID NO: 499332 - DNA, 675 bp, Homo sapiens
gctcagaaaagcagattgccctccacactgtggatagcccatgagttgaaggccttctgagcaatgtttgaggttctctgaagtaattcttctcaaggcagcaatatagaaaccctgactaagtatcagcctgctcctttgcagaatctggactcaaagctgcaatatcaacttttacctgaatttccagcctgccagccttccctatggatttctgacttgccarctcccacaactgtggaagcgaattcctttgaaaaatctctttccatgcaaaagctcctagtggaaggcctgtttttttccaagtagtttcctctcagaaaagagatgcagagttttattggaaatgtagagtaatgtaatacctcatctgactttctaaatgcaggaccatggcgttaattgggattgttgacaaacaggagatgatagataattatgaaaatttaatttaggatttctcaagttttatgtctgaacagaaagctctgtaaatatatatctttcattgtccatagtcagaaaatgttattttatgcctttgggtttagggtttttttgttttgttttgttttttactattttctaataaaaataaaacagtactaagtcaacaaaaagaatctctttcttcttctccctctttgtttcttttctttttctatctcgcta

SEQ ID NO: 499333 - DNA, 492 bp, Homo sapiens
tgctgcaggcgtgggggtgaatgcagttataaaagggcaacaggagtgatcctgggtgatgctgctgtgcagttcccctgaatgaggtagcaaatgcatgaacctacaygtgataaaactgataggactaatcatacacaccaaacaccacacatacatacacctgcaaatacaaacaaaacaggaaatctgaatgagattggtggagtgtatcaatgtcaatttctttaatgtgatatcaattataattttgcaaaatgttaccattgggagaaagtgcgtaaagtgtacacattatctctgtatgttatattttacaactgtatgtaaattgacaatagcctcaataagaatttgaactaataaggaagaatttaaataggtattgatccaaaaaatctgaaagaaaagtctgtgagtggattccttgacaggtcaaaaatggctttgttttctataaacaggaaacacctcctcccccttcccctcccc

SEQ ID NO: 499334 - DNA, 600 bp, Homo sapiens
aaatggtaattttgatgagttgctggacgctgagtttgacatactaagggatataaaatggattcatatacaattctcaaataaaaacataaaaagtgaagcgaaaacagccaacaaacataatgagacctttattaccctaaggatgaaaccaaataaagacatttaaagacgttaaaaagaggaaaaggacagatcgatatctctcataaacataggcaataaaatcctcaacacaattgcagtgaaatgaatccaacaacgtacaaaaagaatgtaaaactatgagtaattgggattattctctgtttcaaaggtttgctcagcattggaraatcaatcctgccatccaccacatcaagaggctacttgtcacatgctcgtatccactcatgcagaagaggcatgtgccagagtctaatgtccgtttatgataaaaactcctagcaagccagaacgagagaggaacatcctcagtttggtcaagaacattgaaaaattaaaccaagtacatacagccagcgtcatacttaacgagtgaaaaaactggaagcttctctcttaagatcaggaacaagacaaatatcctctctcaccact

SEQ ID NO: 499335 - DNA, 543 bp, Homo sapiens
ctgaagagttttctgtggctctgaaaattcttcagtgcaaagacaacctctgctcctcatttgttatcttctaggatgcaagtgaggtttgtttttttttttttctcacctcaattaatttagctcagggattttatattttaattgaagtggcagtttttataaatattcatcaaacattaataaatttccagggtcatmaggcgatgtgtcaagaatgaagaacagggaagagcatccttcctggagcaagctgccactcatgcatatgcataagtagctctaggtcctagtagagcccagcagtctagtgttcatctgtttgttcaataagaatttactgaaagccaataggtatgaggtgtgtggatgggatctgtggatgcagagtgagcaaggcatgtctacctacttacagccatatctttctgcaaatgcacccacctaactgtggtacagttacccctacacctacatcatagctctagctcgctgtcaacatctatgtatcttattagggtggcacaaaataattgcgaattt

SEQ ID NO: 499336 - DNA, 492 bp, Homo sapiens
actgcaacctttttaggcattaggagggagaattacatttaaattttgaatattagatccaaatctttgctacagcttggcttagctgtagcgacttcagcgagaggagattgatgagtgagtgattaatcaggagggctytaaagggaaactggctggctgggaggggctttgcacagagcaaggaccctgcaagcctcccttatgctccagagatgccccttctcctcagttctgggataaagaacagaagtaaggaaggaagacagagcctgccacaccagcttccccaaaagtggcagagctggcaatggtagttgataaggaggcattttaggccactgataaaaatgccactttagttcctgataccacttagcatggagacagtggggcaaactgaggcatcctgtgtgtactatgaaaaacaaactccaaaatagaacacacagttacatctgtgtggaagaaaatacccagcaagagtacaac

SEQ ID NO: 499337 - DNA, 427 bp, Homo sapiens
tcaatatcattttgaccatataaaatatgcatataatgtaataatataatatattaataataaaatataaattaatatatactatgttatatattagtaacaatacattgtatattaatatatactatattgtatattaacaatatgcattatgtatttacatgtaatatatactactaataaaatatattatttatataatatattaataataaaatcattattatacatatatacataataactatttctatcatatatatacatatatgacatatatatgtatgacagctattttattattatggtttaattatattatctgtgtcattccagtgtctgtttctattgattgaaataaaatattttcctcsttacgaactacattttcccatttatttgtatagtaatgaagatgagcatggtt

SEQ ID NO: 499338 - DNA, 427 bp, Homo sapiens
tcaatatcattttgaccatataaaatatgcatataatgtaataatataatatattaataataaaatataaattaatatatactatgttatatattagtaacaatacattgtatattaatatatactatattgtatattaacaatatgcattatgtatttacatgtaatatatactactaataaaatatattatttatataatatattaataataaaatcattattatacatatatacataataactatttctatcatatatatacatatatgacatatatatgtatgacagctattttattattatggtttaattatattatctgtgtcattccagtgtctgtttctattgattgaaataaaatattttcctccttaygaactacattttcccatttatttgtatagtaatgaagatgagcatggtt

SEQ ID NO: 499339 - DNA, 541 bp, Homo sapiens
tgatgctttcctctgaataaaatcagcaggttaatgattttaaatatctgggttaatgtttccatttgaaccattccaggagacaaacatgagaatgactaggtatcaaatgaatataggcactgagaaaaaaaaaatkttgagtgggcattttgctcaggattgggtactacagtagccgatttatttaaagcaaattttttgttattgttgttttattttatttatttatctttcttcaacttttaagttctaggacatgtgcaggacgtgcgggtttgttacaaaggtaaatatgtgccatggtggtttatagcaagtttttaaaatcctccccagctctgacaatcatttgcgtactccacagagattaattggtaaattagttacctaataaagagtaattaataaagattgttgattgactctttgccataatgtatcctgggtcatgcaggggacacaccagtgaacaagagagacacagtgcccattccatggcacaggcacactcctagagctgtgttttcagcctcttctt

SEQ ID NO: 499340 - DNA, 543 bp, Homo sapiens
aaagaaatggacaactgtgcttattgactgcctcccccccgattccctgtaaatcatccctttgcagcttgtgtcccaaataacttataaacaatgtctcctttactcagctctccaaaaacaatccctttgtttaaccacaatttgcaaaaacaatttcttcattgtaaataaatccctagactctacaatatgccctgatccaggaaaacacaggaacatattttataaagctctgtgtatttccaaacaagggacattgtttcaccatagaaactctatttttaaaaatcctattgacagtaaagcatagagagcacgcttctggtgtgaagataaaggcagcccagaagtgagatgccctggggaaggtaaagtggagaagagaactcagaacyatttgctccatctgttcagtccatcacccaagggtctcagagcgtgacttgcagcgctggggccaaatagaaaagggcctgccggagatagctcgagctggttggacagaagcctaaccatcctggagatcaggaagacatagct

SEQ ID NO: 499341 - DNA, 310 bp, Homo sapiens
ctgtgaccattagaacctctccctttttcctccccttaccccatctgttttagtttttgtggggaagtattattctttttatttacaaatggccatagataagattgtaataattgtcagtatcacagtcttgggggatgcacagaataataattttagckatagaatgcatcttagtgattcctaggttgaactcattttaaaattgaggtttaggctgggtgcggtggctcacacctataatcccagctctttgggaggccaaggcaggtggatcacttgaggtcaagagttcaagaccagtctggcc

SEQ ID NO: 499342 - DNA, 519 bp, Homo sapiens
tgtgaccattagaacctctccctttttcctccccttaccccatctgttttagtttttgtggggaagtattattctttttatttacaaatggccatagataagattgtaataattgtcagtatcacagtcttgggggatgcacagaataataattttagcgatagaatgcatcttagtgattcctaggttgaactcattttaaaattgaggtttaggctgggtgcggtggctcacacctataatcccagctctttgggaggccaaggcaggtggatcacttgaggtcaagagttcaagaccagtctggccaatacggcaaaaccctgtctttactaaaaatacaaaaattagccgggtatggtggtgcatgcctgtcattccagctattctggtggatgaggattgagaatcgcttgaaccygagaagtggaggatgcagtaagccgagatcatgccactgcactccagtctggatgacagagtgagactttgtctcagaaaaaaaaaaaaaagataaaa

SEQ ID NO: 499343 - DNA, 657 bp, Homo sapiens
actctggcaagtgttgattgagcagagaacttccctgaccaccccacgagaaaaagctcccaccctccacacagacatacaggcttttgctcttacatcatcgcacttgtcgctgtctgaaatgactacggatttgttttcttgcttaccatgggtctttcttgcttggatgtaagggcagagaccatcaatctccagccctggaatagaatctgacatgtaggaggtactccatttttttaaatgctcgaatctggacttgcccacgaacaaacatcaattatcctcatatggagcattgtgaggggacctgctggttagatggcagagtttagcattcatgccccaggccctggaaagttttgtggagcttctcatttgccaaaaaactgtcatttttacaaatatttttctgatcacggaagaagaacaaaagaggaaatgagaaatagatgtgtggtgcccagatggccactgctctgagcacaagcaagaggctgtcatggcccctagacaggctcagtaagggctggaggggmagcctgttagtcaggaaagctacaaggaggaaagaggtggttctggttttttgatcatgcaccaattatgctttttgcttctagttggtttttatttaattttttttctttagggata

SEQ ID NO: 499344 - DNA, 553 bp, Homo sapiens
ttttgactctgcaaaggaacaggtaagtagctgtaagagaccatgcagcctgaaatggttactacctggaccttttaccaaaacgtttgtgggctcctgcactagggagagataaagagataaaatgctgacaatcatttagtctcagggtagtcattacatatttactcacaaactgaagtaaaaattgggttcatcctaaacagccaacagtaggggaatggctggggaaatgtggttaacaaatggtagaatagtatgcagccgtcgaaagtcacattcatgaatgcttttaatagcatagcgaaggacaaaattkatttaagagaaaaatgaagaatacaaaatacattaccaatcaatttcaactgaacaaaaatctttttttcaaaggaaaaggtaccaaatggaaatggtatataccatttagctttagcaattgagaagtgggaatttgggtgatatttatttttctcattgtgcttttgggggaagatttttagccatttctacaacaaatgttacttttatgagaagaaaatgattattttga

SEQ ID NO: 499345 - DNA, 557 bp, Homo sapiens
gttgaaagacggaacatgccatttctagatcaacattcaaggtaggctctgataagcccaaagaaaaaaaatggaagatcatgaccttggttttaaactctagatttctattaacactgcttcagatcatgttacccttaattyagctacaacacacccctgactcatactgagtccactgagaccccaaacaagacaaccctcatcctatatttgtgggttcagttctgaacctaagagcagaattttatctacatctccaaaggcaaaatgtgtttctctcttaggggcccagcctgagctgtgatgactagttgtcttcaagagtacacagcaacataagctcctgggagcaggaccttggcaagatggttttctactgtgttgccagcactggagaatggggcatgttacacagcagacgctcagtgaatattttctaaatgaatgagtgagccccatcacactttattttattagatttggtccattatttaagttgcttaggattcttggggatcttgagcctatcgtcaactgtaacaggaatcttgcaa

SEQ ID NO: 499346 - DNA, 557 bp, Homo sapiens
gttgaaagacggaacatgccatttctagatcaacattcaaggtaggctctgataagcccaaagaaaaaaaatggaagatcatgaccttggttttaaactctagatttctattaacactgcttcagatcatgttacccttaattcagctacaacacacccctgactcatactgagtccactgagaccccaaacaagacaaccctcatcctatatttgtgggttcagttctgaacctaagagyagaattttatctacatctccaaaggcaaaatgtgtttctctcttaggggcccagcctgagctgtgatgactagttgtcttcaagagtacacagcaacataagctcctgggagcaggaccttggcaagatggttttctactgtgttgccagcactggagaatggggcatgttacacagcagacgctcagtgaatattttctaaatgaatgagtgagccccatcacactttattttattagatttggtccattatttaagttgcttaggattcttggggatcttgagcctatcgtcaactgtaacaggaatcttgcaa

SEQ ID NO: 499347 - DNA, 615 bp, Homo sapiens
tggatttgcctaggaataaaccacagaatgctaaagtggcacttgctgtcaaatgttcagaccacagaatcaaaggaggaagaaagagtcgatggaaaatatgaagcagaaggaggccccatttcaaccctggaagcagtggctatgagtgmtaagagctggcatcaatacaagacctgcttcccccaggaagccctctcagatccctccacatctcacagatctcccccttggcaaacctcccttagcatttatctcctgcaataattattttcacccttaacagcaaactgctttgaccagtgagctaagtctcagctactgcctagagtgttaagttgctagtgctgctatggataatgttttgattccttatataactgagagcacctgagcacatatagtttaactacataatatttatcaaaagaatgaaaagtgggaaaatggccactttcttcctttgataaatccaaagtgggcattttctaaaggtggtgtgccctctgcacaagacagacacacctcctacccttctggcttttagttgactgcttttaaaatgccatcaattttaaatggagcttttctttctgatgactgcagaagtgattg

SEQ ID NO: 499348 - DNA, 517 bp, Homo sapiens
ctgttactgaagtccacaaaacaggaaggaaaaagccactgtaattcaattccggaaacccccatggttgtaccttgtaaatattcaataaatgattatttttkatgatctttgaagaatacaatgctaccatgtacaagtaaagattttttttttcaaattgttcacttgttataaagaggaaatgggccaggtgcagtggctcacatctgtaatcccagcactttggtaggccgaggtgggtggatcacgaggacaggagatagagaccatcctggccaacatggtgaaaccccatctctactaaaaatacaaatattagctgggtgtggtggcgcgcacctgtagtctcagctactcgggaggctgaggcagaagaattgcttgaactggggaggcggaggttgcagtgagccaagattgcaccattgcactccagcctggcgacagagcaagactccatctaaaaaaaaaaaaaaagacatgaattatttcagtgggaagagaattatggtcc

SEQ ID NO: 499349 - DNA, 517 bp, Homo sapiens
ctgttactgaagtccacaaaacaggaaggaaaaagccactgtaattcaattccggaaacccccatggttgtaccttgtaaatattcaataaatgattattttttatgatctttgaagaatacaatgctaccatgtacaagtaaagattttttttttcaaattgttcacttgttataaagaggaaatgrgccaggtgcagtggctcacatctgtaatcccagcactttggtaggccgaggtgggtggatcacgaggacaggagatagagaccatcctggccaacatggtgaaaccccatctctactaaaaatacaaatattagctgggtgtggtggcgcgcacctgtagtctcagctactcgggaggctgaggcagaagaattgcttgaactggggaggcggaggttgcagtgagccaagattgcaccattgcactccagcctggcgacagagcaagactccatctaaaaaaaaaaaaaaagacatgaattatttcagtgggaagagaattatggtcc

SEQ ID NO: 499350 - DNA, 655 bp, Homo sapiens
ctggccatggggcaagggtcactaggtagagtgtcaggggctagggccagcagaccctgtatactgagagcccctgcctgagggtcagtgaccactggcccaaaaagaaactgccttctctggggaactgttttttttttttttctttcaagtggtttggttaggtttttttttttttttcttgttctgtgattkggatgaatttgaaaatagaagagttatacttcaactgccccaaactcctactagtggaggatggaggagaccccaaggatgtcttcttccttgtgcacttatttgttaaggacttgataaaatgatttccattcataggcacagctcttactttcatctgggctttatgcttctctcacacaaatctccttcagaatgtcttgcatttgctgtttgaatcattgtagaactgtcctgggaggaatacaagctactttagaagtttgccttgaaagtttgtcttcaaagctaaccagaaatggtttccatgagtagaaagcagacatacagagagaaaggacaggagggtggttctgtgccatttcacgaatatatggtgcctcttcccaggccacaggagcatctaggaaacattgaaactggttctgaccatgtgaggctcttgcttttcccactgcac

SEQ ID NO: 499351 - DNA, 595 bp, Homo sapiens
ttagacactaatggattttttaaagtattcagtatgtttcaaaccattgaaacctttattctttttgatacaaaaattgtctcaacttctgagggataaattttaaaatggttcctgtggttttactgtgattttgaaaaatttcttaattttctmttttcacaacaggttttaggctcatcttgttcatatcctgcctcagatgcggaatcagccaactccctgagcacccctacttcatttagtgagtaacacagattttgatatgaggtatttttttcatgtattatagccattttttatcctagcaatgttttctttgaattatggcatctttaaaagtgaaattttaaatttctgtatgtctgaggatattccaattttctttttattatatttttctaacctaattttattgtaattaagaagtatgctctatatgaggatttagttaactatgttaactatggcctgctgagcaagtccagccctcttttaataaggcattactggtgcagagccaggctcattattattttttttatattgtctatgtctgtgttcacactacaatggcagagactgttgcagtctt

SEQ ID NO: 499352 - DNA, 346 bp, Homo sapiens
gtttgcaggcagctccacagtaacatccaattttcctgaatgattatattgccagattcatgccaccctttatcttttgactgatttcttaccctaaaggtggctcccgggccaaattcacagagctacttaggggaaagggaagcacccttagtgacaaggtcaggatattctttccactggcgtgtgtgtcccttagaaagctcctggtctggggctcygggcctttgcccaccatgacaaggactttccttccatgaacaggaaagaggctctgagaccatcctttgatgggacatggagaagcatacctgtaaggttgtatcttggttcactgtaagataaa

SEQ ID NO: 499353 - DNA, 503 bp, Homo sapiens
ccctccaccctcaccctcggacatgcccattccagcaggacaggccrggaactgcaagtcctgtgacatggccaacgtccatcgacagcgaccgtgggagcctggcctatggctctggcctcctgacttcctgctgtcctcgaggaattatctaaacaccacctggccctctgttccatgcagtttccctaaatcattacaaagtttaggcatgtccagtgacaatggcgcccagggccttgccaaactgaacctgagatggacacaaggtggccagaagccaaagtggaggaagttctccaattcctttttttttcttttcctcttttttctttttctttttctttctttctttctttttctttttcatttttttttttatagagataaggtcttgctctgtctcctaggctggagtgcagtaatataataatggttcactgcagcctccacttcctgggctcaactgatcctcctgcctcagcctcccaagtagctaggac

SEQ ID NO: 499354 - DNA, 503 bp, Homo sapiens
ccctccaccctcaccctcggacatgcccattccagcaggacaggccaggaactgcaagtcctgtgacatggccaacgtccatcgacagcgaccgtgggagcctggcctatggctctggcctcctgacttcctgctgtcctcsaggaattatctaaacaccacctggccctctgttccatgcagtttccctaaatcattacaaagtttaggcatgtccagtgacaatggcgcccagggccttgccaaactgaacctgagatggacacaaggtggccagaagccaaagtggaggaagttctccaattcctttttttttcttttcctcttttttctttttctttttctttctttctttctttttctttttcatttttttttttatagagataaggtcttgctctgtctcctaggctggagtgcagtaatataataatggttcactgcagcctccacttcctgggctcaactgatcctcctgcctcagcctcccaagtagctaggac

SEQ ID NO: 499355 - DNA, 503 bp, Homo sapiens
ccctccaccctcaccctcggacatgcccattccagcaggacaggccaggaactgcaagtcctgtgacatggccaacgtccatcgacagcgaccgtgggagcctggcctatggctctggcctcctgacttcctgctgtcctcgaggaattatctaaacaccacctggccctctgttccatgcagtttccctaaatcattacaaagtttaggcatgtccagtgacaatggcgcycagggccttgccaaactgaacctgagatggacacaaggtggccagaagccaaagtggaggaagttctccaattcctttttttttcttttcctcttttttctttttctttttctttctttctttctttttctttttcatttttttttttatagagataaggtcttgctctgtctcctaggctggagtgcagtaatataataatggttcactgcagcctccacttcctgggctcaactgatcctcctgcctcagcctcccaagtagctaggac

SEQ ID NO: 499356 - DNA, 643 bp, Homo sapiens
ctcatttgcaagaaatacaaaagactacaacaatgtgttgaactgcactgcaaatgtgcatcagcaaattccagacagtgggaaactataggtcaaatgctacaggtcttcaatagataaaatgaaagaaaaagaaagggatggagaaggattctgtatattaagagatttaaaagataaataatttttagtaggcraaactaaactacagtgcctagaaatgtacactgatgtgataaaactacaaagtaacataaggaagtgatcactgtaaaaagtcaggataaggacttctgcttctgattaggatgcaatacagggaccagattaccttcctgctcaaaagaactaaaatactagaccaaatacatggaaagaaacaaatctctgttttcacacattggatatctggcttcaaataatagtgatccctgagagaggggtaaaattgccccagcttactccctggagagaatattcaggccagaacacagagaagggggacccaacagtctccttgagttgagaaggcaaagctgggagttcatggaagtcatgtggctagggtccaccaagcaaagtactggtgaggagagaggtgcccagagagagctccagagatgtgcatgcgacaccccttgtg

SEQ ID NO: 499357 - DNA, 585 bp, Homo sapiens
tgttagccaccacacaggcagccacaatgttaaatagtcactgctgtttgtttstgacaaattctcctggagaagaggctgtttacactgggctaaccctgatctgggtcaaataagataagtcttgtgaatacggtcttccagggaatgaccagacaggttaagtaatgataattctctggaagcatggccttgaatgagctccaagctggttctgcctcccacataaccaccttccttcctgcaccccacttcctgcctaaccccagggcgtctggctgccaggctgctggtttcatattttcaaggctactgctgagctgaggagggtcatggaaaaggcaagttaaaactccacaaaactccctgttcttaccaagtttcagccagttttcttgaataaatgctcctggattgctgtaagcctttcattaattttagagttctgaaaaagtcgattctgacaatttttgccattgttttagttgattttatggaggagagaatgttcagaactccttactcctccatttgtactgatgtcaccctgaatacctttaaaatttagcacatggtatctcctct

SEQ ID NO: 499358 - DNA, 585 bp, Homo sapiens
tgttagccaccacacaggcagccacaatgttaaatagtcactgctgtttgtttctgacaaattctcctggagaagaggctgtttacactgggctaaccctgatctgggtcaaataagataagtcttgtgaatacggtcttccagggaatgaccagacaggttaagtaatgataattctctggaagcatggccttgaatgagctccaagctggttctgcctcccacataaccaccttccttcctgcaccccacttcctgccyaaccccagggcgtctggctgccaggctgctggtttcatattttcaaggctactgctgagctgaggagggtcatggaaaaggcaagttaaaactccacaaaactccctgttcttaccaagtttcagccagttttcttgaataaatgctcctggattgctgtaagcctttcattaattttagagttctgaaaaagtcgattctgacaatttttgccattgttttagttgattttatggaggagagaatgttcagaactccttactcctccatttgtactgatgtcaccctgaatacctttaaaatttagcacatggtatctcctct

SEQ ID NO: 499359 - DNA, 540 bp, Homo sapiens
tgctgctcattgagattaggaaccgttggcttgaaaccagctagtgctgaacagcgggacttcctgctctgctccaaagtgtttatttcattccacagtggctgccgaaatgcagcctctaggaatcctgctttaaatgtgcccctggagaccctgggctattaagggttattgctattggtcctctgtctaggaaatgattccagttctacgttatacatctttgagttggcttaaagcactgcatatgttactacaaagtgttgcagtgatgtatatgtttgttttggtaacccatatagtcatttttcaggaaaattatgttggggacattatggcacataacccaaggaagcaaatgttcacccatcagattttttctttttagaataaacccttagagtaactctcacgtgtacatgtttctattttccaaacagaatgagtgtccagataacctttagctcacaccgatayacccttaaaatggttatatctgtgaatgattcaattaaattaatagcccccaatgcctcttgt

SEQ ID NO: 499360 - DNA, 668 bp, Homo sapiens
tgttaagaggctgttgtcacagtccaagtgaaagttgatgtggcctggcttaagggaaataggagactcattcaaaacacctttacaaattagaacagacaagacgaggtgactgatgcgtctctcaaatatgtgttatgttcctgctgtgttcaagaaaacataggtatgtgagagagatgagaggttcagagatggaggagacatgtccctgcccttacagtgaggacatgcattcgttatcacgtttactgagtgcccrctccgtcatgcgcgcaggtaaacacaaggttcaaagcagcaagtgcacagggagcaggaatgtgaagtgctgtgaaaatttaggtgcaggaaggaccttggaatatggggtgtgtgatactcacgggaggctgctccaggcaggggaacattgtgagcagaggcacaatgatgtcaaagcctaaggaactgtggcttggggggtgtggggcagagggttagagggggacagagagagagaacatagcaaggacagccaggggtggactgtagtgagcctcaaacaccagcctaaagagcagcggtgaagagggccagtcgcaggggtcacaaagccttccgagcaggacagaggcatggtctgagctgtgttttacaaagacaaatctcataccatgctcaggaca

SEQ ID NO: 499361 - DNA, 655 bp, Homo sapiens
atcccagctatttgggagactgaggcaggagaattgcttgaacccaggaggcagagagaggctgcagtgagctgagatcacaccactgcactccagcctgggcgacagagggagactccatctcaaaaaataaaaaataaaaataaaaaaaattggccgggcrcggtggctcacgcctgtaatcccagcactttgggaggctgaggcgggcagatcacaaggtcaggagatcaagaccatcctggctaacacggtgaaaccccatctctactaaaaatacaaaaaattagccgggtgtggtggtggatgcctgtagtcccagctactcgggaggctgaggcaggagaatggcatgaacccgggaggcggagcttgcagtaagccgagatcgcgccactgcactccagcctgggcaacagaacgagactctgtctcaaaaacaaacaaaaaaattgattatgtggaggcacccaggcataaaggtaggtcagcagggaaggtattttgctcctcaaattggggtggcagagagctggggtaccttgaattcaatcattcctaccatgttcaagctgcgtcacagaagcgtgggacatgaacactgtttacaacccatttctaacaagctcagagcctgctgaaagagttaccaagg

SEQ ID NO: 499362 - DNA, 554 bp, Homo sapiens
tgagaagttgaaattctcccataggtacacagttcttctggcatcccgcaccatctttgcctgtgctgagtggtgtgtggtctggccttcaagggagccgtttccagcagtacatgtgaggagaggacctgtctcttggctgctaggaagcactccagccagacaacagccctctccagctactcagtgcctcccacattggacaactgggaaagcacacagggaacagtgggggttgttgagctcagcgagtgtttcctatagtgcataattaaagaaaacacctgtgtagctgctaaatcacttcccgctgttcccctgtgcaaatgctgtgctcaataaccttacaagtgcctcattccttctacccaaccgaggcagtgcacagagccacaatgcataaagctggcaagttattagttcagggccccttaaaagatctcttargattgatttgttactagtccatggggtcccttggttagtctggtggcattttgctagactgcagcttcagggaggctcagggatgggtagtgggcctactttctcca

SEQ ID NO: 499363 - DNA, 556 bp, Homo sapiens
cccacatggagtatgagcacagttctgtccctagctgtcttctaaaccttaggcaaatgacttcaccattttctgcctccatctctgggtataaaatgagaagatagaatcataattggctttgctcatgggattggtatgaggcccaaatgagataataattatgaaattactttgaaagaataaaggtattattagtacaaaaaagggatgggttcatattagtacaaatatatcttcccaataatatgagtgaactctgttacctgaattttctacaacaaccatacataagaagcaaatggaggccagagcccagtttgtcaggagggctacccactaaccctaggaaggtgagggagaaggagagatacatagctgaagtagtgaagactgtaagaagtgtcmagcatcctttcattgttctgtgttggaacaggagattgtaaaagcttgcaagttacttgcacaagataggggaactagttgcacccagaaacgaaaagataagacaattatacttggtaatagggcaaagcatggagactctccagac

SEQ ID NO: 499364 - DNA, 571 bp, Homo sapiens
gtgcctaaaatgcatgttggcagaatgtagtcacattcccagattttaggaagccaggaatccaggaaggagtcttcctctttctgtatagcaacttaagcttatttgaaggtggttgttcactccctcctggagtgcccttagctgcagacaaagagagtgggattcgtgatgatcatttggcatcatgtccctgacagatagcctacaatgttaccagaagctgatgaggcttattttggttttgtttcgttttgtggaaaaccagaagggatctcagtgttgctgcctgcaggataagtaaagatawcctactatgtattttattggcaatcctgatagcattttctccattggtggtttatgtgtaatagagaccaaactgcaattttctgacctgccaagatccattatgtctggtaaatatagtttatgcttgacagaatacacacttagggtggaaagccatgcaaattaaactaaggtttaggctaatttttggtagtgaaaattattctcccttggtgaccttattcagcatgaaataaaacaaccagaaagctattcatgc

SEQ ID NO: 499365 - DNA, 649 bp, Homo sapiens
tggttctcctctgtagtttgtttagcagacaattgtagtcattgcccctcagcccatacaacatgggggatctggatggaaatgaaacgcagacttggctcatcagagggcagcttggcttcacttgtatgccacaaacattgtcacctcataacactgacartagtcactgatgagcacatttgaacccattcccaaaagtgcattgcctccacaccacatgaattagagccatttgtgttattttgcttatgtgttctttttcttttctctgttgtgtattcagattcccatattagttttccttaatctaagacttacattagatgactctagccagactgtcaaattatttgagaactctctttgtagctctaaatctagggtagtacctggtagtcaataattatttatcaaatgaatggatatttttcaacacttactggcaatcaagaaataattgtatttctaaaacagtgtgaaaacacgatgaattgaattgaattggcgagaatagaatataaactgcataactgtaagagatagtactatacaatagtgctgatgacattttgttttgctttattttattttatttattttctggggctgcctgatacaaaaagttccttgtgaaaagagaagattg

SEQ ID NO: 499366 - DNA, 664 bp, Homo sapiens
aggcagttggagatacccgttgagcctctatgttctaaagacaaatgttccagcctctcatggtcttttggtggcacaaaatgtttcctcctgaagaggtgaaaaggtgaccacagtggtccttctcactttgctctgcctctgtggctgtcatgggagtagagttggctatgacatctgccctgcattgatacacaaggctgattcagggtgggttgtcaggtgtcctttcattcatcatgaccctgagtatgtcccttctgaaaggaggcatacatggtgaaaaaaggggccttccctggagcagatttgtgaagcaaaacatgaaaccttattattggtccatagaatgagcccgagaggcccttgagatggtctttgatcctactcatattttaaggtagaaaaacttcaaagttttaaaaaaactcagaaaggctggaataattgttccagatctcagtacagttgagctacagttcactcagtcatctttcccacttcagaatctgcccattcgtgcaacctttgatccctccatccacccacaaacatttgttgaatgcccataaataagatccagtccatgcctcaaaaagytcatatgcacaggaaggatgggaatgtagggctgtggactaggtgttacgcagagatgtggcag

SEQ ID NO: 499367 - DNA, 624 bp, Homo sapiens
aatatgtcggaaacaaggtatattttcccccatctctgtgtgttttctcctctcgtattaggctaccttaggagtgtyggcagtatcattcagaagatactgaggctccaggatttttattagcctggcattgttaattgctgctcccttgcaaacctcttcctataaatgctgagaacacactggagccccttccagaggagttcaagaatcttttcaaggggaaagaaagctaacagtaaaagcatcttttgttggcagaggggcttctgaagtctttaaatctttgttcataagtaattgactaagatctaacagccttgaaggaaaggagctgatggtatcactttttagtcatagtattaaccttgtgatttatggtacaaaattagccactgcatcctctcattacgggtgctgagtgatttctccaggcaggcaggagggaattgagagctggatttttgtctcctggagctctactgtttcctcctagggaaccacagtgagtgtttttagggataggaatattgttttccttccattttctctgctctgtaaaagaaaatatcaaatgtaagtaaataaataacctaagggagctagaatgttcagaggaaatgt

SEQ ID NO: 499368 - DNA, 572 bp, Homo sapiens
gacaagatgctggctttggagcaggcactacaggttcctatgcggagagcatcggtgctcagggaagggaaatccacccctgtgctcttcacacccagacagatgctcacagkttccagggatatacagggacatttctaaatctgtcttggacgtccattcactttatctttagccatggaatgctgacaagtattcagtacggttgagtgaccttctataggtcagagcaggctgtgttctgattgagtttagaaaactcataactctggccaagccttcaattggtcaggtggatggggctttgttaggggagactgcagccagagccagtgtcgcccaccttccttctccctccacctacctgagctgccagtcccttcccactcctcaaacaggacttctctggtttgtgaacacattttctcctcttggtgtgcagagcttttggttccagccctgtcagatagtgatggcacagacccagtggtcttttaatcatagcaatgggctcattgctttgaacttgcatagtctaaaaaaataaataaataaaacaggaccagcaagaa

SEQ ID NO: 499369 - DNA, 466 bp, Homo sapiens
gctgtttttcttcaagttagagaattttagagccacaaaggaaactggagattatctttayagatgaagaatctgatgtccaaagaaattttccaaggttaaagagatatctgttgccagagccaagataagagcacagcttcttccaacaccttaattttattgttttgttttgattgttttcctttcagttagccccctaggaaatgtttattgaggacctactgtgctcaaagttctgggcaggcttctctgggtaaatcctgaattcaggtgtgtacatctggtgaggaaaacagtaaacaagagtaaaataagacagtcaggcaagagaagacaatgcccagaatccagtgacattcacaccaaggcttaaagtgcaacagaaaatgtgacagcagaggaaccaggaaaacctttccggaaggagccctgggaagagcagaatgggtgcattcaccacctc

SEQ ID NO: 499370 - DNA, 584 bp, Homo sapiens
atcagctgtaatggtgaagataaatattctagacttaatatgccaggagggatgtgcgtgcctcatatgctctatggacatgttacagtaagggaaataggaggtgtccccctcaacctggaactcctctaacaagccagatagaaatgcatcattttttaggccatttcacttggatcgaagcttgttttctttcacactcctagtgctttcaaaaaaaaaaaaaacttggctgtttaattaaaaaaaatttggcctgttttgtatatatttgcagtctgagcacccatagaggggagtcacccctctcctccagacaagggtgggttgttgaattttatgtgaaatcttgacattgcaataaatctctgaacctgaaccagcctgcaytggatatttaatactgttttcatttccaatactaatcaatcctggaagaatgtgctgttattttttagttacatgtaaacatttagatgaatataaaatggcttattgatagcttacatgcaggcaagtttattgatacttttgtcaaattctgtttgattgattgatttggccatcgtactgctatggatatg

SEQ ID NO: 499371 - DNA, 315 bp, Homo sapiens
ttataccaacctatcctcccacaagcagttaacagaggtgtttctttcagtggagctttgtcaattatgatgaygatcatgttttaaactagtactgacagtgaaaaactgcctttttgtaattgtcttaacttgtgttattttaattactttgacattgaaggattttttttttcatgtttaggggcatttagatttcttctcttgtaaattgtttactgatgtcttcgtccatttttccattgaggtatttatacatcttcaaggagaaatggagggtgcaaggttgtgtccccttaacctacctcatttaat

SEQ ID NO: 499372 - DNA, 679 bp, Homo sapiens
atgtcaactgtcctccttgttttttgattccatagtttatgattcatgacacttcaatacatttttatttagatttttaacaaatgaacaatggtgaattgctgtactgtgaaaaatcctagtggaatgactcatattatcttctctacttcgccaaaactgtcttctaaattgtgatttttcaatgcatatgtggaaaaacataaataatgattataataaatcctgtaatccctttcaggagattttcaccatatcttaatagtctatcaatatattttaaatacttagtgtatcgagccattgagtacttcgaagatggtcactttcaccaaatttcttttatgtttttattttgtttgaatttttatatggatgttcggtttagatgctcccctttcctgaatctcgaaaataaaaataagtgcattgtgcgttgggtgagatgggagcagggaacaatatgatggaaacattatacatacagccaggtaatctaaagtgcagtttggatgatgctccaagtgaaagtctttgaattccagttcaaatgcgctgccgtggctagatttcaaccaccagtagcattcagagctgtggtaatagggcatcgggtagttgggagatatgaacgtrccgcttgaagtggtgagattacccccgcaacctacaggagaaa

SEQ ID NO: 499373 - DNA, 384 bp, Homo sapiens
ctctcgccgaaggccctgtggtcctagcgaactttcgccctttttaaagaacaaacttagattyccccccaccaagcttaaagaaatagcgccatttgtccttttcccctctaaatgcggctggccagagccggggcagtggcccaccttagcatcttcttcgtgtgtgtgtgtgtgtgtgcgcgtgtgtgtgtgtgtgtttgtgtgttgggggggtcgctagaagtgcttaaaatatataccaaaactattattttaaagactaatcacaccctcaaatttcatatgtgtcacctcccaaattacgcgatagcaaaccgttgtgcaggggtacaatgtaaaccataaaggaaggccggtttacatttttgcgcaccaggaaga

SEQ ID NO: 499374 - DNA, 621 bp, Homo sapiens
gtaaaaaaaatcctgtgtgacacaccaaacatcaggttcyacttgtaatttacaacctgttctattttccagagatttgtatcagtcaactattgccacagaatgctgcaaaacatgccactccaaaactcagtgacataaaaaaataaacctttattctggatcatgtatctgctggtctgctggggcagatagttgttgcatgtattatagatgccctgttccacctcgcagagatgtgttcacagagttcaaaagagttctttcaactgactcttggttcttgggagactctttcatggaggccacaactcagcatggtcagggcgtgtgatgagtgcctgattctttaaaggcgctggcattctaggtaggccttggataagttgaggaatttgtcttctgaaatgagggaaagtctactaaatggttcatctagtttcctccatgaagaataattccaaaagccagtcaacttctctagctcttctcaacagtggaagacagataggtctgaaacggttgcaattctcacaagtcagccttcctctgaatttcccacatggaaaactacatggcagggaactatcaggcaaggctgcagatgcctctaagctccag

SEQ ID NO: 499375 - DNA, 601 bp, Homo sapiens
gtaagaggatgtgtgcaggttatatgcaaatcctagggcatttctatcagggacttgagcatccacagattttggcatccaaagagagggggtcctggaaccaatcccctatggataccgagggatgattgtactcttttcagatgtggccaggaaaaataatggaaaaggaaggctgtgccagagacagagctaggacatggagaacagtggattggggcattgctccaaagaacaatccctgccccagtggggaaactggtcaatactctcatagcaggatttcagaattcctatggcccagtaatcactatctatcttctcagtcttccccttttaaaagaagggcatttgctgctattcctcaaccctgtttcacccttgtatgttgggaatataggctgacagatwccttgtctttttagtttatgaatatctcaatcaagaagagccacatctcagtgacgagcacaagattctgaactttgagccccatgccatgactggttaaggcttgtggtgtgtcttgaggggcaggggaagtacatcacatataggagcaaagtgaataattataatcttttttttttttttgaggcag

SEQ ID NO: 499376 - DNA, 386 bp, Homo sapiens
tcccaggaatcctggacgaaacttcagaaaccttctcaaaatagccttgtaggtgactacctcctataaattggaatttgcataagatattaaatctatttgccatacctgacctacgttaagtctttatttttaagatgagaaaatcaagacacagagaggggaagtaactcatctgagatcacacagcaagccagagacaggtctagaactccaggctcagggsccaaagtgtgttactcattacagctcctcataaaggaagtggtcctgcaagcaccatgtggcagcacagttaatttactttgtttttgaccaaatggatttaaatcctggaaacagctccctcaggctctcccttccaaaatgccccttcctctgcacca

SEQ ID NO: 499377 - DNA, 591 bp, Homo sapiens
gcaatagattattttaaaccagcaataagtctgtgatgcagtactaatgccttcatasatatcaaacacaaatctcagaaagaagaggccaagactaacttctggtctaggtctcttccacttttcatcatgctgcttctatctgagaccattaccgtgacatttgatgggggatacacaattccttctgctccaacacccaggtcttctacacatgcacacacacaaacacaaacacataggtacacacacacacacacgcacatacacacacacacagacaaagagaacggaaggtctcattaaaacagcgtatactatctgctccccgattacaaaggaatgcagatagcctatttggatatttcagtactccagtaacccccttttcctcttcttctttggttctctggggtttttttaaattagtaaggtaattaattcaacaattattttagaatatttctataaaaccaatactgcacttgatgctagagatacaatggtaaacgaaacagacataacattggccctggggatgcttatcatcttatggaggtaatttgcctattgcccctccataaaaaccac

SEQ ID NO: 499378 - DNA, 591 bp, Homo sapiens
gcaatagattattttaaaccagcaataagtctgtgatgcagtactaatgccttcatacatatcaaacacaaatctcagaaagaagaggccaagactaacttctggtctaggtctcttccacttttcatcatgctgcttctatctgagaccattaccgtgacatttgatgggggatacacaattccttctgctccaacacccaggtcttctacacatgcacacacacaaacacaaacacataggtacacacacacacacacgcacatacacacacacacagacaaagagaacggaaggtctcattaaaacagcgtatactatctgctccccgattacaaaggaatgcagatagcctatttggatatttcagtactccagtaacccccttttcctcttcttctttggttctctggggtttttttaaattagtaaggtaattaattcaacaattmttttagaatatttctataaaaccaatactgcacttgatgctagagatacaatggtaaacgaaacagacataacattggccctggggatgcttatcatcttatggaggtaatttgcctattgcccctccataaaaaccac

SEQ ID NO: 499379 - DNA, 418 bp, Homo sapiens
agggcagccacattcaggtgggcagcattttaggaaggacaaactccaaaacccaggctccaaaggatccacgggaaggtcgagaggctcaggggagtgtcctggtggctgggccagcgctttgaggcccctggggaaccagcagagagggcctgcgtgaggcatctggaggctctgagcacctctggaatcccagcgacctgcagaggttgcccgtctctgtgggggcagcagcgcctgaagggaggtggccatagcagcccacaggggcccagggctgacsagctctgccttgggtgccaaggctgggcagggcctgtgcccttgggagtcctgtttcagacccacctcaaccacatggccctgccctcatcttatttgcctggacagcaaggcctgcagaaactgatttgctcat

SEQ ID NO: 499380 - DNA, 440 bp, Homo sapiens
tttaggaaggacaaactccaaaacccaggctccaaaggatccacgggaaggtcgagaggctcaggggagtgtcctggtggctgggccagcgctttgaggcccctggggaaccagcagagagggcctgcgtgaggcatctggaggctctgagcacctctggaatcccagcgacctgcagaggttgcccgtctctgtgggggcagcagcgcctgaagggaggtggccatagcagcccacaggggcccagggctgacgagctctgccttgggtgccaaggctgggcagggcctgtgcccttgggagtcctgtttcagacccacctcaaccacatggccctgccctcatcttatttgcctggacagcaaggcctgcagaaactgatttgctcatccaatttggggawcctgagctccctgctgggcaagcctgatggtttcaca

SEQ ID NO: 499381 - DNA, 519 bp, Homo sapiens
atgagaaccgagtgaaagggatttcctctttataaaaccatcagatctcgtgagacttattcactatcatgagaacagcacgggaaagacccacccccakgattcaattatctcccactgagtccctcccatgacacatgggaattgtgggagctacaattcaagatgcaatttgggtgggaacacagccaaaccacatcactgactattcctgtaaagtcctgcatgatttcaagctcctctgccaggaaaattctttatttttgttgttcttttcaactgaggtacaatttacacacattaaaatgcatgaatcttaagtgtactgcttgatagggttgcatcttggtaagcattcagagaaccaccatccagaacaaagaacagaatacgtccatcatccacaaagctctcttatgtcccttcccagataatgcctacctccacctgaggtcaccattactctgactttaatctctgtggattcattctgcctgtttttaaccttaatttaaatgg

SEQ ID NO: 499382 - DNA, 621 bp, Homo sapiens
accaaaagtggatccttgccaccagtgttgtagtaacagtaatgcatttggacatgatagtcatgaaaaccatgatggaaaggctttcaaggacacagagcgaacacaggagtcagccctgctccacatagaattaaagcatctgaagtcagctgtgagacaaatggagaaggtggcccttgartactgctcctttcccccaccgctgacagtctttgctgtccccacctccccttcctgatttcccagtctcccacataggagcaaggggctttccatggacccagccttaaagacataataaggcatccttgattcttcctttaccttcctataacaccctgttcgtcagaaattccttttgactccacttgtagatataacttgagtgcctcccatttcttcttctctggcccagctcaagccaccggtggctctcttatagatttctgtaggaacctcccctgcatggtctccctgcctccaatctggcctcttgcaatgcattctcccacagcaggcagactggcttttatatattccagatagaagttctttgtctgatcggtggtttgcagatattttctcccagtctgaagcttatcttttcaaccagggtct

SEQ ID NO: 499383 - DNA, 621 bp, Homo sapiens
accaaaagtggatccttgccaccagtgttgtagtaacagtaatgcatttggacatgatagtcatgaaaaccatgatggaaaggctttcaaggacacagagcgaacacaggagtcagccctgctccacatagaattaaagcatctgaagtcagctgtgagacaaatggagaaggtggcccttgaatactgctcctttcccccaccgctgacagtctttgctgtccccacctccccttcctgatttcccagtctcccacrtaggagcaaggggctttccatggacccagccttaaagacataataaggcatccttgattcttcctttaccttcctataacaccctgttcgtcagaaattccttttgactccacttgtagatataacttgagtgcctcccatttcttcttctctggcccagctcaagccaccggtggctctcttatagatttctgtaggaacctcccctgcatggtctccctgcctccaatctggcctcttgcaatgcattctcccacagcaggcagactggcttttatatattccagatagaagttctttgtctgatcggtggtttgcagatattttctcccagtctgaagcttatcttttcaaccagggtct

SEQ ID NO: 499384 - DNA, 309 bp, Homo sapiens
tggcccttgaatactgctcctttcccccaccgctgacagtctttgctgtccccacctccccttcctgatttcccagtctcccacataggagcaaggggctttccatggacccagccttaaagacataataaggcatccttgattcttcctttaccttcctataacaccctgttcgtcagaaattccttttgactccacttgtagatataacttgagtgcctcccatttcttcttctctggcccagctcaagccaccgstggctctcttatagatttctgtaggaacctcccctgcatggtctccctgcc

SEQ ID NO: 499385 - DNA, 274 bp, Homo sapiens
ttttttaatagtaatctttttgtgaatcacagatgtgggttctagtcacatgtgattttgaaagtggtacttgagtcatcaatattctcacttatgaaatgaaatggtcaaatggtccaatggtcaaayggttgctgaaagtcctttcaaattactgttctatgagaaattccaaattgcaggggccagagagaatgatgactccaacatagcacagaccttcaggaagatggcaagaccaggggaggcagaagattttgctactaaagcaagt

SEQ ID NO: 499386 - DNA, 630 bp, Homo sapiens
aactccattttatagatgaagacactgaggcttagagaggttacataatcttcccaagtcatggctggaatgtggctgaaccaggattcaaattcaggtctaccttcaccttgctgttgagccaatgcccttactcctaaccactaatgcctatatttttcatccactttccttcccaacaattttttaatagtaatctttttgtgaatcacagatgtgggttctagtcacatgtgattttgaaagtggtacttgagtcatcaatattctcacttatgaaatgaaatggtcaaatggtccaatggtcaaacggttgctgaaagtcctttcaaattactgttctatgagaaattccaaattgcaggggccagagagaatgatgactccaacatagcacagaccttcaggaagatggcaagaccaggsgaggcagaagattttgctactaaagcaagtgcattcaaactaccacataggatcccttgaactggaatctgcgtcggctgcttcagagaccagcacaggtttactgctatctgctaagtgctgctgcaatgtcattactatgttccattctcccagtgtggaaactgagtctcagggagagtttaaggagcttggcaagctcac

SEQ ID NO: 499387 - DNA, 494 bp, Homo sapiens
gctggctgtcctcactcagttccatccctaccccctgactcctaggaaggtcaagtagtggttgaactgatttgtgggctttgaaatgaggactctggaaagggtggtagaaagttaaaaaaaaaaaaaaaaagcccttgcgctggggaggtcttaggtgggttttgaaacaggtttgtattctcagctgtagggtgggagggaaatagaaggtagagaaaagtgaatgtagaagatgattagagtcaactgtgcttctctttcatagtgtatgaggggctccatggtaactggtgtcattttgaaatcatatgtttgtgttcttggccatggcatttctttcagcctggaccacatgagccaccactggcataagctcacgtcttccatctcaagctgaagtccctccctgagagttgatcactccattccakttgggactggaatatttttccaggccagaccacatctgcagcaagatcctttggagtggt

SEQ ID NO: 499388 - DNA, 651 bp, Homo sapiens
ctgtcaaaccctacagggctttgtaatgctgccgcctctatgaggtcacccctgatttctctcaaacrgagtaacttctcttctttatgtcccccatcccaagctttacaccattatcactgtcattacttcctgctaacaacttgctacatgctgggcgttatgtaacatatgtggcatgctttattttattgacccatttcacaaacctatgatattgatattatggctatttccactttatagatagagaaagtgagctctggggtggttgagtgacttgtccacagaggctctgccgtatgttccagtcatttctgcaggcgtctcatctcaacgccagactggagattcctggtagtcctaaatgctgccagttgaatctctcaggtcctataaggagaacttgaatacaggttgtattaaaagatgtagcagttcctaggaagataacatcagcaggctggggtggaaagtcaaagctatctcttgggacacttaaaaattggaagaatcattaagaaacaaaatattagggccaagtccatcctaatccaagcgagtgaaatccgaccatgcccatctttagccacagcaggctaagaaaaatgcccctatcaaaggcactgggttcagacccaagccttgcaa

SEQ ID NO: 499389 - DNA, 587 bp, Homo sapiens
aggggagagcacagcccagtgagtacaaaccaattgcaggagagaaggggggcggcagatgggagcagcaccaggcactgcacttgggctcccaagtctggtggagttctcagggataacctttttagggtgggggctgggacctccagaccacatggtgttgtgtctgggataagtgtgtgggggcagggaggttggaagaatgacacgggctcaggacacagagtgaggactcatgtctaatgagcaccggccaaaacttccatcttcagtttttctgatcacgagtcctcaaccccaagccttccctctcaagttgagtttatggtccagaccacctggacagagcaggagggaggcagtgcttggatcagccctgaactgctgtagttggaatgggtttaccttaaataggtcattgcacataacacgctgagacaaagagggtggggtgggggctggaggtgcggatggtccacacacacacttgtctgcgtaggcttgctcaacccagcccagcagcaccggagagcccctccgcacctcattcttaagaacstggacccggctctcctcaccagcgtctc

SEQ ID NO: 499390 - DNA, 574 bp, Homo sapiens
tgcatctgggagacaaatgtctgtgccccaggggctgcactcgggggacatacctcctgggaagcagcaagcttgccctgggagggcagcatgccaaaaacagcttcacataagcagggtgatctaaaatgtcaccacgcaccagagaaactggcaacaatgggattccaatgagtcaggctctgcccttcttccatggtgggggtgtgggcataaagggcctaactgctagatctccctccccacagggagaagagctgggggaggcaggagagccagggggaggctgtcactcagcagttgctaatttctattcattagaactttacaagatgagtagaaccaaggtgacgcccatgtgtgggcctttggtgggagggctggggagggagtcaggcatctcctgggtctgctgtagggtgtggcgctgtgtgggctgtagccctgggagccttgtactcctaggcttgagatctatgccagagaggaargtagctttgtgggggcagggtaggggagggagagctaagcaaaaggcccaataatagcttagggccactgatgtgcaccaacc

SEQ ID NO: 499391 - DNA, 574 bp, Homo sapiens
cgccgggcctcggtggccactcacaggtggcagcactgaaaagaagacccccacctgcagccattgagtcacagtgggacgctgagtgggcaccagatggcctcagtgtgctcggagtccccaggcctgcctaccaggggtaaggaagggtccccaggcctgcctgctgggacccggctggcactcaccacctgtagcttcatctggatgcacagtgacttctttttgacagccgccatgcctgtggtaaaggttttccgcatgctggtggcccggcgcagtgccagctgcgagccgccctccaggcccgcgatggagccagagagcaccgtggcactgcctgcgcggcccagaaacaggttgctgatgatttttctgccagaggtgggaggataagggaggaaaagcagtcacatcgatggagcgggaaaggccgctcctcccscaaggccccagaacactaaacagtcccattcagccacgtccaggggcctggctacctgaactgcatgccccacaccctacagagaaacaaactgtggagaaattttcaaacagtaaggagagaaagcca

SEQ ID NO: 499392 - DNA, 353 bp, Homo sapiens
gtaaaaatattagcccagtgtggtggtgcatgcctgtcctagctacttaggaggctgaagcaggaggatcgcttgagcccasgagtttgaggctgcagtgagccatgatcacaccactgcactccaacctgagtgacagaatgagatcctgtttaaaaaaaaaagaagaagtgaacattatcatcatcctcattaatctgtctctggtacgtcaggaagcactggtgcctggtagcttggtacccgcaggaatgtcacaggtgctgttcctgttaatggctcagctctgctcacggggagtgttggagaactgctttattcttgtccccacgctgatgcttatgcccaaagtg

SEQ ID NO: 499393 - DNA, 225 bp, Homo sapiens
tggggtttaccctccaccatgccagcagagcctacccgcccttaacctgcactctctgggcccctcacaggagggaatgggggcacaaatgctcctgggagaataatgccacgcctcaggcagcccctcaggcctggaatgcctggcctggacaaatgctttgaggcccaagcatccacaccagacatstgcacactgcaagcccccgagagcagcaggtaactc

SEQ ID NO: 499394 - DNA, 618 bp, Homo sapiens
cctgagaaaccaggaccaactgctatctcctgagatgcccactaaagcagcccatctgtgtcttggcattgtgtgccagccactgacaacaccatccaatctagatgtccagccaggcccacaccccccagagcagatggtccaccagtgcctgtctttcatctgaataagttacggaaggtccaggcagtgcctgtgacatgccagaacagggctcctctttttgcccaccccccagacatcacacaggctatgccaggtaagctgagactgattctagcatggcgcaaggaaggggggcttttctaatcacatagattggagccccctggatccgggcattgtttatgcggcccctttccagagtacccaacaagagatgtggcccttggctctcagagtaggtacctgtgtgactcttcctgggagagggagtgcacagagattctctaattcaggaagtgtccagggcaggcrcagctcttcccgctggctgccaggtgggtgctgagcaatggagcagcactaatgggcacctcccatcactgtcgattgcactgattgtgctatctgggatcgagatagcatatcaaacgagcaagttgattccaaaatcag

SEQ ID NO: 499395 - DNA, 665 bp, Homo sapiens
gtctactgctcttgctggctttcgtgctgtagcacctggggcctcctatctccccaccaagctggacaccactatcctagcgcactcgtgccaggagccctgcagcttggatgatggggaagggtgttctggttgtgccctggaggggcagttgttgggttggacacagagatacactcaaaaggaacttctcatcgtcagaacaggtgccttccccgttttggccccaattgctcacgcgattctctctccttgccatggcttctctactcctttgtctctgcaaaacctccccatccttcacgggtcagttcctagcctcctctggagatccatccttgcctggcccttctcttgacctcctgggggcacttcctagtgggctcctaacacatgaatggcttgtgtccctgggcaaggatccagcagtgggtatctctcttcccatttctctacctggtgctaggcatagtgaaggctgggctcagggcacactgtttccaagccccgattctgcctctctgcacactcagaaggcaacctgctccccaaagtgcctakcccttggccagcaaggtgagcaggagtgggtcctgccaggagaagatgggcagccagcccttggccatgccccatcacagccccaactggcagttgatggggag

SEQ ID NO: 499396 - DNA, 455 bp, Homo sapiens
tggctggtcacttagtaccaaaaggtcctggtcaagcagcaggggccagatctggacggtcctaaaacccacagctgggaagggaagatggccagaggtggtcacttgtccttcgtatactatctccaggcaggacattcaaactgctatgtagccaccctatcaaaagacccctgggattagtgagcttgatgccccatggagatccgctcctccatctgatctaaacctctctgctcctgtgcctcctgctgctctttttgcgcgggcagctggggtctcagtcacagtcagcacatactatstgtgtaggttttatccctcttgcttttccaggtccatgctttttctccttccaggagaggtaataaagactcttggagcccaagtgaccattataaatcagatccagttactcccctgcttcgaacccttcaatagtcccatttcactgg

SEQ ID NO: 499397 - DNA, 318 bp, Homo sapiens
ctcccttatatctggtgtacttctaaatgtaaatcatattgctagagttccagtcgcattatagaagaagagaggagttaaaatgttttgtttttgttttgttttgtctgttttttactatcagtttttgtatmacacttctgcttccccaatgtttgtaacagcttccaccattggtcaacctgctttgctgcataagttggtaaaaccgaatagttgctccctatagtctcctttctctctctctcctctctctctctgtctccccaccctctcttgtgcacacacacgcacacacatgcacacatgagcctaaaa

SEQ ID NO: 499398 - DNA, 474 bp, Homo sapiens
tgtcattactttttggacataaatataattgtcctatgwgggtaggtctgcttttgggctctcgattcttttcaaagattccattggtttatttttgccccagtgtcccaatgatagaaccatggccctaatatccctcttagtatcttaccttgttctttctttgtaatatcttagctatcctcggccttttgcatttcaatataaattatgaatcagcttgtcaattcctactctccgaaaatgttggagttttcactggagtttcatagatcaatttaaaaagaacataaacttctagtctttcaatctataaacaaaaaatattctccatttatttagcttcctttaaattttcttcaataaagttttatattttctgtgtagagttactgtacatttttgtttataccaggctattgatatgcacactaaggaaagttagtttgagatatggtatcaagcccctctcag

SEQ ID NO: 499399 - DNA, 590 bp, Homo sapiens
tataaattttaaagaaatgaaagcttctgaaggtgcagtttgcattttcaatcttgcaaagctctaaattattggactcatgacgatcatgagctgtacatcacactcagagcaggactgcactcacatttcattaatgcatgcagaccagcgagctgtaacctggatttatctctccataagtttgtttccagaaagtggctagaattggccaaattaatcaacagtggaatttttttcttcactttcctgtggttgtctttgttgccatacatactgctttcaaagtaaggtggacattagttgaacattttgggcctgcaaagagtcatgaaacttasaaccggtgatacctaagttagctctgcctcttctctactaagttagtgccacataacactaagtttagtgctcatgacaccaagtttagtttttgtcatgagtagcattctgcctccaagtttcaaattctgtatgattaaaagttaaccttacttgtaaatgacatgaaatccaaaatttcagtagattgaagtaggtagaaggttgcttgcctctatgcctaggtgtttctggcctaaacttagtgt

SEQ ID NO: 499400 - DNA, 591 bp, Homo sapiens
tccaattgtgtgaatactaccatgtgctaccaaagaaatgtttattcacaggttcagcaggttaactatttctggtaagcattttttcaggaggcttagtgcatattttttatttcttataaaatatacattttactagaaggtaaattttaagatttttatagaacacagattttgtataatccttgaaattaagattttcttacaaacaaaaaatcctatctacataaattcaactttttcattgtagcaatttatttttatattcaaaattatctcatttgcatgaaggaaaatgatatttaaaatacaagaaaatgtctactttgaatgaggtagggatttaaacattttggataagacagcaaattttgaaagtattttagcaaaatgagcactttggcatccagatttctctcataaagaattttcaagaatctttattttcatgrcatgaattagcattatatttggcaaaacttcaaacaggtagacaaatatgcagaaaatatctaaacaatctttaactcccaatggaattcctttgatttttatgctgtctaacctcaggtgttctcattgcctcttgac

SEQ ID NO: 499401 - DNA, 590 bp, Homo sapiens
tattaaatacaattttacccaagatgtatttgaaaatgagttttctagacaggtaggcttcctgagaagcatttcaactggattaataattaagcttaagtttggttgtgtctatcagggatccagaaatagggtagagttgaaagcctatctataccagataaacaactatttgaattgactggcattttaccaattgcttaattttactaaattgactggacacttgttaagatacactgaattggctgtctgatccaatattatttaaatctagtcaaatatatgttttaaaaaacatggatcattgagttaatcgacaagaatcattgaatgasccatgctacatacccaggacacaaacataggtctacaaacacagtacaaagcctctaggatttggtaatgtaataaggttacttattgtgagatactgattttcagatggaaggcactggaaacgacatatttttgaaatttgtatggcctttaacctcctgagtatttatttagatatttatttcctgaccaaaaagtgagggtaaaattatactgattaaataaaacccatattcaatgatggctacatc

SEQ ID NO: 499402 - DNA, 660 bp, Homo sapiens
cactagcttttctctctcaatgcatagtaagttcctaaacagcaagtttaccagacttgaccaggattttaaacttagcccatgtacttacttccattattaccccaacacccttaaaatgacacataataaagcaataaattatctttaatactagaaattattttccaatgctactggtgaaacaggtttattaaacaaataagaatattaaagaacatatagcttaaaacatcctcagaagtaaactacaggagtagtacagcaatctacatatccaattccgcattgagcatttgaattcaagctgaaatttgagagccacactctgtaggatatgacttcccygggtggggagggtacctagtattagtgttatcgcctgcaagaaaagcaaagcagattttgaggtaactgagaccaccaatgcagacctgaatgggggaaaaaaagacaattcttttgaaaacaaaaatgaactagatttcctcactgccagaggaaatgtattcctcttttggcagctagtgaggagaaaaaatatctgcttgttttagacccccaaactttaaattcaagtaatcagtaggccgcaccactttgaaagcactttgggatagacatcctggtcacaacagaggcatactgggtaaataacac

SEQ ID NO: 499403 - DNA, 449 bp, Homo sapiens
aggccaaaatggcaactaaaagacttttagaaacctgcaagagatccacagcagtgggtaacaaaccatcatgtttctagagtggagagaaaygagcatcaacaagagtgtggcttgacttaggtgtcctgaaaacaccaagaaagggtgagaagaaggctgacagtggctataatggaaaaatcacattaagccagttctcaaacccagagcccattgactggatgggaaaccaggtactgttaaggaagaagcctagaatgtaattgcaagcatgtatagtgcctgtaccaccatccttctaaatagggactgtgggcatttgctagaacaaacatacattggtaaaaagggaaatatcagtatcttttgagggctattagatacagagtctgagctaatactggtattaaaactccagatccattcaggacataggcgtgggcaag

SEQ ID NO: 499404 - DNA, 652 bp, Homo sapiens
tggtgagtttcttctgggctactaataaataagatcatcgtgaatcctgatgctttatgtaggaaataggggaccacaagagaaagaatgccacatcacctgagaagtttcttcaaactacacttaaccaatcctaccacccacctatagtttcagaatggggtgcacgagggagaatgatacacacaccagagcatgcacgagctcccaggtgagtctcatcatttcaatgctcacacatttaaaatcactggcctcctttcttaaattacttaaacatgacatattattttcatttacacacctattagaatagaggtgagatatacttaactgcttaaattcaaacctatggagttgaatttgaacactccactagtgataagtgcattttcacaactcagtcactgctatgaagccaggcacacaccactaaattaaatgcrtttgccattttcaccaggatctgttgctgtaaaataaaaaccatttcctgatagacaaaaccaaaattacctgtagcattacgactactgtgttcaccacattccactgtgattttctgccatccacaatcacggggaatcctctagccttacacttttcactgaaacaaaataaaattacaaagcattaaaacaagctccagatt

SEQ ID NO: 499405 - DNA, 652 bp, Homo sapiens
tggtgagtttcttctgggctactaataaataagatcatcgtgaatcctgatgctttatgtaggaaataggggaccacaagagaaagaatgccacatcacctgagaagtttcttcaaactacacttaaccaatcctaccacccacctatagtttcagaatggggtgcacgagggagaatgatacacacaccagagcatgcacgagctcccaggtgagtctcatcatttcaatgctcacacatttaaaatcactggcctcctttcttaaattacttaaacatgacatattattttcatttacacacctattagaatagaggtgagatatacttaactgcttaaattcaaacctatggagttgaatttgaacactccactagtgataagtgcattttcacaactcagtcactgctatgaagccaggcacacaccactaaattaaatgcgtttgccattttcaccaggatctgttgctgtaaaataaaaaccatttcctgatagacaaaaccaaaattacctgtagcattacgactactgtgttcaccacattccactgtgattttctgccatccacaatcacggggaatcctctagccttacacttytcactgaaacaaaataaaattacaaagcattaaaacaagctccagatt

SEQ ID NO: 499406 - DNA, 479 bp, Homo sapiens
attggatattatttttcaacatgcaagtgttcatctcacttttaattwaaaaaaaatccataaaatgctcagtgctgttagaatataaaatctgaaaataaaatctaatatttatttagaatgtgacataaaagactgctaaatctcagtgttattctagaattgctctttgcacttatttttagccatggcttttaagtgcaacgaataatgaactcataactttggaggatttgattagcccaatgcagcatgctgaaagtagcttttagagcacacggtttaaataaaaagaaaatgcataagcttttacacttgactccacaatacattttagttaattttattataaaaattctccccatttattctataaaaatggtgctccaagatgatattttgttttattttttatttttaaattgagatcggttcttgctctgtcatccaggttggagtgcagtgtagcacaatcgcag

SEQ ID NO: 499407 - DNA, 479 bp, Homo sapiens
attggatattatttttcaacatgcaagtgttcatctcacttttaatttaaaaaaaatccataaaatgctcagtgctgttagaatataaaatctgaaaataaaatctaatatttatttagaatgtgacataaaagactgctaaatctcagtgttattctagaattgctctttgcacttatttttagccatggcttttaagtgcaacgaataatgaactcataactttggaggatttgattagcccaatgcagcatgctgaaagtagcttttagagcacacggtttaaataaaaagaaaatgcataagcttttacacttgactccacaatayattttagttaattttattataaaaattctccccatttattctataaaaatggtgctccaagatgatattttgttttattttttatttttaaattgagatcggttcttgctctgtcatccaggttggagtgcagtgtagcacaatcgcag

SEQ ID NO: 499408 - DNA, 487 bp, Homo sapiens
ctctaagatctaagtcaataaaataagaatgtcgttaagagtacataacaataattgatgttcctctacccctagatactgagtcactgtattcacaatagaccaaaatttagagtttttagtaaaaaacrtacatgctcctgctatatgatgcctgatactttaagaaacacaacatgtatgagaaaaaaaaatatgataaagcatatattttgggtttctgattgtcttagtgcattatttatattccattttcattggtgcttcaagcttattgacataattcaaagatttacttttgcttcatcattgagcagaaactacattcaaagatatccacttcctcagctttacctccttaatcttctgaaatgaggagcatgaataatcttttgcctttatacttatttttggagggtgtagataataggaatttgtctagcactgacttttttaaccttaggctacccggtaccaacttctaact

SEQ ID NO: 499409 - DNA, 621 bp, Homo sapiens
acatatccagggatatggaagtgggtactgttttaaataatcttttatatgaatgaaaaattaaagcaaaaagaaaatattatacagaagttggtatagtaagcatattttaattgatcaactgagaattgtacaatgattgtaagaacataggttgtagttcttatctaaacaaaaagacagaagcaagacacagagcataattagaccaactttgtattcaaaaaaggaataatgctagtgataycatttggctctgtgtctccaacaaaatctcatcccaaattgtaatccccacatgttgggagaaaagcctgttgggagttgactgaaccatggggtggacttcccctttttcttctcgtggcagtgagtcagttcttacaagatctgatattttgaaattgtatgatacttccccctttactctttcagtctccagccgccatgagaagacatgccttgcttccccttcaccttctgccatgattgtaagttttctgaaacgctcaaaccatgcttccttttaagcctgcagaactgtgagtaaattaaacctttttacttataaattgcccagtattgggtatttacttatagcagtgtgaaaatggactaata

SEQ ID NO: 499410 - DNA, 454 bp, Homo sapiens
taatgaggcaaaacccaaataaaccaacagaaaatattttgctatattataaagataaatagctcaagaatatccgcttatcttagtctggtgtgttaattcctcataaagcttgagaataacttttctctagagctgtcagataagaagcctgaataatcaggtattaaagtgaatgactctagaccctgtctgtctctgtgtgttctaatactgacyccacttgctaattagctctatttcagaaatagaactttgaacatagcattcctgattcttctgaacaagcacaaagattgcaaaggaacaaaaagaaaatggagaagaatctaatctttaaaaggaaatttcaatatgtctaaagatgaatggagaaacatttgtaaatttaggatcacagtgcttgagaaattaggattgaaattaagttttcatgtgacaaaagtttaacatt

SEQ ID NO: 499411 - DNA, 454 bp, Homo sapiens
taatgaggcaaaacccaaataaaccaacagaaaatattttgctatattataaagataaatagctcaagaatatccgcttatcttagtctggtgtgttaattcctcataaagcttgagaataacttttctctagagctgtcagataagaagcctgaataatcaggtattaaagtgaatgactctagaccctgtctgtctctgtgtgttctaatactgaccccacttgctaattagctctatttcagaaatagaactttgaacatagcattcctgattcttctgaacaagcacaaagattgcaaaggaacaaaaagaaaatggagaagaatctaatctttaaaagraaatttcaatatgtctaaagatgaatggagaaacatttgtaaatttaggatcacagtgcttgagaaattaggattgaaattaagttttcatgtgacaaaagtttaacatt

SEQ ID NO: 499412 - DNA, 633 bp, Homo sapiens
tggaaaaaaatgattaagatatgataagcaaatgttataaaactgaattttttaatttycctacctttctcaaatttatgagaagtcttatgatactgcagtttgaattactgtgtttattccttcattatacactgctctgtaattttctgaaatcgtatcttaatggaagtcttttctctctgatccacctttatagagctttctggacagggactataatatttttctctgtaattgcccatgcagtgttaactctatagatatgaaccacaattactatgtttgtattgatcagtgagtcacgggacaggcgagattgtggacaataaatttgtatgcatgtgtgcggtttttgttgttatttatactgacatgaacagtttgtgttaagctattctgaaattgaaagtagacttaacattgaattgttagagtcaaagcaaagaaaatagtacttatcatttcattgcaattataataaaatgaaaaatactaaataacaaatggcgggacttatacagtaaacataaccctaaaggataatattatcctgatccttttattcaactcattcaacatgtatctctttatcctcttagtgttataaagtttagatattattgtatattg

SEQ ID NO: 499413 - DNA, 633 bp, Homo sapiens
tggaaaaaaatgattaagatatgataagcaaatgttataaaactgaattttttaattttcctacctttctcaaatttatgagaagtcttatgatactgcagtttgaattactgtgtttattccttcattatacactgctctgtaattttctgaaatcgtatcttaatggaagtcttttctctctgatccacctttatagagctttctggacagggactataatatttttctctgtaattgcccatgcagtgttaactctatagatatgaaccacaattactatgtttgtattgatcagtgagtcacgggacaggcgagattgtggacaataaatttgtatgcatgtgtgcggtttttgttgttatttatactgacatgaacagtttgtgttaagctattctgaaattgaaagtagacttaacattgaattgttagagtcaaarcaaagaaaatagtacttatcatttcattgcaattataataaaatgaaaaatactaaataacaaatggcgggacttatacagtaaacataaccctaaaggataatattatcctgatccttttattcaactcattcaacatgtatctctttatcctcttagtgttataaagtttagatattattgtatattg

SEQ ID NO: 499414 - DNA, 677 bp, Homo sapiens
gctggaaaaaaatgattaagatatgataagcaaatgttataaaactgaattttttaattttcctacctttctcaaatttatgagaagtcttatgatactgcagtttgaattactgtgtttattccttcattatacactgctctgtaattttctgaaatcgtatcttaatggaagtcttttctctctgatccacctttatagagctttctggacagggactataatatttttctctgtaattgcccatgcagtgttaactctatagatatgaaccacaattactatgtttgtattgatcagtgagtcacgggacaggcgagattgtggacaataaatttgtatgcatgtgtgcggtttttgttgttatttatactgacatgaacagtttgtgttaagctattctgaaattgaaagtagacttaacattgaattgttagagtcaaagcaaagaaaatagtacttatcatttcattgcaattataataaaatgaaaaatactaaataacaaatggcgggacttatacagtaaacataaccctaaaggataatattatcctgatccttttattcaactcattcaacatgtatctctttatcctcttagtgttataaagtttagatattattrtatattgatccagtattaaaaataataacaatttaacaaaagacactat

SEQ ID NO: 499415 - DNA, 664 bp, Homo sapiens
accctagccatgaacaattagctgtgggaaatatctaaaatcacaggtaaaattctgtgcttgtgtgatgtatgatgtgtacttgcataggttcttatatgattttccgggtagagagttaagtcttttatccaattcttaaagaggtcatgcctccccccaccccccaaaaaagttaagctctttccagtgcttttctttatgtaaagagtccaaatattaaagtaacattggtgaaataaaaaccaggactgtcattaaaaattgactggaaagcctgccatgatgacttaaatacatgttatagcaaatacgtaattaggaatctgtgtttctgatgcacaaaatgaacaaaatgaactaaatgagattstacaatattgtattaattacgaaaatatgacaggtaactgtttaatcccttacaattttaaatgaggtatttacataacttacaaatgacacactattataacttttctgaatgctccacagttttgttctttgataacatatttctggccaaggctacctaatcaaaaattgtaacgaaaataacttcagttcatctaggatgtttcatgtctggtttaggttacactatatgatttttgttttaacttttttggagaagaggggaaaaaagcaattttttagttctagt

SEQ ID NO: 499416 - DNA, 623 bp, Homo sapiens
tattagaattacagccagagaagtctgagttcaggtagttcctgcaggagcagtcagaattggtgctcttatttcaaggcagagagaagggaggtctgctaataatagctctaatagcattgtgctaacattgtctttacccctcaaatgctgggtttgcttcattttgatatgagaatccaacaggaacctgaakagattcttttcagtgctgtcctagaggttctcagcaaaactttggttaactctcccatgatgagcatgagatttgtctgaagctcatggcacctttaagactccaacaacaaggtcctgagagacaggatatgtggataatctgttacaactctcttaagcattaattgacccagctgctgtctatccagaactttccagaggtatttatatgcactgaatttgataacaagatgtcagtaaattttggattatttctttggttgtttgttttcatattttttctaactgcaaattttttgagatatagattcttagcattttctggaaggtaaggcttgttagattgcctaatatatgaacatgtcaataatcctctgcactatttatatatttggttaaatatacccagggatgggtagtgaaat

SEQ ID NO: 499417 - DNA, 533 bp, Homo sapiens
ccattgacttgtagaaacagtaggtaattgtcctgtagataatcccatatttcagagtttagagttttctgatcgttccttcgaggtatttaactaattcccctatttccccatttagactagaagttagatagaaaatcttaattagatgtatgtgtatttttttgcaagactaattcctgagtgatgttatatatttcacatttcacaacattggtggtaaacaatatctttgacttagaattgctgagatgaagttcagatggtgwcaggtgacagcctggtctcttaattgtaaacttttctaacaactttgcatatagtggttttgccactcattgatgactgcttgaattagttattttattagatgttggaaaatagtagcggtctaattctttcattctgtctctatttactagatgaattcttctatataggactcatctcatggttgctgtgaaatatagttcaaattggaacagaagcatacatctcatttttttctctttaataatcaattttcattaaaa

SEQ ID NO: 499418 - DNA, 633 bp, Homo sapiens
acttgagttttatacacaatcagcaccaccccaccatactggttttggctacctggctacaatcccctctcttaggcaatttaagaaacgtccatctcctttcaaaatgtaaatgcacacacaaaaattcaagttttaaagatgtcaaaaacatcagggatagctctaggcaaaaattttggatctgaaaattttgattccctttattttgtcttttccatgtttgcttttccttatccagttgttcagtcatcttcccattatcaaaagaaagtgcatcccttgttgagactaaaattcctcattgagttaaggggatagcccggtagggtctagggtagtagaagattcttcctaaattatagcgtagakaaaactgcccattataacttttccataggtaactcttgaactttggctaattgtacacagccagtgttattaccaacagatttgaaaattcttacataaatgtgtgagagtatttttgaactattaaagggcagtatttttcagacgtctttaagaaaactttgaaagaatgtagtctcatttctatacatacactttattaaaatgtactagaggctcagaattccattcattaattatagtgaatgtttttcattgctt

SEQ ID NO: 499419 - DNA, 622 bp, Homo sapiens
ttgtatgaggacttcgtcattacatatctccctcctataacttaagcatctccctttgtaccggcttctttccctcagcctataagcatatttaaaggaaggaaaggagagaggagggaaggaagaatgagagaaggaggaagaatataattcattatcgatccacccacaattcaaggttcaatcctgcctctcccttcatcatgacgatccatccagcttctgctcatcaaagtacctgaaagcagatctacatcttctgacttcacttactcaatttttattaatccatagatcaaggtgcattattccayaaattatgatcctctggcttctacttataccagtgtactaaaatgtcttttgatgagatcaccaaagagttcactcatgtcatactgcaggccctaatcttagttattaccttatttgaaagcagatctacattttctgacttcacttactcaatttttattaatccatagatcaaggtgcattattccacaagttatgatcctctggctcctacttataccagtgtattaaaatgtcttttgatgagatcaccaaagagttcattcatgtcatactgcagcccctaatcttagttattaccttattt

SEQ ID NO: 499420 - DNA, 622 bp, Homo sapiens
ttgtatgaggacttcgtcattacatatctccctcctataacttaagcatctccctttgtaccggcttctttccctcagcctataagcatatttaaaggaaggaaaggagagaggagggaaggaagaatgagagaaggaggaagaatataattcattatcgatccacccacaattcaaggttcaatcctgcctctcccttcatcatgacgatccatccagcttctgctcatcaaagtacctgaaagcagatctacatcttctgacttcacttactcaatttttattaatccatagatcaaggtgcattattccacaaattatgatcctctggcttctacttataccagtgtactaaaatgtcttttgatgagatcaccaaagagttcactcatgtcatactgcaggccctaatcttagttattaccttatttgaaagcagatctacattttctgacttcacttactcaatttttattaatccatagatcaaggtgyattattccacaagttatgatcctctggctcctacttataccagtgtattaaaatgtcttttgatgagatcaccaaagagttcattcatgtcatactgcagcccctaatcttagttattaccttattt

SEQ ID NO: 499421 - DNA, 644 bp, Homo sapiens
atatgagaatctggtgcttaagtggtaaatttagacagatgtggatgctataaagtaactttagttctttgtttttctccatagtaaaaacaaatttgtctctatcttaggtgagtacagagctaaggaaataatacccaaatgacaacagtttggccaaatcttcaggttctatttcacaaatgactccatctagaaggattttagtatttcctctggtgcttgttactttttttccccccataaaatgtatgacccaaacttattcctttttaaaagctgaacttatagctttacacattttaattaactgttctgaaaatatttttttcttttaagaagtagaaattagaaaacattctgtgtgaaagggatttattttacagaattatttcttatttttgaatttgaactctgtaacttaatatggaagttgagtgtcatcaagggagagacaggtacccaggtcaaataagattggataaaatgtctgccttggccacctgtttcaggggctaaagatcgaactgattgcttttgggcttcacgttcagaaacaaggacttytgaattcatacctgaggttggcaagtttagccagagctttttaaaacctatttataagtgtttgtctttcaatatgt

SEQ ID NO: 499422 - DNA, 470 bp, Homo sapiens
cttcgggccgaaagcacggtacagaggctgttggtggctttgccacgccaccccacccaccccggatcgcggctgtcttaagggacctggattcatcaggggctcttcggggcctgtgcgagtgctgatctgctccgtttttgcaaaaggcgcctgtgtctggcagagctggtgtgagacgagacaatcctgccccgccgccgggataatcaagagttttggccggacctttgagcatacaccgagagagtgaggagccagacgacaagcacacactatggcgctgaaacggattaataaggtaacccgcggggacaagggcatggggtggtaggagaaaaggaaggctcgggccaagaggaaagcgtgggggtgggaaggaagcataattctgaaaatacytcttggatcacttcttccatggggggatggagaacgcagatatacttcttgaagaaatgaagtttaaa

SEQ ID NO: 499423 - DNA, 522 bp, Homo sapiens
ctaatgcatgcttgtcagtaatgaacatttagtttagatgcttaggcttaaaagtgtttttcccttacattactatctccyggcaaaatttgaactaaaccaccacattctgtataggattggtacaaagtctcaagctaaaatttaaacaccatgatagtttgaaaaaaaaaaaagatactacataaattcccatttcttactagtgctattgtaactgctttgccatgcagtactttcaagcaataacggctaccagatatttactttcacgttaaacagagaccaagcagttaaatgtacagttttcagaagactgccatatttgttaccttttgttagttaatacagtgccttaacgcatgcagcactcaagtgctggcagtaccataataagcgcaccatagagtgcagatcctcttaccctacaacatagcgtatttctctgtccactctcttgctaacctattgtacctaattgaacaagtacacttagcattaattataacatatgaaagttat

SEQ ID NO: 499424 - DNA, 522 bp, Homo sapiens
ctaatgcatgcttgtcagtaatgaacatttagtttagatgcttaggcttaaaagtgtttttcccttacattactatctcccggcaaaatttgaactaaaccaccacattctgtataggattggtacaaagtctcaagctaaaatttaaacaccatgatagtttgaaaaaaaaaaaagatactacataaattcccatttcttactagtgctattgtaactgctttgccatgcartactttcaagcaataacggctaccagatatttactttcacgttaaacagagaccaagcagttaaatgtacagttttcagaagactgccatatttgttaccttttgttagttaatacagtgccttaacgcatgcagcactcaagtgctggcagtaccataataagcgcaccatagagtgcagatcctcttaccctacaacatagcgtatttctctgtccactctcttgctaacctattgtacctaattgaacaagtacacttagcattaattataacatatgaaagttat

SEQ ID NO: 499425 - DNA, 522 bp, Homo sapiens
ctaatgcatgcttgtcagtaatgaacatttagtttagatgcttaggcttaaaagtgtttttcccttacattactatctcccggcaaaatttgaactaaaccaccacattctgtataggattggtacaaagtctcaagctaaaatttaaacaccatgatagtttgaaaaaaaaaaaagatactacataaattcccatttcttactagtgctattgtaactgctttgccatgcagtactttcaagcartaacggctaccagatatttactttcacgttaaacagagaccaagcagttaaatgtacagttttcagaagactgccatatttgttaccttttgttagttaatacagtgccttaacgcatgcagcactcaagtgctggcagtaccataataagcgcaccatagagtgcagatcctcttaccctacaacatagcgtatttctctgtccactctcttgctaacctattgtacctaattgaacaagtacacttagcattaattataacatatgaaagttat

SEQ ID NO: 499426 - DNA, 603 bp, Homo sapiens
tgtccctttcttgggcatgtacaaagacaaaaaaaggaaatagtgtttatatggctggctgagaaaaacacaagacttaatttttttaaaaatgaaatatatctctttaatataccttcagtgcatctctatttcatctatgtgagtttctgagcttcttgaatggagaacacattgagagcatcagtggggggcaatcagtgtaatcatgcatcacagcgaargtgaacctataaatatcaatgaggtaacattgccaaaacatgttccaaaagaatttttcttgaccattgactcactctgccattctcagaggaatttaattgctctctactggggcacatgtcctagtgtattagaagaagggacatgtctgaatctgtccagtgcaaacataacacaagtggatccttttgtctttatgtagggccagcccagatgagctcagtttatgcaggcctcgtgtggcacggttttcaggtagattctctaattttcccttttatatttaggtacattcagtaacttaatgttagttgatttctcaggacacgacattgatagttatttcaggagacatcaaccctgattgccctaatctgt

SEQ ID NO: 499427 - DNA, 581 bp, Homo sapiens
tgtagaaatcagggggaaaaagaagtgctagaataattttgtaccaaattaaccaccttcagaaatgcctaattgaaattgataccagaattgcccaggctggagtgcaatggcacaatctcagcttactgcaacctccgcctcccaggttcaagcaattctcctgcctcagcctcccaagtagctgggaatacaggccctcaccaccacgcccagctaattttttgtatttttagtagagacagggtctcaccatgttggccaggcgggtctcgaactcctgacctggtgatctgyctgtctcagcctcccaaagtgctgggattagaggcgtgagccaccgcgcctggccaatagggcctttatactaaaacattacaaccactaatcggtaaaatacggatagggatctgaggataggaagggaggaaagaactttggctctgacattgaaacttaataaaggtactcatcatccatgccaccacagccccaccttagagccttgttcagacccatgactgatcctgctttcattcaatttgttatcaatatttattgaagccatgctgtgtgcacat

SEQ ID NO: 499428 - DNA, 623 bp, Homo sapiens
gtcctgagtttcactgggttaggcctacctgaaggaagcagctccaatatccctggagaaccaaagcccagttgttaaataacaaacaggccaaagaaactattcttatatttatgttgaagctcatgagtggtagcctctctgtacaagagagaagagtgaatayatgtgcacatcgtatagtcttgcacgttctagagtagggcaaactttgtgtaaaggagtgcagtggcgccatctcagctcactgtaacctccgcctcccgggttcaagcaattctctgcctcagcctcccaagcagatgggattacagatgcccaccaccacacctggctaattttttctatttttagcagagacagggtttcaccatcttggccaggctggccttgaactcctgacctcgtgacccacctgcctcggcctcccaaattgctgggattacaggcgtgagccaccgcgaccggctaataataaattttttagattttgaaggctacacatagtctgctacagattcttttctcccctcattcattcctttaaaaatgtaaaaacctaaatttgtagctcatggcaataggaaccagggtcagatttggcccatgggccagattatact

SEQ ID NO: 499429 - DNA, 548 bp, Homo sapiens
caaagcatgctagagaacagcgtcaggaagatggctttagtgaaataaagtaygctctgtaacaaattaaatgttaagatcagtttccaatcaattagtaagtacttatgaagggttaaccaactaactacatgtttcatttagtctaaatagaaaccgtaagatctgctttcaatgagctttcaacctagtttcagtatgacagtatagaatatagaatatagagtacaggatagtgcatatgtagccaccaggacttggaatccatgtataggaaccgttcacgaaaacaccacaaccactcctgcagtagtacatctgtgacttccatggtacaggcttggttttaaatctcactttaacacactctttcaatgatatttactgtgtgccctgctgtatgttagtttctgtggtgcacacaagtgatgcagcagtggaagtgaaatagatacaatccgtcccctcactgagctttacaggatagcacatgacacatatatgatgaatcacacaagtaaacaatcccaaattgttatacaaatatg

SEQ ID NO: 499430 - DNA, 548 bp, Homo sapiens
caaagcatgctagagaacagcgtcaggaagatggctttagtgaaataaagtacgctctgtaacaaattaaatgttaagatcagtttccaatcaattagtaagtacttatgaagggttaaccaactaactacatgtttcatttagtctaaatagaaaccgtaagatctgctttcaatgagctttcaacctagtttcagtatgacagtatagaatatagaatatagrgtacaggatagtgcatatgtagccaccaggacttggaatccatgtataggaaccgttcacgaaaacaccacaaccactcctgcagtagtacatctgtgacttccatggtacaggcttggttttaaatctcactttaacacactctttcaatgatatttactgtgtgccctgctgtatgttagtttctgtggtgcacacaagtgatgcagcagtggaagtgaaatagatacaatccgtcccctcactgagctttacaggatagcacatgacacatatatgatgaatcacacaagtaaacaatcccaaattgttatacaaatatg

SEQ ID NO: 499431 - DNA, 535 bp, Homo sapiens
attccacaaatttcttagcattctttaggtcttctgaattcagtaatgcaatgtttgtcgtcataattgattttacgtttctagattacacatcctgaaaatgacacacacaatatgccgaactgcactcacaaaatctaaatccatgggtaatggaacaatttagggaaaacacaacagatactgaatagacatagtttattctatatatatttcaagggaataaacctaagctgtgattctatggtcccctagtactctatcctgtagacagtatctaatagataagtttgatttatctctttttatgaacaaaatttgttttattcattctattaaataaaattatcattgcttagctgtcaaaaaataaataaattgayatgtttttattttccattattgtttttagccttccatcttctccaaagcagaagaaagatataactttcttatatgaaaaacagtttctattgcaggttctggctaagatagtctgagagaatcctgacagtatttcagttacttcaaactc

SEQ ID NO: 499432 - DNA, 535 bp, Homo sapiens
attccacaaatttcttagcattctttaggtcttctgaattcagtaatgcaatgtttgtcgtcataattgattttacgtttctagattacacatcctgaaaatgacacacacaatatgccgaactgcactcacaaaatctaaatccatgggtaatggaacaatttagggaaaacacaacagatactgaatagacatagtttattctatatatatttcaagggaataaacctaagctgtgattctatggtcccctagtactctatcctgtagacagtatctaatagataagtttgatttatctctttttatgaacaaaatttgttttattcattctattaaataaaattatcattgcttagctgtcaaaaaataaataaattgacatgtttttattttccattattgtttttagccttccatcttctccaaagcagaagaaagatataactttcttatatgaaaaacagtttctattgcaggttctggctaagatagtctgrgagaatcctgacagtatttcagttacttcaaactc

SEQ ID NO: 499433 - DNA, 655 bp, Homo sapiens
gttgcctagattatctttagtactattctattcctattatataaatctaagaacaatttagcttttatagaaagttttgaaaatatggaatayatacgtacatatatagttgtattgcttaaagatggaaatacattccgagaaatgcactgttaaacaatttcattcttgtctgaacatcatagagtgtacttacacaaatctagatggtattgcctactacacacctaggctactgttatagcctactgctcccaggctacaaacctgtaccgcatgttactgtactgaatactgtaggcaactgtaacataatgtatttgtgtacctaaacatagaaaacatatagtaaaaatacagcataaaaggtaaaagaaaaatggtacactttcatagggcacttaccataaatggagcttgcacgactggaatttgctctgggtaagttagtaagtgagtggtgaatcaatctgaaagcctaggacattattatccatgactgaggactttataaacactgtacacttaggctacactaaattaattaaatttgttttctttattaataagtgaacttaagctgtgactttttactttagaaacttttaaagctgttacactttttgactcttgtaataacatgtagcttcaaaaa

SEQ ID NO: 499434 - DNA, 655 bp, Homo sapiens
gttgcctagattatctttagtactattctattcctattatataaatctaagaacaatttagcttttatagaaagttttgaaaatatggaatatataygtacatatatagttgtattgcttaaagatggaaatacattccgagaaatgcactgttaaacaatttcattcttgtctgaacatcatagagtgtacttacacaaatctagatggtattgcctactacacacctaggctactgttatagcctactgctcccaggctacaaacctgtaccgcatgttactgtactgaatactgtaggcaactgtaacataatgtatttgtgtacctaaacatagaaaacatatagtaaaaatacagcataaaaggtaaaagaaaaatggtacactttcatagggcacttaccataaatggagcttgcacgactggaatttgctctgggtaagttagtaagtgagtggtgaatcaatctgaaagcctaggacattattatccatgactgaggactttataaacactgtacacttaggctacactaaattaattaaatttgttttctttattaataagtgaacttaagctgtgactttttactttagaaacttttaaagctgttacactttttgactcttgtaataacatgtagcttcaaaaa

SEQ ID NO: 499435 - DNA, 655 bp, Homo sapiens
gttgcctagattatctttagtactattctattcctattatataaatctaagaacaatttagcttttatagaaagttttgaaaatatggaatatatacgtacatatatagttgtattgcttaaagatggaaatacattccgagaaatgcactgttaaacaatttcattcttgtctgaacatcatagagtgtacttacacaaatctagatggtattgcctactacacacctaggctactgttatagcctactgctcccaggctacaaacctgtaccgcatgttactgtactgaatactgtaggcaactgtaacataatgtatttgtgtayctaaacatagaaaacatatagtaaaaatacagcataaaaggtaaaagaaaaatggtacactttcatagggcacttaccataaatggagcttgcacgactggaatttgctctgggtaagttagtaagtgagtggtgaatcaatctgaaagcctaggacattattatccatgactgaggactttataaacactgtacacttaggctacactaaattaattaaatttgttttctttattaataagtgaacttaagctgtgactttttactttagaaacttttaaagctgttacactttttgactcttgtaataacatgtagcttcaaaaa

SEQ ID NO: 499436 - DNA, 655 bp, Homo sapiens
gttgcctagattatctttagtactattctattcctattatataaatctaagaacaatttagcttttatagaaagttttgaaaatatggaatatatacgtacatatatagttgtattgcttaaagatggaaatacattccgagaaatgcactgttaaacaatttcattcttgtctgaacatcatagagtgtacttacacaaatctagatggtattgcctactacacacctaggctactgttatagcctactgctcccaggctacaaacctgtaccgcatgttactgtactgaatactgtaggcaactgtaacataatgtatttgtgtacctaaacatagaaaacatatagtaaaaatacagcataaaaggtaaaagaaaaatggtacactttcatagggcacttaccataaatggagcttgcacractggaatttgctctgggtaagttagtaagtgagtggtgaatcaatctgaaagcctaggacattattatccatgactgaggactttataaacactgtacacttaggctacactaaattaattaaatttgttttctttattaataagtgaacttaagctgtgactttttactttagaaacttttaaagctgttacactttttgactcttgtaataacatgtagcttcaaaaa

SEQ ID NO: 499437 - DNA, 495 bp, Homo sapiens
tatttcaaattttaaaaatgcaatcctttctagacattttaatttccccacttccaccttttcacctctacgtacatttttttgtatgtttttatacatctatagctttttaaattgggaaaataggaaagtagaaaacttctaaaatgtgaaaaatgtaaacagcttgtttcttccatggcacatatgttstctacaggggaactttgtagtgctgagttgcaaaagattccatattcaatctgcccttgagactgtctgccgtcttcttatttccaaagatgaatgttttctataccctgccaaataccggaaagacttgattcattcaaggctgaattatttacaagaatcttttgcattcctcctttcagggacaaggttttgttttgttttggttctgtttggttgtgttctcttctgcagtgatttttcaggatacaaattataaaaacaaatatgaagagcatctgaaatattttatttaaaggtgct

SEQ ID NO: 499438 - DNA, 495 bp, Homo sapiens
tatttcaaattttaaaaatgcaatcctttctagacattttaatttccccacttccaccttttcacctctacgtacatttttttgtatgtttttatacatctatagctttttaaattgggaaaataggaaagtagaaaacttctaaaatgtgaaaaatgtaaacagcttgtttcttccatggcacatatgttctctacaggggaactttgtagtgctgagttgcaaaagattccatattcaatctgcccttgagactgtctgccgtcttcttatttccaaagatgaatgttttctataccctgccaaataccrgaaagacttgattcattcaaggctgaattatttacaagaatcttttgcattcctcctttcagggacaaggttttgttttgttttggttctgtttggttgtgttctcttctgcagtgatttttcaggatacaaattataaaaacaaatatgaagagcatctgaaatattttatttaaaggtgct

SEQ ID NO: 499439 - DNA, 495 bp, Homo sapiens
tatttcaaattttaaaaatgcaatcctttctagacattttaatttccccacttccaccttttcacctctacgtacatttttttgtatgtttttatacatctatagctttttaaattgggaaaataggaaagtagaaaacttctaaaatgtgaaaaatgtaaacagcttgtttcttccatggcacatatgttctctacaggggaactttgtagtgctgagttgcaaaagattccatattcaatctgcccttgagactgtctgccgtcttcttatttccaaagatgaatgttttctataccctgccaaataccggaaagacttgawtcattcaaggctgaattatttacaagaatcttttgcattcctcctttcagggacaaggttttgttttgttttggttctgtttggttgtgttctcttctgcagtgatttttcaggatacaaattataaaaacaaatatgaagagcatctgaaatattttatttaaaggtgct

SEQ ID NO: 499440 - DNA, 495 bp, Homo sapiens
tatttcaaattttaaaaatgcaatcctttctagacattttaatttccccacttccaccttttcacctctacgtacatttttttgtatgtttttatacatctatagctttttaaattgggaaaataggaaagtagaaaacttctaaaatgtgaaaaatgtaaacagcttgtttcttccatggcacatatgttctctacaggggaactttgtagtgctgagttgcaaaagattccatattcaatctgcccttgagactgtctgccgtcttcttatttccaaagatgaatgttttctataccctgccaaataccggaaagacttgattcattcaaggctgmattatttacaagaatcttttgcattcctcctttcagggacaaggttttgttttgttttggttctgtttggttgtgttctcttctgcagtgatttttcaggatacaaattataaaaacaaatatgaagagcatctgaaatattttatttaaaggtgct

SEQ ID NO: 499441 - DNA, 621 bp, Homo sapiens
agaggatatcttttctctattataaagtttgatgaactagaaatgaaagagaaaaccagaagaatgtttatttccctgtaaaatgaacactatattgtttattgccatttcttatcattcgatttttctatacctaaaaactgtgtaatggtaggtaagagtaaaaaaaattatagaaaaatagaagatagcattatctaaaaatctaattcttatatataaattgtcatcttaggaaaaaattaacataaaattattttgcaatattttacataactaaaaaaggtaaggctgaattctgctggtgaaagtaaagtggaattttattacagaactaatggacaattctagggtagaatttttccttttttctttggcagtttctttagttttgctgaatcagctaatttgtgacctaaatgcttcctcctctaggccttttctttgtgtagcatgtagaatgcccataagcttgtgtcacatgtratactttaatgcaattactaactttaatgacctcataattggaaccactgtgattcttaatatgactatggtgaggtgagcttgtattgactttcctatagacatttatgtagactgaaactttgtggtgattca

SEQ ID NO: 499442 - DNA, 316 bp, Homo sapiens
tgcctcaaaggttccatgttaagacctgagcaaattattacccactgccccatcactcagaatcgtcttcctgtcctcaattctgccagaaaaaatgcatgagatgtttgtcttaktccattttggttgctataacaaaatagcataaccttggtagcttacaaataacagtttatttctcacagttctggaggctggaagtctcatatggtttggctctgtgtccccgcgcaaatccgatctccaattgtaatccccaggagttgagggaggaacctggtaggaagtggtggatcatggggacagtttccccagt

SEQ ID NO: 499443 - DNA, 605 bp, Homo sapiens
aacaatatgttcattatatctctatttacacactcattcaatcagtaaacatacttactgaaagtgtattctatccagggcattatattaaccwttgtagaaagtttaaaggtatatagggcatagctctatcttttgacatctaactgtctaatgaggagatataatagatatgcatatgactacaatacatcagtctgcattggcaattaattatagaagaggcatttttaaatacacattaggatgtaagagaatggaatcccaggaagagagaaaagcatgagcaaaaatgtggaggcaaaaagtaccaggctattttaaggaatgactgaatcactgtgtttgggtgttagaggaatggagggggaaagtcttgaaaaagtataagcaggctgggacgagatatgaatgactttaaatcttacactgacgagtctggccttttttactagaaatgagaaattagtgatatttagagcagggaagagcatgagcagagtgttgctttcagaaggaagactgatctcaaggcgaggtgaaggactgattggagtaagaaagcatagcaccatagtgaccagtgaagaggccctttcggttga

SEQ ID NO: 499444 - DNA, 426 bp, Homo sapiens
atggaactgtacaatcagcaattcccggtccakacttctcaacctccgtagttgtgtaagccaattcctgtgaattactatgtctctcaatctttctttctgtacacacacacacacacacacacacacacacacgcacaccctattgattttgtttctctggagaaccctgactaatacataccccttacccctacaaaaaagagggggtggtactgctaaccttggtataagtcaagagagtcatattactaccaaaacatcaagatcaatcttgggtccagaacaagcaaggctttaatcagaatatgcccagagtttcatgttcagttctggtaaccccaatataggaggaaaagagtcaaacaagagagagtccagaaggaaaggaccaaggtaccaaggtagatgatgcgtctaaagtca

SEQ ID NO: 499445 - DNA, 426 bp, Homo sapiens
atggaactgtacaatcagcaattcccggtccatacttctcaacctccgtagttgtgtaagccaattcctgtgaattactatgtctctcaatctttctttctgtacacacacacacacacacacacacacacacacgcacaccctattgattttgtttctctggagaaccctgactaatacataccccttacccctacaaaaaagagggggtggtactgctaaccttggtataagtcaagagagtcatattactaccaaaacatcaagatcaatcttgggtccagaacaagcaaggctttaatcagaataygcccagagtttcatgttcagttctggtaaccccaatataggaggaaaagagtcaaacaagagagagtccagaaggaaaggaccaaggtaccaaggtagatgatgcgtctaaagtca

SEQ ID NO: 499446 - DNA, 187 bp, Homo sapiens
gaagtcacaaaaatctgtttaagtcccattggcaccacttcacttcttttagaaaatgacttcacttccctgcacctcagactcctcatctgtataatagrtctgttaagtcctacatcccaggttgttagaaagataccatgggatgtcaaatataaaagcatcctgtactctttactgtaaagaa

SEQ ID NO: 499447 - DNA, 514 bp, Homo sapiens
gtatcgagcatcttgccagttttactcacgtctttatcccctgtgtttaggacagagccaggcacagaagcaaaatggttttttctgtccttttttactgaccctgatgataaatggatggcgctgtctgagagaacccaggtagagaaagttaatcaatgaatacttttgaatgaagtaattcattctaggacattctttcttgcctatatgatagttggtaaaaataggcaaaacagagaaccaagggaaaaagacatttgactaattctccctttgacttatttctgtgatttagtggctgtgtggsagtttctagacttaggtgatgagagctaagagcagagctttcatttgctccaaaaggagatgttggttcattttgcccaaagaagcagggacagaatgtaaagtactgacacctaacagtagcaaaatatgtttagcctctttcctcctctttaaaatgtaatcaacattaaaaacaaaacactcagatgagtttcaaataaaa

SEQ ID NO: 499448 - DNA, 618 bp, Homo sapiens
catcttgccagttttactcacgtctttatcccctgtgtttaggacagagccaggcacagaagcaaaatggttttttctgtccttttttactgaccctgatgataaatggatggcgctgtctgagagaacccaggtagagaaagttaatcaatgaatacttttgaatgaagtaattcattctaggacattctttcttgcctatatgatagttggtaaaaataggcaaaacagagaaccaagggaaaaagacatttgactaattctccctttgacttatttctgtgatttagtggctgtgtgggagtttctagacttaggtgatgagagctaagagcagagctttcatttgctccaaaaggagatgttggttcattttgcccaaagaagcagggacagaatgtaaagtactgacacctaacagtagcmaaatatgtttagcctctttcctcctctttaaaatgtaatcaacattaaaaacaaaacactcagatgagtttcaaataaaattccaatcatgtgttgtggccagaatcaccagcatcagcgagaaccactgtcagtttcagtcattccaatgtgcaacgtcatgttctcttcctcgttcgtcttcagggagtg

SEQ ID NO: 499449 - DNA, 510 bp, Homo sapiens
tgactttaaagaaaggggctgtgcgtggctgacttctgatctcttgggattggagtacaggaagggaagagaaaaaaaagtggaacagaaaaggtcttgtttgagtgtgactgttgtgagctggtgtcaaatttgttggatgtttaacgctgccagctctttggtattttggtgtgttggtgagttttctgaggctctcctcccytcagtcactgggtgtctattaccttcagtctcattgatgaaagcaaatacctttccattctgtctcaccccttaagtccttccgcagccctctaggaaactagtgataaccttcagcttctctctgttgagatctatgtgcacctccaaatagcaaagcccttctgggtgggattttttctttttttgtttttgtttgtttgtttttgagacagggtctcactctgttgcccaggctggagtacaatggcgtgatcacagctcactgcagcctcgaccttccagattcaggtgatcctcctatct

SEQ ID NO: 499450 - DNA, 510 bp, Homo sapiens
tgactttaaagaaaggggctgtgcgtggctgacttctgatctcttgggattggagtacaggaagggaagagaaaaaaaagtggaacagaaaaggtcttgtttgagtgtgactgttgtgagctggtgtcaaatttgttggatgtttaacgctgccagctctttggtattttggtgtgttggtgagttttctgaggctctcctcccttcagtcactgggtgtctattaccttcagtctcattgatgaaagcaaatacctttccattctgtctcaccccttaagtccttccgcagccctctaggaaactagtgataaccttcagcttctctctgttgagatctatgtgcacctccaaatagcaaagcccttctgggtgggattttttctttttttgtttttgtttgtttgtttttgagacagggtctcaytctgttgcccaggctggagtacaatggcgtgatcacagctcactgcagcctcgaccttccagattcaggtgatcctcctatct

SEQ ID NO: 499451 - DNA, 665 bp, Homo sapiens
ctgcccatatttttcacagggataaaatactcaagttattccacctaatgtgccatctcttcatgtcaatcactgaagtgttgatgactgaattcccaaacatctcataattgctcattctttcttactggtggcatacacactaccaaatatactggttcataaaacctgctgtgaatcatcccaaattctcatatgtttgattcctcacatatgtatgtaagatggccattcatagactttatactgggtctcacctcacagtatccattctttgaatgactttgctttgacctgactcaatatctgtctgttcttgcaaatatggctgccacttctacagccctggtgaaaaggaacattagtatgttcccagttctgaccataaagtctcctgagagccatgttcactaaaaatctttgctgagaaacagacaactcataagcagaggtgcttacatttaccaagggggagatgcttgggaaaaaaattattcctgtaaccaaatcctgaaatayaatgatttattttcaatatatcctgggcatcacctttgatcctcttatatttttaaaatcagcagaatccaaagttcttctcaattataaaccattaaaattctttttggattttactttttaaaaaaatattaaagcctcccaga

SEQ ID NO: 499452 - DNA, 606 bp, Homo sapiens
tttcacaattggcttattcctgtgtttaatggaactgtcacagaaataagaataaaagaagagagaacagtgaccttagcaccataattcaaggcatctttgcatggacaagagatacaaacatggatcaatgcatgacatttgaaaagcacaagtagaaagtatagaagtaactgatttgcccctcctaccagattgtttctagggtacctgttttatgctttcatagctctttgctcttctccatagaatccatttacatattgcattatatattttataattaatgccaatctgtctccatgaaaagtaaacttttcaatgtaaagaatgactattgtaccccaaatttttaaatttgagtatatgaataacttttttgaatacatgaaaagcattgtttataacaatgaaaatattaaaaagtattttcttgaataaatccgaattaattttgtgatctgacatattttaaagcaaaatatgtgtgcatatatatatagtggatagatatgtgtttttgacatttcagaaatcaaattcagarcaataaatatataataactatcctcaaattaacttcaaattttattaaaaatgcataca

SEQ ID NO: 499453 - DNA, 378 bp, Homo sapiens
gcagtggagactgtgctgtgggcaccctcccttgggagcagccaggcaggcagtcttggaagggacctgcaggtaatggggagcatggagcaaatgcacctcggccctgcagcaatggcagtggggcctgtcctgggccctgccctctcccagctggcagacagcaggggttgtagctgctcagtacaaggtggaaagccttggagatgggcacctatgttcacactatgctgcatctgcacagcacagcaaagccttctgggctccatgctggttcaagctggcctctgcttggtctccgagcagctccccttatcaatccaattktctgtgggggtcatgagagctccccctgccagtacaactctttatgggggg

SEQ ID NO: 499454 - DNA, 621 bp, Homo sapiens
gaatagccatcaataacctcaaaagcatagataatagtgaaatgcagtaacagaatttggatatggtgagttttgaatattttgtatgttttcaatataatttgttcagtggaaagtttgtataacttaattcttattaatgtctgtatttaacaactggcttgcaaaattcctgaaaagtttaagcttttgtggagccagcatcagccaactccattgcaccactgagccctcctcatcacctcttactcatcttgctgtgtaaatacaacctgactcatgagcttttgttttacctgaacttargttttgtttttatgtttttgttttcctttttgtagagaaccgagtctcactatattgcccaggcaggtctcgaactcctgggctcaagctatcctctgcctccctaagagctgggattacaggcctgagccaccatgcccagcagattttgttttaatcttttccatcttcaagatgttttgcttctcctccccctcctctgattttggctttctgcaacaggagaggttatggtggagaaaagaagctgatgtccagagggaaggactttcccattcaataaagattttaagaaaggggaagtgttaaagcaag

SEQ ID NO: 499455 - DNA, 621 bp, Homo sapiens
gaatagccatcaataacctcaaaagcatagataatagtgaaatgcagtaacagaatttggatatggtgagttttgaatattttgtatgttttcaatataatttgttcagtggaaagtttgtataacttaattcttattaatgtctgtatttaacaactggcttgcaaaattcctgaaaagtttaagcttttgtggagccagcatcagccaactccattgcaccactgagccctcctcatcacctcttactcatcttgctgtgtaaatacaacctgactcatgagcttttgttttacctgaacttaagttttgtttttatgtttttgttttcctttttgtagagaaccgagtctcactatattgcccaggcaggtctcgaactcctgggctcaagctatcctctgcctccctaagagctgggattacaggcctgagccaccatgcccagcagattttgttttaatcttttccatcttcaagatgttttgcttctcctccccctcctctgattttggctttctgcaacaggagaggttatggtggagaaragaagctgatgtccagagggaaggactttcccattcaataaagattttaagaaaggggaagtgttaaagcaag

SEQ ID NO: 499456 - DNA, 481 bp, Homo sapiens
ccataaatcaatgctgaataagaactataaagttgtgaatcaatgtgtcccagatctccaaactggaatgaaaaarcaggaataaaatagctggagctcttccaagatccttcttttcatccccctcctcccaccgccccatatgctagtatgctaattttaaaaggcttctcttttccgctccttggcctggctgtggacagcatttcagggcaggaaattcggtctagaagtgtggctgaggaaacaagaggctgttctgttgcatttctgttcaggactgatctgtagctctgtcgtgtatccttggtcatgtatccttggccagggtctccacctgtggccgagaagtgatggcatttgttgtctgtgtcacagatacaggaagggaacaagagtgatcaggtcatgtgtggtccatgaatggttttttaggtccaagcagtttaagggctctgagtccctgcattgaaatattaaa

SEQ ID NO: 499457 - DNA, 548 bp, Homo sapiens
ctctagccaggagaacaccttgtactctttggttaaatactaggctcacatgctcatcactgaactaattgctctgtcaagaagcatgggattcacaatcagagttgagttaatttcatccaaattgcataactgctacacactggaaatagatagcaggctacacagtgaaaaaggaatacaatagatgtgtggaaaacagtcagaattttgctgtagaggagtttccaggcaggtttaacagctagtaaacaaaatgtattacttcttttctaaattgaagttatactttgtgacccaaatatctgcaaatcaaatgtactagctatctagtcaagcgtattttctgaaatttatagatgcctattagaagcaaataaatgttcataaacaatctaagaatcaacaaacacaataacttatcactaaaggtattgagaacacaggagctctaaaagtattgactcattgtaaataatgccccaagagggctgatgtttttaaagctgagctttaamacatagttcagaggtatagtcttacctaca

SEQ ID NO: 499458 - DNA, 315 bp, Homo sapiens
ataaacaaaaatagtattggattataacccaaagtgtaaaatatatatatccatttgtstatggtgacataaataagtgattgtaaacgtaacataaattaacaggagagaatagacaaatcctccatacaaataattccaaatcatttatattgatacttcaccttaagtataactggtagtttcattgtcctagatgcagaattgcacttaatctcttagattttagtacatatttcactttcctactttacttgcaatctttcagtctgaagcctgtttagatccagaatgtaagtctctttttttcagcag

SEQ ID NO: 499459 - DNA, 521 bp, Homo sapiens
cataatacatatgacaacaagactcctttgagaaatagctgactctaagactgagaaagagagatctgagataagctgggagcatgttgcagtaacagaaaggaaggaagtgctaaaacaacaactcgataatgagggtgtgtcaaaagaacacagggacacactgaaagagcaaccaatggccaaagctggaacaatctgatcaatcaaataaacaaaaatagtattggattataacccaaagtgtaaaatatatatatccatttgtgtatggtgacataaataagtgattgtaaacgtaacataaattaacaggagagaatagacaaakcctccatacaaataattccaaatcatttatattgatacttcaccttaagtataactggtagtttcattgtcctagatgcagaattgcacttaatctcttagattttagtacatatttcactttcctactttacttgcaatctttcagtctgaagcctgtttagatccagaatgtaagtctctttttttca

SEQ ID NO: 499460 - DNA, 521 bp, Homo sapiens
cataatacatatgacaacaagactcctttgagaaatagctgactctaagactgagaaagagagatctgagataagctgggagcatgttgcagtaacagaaaggaaggaagtgctaaaacaacaactcgataatgagggtgtgtcaaaagaacacagggacacactgaaagagcaaccaatggccaaagctggaacaatctgatcaatcaaataaacaaaaatagtattggattataacccaaagtgtaaaatatatatatccatttgtgtatggtgacataaataagtgattgtaaacgtaacataaattaacaggagagaatagacaaatcctccatacaaataattccaaatcatttatattgatacttcaccttaagtataactsgtagtttcattgtcctagatgcagaattgcacttaatctcttagattttagtacatatttcactttcctactttacttgcaatctttcagtctgaagcctgtttagatccagaatgtaagtctctttttttca

SEQ ID NO: 499461 - DNA, 497 bp, Homo sapiens
tgagaaatagctgactctaagactgagaaagagagatctgagataagctgggagcatgttgcagtaacagaaaggaaggaagtgctaaaacaacaactcgataatgagggtgtgtcaaaagaacacagggacacactgaaagagcaaccaatggccaaagctggaacaatctgatcaatcaaataaacaaaaatagtattggattataacccaaagtgtaaaatatatatatccatttgtgtatggtgacataaataagtgattgtaaacgtaacataaattaacaggagagaatagacaaatcctccatacaaataattccaaatcatttatattgatacttcaccttaagtataactggtagtttcattgtcctagatgcagaattgcacttaatctcttagattttagtacatatttcactttcctaytttacttgcaatctttcagtctgaagcctgtttagatccagaatgtaagtctctttttttcagcag

SEQ ID NO: 499462 - DNA, 663 bp, Homo sapiens
cttcaacctttacaggttactatggaaatcatatatcaaaaggctcaaaacccactggtattctatgaccaataatttctacttctagaaatagtctaagaaccaaatcagaagggaggtataatgataaatatttcacccaagcagtgtttaaaacagctaaaaatagaaagcaaccttaacaattctaaataagaggatgtttaaattaccacatgtgcatatagtggaatactaagtagtgactaaaaagatgacgatatgaatggaccgatggaagggtrtactcatgacaatagggaaagtcagacttcgctcttccagcatactgggatgtgtattctgaggagaagcaaagtatctggcacacgggataccaataaatacttctgaatgaatgagaggtgtcctggttgtctctggatacactctcacacacttaacctctcacctgccctcattctggagttagatttcatggcaggatgtaatcaggcagatggtttctaccttcctctctccccagtatcattaaagtaaattccttcatttgttttttctagtatatctgtgttcaagtggtgagatgtttctttggaatcattataaagctttcagtttgcttgagtagtaaaagctgtttattcattagttaataaatgt

SEQ ID NO: 499463 - DNA, 476 bp, Homo sapiens
ccaaaaataaaaataaaaataaaaataaaaaattagccaggcatggtggtgcatgcctgtagtcccagctactcaggggactgaggcaggagaattgctggaacccgggaggtggaagtggcagtgaccccagatcrtgccattgcactccagcctgagtgacagagggaaactccatctcaaaaaaaaaaaaaaaaagtggaactaggaaacaatcctgactttctggtcctttcgtcccatccccaggggaagcaaatcctgtgtctacccctctgcctatcctacttcacctatacgtggtcttgccttgtcttggggttcccccacatgtctgtcttatcctaccttgaacataatctgtttgcaggcagggcttaattccatatgcttagtagtcccacagtttcccaccaggacagggtcctgggttgtatattccataggcattcaaatgttaaatggctcagatgagg

SEQ ID NO: 499464 - DNA, 485 bp, Homo sapiens
cttctgaaaccccaagatcagtcccaggcaggcaaagcagctaacctcacaccttattgcgtgaaaatgaagtttccagctcagcataccggacagtaattaatctaattaacaattattgggtagcgatgaagctaagaatgtcacatctcgtggcatcctttttatttcagatgggctttkgaacgtgatttttcctgacatttaaactgccttaccgtatgtctttcctcttgcagagaaatgcaatttattcatcaaggatgcaggttcattttccttgggtgcaggagatatgaacaaatgtggattaccttaatatgaaaagtgctggcccttggcgcctgcctgaatatgaatgttggagggaatggagaagtcattttccttggtgtattttgttattaagtttgaagggtaaaagcgttgaatctaagctgcagtgacactagatagcatttttgtaaataaaaattgatttttaa

SEQ ID NO: 499465 - DNA, 596 bp, Homo sapiens
ggaggccctgaagcttatacaatttgggcatgccrtgtaagaaagagaataaaaagttacagcataacattagctacagagccttggaaagggccttgcataggagaggaatgaggctcagggttgttctaaagcaccctgggggcttggtcaaccccaaatgctgacgtcattcccagagcttcagtttaggtgagcatgacgagggactgggaaatttctaacaagttgttcggtagcaccaaagctgctggtccacacagagtgtccataccttgagaaccacagatttatacaaacacgggtcacggtctcttcaagaaacatacacattctttttcacattttacaaaatcttatttagtatcccacattttaccaaaaatacacaggacagcgtgacagtctctcccagggctgtcgaagggccccggcgagtgagaagcacagaggcagaagcttcacttgctttgcagacaggccatggctggggaggccacttcaccattcagcagagccctaagaggttgcatttctgtgatgagagcactgtgtcaactgtcctcaaaacagaacactatgtcttgcctggatga

SEQ ID NO: 499466 - DNA, 600 bp, Homo sapiens
ggaggtttaattttcaagagaagcagcgagagaaattggtagggtctgattagaaagggtttgggattctgaatttggaagcttggacttgtttgcattgcagccagtagagcacagttattggagatggcagaggtgggaagatcacactatatgagtgggaggggacacggggataggagaaggagcagcactgggcatttatcaaggcacaagtgctggcacatcttcattttcagctttcaattttcaaagagcattgtttttaatagtagtgcaaaaatggactctgatgctyccgattttctccctcagtacaaagagtcaagttagtctgcatgaatgatcacgtttgtatttgtcattatttgtttggtgccattggagccccatacctcacagactatttaatgggtccatgaacaaaggaaatacaatgcatgtactcacaatgctccatattttgagggttaaaatgattctgtcctggaaaagggagatgagttttaattttttactaggatttcttacctctgcactgtcaagcaggtaacctgtatatcaaacgagatgcatgtcagccaccctgaatgttgctat

SEQ ID NO: 499467 - DNA, 600 bp, Homo sapiens
ggaggtttaattttcaagagaagcagcgagagaaattggtagggtctgattagaaagggtttgggattctgaatttggaagcttggacttgtttgcattgcagccagtagagcacagttattggagatggcagaggtgggaagatcacactatatgagtgggaggggacacggggataggagaaggagcagcactgggcatttatcaaggcacaagtgctggcacatcttcattttcagctttcaattttcaaagagcattgtttttaatagtagtgcaaaaatggactctgatgcttccgattttctccctcagtacaaagagtcaagttagtctgcatgaatgatcacgtttgtatttgtcattatttgtttggtgccattggagccccatacctcacagactatttaatgggtccatgaacaaaggaaatacaatgcatgtactcacaatgctccatattttgagggttaaaatgattctgtcctggaaaagggagatgagttttaattttttactaggatttcttacctctgcactgtcaagcaggtaacctgtatatcaaacsagatgcatgtcagccaccctgaatgttgctat

SEQ ID NO: 499468 - DNA, 587 bp, Homo sapiens
aagtcatactgtgtcacttttgtcatgctgtgtcagttgaagcagtcacaaccttgcccagattcagaattggggaaataatatccaacatctcaatgggaaaagtgccaaagaattattaggtcatttttaaaaaccactacactattttcttttcagtttcccagagaaggagactgaggcacagagaaattccccagccataatcaagtcatctaaatcctgagctgacatgtaactttagaatgatgcagcctctctgtatttgaatcgattgtgcccttagatttaatgccctcaaattgagtgtttcataatctaccttttctcctgtgttattcttctgcagcatattattccatctaaccagtgactcaagctaaaaaacctgggagtactctttgagtttttctctcaccctcatccatgaattgaatcagtccaattctattaggcaggagttgttcacatttgaratagctgcccaattgtatctcttctgtttccataaattagattagaatcagctaaaacttccatttgccacataggcaggaaatccactgctcccgttgctgtgctgccca

SEQ ID NO: 499469 - DNA, 532 bp, Homo sapiens
aaacactgtgaatgaaatgcagagcccagcaatgcctccttatggaaagcacaggaagccttgctctagcctctcctctgacagacaaagagaatccacctgcaaatttctcgctgataacggatatttggatatggataacaggtatttaagcagtgtacttgccaacagagttayttggcaataatagtaaaacagtgtatctagctacttaaataaataaattgagcctttcagggttattaaaattaaatttaaacgggagagaaaaagctgtacatgctgactgcatgtgggtgggtgtccaagtgtgcgcacgcttgcgtttcttcacgactttccaaacaccagtgcagaaccttgtacatacacagccagagcagccagtgtgaacaatgtcctatacgtgggtttaatttgttttgtaaatacaagtgtaattggcatttaaggggccactctaaattgccatcgccccctctgtctgagcatgagtaatctaatttttctgcagagcatgttgcagtttgat

SEQ ID NO: 499470 - DNA, 584 bp, Homo sapiens
accctggaagctgaggagatgaagaataattattttctgcatctcctggaaactcctttaatgttggaaatccactgtcccccgggactggcaggatgaaagggctgggagagggagagagctggccagaggagctggtgtgggagggcaagtccacgatgcagaygctgagcggccctgggcaggttcaatgcctccccgtgcctctcagcagcttctgctccagcaggaccaaggtccaggctctgctgcacagtgaggtgtgaaaaccccaacctagaaagaaccccctggcagagatgagaatatttcagagtccttggctaagccaggataactaggtctgcaggaaggagcaacgccgagccatgatcttgaaccccactggtcccagagcagccagcaccttcccaccagtgtaagccagcagtgaggactctgcccggacccaactcctggagctgcccttgggagccagctggatctccctgaagggccctctctgttctccatgggccctggggacgtcaccgtcaaactgcaaacatagacacgctctggcccagcaatttggcttgcaagaa

SEQ ID NO: 499471 - DNA, 554 bp, Homo sapiens
gctcaggtggtcccacagcacgccggccagcgccggggctgcctgcacgtcctggaggctggagagccggtgctcggggttcacagtgaggagctgcaaccaggcatgagtcagagggtccagggcccacagcccaccagcacggaatagcccgccacccccaggccagggcaccttgaggagggtcccaccaagcctsaggttcagaattcaggaacctcagggccacgcgaggaagggtggtgccgacggccgacatcaggcaaagcaccgtggctggctcagcatgtggcccaagggacgcctgttctcagtgctgctacctaaacccctggcgccagaggacagcagagggatctgcagggaaggctctgctgggatttgccaggaggtggcagccgaggcccggctagcggctaacactcggcacatggctggcctcacagtaactatcccagagccacttccttcaccgaatcatgggacctccacaggccagatgagcccggggcagccatgcatggcctgggaagcaacatcccagcgctggcacc

SEQ ID NO: 499472 - DNA, 542 bp, Homo sapiens
gagactaagcttgaacgaggccgccttgggagggcggggcggggcgggatttctcctgaacttcctgcatttcctatgaccattttttaaattgttattttgaaagccagttgagggtttcagaatgacagtgagcgtaagctgcagcagcccctggctgcccctggcaggaccccctcctgccgcttcccactgccaacggggcagagtcgcgtggctcggcagcacggccttcctcccatgcacacggccgcaggaggccgaggagtcccgtgcccgggatggaagccccagcctcactctgcacaggcgcagaagcaacggtgctttcctgcgccagccccagcacccgcggcctcctgcagacggtcactrcaggctcaaggcggccactgcaggtctggaaactgctccagaaaggctgtttgttgccctggggctgggaccagacaggctgtgagacaaatatggtggaaaatccggccctcaccctctgcccctcaggagcctggcttggggccactggctggggccagggctct

SEQ ID NO: 499473 - DNA, 537 bp, Homo sapiens
gcccccacgggaagctacacagcaggtccaagagatccacatgattcaggagatgccccttgctttaaaatgtaggttttattatcacacaggtgggtgagatcaggagatgcctgccattgatgagaccgttcgttatagttaccaacaggaggaggggcatgccacaccgtggggccacacagcaaagaccagggtctcggaggcagacgacgtgaaggggaaacacgggcagagccttagyggaggcttcctcgggaaaagcagggaaaggcggggaaagccaggtgagcaggtttgagactggcctgtgggaatacaggcctgccctggttgtctggggtcaggtcctgaggtgattcatgcaggggatgtgggctcaagcctgggaaagcatagagcagacggctgggggtgagctgggggttgcatttgaaaggcaaccaaaggcaagtgtttctgatctctaggaagtggctggcccaggaggggcagtctctccagggtcagcaaggccctgacattaaagcgttggaa

SEQ ID NO: 499474 - DNA, 542 bp, Homo sapiens
tgccaggaaagcagtcctggacatttaggaagtcgatgggcaccactgtgttccaacaaaacttyatctgtggatgctgcagtgtgaacttcatagaatttttgagtcatgacatactcttgttattgttttcagtgaatatacaagaacgattcttagcctagggctgtatgaagagaggtagagggttgggtctggcctgtggcatagtctgccaaccgtttgtagactatggggtagaggttgacaagtcactgggatcctgaaaatacagccccacagttagatgtcagcagtgaatcctgtaatggagttcctagataatgaactccttctcattctgagagttttaccaattgtgcacttcagtttaatgctcttggcttcagactgacggtgcgtgaaggctctagccccaggctagggccctggccacctatgggtgggccctggaaacccagagcaggcggccggacctccctgttaaatgcagacggtcagtcctgccgggtcagttgcagggcgtgctgaggcgcacgcca

SEQ ID NO: 499475 - DNA, 542 bp, Homo sapiens
tgccaggaaagcagtcctggacatttaggaagtcgatgggcaccactgtgttccaacaaaacttcatctgtggatgctgcagtgtgaacttcatagaatttttgagtcatgacatactcttgttattgttttcagtgaatatacaagaacgattcttagcctagggctgtatgaagagaggtagagggttgggtctggcctgtggcatagtctgccaaccgtttgtagactatggggtagaggttgacaagtcactgggatcctgaaaatacagccccacagttagatgtcagcagtgaatcctgtaatggagttcctagataatgaactccttctcattctgagagttttaccaattgtgcacttcagtttaatgctcttggcttcagactgacggtgcgtgaaggctstagccccaggctagggccctggccacctatgggtgggccctggaaacccagagcaggcggccggacctccctgttaaatgcagacggtcagtcctgccgggtcagttgcagggcgtgctgaggcgcacgcca

SEQ ID NO: 499476 - DNA, 542 bp, Homo sapiens
tgccaggaaagcagtcctggacatttaggaagtcgatgggcaccactgtgttccaacaaaacttcatctgtggatgctgcagtgtgaacttcatagaatttttgagtcatgacatactcttgttattgttttcagtgaatatacaagaacgattcttagcctagggctgtatgaagagaggtagagggttgggtctggcctgtggcatagtctgccaaccgtttgtagactatggggtagaggttgacaagtcactgggatcctgaaaatacagccccacagttagatgtcagcagtgaatcctgtaatggagttcctagataatgaactccttctcattctgagagttttaccaattgtgcacttcagtttaatgctcttggcttcagactgacggtgcgtgaaggctcyagccccaggctagggccctggccacctatgggtgggccctggaaacccagagcaggcggccggacctccctgttaaatgcagacggtcagtcctgccgggtcagttgcagggcgtgctgaggcgcacgcca

SEQ ID NO: 499477 - DNA, 641 bp, Homo sapiens
acatggagtgagggccaagcacaggacctttccccatatgctcttttgtctgagaaactttagccaaacattttcaaaccaaacagaaacaaatggcagccactaactctgctcacagtcaaggtatttttttcttgaagctctgatttggggaaaatatgaaacagaccttacccagacacaggctgtgcctcctcctccctcttcctcctctacccccttcatggggtctctctcaactctacagaggggaccagtgctgttatcaactccctgtctgcccagggccgcctctgaggtcatcctctccccagccaccacggcggagccccatgtggctcacacggatgctggaatggtcctcccatcctgggacagtcctcaggcacgtggtgctctgctctgggtcaccctcctactgattttggctctacagctccctaataaataataaaggcagaagccactttgatggtgcaggtggcaggtgggacagtgaagtgggtgcacagaagcgggtgcacaggagcaggttcacacacaaccaaatgcacagtgtgcacagacacacacactacccagggcacaagagcaggtgcacacayacacgcacactacccagggcacaggagcaggtgcac

SEQ ID NO: 499478 - DNA, 611 bp, Homo sapiens
actactacaggttctacccccttttctgatttattgtttctcaatccatagtgtaagtaactcctgcatcttttagggcaaactatcttctttcatttttgttctctgtaggtcaatctctgggaccaagtcaatcaagctaacttctctgtcagagttcctgcttcttgagttctccagccttgaagaaatccagcagatcctttttctgtctgcttgtggctatatctgattgttctgagtggaaatatcaccactgtcactgtcatccgcctggatcaaagcctccacatacctgtatacttattcctagggatcctctccatttctgggacatgctatacctttgtcattctgcccaagatgctcatagatctgttgtctttgctcagaacaatctcatttattaactgccactccagtgttcttctttctgggttttgctgtcactaatttcatgttcctgggcatgacagtttatgattcctatgttgccatctgccatccacttcactacyctgtccttacgagctggcagatatgtaaacaactggcagcaacgtgtgctgtgattgtttttttttgtttgtttgttttcactgataggctcc

SEQ ID NO: 499479 - DNA, 396 bp, Homo sapiens
caatgaagccataggaaatgcagataaatatcaagggcacaacaagcaccaagaccccgaagatgaagatgaccagttcactgatgtagctgtcagcacaggcragacggataactggtgaaatatcacaaaagtagtggttgaccttgttggagccacagaaagggaggctaaagacaaaagttgttcccaccagagatattaggaagccactaataatacaagttgctatcagttgtccacatactctccagctcatgagaacagcgtattgcaaaggctgacagatggcagcataacgatcataacccatcactcccagaagcagacagttagtgacagcaaaaccgaggaagaagaacatttgggtggcacaactcacaaaggagagtgtcc

SEQ ID NO: 499480 - DNA, 396 bp, Homo sapiens
caatgaagccataggaaatgcagataaatatcaagggcacaacaagcaccaagaccccgaagatgaagatgaccagttcactgatgtagctgtcagcacaggcgagacggataactggtgaaatatcacaaaagtagtggttgaccttgttggagccacagaaagggaggctaaagacaaaagttgttcccaccagagatattaggaagccactaataatacaagttgctatcagttgtccacatactytccagctcatgagaacagcgtattgcaaaggctgacagatggcagcataacgatcataacccatcactcccagaagcagacagttagtgacagcaaaaccgaggaagaagaacatttgggtggcacaactcacaaaggagagtgtcc

SEQ ID NO: 499481 - DNA, 396 bp, Homo sapiens
caatgaagccataggaaatgcagataaatatcaagggcacaacaagcaccaagaccccgaagatgaagatgaccagttcactgatgtagctgtcagcacaggcgagacggataactggtgaaatatcacaaaagtagtggttgaccttgttggagccacagaaagggaggctaaagacaaaagttgttcccaccagagatattaggaagccactaataatacaagttgctatcagttgtccacatactctccagctcatgagaacagcgtattgcaaaggctgacagatggcagcataacratcataacccatcactcccagaagcagacagttagtgacagcaaaaccgaggaagaagaacatttgggtggcacaactcacaaaggagagtgtcc

SEQ ID NO: 499482 - DNA, 477 bp, Homo sapiens
atagcaagctctcctatagagacccatgtggtaagcaattgaaggaggcctctggccaacagacagcaaggaaccaagtcgctcagtctaacatcatgtgagacactgaatcccattaacaatcacatgagagagcttggtttcagatcgtctccctcagttgagcctggagatggctccagctcagccaacatcttggttgcagccttgtgaaarcccctgagctggggggtccagccaagccacacctggatttctaacccacaggaacagtgagtcatgtgttatttcaaccccctacattttaaagtaatttgtaatgcagcaatagatgactaatatatattcccatttggggccattctctgtcttcacaaagtgggtattcaagtacactgcttggcagctctgcccattgggaaaatttactttctttgttgtctttcaagttcgtctctgatggtagcagtaaggaag

SEQ ID NO: 499483 - DNA, 573 bp, Homo sapiens
ccactgacaccaacccctgccatctgttgccatttctctggctgtcatgcacctggtggtacagaggtactctgtatgtgtcagccatggcctcaaacacagatgagttccattttcctgtccatggaaaatatgcgtagctaatcttccaaagaactttacatttcaaagctcctatgtctaacttatgaatctgctcttaatcattacccatagcttgagaactgtcaccctaacccaactttaagagatgtttatctgtgtcactaaagacatcaattctcataaatggtgcrgagatgcatatagatatatgtctatatatagcaggttaccaagtagaatgtgcagtgtgtaatcttaaccatgaaaaaaaaatgctcaagaaaaaaagactagaaagttagcttataggagttatattcacttccttctcgatacctgatacgtactatagtttccaaatttttagaagtgaagagattacttttagaatctgtttctttctttctttctttctttctttctttctttctttctttctttctttctctcaatatgttttatatgtaa

SEQ ID NO: 499484 - DNA, 614 bp, Homo sapiens
aagaatctgagaaaccaaaagagagaaattgagagaccacttgaatacaggtaatcctcacgtctctaatgtctaatgctcttgcaatcgttaaaagttgaaaatagtcaaagccaaggcaatttcccatggaacaataaataatgaagaatttagatgctgaacaaagacccaatgctcaatctctatagaaagaccgtaaacacttagtacagctataaattatgtagaccatttatattttctataatgggtacaatattgtaatagaaaaaaattaaatgcacgttacttaaaataattttgcctctttatacttctgcagtataaaactttctaaagtatacgtacataagttagaaagagctacatactaatcaatcccatgaaagtgtatycaggatggtacactgtcacaatctacaagaacgacaagtatttagagtatcaatatttgccgctgaatattatttcatttaactctaaaaataagcaagcaaaattctttttatcattaccattttgaaaatggcatctcagagaaaatcgatagctttctcagaaggagctttattggctcatggaactgcagtttggaggtagtgctgccccag

SEQ ID NO: 499485 - DNA, 585 bp, Homo sapiens
cacctggacacctactcccatccactttaatcagagtcaccaagccacagcgggggatggtggaggtgcaggcctgggcagaacagggactgtcccagacttcttcctgttctccttcccactcagctcaactgcttttgtcttgtttactcagcacagttctcttccccactagccccactccccattgtccactatctttccatacccacacataactgaattatttatgggagggatttttctttttactttaactgagaaagcaacccaagggcaagaattttttttttatattttacttttagatttattttaaaagttaaaaaaaaaaaaagttcacctcctatcttggaagcaatgaaccaatcttgaataagtttcattcacaggtagattcagagcttgacgatctgtgactctactttggcatgatacctgacctcctctggtaktgccaggcacctgcagtacttacctgattaaggtaatttaagtttggctgctaataacactctctggctctcctccagactccctgactattcatccaagcctccttcataggctctccctcctcctccc

SEQ ID NO: 499486 - DNA, 623 bp, Homo sapiens
atattttgtataatggtgtayatatcctaaaagttgctttagtcactaaataatttttgagacctatccatgtaactacacatagatttagttgattacttctgaatgctgaataatattccaccatttgaaaccaccactttcatctagccattcctcctatggatggacattggatatttgtctgttgatgatctgatgtattcttctgacttccccttctctgattgtaccggattactccttagttgtttcatgtaagtgagatctgtctcccagaccagaaggtaaacttccagacctccatgtccaacatgcattacagaataattttttgaatgaatgaactttgtgtttttgactgcctcgtagactaatagtagctttggattcaacagaggctcagcaaattctatttatttatttatctttttccctttttaaaagagaagttttgaccgggcgcggtggctcatgcctgtaattccaacactttgggaggccaaggcaggcagatcacctgaagtgaggagttcgagaccagcctgaccaacatggagaaacctcgtcactactaaaaatataaaactagctgggcgtggtggcacatgcctgtaatccca

SEQ ID NO: 499487 - DNA, 435 bp, Homo sapiens
ccatgataaaacacagtacgttgcacaaattaaagatggttgttctcatccaaatcagttttcctaaaaaggcaactgtgtttaggacagccctgtgttactgcagacgttgagacagatccttggcttttgccacagcactacctatagcatakgaatagctagagaaaaaggaggagcaaacctcaatccataaacaaggctgaggcctagatcccacccttctgagatcactatggatggagggtgggcctaccttctgctgcagaagcagccaagtacctctttcagtctgatggtgtagttctcttctagaaatggctttaagaagtagcaagaagaagaaagcaagctacaacagccacagaagctgttagccagattaaaaaaaaaaaaaggaagaggggaaagacaggtttttaaaacccatacagg

SEQ ID NO: 499488 - DNA, 435 bp, Homo sapiens
ccatgataaaacacagtacgttgcacaaattaaagatggttgttctcatccaaatcagttttcctaaaaaggcaactgtgtttaggacagccctgtgttactgcagacgttgagacagatccttggcttttgccacagcactacctatagcatatgaatagctagagaaaaaggaggagcaaacctcaatccataaacaaggctgaggcctagatcccacccttctgagatcactatggatggagggtgggcctaccttctgctgcagaagcagccaagtacctctttcagtctgatggtgtagttctcttctagaaatggctttaagaagtagcaagaagaagaaagcaagctacaacagccacagaagctgtyagccagattaaaaaaaaaaaaaggaagaggggaaagacaggtttttaaaacccatacagg

SEQ ID NO: 499489 - DNA, 636 bp, Homo sapiens
catatggactatcaagacagcagcaaccccaggatctcagccttacagcagagctgcacctacctgccagctccttccacatcaagtgcatggggttagcacgtcgatgtctggggacagagcaggagagctgagagagattgttcctgtggagaagcagggcaggtgaactgagatagaactctccaaagccctctgagccttcaccaatctytaagccttcaccatcctgtctgcagcaggctgagacgggaccaaagaaatcttttcagggcactgctatactctcccaagtgcaccacagcaaccctcaggggctgggacaagatgaaaggtctgagagagagaggtgtttgaaggcatgaacatccaggggtaagactgaccagcaaagagaattccccagcagccccaaaagctggcagtcaggttataaagcagaaagagatcacttgcagtttagaaagctgaccagttaactacagagcataaagggatccctggagtctcattggcacttagagatctgctgaaggggaagtcctcatattgtcttaatgatatcggaggccagtggtgacttatatctaactgaagttacaaacgaacccagacctagaacaactacacatgaga

SEQ ID NO: 499490 - DNA, 636 bp, Homo sapiens
catatggactatcaagacagcagcaaccccaggatctcagccttacagcagagctgcacctacctgccagctccttccacatcaagtgcatggggttagcacgtcgatgtctggggacagagcaggagagctgagagagattgttcctgtggagaagcagggcaggtgaactgagatagaactctccaaagccctctgagccttcaccaatctttaagccttcaccatcctgtctgcagcaggctgagacgggaccaaagaartcttttcagggcactgctatactctcccaagtgcaccacagcaaccctcaggggctgggacaagatgaaaggtctgagagagagaggtgtttgaaggcatgaacatccaggggtaagactgaccagcaaagagaattccccagcagccccaaaagctggcagtcaggttataaagcagaaagagatcacttgcagtttagaaagctgaccagttaactacagagcataaagggatccctggagtctcattggcacttagagatctgctgaaggggaagtcctcatattgtcttaatgatatcggaggccagtggtgacttatatctaactgaagttacaaacgaacccagacctagaacaactacacatgaga

SEQ ID NO: 499491 - DNA, 636 bp, Homo sapiens
catatggactatcaagacagcagcaaccccaggatctcagccttacagcagagctgcacctacctgccagctccttccacatcaagtgcatggggttagcacgtcgatgtctggggacagagcaggagagctgagagagattgttcctgtggagaagcagggcaggtgaactgagatagaactctccaaagccctctgagccttcaccaatctttaagccttcaccatcctgtctgcagcaggctgagacgggaccaaagaaatcttttcagggcactgctatactctcccaagtgcaccacagcaaccctcaggggctgggacaagaygaaaggtctgagagagagaggtgtttgaaggcatgaacatccaggggtaagactgaccagcaaagagaattccccagcagccccaaaagctggcagtcaggttataaagcagaaagagatcacttgcagtttagaaagctgaccagttaactacagagcataaagggatccctggagtctcattggcacttagagatctgctgaaggggaagtcctcatattgtcttaatgatatcggaggccagtggtgacttatatctaactgaagttacaaacgaacccagacctagaacaactacacatgaga

SEQ ID NO: 499492 - DNA, 528 bp, Homo sapiens
tgggaaaggaaaacttggaagctctgcaaagacctacgctccttcatctaatccatggaaaggtaaaggggcgtttagattccacaactttttctccaacttcatatttttcttcccttcagtagatattattttgaggtaatcacattgtaactacttttatggtaaatggaatttcttcaagaactaaagaacagaggttgtaaattaaatgtttccaaactgaatcaatgccctgagttcccttacatttactagccaatttgtttcctatttttctggaaatctttatagtggaatgaagtatttatttattgatgaaaggcattattaaaaggtaaatttctcatcaaattataagggattacaaacrtaatgtaacaaagcaagtcatcaaagcatgattggatgaattcaggaaaggagacaaattatgagactgaaatgatccaactgagattagtaatattgatttgttatgagattatcgatatctggctaaagtacaaggttaaagattttaaaagg

SEQ ID NO: 499493 - DNA, 584 bp, Homo sapiens
aatacagaaaatataaatagaacagttaccacaggagaaataaaattgtcaaaaagctacaactcccaaaatacaaaacctatgtgatctgatagatgaaygttagcaaatttttaatgaaaaagaattggcaatgccattgtaacatcttcataacagaaaagcaagagagagtgcactttattaattttatgagttgagcataatcttgttatgtgtcactagcacctagtgcttaagcacatagattctagccataccttgagccagccatgaaatctttgtgtcagagaaagttgactgtccaccaaaagctaatttttgttaacatagaacatagctgtaattggaatatgattcccactcaagagtttttaatcagtttccctttcagctatactaattctcaaccatggaatgtaactagaagtgatgtttaccatttcaaggcaaagactttaagcagatatatcctccttgtggaaggcataataatgtccgttcaaagatcctaattcccagaacctttgaatatgttaagttacgtggtaagggggaatttaaggttgaagacagaattaaat

SEQ ID NO: 499494 - DNA, 584 bp, Homo sapiens
aatacagaaaatataaatagaacagttaccacaggagaaataaaattgtcaaaaagctacaactcccaaaatacaaaacctatgtgatctgatagatgaacgttagcaaatttttaatgaaaaagaattggcaatgccattgtaacatcttcataacagaaaagcaagagagagtgcactttattaattttatgagttgagcataatcttgttatgtrtcactagcacctagtgcttaagcacatagattctagccataccttgagccagccatgaaatctttgtgtcagagaaagttgactgtccaccaaaagctaatttttgttaacatagaacatagctgtaattggaatatgattcccactcaagagtttttaatcagtttccctttcagctatactaattctcaaccatggaatgtaactagaagtgatgtttaccatttcaaggcaaagactttaagcagatatatcctccttgtggaaggcataataatgtccgttcaaagatcctaattcccagaacctttgaatatgttaagttacgtggtaagggggaatttaaggttgaagacagaattaaat

SEQ ID NO: 499495 - DNA, 584 bp, Homo sapiens
aatacagaaaatataaatagaacagttaccacaggagaaataaaattgtcaaaaagctacaactcccaaaatacaaaacctatgtgatctgatagatgaacgttagcaaatttttaatgaaaaagaattggcaatgccattgtaacatcttcataacagaaaagcaagagagagtgcactttattaattttatgagttgagcataatcttgttatgtgtcactagcacctagtgcttaagcacatagattctagccataccttgagccagccatgaaatctttgtgtcagagaaagttgactgtccaccaaaagctaatttttgttaacatagaacatagctgtaattggaatatgattcccactcaagagtttttaatcagtttccctttcagctatactaattctcaaccatggaatgtaactagaagtgatgtttaccatttcaaggcaaagactttaagcagatatatcctccttgtggaaggcataataatgtcygttcaaagatcctaattcccagaacctttgaatatgttaagttacgtggtaagggggaatttaaggttgaagacagaattaaat

SEQ ID NO: 499496 - DNA, 611 bp, Homo sapiens
tcccctcatgaaaaggttacagagcattttcagtgttggatgcaactggagtcctgtccgtaatttagttttctagaatgaggcttttgatttattgagcattcccgcaaatagttctgaagcttttccaagtcttaccccatttaacacctctgcttaatcagtaagtgatcataaaacacatgtgaattacaccacagcgccaaatgatggtcccattgaaagaattaagaaattgaaattcataacacrcaaatgtaagggaagagctgcttaccttttcacaaactggactgttgtcatttgcatccagaactttcacttcaactatcgcttttgatgagaaggtgccatcagttgccgtgatagtaagaaggtaattgtcccttttttccctgtctagaggtttcttcacatataccttccattcattctgtatagtttcaacagcaaactgtcctaaaggatcccctcctattaaatcaatggaggaagataataatcaaatttgttgaaaggataaaaataagtaacagaaaaaataaactgtacaaaagatgtataatgttatagtttaaaagaattgagtattaaaagaattaatttggcat

SEQ ID NO: 499497 - DNA, 611 bp, Homo sapiens
tcccctcatgaaaaggttacagagcattttcagtgttggatgcaactggagtcctgtccgtaatttagttttctagaatgaggcttttgatttattgagcattcccgcaaatagttctgaagcttttccaagtcttaccccatttaacacctctgcttaatcagtaagtgatcataaaacacatgtgaattacaccacagcgccaaatgatggtcccattgaaagaattaagaaattgaaattcataacacgcaaatgtaagggaagagctgcttaccttttcacaaactggactgttgtcatttgcatccagaactttcacttcaactatcgcttttgatgagaaggtgccatcagttgccgtgatagtaagaaggtaattgtcccttttttccctgtctagaggtttcttcacatataccttccattcattctgtatagtttcaacrgcaaactgtcctaaaggatcccctcctattaaatcaatggaggaagataataatcaaatttgttgaaaggataaaaataagtaacagaaaaaataaactgtacaaaagatgtataatgttatagtttaaaagaattgagtattaaaagaattaatttggcat

SEQ ID NO: 499498 - DNA, 274 bp, Homo sapiens
ctttccccattaggagctgcttcatgtattacatctgagtttttagttcatagggtgtaaagttcscttgaattcattttctttatgatagagcaaagttttgaattttcattctgtcactacaaggattgacagaaggggcaaatgcagtcactgacaaagataaacagatgggaagataggagagcagtagttacactgacattttgctccagtcctttcaaatttcacattaattgcatacgtcactccagagtcctcttttctccgtgaa

SEQ ID NO: 499499 - DNA, 624 bp, Homo sapiens
ctgctttgcttcattctctgcctctgtcatcacatggcattgagacatgtcattctcccaggtgtctgtctctgtgtctcttctccttataaaaacatcagtcatactggattaagggcccactctaccccactttgacctaatcttaactaattccatctgcaatgagcctatttccaaataaggtcacattwtaaggtactgggggctgaggattttcacctcttttagggggacatgattcaaatgataacaaaacatatccaagcataccttatttatgaaagctggggcattattcctaattatttttcaggtctgagactggttgggagctgttttgtttcctttgtaggtaggaagagggtggctgagctctgaactcaagctagtggtgtgcacacatgttttttgaacatgtcgtctgtgagctacaatcgtttgggtgaacaaaactcttttcttatttttatgagattatagtgttccaacaaataaagaaaaagaagacttctttctccttgctgagtcaaggcttgtattctagggttccttcattcctgtaacacctcatccatgacaaaactcttgtttccagcctggagggaaaaaaattacagtcat

SEQ ID NO: 499500 - DNA, 603 bp, Homo sapiens
cccatcaaaattagggagcacagtatggcagatctttagttagaagccatgaaatgactggaccattgtagtatctgaaaaaaatttttcaatttcttatttgtacagactgctttagagtttacaattatatataactttggagtaggcagtaatgcattaatttcccaaatttacaggggccatgcaaatttcaataatagattcagggaggtttaaggctgaattccctgcttgtaagattttgcttatttctgtgataggcactgagtgaagtattgagaaagcaggttctggggccagattaaaattatgactctgggttaaaattctgattctgtcatgtaccaattatttaacttctatgtgcctcaattttctcatgtgttaaatagggggtgatggtggtactacataggktcatcatgaaaataaaataaacatagataaggcactagcgagactaataaagaagaaaagagagaatatccaaataaacacagttagaactggcaaaggtgatgttaccactgacaccccggaaataaaaataaccatcagacaccattatatacacaaacacgtatacaaactggaaaacct

SEQ ID NO: 499501 - DNA, 523 bp, Homo sapiens
attctaactaaaaccacattttcctcacccaaggcaacactgttctctttcaacttcatggcaattgttgtgtgtttattgtcctttttttgtggcgtgggggtgagaaaggctctgttgttcttgctgtagttgtggtttatagacattttgaawgagaaattgatatcactgtagctgtaataatacaagtgtctttctattttttagataaaagtaactaaagataccaatgaattaagaattcataacatgcctaatgtcccttacatgttctactttcaccctctcccaaaatattttatcaaattcatatataaatgcactttgctaatatttttatatttaaaatttattgtctgtcatggtgcagcctttctgtctgttccttcatcatccctccaggataaaggagatatgtttttactttgctcatagttgtatcccaaacccctagataggaagagactgaataaatatgaattcgggcattaatgaattgtgtaaacaactgtagtctcag

SEQ ID NO: 499502 - DNA, 613 bp, Homo sapiens
taaatgatttatagaagccactttcagcaattctaaagtacttgcttattcagcaagcggtctttttatatagatatctggtaccaagagatggtaaatgtaattttaaatgatattgtaatgttttgtttgcttggactttaaaaaactttgtagttttatattggcaatgataatctcatgagagmcaataatttttttttgctaaacaacgattaaaagtgagcttattaatatatactatcatcattgtagaactgctgacttttgcagaaattctgtagattttcatttacatttgattagaacccatgtgttttgtttggttcccccaaaagcgtatactttaataagaaattgtgaactactagtttatgggataattccacaaagaactagtagaagagtgaaaagttgagagagtagagataaggaaataataaacgcacctcaaatagggtgcaattttggacaactggaacactaggagacaatgtgaaacatatatcagagttctcaaagcaaagagaaaacctggactaggtagtcagttggcagtaagattaggtgggtatttttggataattaaggagatagaacaatatatttcaag

SEQ ID NO: 499503 - DNA, 613 bp, Homo sapiens
taaatgatttatagaagccactttcagcaattctaaagtacttgcttattcagcaagcggtctttttatatagatatctggtaccaagagatggtaaatgtaattttaaatgatattgtaatgttttgtttgcttggactttaaaaaactttgtagttttatattggcaatgataatctcatgagagacaatawtttttttttgctaaacaacgattaaaagtgagcttattaatatatactatcatcattgtagaactgctgacttttgcagaaattctgtagattttcatttacatttgattagaacccatgtgttttgtttggttcccccaaaagcgtatactttaataagaaattgtgaactactagtttatgggataattccacaaagaactagtagaagagtgaaaagttgagagagtagagataaggaaataataaacgcacctcaaatagggtgcaattttggacaactggaacactaggagacaatgtgaaacatatatcagagttctcaaagcaaagagaaaacctggactaggtagtcagttggcagtaagattaggtgggtatttttggataattaaggagatagaacaatatatttcaag

SEQ ID NO: 499504 - DNA, 549 bp, Homo sapiens
gcagagctcctagggttggggggtgtsctacaactctctcattcccaccacccacagctctgcaaatgggcagggacatgtttcagctccttcagtcccatgctttgctctgtccagtgtctcccgggctcctctccaccacttcgtgtcactggagcacgaaggctatcgtgtttaaactctggcttggaaaatcctgaggcctgggccccgcaaagggtggctgcactttacttctggtccagcaaacaggagcatgtcaccatccagagctcagcaatctggccaagaacgtgttacagcccttttcatgtcctccttttggtggatcccaagttcttgtcctgtctccaagaagaatgcagttatgtggacaaatggagaatgagcaaggcagagaagagttttactgacagacagaacagctctcagtgaagaggattcccctagtgggtaactcctacctacaggcaggtagccctgaacttgtggctgagtccagggttttacggtctcagaagggaggaagtgcattctgattggtctatg

SEQ ID NO: 499505 - DNA, 615 bp, Homo sapiens
gcgtttgcaaatatgcattcaatagcttggagtagagagagaaatgtattcataaatggcaaatatattcatgttgccaaacagcaacataagcaacaaagtacgtgtgagcactacggtcttacatactaaatctcataagcctaaagaatctactgcaaatccctctttgaaagatgggggggaggggaaagtagcgtaaagtgatgacccagaaactgcgatcttccaggcaagaagagcgcccagccgcaccgcactcggaccgaactcctcgcgtctcacctcaggcgtcctaaaggcggtgcgcatgcgcagcgcccgccagccacgccgcggttccttcctgcgcctttatctgcatccgggtccgtgggattcgcgctccactggtcagctggggtcgctctcgggtggttgggtgttgcttgttcccgctgttccagcrtcgaagaaccattgggtctgccggtaagtttagcggggggtgcggcgggggcgccaagaaggggactcgggtcgggggacccgacggcaacttcgccctgtgcggcctttgtgctgagactgggacgccgggccggggcggaatgggtgctcaggaacctcgaggct

SEQ ID NO: 499506 - DNA, 615 bp, Homo sapiens
gcgtttgcaaatatgcattcaatagcttggagtagagagagaaatgtattcataaatggcaaatatattcatgttgccaaacagcaacataagcaacaaagtacgtgtgagcactacggtcttacatactaaatctcataagcctaaagaatctactgcaaatccctctttgaaagatgggggggaggggaaagtagcgtaaagtgatgacccagaaactgcgatcttccaggcaagaagagcgcccagccgcaccgcactcggaccgaactcctcgcgtctcacctcaggcgtcctaaaggcggtgcgcatgcgcagcgcccgccagccacgccgcggttccttcctgcgcctttatctgcatccgggtccgtgggattcgcgctccactggtcagctggggtcgctctcgggtggttgggtgttgcttgttcccgctgttccagcatcgaagaaccattgggtctgccggtaagtttagcggggggtgcggcgggggcgccaagaaggggactcgggycgggggacccgacggcaacttcgccctgtgcggcctttgtgctgagactgggacgccgggccggggcggaatgggtgctcaggaacctcgaggct

SEQ ID NO: 499507 - DNA, 496 bp, Homo sapiens
aacaaatttcacctgattatgaatatcccctgtgataatttgcaaaagcagagattccttggacttcatttcagatcttttgaaacactgtgtctagggagagggacctgagaatctgtatttttaaytagcatcgtaagtgattctcaaccggtaagacatctttggctaatgtctctttgagtcagaaacacttagttttaaagccagctccccgggccactttttaacgtcagcaataaacttctcgtagttgcagttttctgtatatgaagagtgagaataatgctttcaacctcagagacaagtgattctaagccctttgacaatagagttaatcatttttgtgtctacagaacctagcatagtgcttagaatataataggtcttcaaacgtgtgttgaactgagaaaaataacatgcccaggatgcagaagacattggaaagctctaatgcttctcgtcctccttaccttattttttttccgttttatta

SEQ ID NO: 499508 - DNA, 593 bp, Homo sapiens
ctgcgccctccagagagtttaagaaaacaaaaagttgcctgtaccttggtctgagagacttgcttaaacttcgtttcagtgagatgtgtggtgttcttaacaaatttcacctgattatgaatatcccctgtgataatttgcaaaagcagagattccttggacttcatttcagatcttttgaaacactgtgtctagggagagggacctgagaatctgtatttttaactagcatcgtaagtgattctcaaccggtaagacatctttggctaatgtctctttgagtcagaaacacttagttttaaagccagctccccgggccactttttaacgtcagcaataaacttctcgtagttgcagttttctgtatatgaagagtgagaataatgctttcaacctcagagacaartgattctaagccctttgacaatagagttaatcatttttgtgtctacagaacctagcatagtgcttagaatataataggtcttcaaacgtgtgttgaactgagaaaaataacatgcccaggatgcagaagacattggaaagctctaatgcttctcgtcctccttaccttattttttttccgttttatt

SEQ ID NO: 499509 - DNA, 496 bp, Homo sapiens
aacaaatttcacctgattatgaatatcccctgtgataatttgcaaaagcagagattccttggacttcatttcagatcttttgaaacactgtgtctagggagagggacctgagaatctgtatttttaactagcatcgtaagtgattctcaaccggtaagacatctttggctaatgtctctttgagtcagaaacacttagttttaaagccagctccccgggccactttttaacgtcagcaataaacttctcgtagttgcagttttctgtatatgaagagtgagaataatgctttcaacctcagagacaagtgattctaagccctttgacaatagagttaatcatttttgtgtctacagaacctagcatagtgcttagaatataataggtcttcaaacgtgtgttgaactgagaaaaatarcatgcccaggatgcagaagacattggaaagctctaatgcttctcgtcctccttaccttattttttttccgttttatta

SEQ ID NO: 499510 - DNA, 625 bp, Homo sapiens
tgtgtttcaattgttcacctacaaaatgagataatagtgttccatagatgttttatcaattaatgcatacatttagggtgattaatactaggcatataatcatatattccacataagaatgcttttaaattgaatatggtatagagaagttagatttattaaatagcacttatgacttaaaaagaaaaataaactttagatttatttcaggaatacttatatttttattaacttcatctttaggacttccaagaaatcatcctgaaagctaccattcttatatgtggaataatttttttaagcatatcgatatagatcctaataatgcacatatccttgacgggaatgctgcagatttacaagcagaatgtgatgcttttgaaaacaaaataaaagaagctggaggaatagatctttttgttggaggtatgtaaaaaccttttgtcattaactgtttgttagtgtttgaattagggatttttaaatttaaaaaataaatcttcccatwgtgtaatgtaaagagcacctgtggctgtccgtaatacgcgtttattctgctactgattcctgttttcattttcttcagaaaataatcttaaaattcccgtcttaatcttcaaattga

SEQ ID NO: 499511 - DNA, 625 bp, Homo sapiens
tgtgtttcaattgttcacctacaaaatgagataatagtgttccatagatgttttatcaattaatgcatacatttagggtgattaatactaggcatataatcatatattccacataagaatgcttttaaattgaatatggtatagagaagttagatttattaaatagcacttatgacttaaaaagaaaaataaactttagatttatttcaggaatacttatatttttattaacttcatctttaggacttccaagaaatcatcctgaaagctaccattcttatatgtggaataatttttttaagcatatcgatatagatcctaataatgcacatatccttgacgggaatgctgcagatttacaagcagaatgtgatgcttttgaaaacaaaataaaagaagctggaggaatagatctttttgttggaggtatgtaaaaaccttttgtcattaactgtttgttagtgtttgaattagggatttttaaatttaaaaaataaatcttcccattgtgtaatgtaaagagcacctgtggctgtccgtaatacgcrtttattctgctactgattcctgttttcattttcttcagaaaataatcttaaaattcccgtcttaatcttcaaattga

SEQ ID NO: 499512 - DNA, 655 bp, Homo sapiens
cataccagaggatttgccccttggattattcccaaaaactggaaaaagtttgattctcctaaaccttaaaaaaaagccaaaaactagttttactttgtaatactgtttgacctaaaaatgaactgggtgaaaatacaaacatcagcctgagaccccagtaaccttatgcaggaaatcctcaaattagcctcttcagtcttttacaactgagagcagaataaagaggacagagggaaaaagaagaacaaacacaaagataagaggcaggctcaactattggctgctttataagctctccagtcccctccaggtcatcctaaggacactcctccaggtaactgccatcggtatggaaagccaggctcactggaaggcaaactccccaatgggttaaataggaaaaagccctgcattgcttgccccctctgccgcaagctcaaccactaaaactggactgccctgaaggccaaagggcccccaggatggaatcycaacctttgatgagcttgagctgaaggggctctctgctccagccaactccaagattagacatcatcaacaatagggcaagagcaactttggaggtggcaagtaaaattataaattcaccttttaggttcaagagcttcctactctgtgctaatatcctttgagc

SEQ ID NO: 499513 - DNA, 655 bp, Homo sapiens
cataccagaggatttgccccttggattattcccaaaaactggaaaaagtttgattctcctaaaccttaaaaaaaagccaaaaactagttttactttgtaatactgtttgacctaaaaatgaactgggtgaaaatacaaacatcagcctgagaccccagtaaccttatgcaggaaatcctcaaattagcctcttcagtcttttacaactgagagcagaataaagaggacagagggaaaaagaagaacaaacacaaagataagaggcaggctcaactattggctgctttataagctctccagtcccctccaggtcatcctaaggacactcctccaggtaactgccatcggtatggaaagccaggctcactggaaggcaaactccccaatgggttaaataggaaaaagccctgcattgcttgccccctctgccgcaagctcaaccactaaaactggactgccctgaaggccaaagggcccccaggatggaatctcaacctttgatgagcttgagctgaaggggctctctgctccagccaactccaagattagacatcatcaacaayagggcaagagcaactttggaggtggcaagtaaaattataaattcaccttttaggttcaagagcttcctactctgtgctaatatcctttgagc

SEQ ID NO: 499514 - DNA, 448 bp, Homo sapiens
ttctttcatctttccttatctactcttgaggcctcctggatagatgctcttgtgcatttttctgtcttgaaggtgatctgctatggaatctcactctagcatctcacttttctcagagacgaaccttgcttttggttaaacctctattaactatccattaattctatcagttgcttgctcttggaaaattgatctgacaaacttattcatagtgagttgttaatagaccaatgtattttcacatatctgktaaatcagaattttccagaaagatattacaattttctattactttgttataccagttatttcagagaacttgaggctgactgagcaaaatgtgaacccttgatagaatctggactggcttcttcctaatttgtcatttttcatctctaccatctctctctctggacttgctgcctctttctctgtgcctcctctgtgt

SEQ ID NO: 499515 - DNA, 640 bp, Homo sapiens
tctttgatggttactatttgcatgacatatatttttctattgattttctttcaatttgtctgggtttcagcaactgagttgtttgttctcaatagcatattttaggtgtttgttataaatagcatatttaggtgttgttataaatagcatattttcagaacttttaaaatctagtagtataatctctgctttttactgagtgtctagtttatctttgtaaaatgtaataatacagtggagtttagaggyaacatttttaaatgtttagatctaacattttatacaccagagattacaaaattaattcttataacagtctacttacatttaatcttataccacattacataaaatgttaagaactttgccagaatatccttccatttaccctcccctcatgttctttttgctattgttgtcttttattttatgctttacacctacatactacaagccccaaaatccaaacatataatatagcaaataacttttaagaaattcagggaaaaatagtcttttatatttactctcattttaccatttttggagctctttattgttgcctgtaaatccaagtttatatttaatgttatttcctttcatcctgaataatttattctaccttccttgtactccagat

SEQ ID NO: 499516 - DNA, 622 bp, Homo sapiens
ttatttaaggaaacaaaacatggtaagtataaacaatcatgaatggttcctttgtcatagcttcctcatattcctcaaatttaaagtcactttttcttattttggtgttttaagctttttacttgaaaagcattcattattgtataatgattaaatggcatgtgacttatttagcaagttgatttagatattaaatagcattaacattctatggaattcaaacttcatactaagtatttgcttgtaaaaagactcctagaaaaatttaatttcaaaaattacattaaaatgtaagaggtcttataatcctgttatagtcttaatttcttattattccttgcctcgtttgtattttacacattgttaaaatttttttcagttatgggagaatttattctgaattaacacatcccattctctatgtaaacaaagttataaatttgaggggaaaatgctatggttaggacagaaatctgtgataaggaacagaacagaaattcttaatgtatgtcttaagatatgtaaatagcagtatcttatataaaattataaaatagatgttaattttcttcartcctcaagctagtctttccaactttgaggggaaaatgctatggttagg

SEQ ID NO: 499517 - DNA, 533 bp, Homo sapiens
gtgtgaacatgtcaacttccccttttttatgttatctctgaagtattctaagggaagaaaaagtaagaaaacaaatakagcccaactaatttaagagttgctcagttgctctcatatttgcaccatgaattttactaaattatactttaatttgccatcactattaaatggtagaagcttatgaaggaggccaaatacgaggaaatatgtatctgaatctgaatacatttttgattctcacatctcttagaaagttctaaagaaataatcacatctgaaaaaatttttgtgaagttgtttcatgtaattaattcatagtggggaaaggctaactgtcaaaagttgcagttttgacaaggcactttttctagttccattcgtctaatgaaaaatcttgttatttatataacacaaagtcataaaatggcttgcaaatgaaagtcagatagtttgtgccgaatatttctttttggtaggaaaaactattgaagatatacaattgagaaaaagaaggaactggaaatataaatatt

SEQ ID NO: 499518 - DNA, 533 bp, Homo sapiens
gtgtgaacatgtcaacttccccttttttatgttatctctgaagtattctaagggaagaaaaagtaagaaaacaaatatagcccaactaatttaagagttgctcagttgctctcatatttgcaccatgaattttactaaaktatactttaatttgccatcactattaaatggtagaagcttatgaaggaggccaaatacgaggaaatatgtatctgaatctgaatacatttttgattctcacatctcttagaaagttctaaagaaataatcacatctgaaaaaatttttgtgaagttgtttcatgtaattaattcatagtggggaaaggctaactgtcaaaagttgcagttttgacaaggcactttttctagttccattcgtctaatgaaaaatcttgttatttatataacacaaagtcataaaatggcttgcaaatgaaagtcagatagtttgtgccgaatatttctttttggtaggaaaaactattgaagatatacaattgagaaaaagaaggaactggaaatataaatatt

SEQ ID NO: 499519 - DNA, 533 bp, Homo sapiens
gtgtgaacatgtcaacttccccttttttatgttatctctgaagtattctaagggaagaaaaagtaagaaaacaaatatagcccaactaatttaagagttgctcagttgctctcatatttgcaccatgaattttactaaattatactttaatttgccatcactattaaatggtagaagcttatgaaggaggccaaatacgaggaaatatgtatctgaatctgaatacatttttgattctcacatctcttagaaagttctaaagaaataatcacatctgaaaaaatttttgtgaagttgtttcatgtaattaattcatagtggggaaaggctaactgtcaaaagttgcagttttgacaaggcactttttctagttccattcgtctaatgaaaaatctygttatttatataacacaaagtcataaaatggcttgcaaatgaaagtcagatagtttgtgccgaatatttctttttggtaggaaaaactattgaagatatacaattgagaaaaagaaggaactggaaatataaatatt

SEQ ID NO: 499520 - DNA, 583 bp, Homo sapiens
cactggctaagatatttttctctctttccttagtgtgagaaacactactaaagaattttcagtgatgtgctctcttatttctttaggaaaatcctttatgtcactgataattatcatgtgatatgtcttttcttttctttgattcttccacattgtttacatagccatttttttcatgagtctgagaacttcctgaagttaggggcatatttagcctgatattcttaatatcgtgatagctcagaggagaaacatatttcttgtgaaaaggaaagaaaggaggaggccagtgaatamgttaggcaggcagaaagacagggagtgggggcaaaaggagagagaaaatgaatatcacccaataaatactcagtggtcacagatgtaatttttatctatggctacctcattcccacacaatttaaaatccttcaatatttttaccaaagaaggtcatacaaaaaggtcttccggactcaacgtttttttttttttttttttttcaatttctccacacaatggaaattcagacagatggtcatgcccaggaattccagcgtcgaactgaagacagagattaatggaa

SEQ ID NO: 499521 - DNA, 583 bp, Homo sapiens
cactggctaagatatttttctctctttccttagtgtgagaaacactactaaagaattttcagtgatgtgctctcttatttctttaggaaaatcctttatgtcactgataattatcatgtgatatgtcttttcttttctttgattcttccacattgtttacatagccatttttttcatgagtctgagaacttcctgaagttaggggcatatttagcctgatattcttaatatcgtgatagctcagaggagaaacatatttcttgtgaaaaggaaagaaaggaggaggccagtgaataagttaggcaggcagaaagacagggagtgggggcaaaaggagagagaaaatgaatatcacccaataaatactcagtggtcacagatgtaatttttatctatggctacctcattcccacacaatttaaaatccttcaatatttttaccaaagaaggtcatacaaaaaggtcttccggactcaacgtttttttttttttttttttttcaatttctccacacaatggaaattcagacagatggtcatgcccaggaattccagcrtcgaactgaagacagagattaatggaa

SEQ ID NO: 499522 - DNA, 412 bp, Homo sapiens
aatgtggtaataattagatcctgaacttctgtcaaagccaggcaggggggcactaaagaagctcacacaacagaaataatgtcaaatataagtgcgacatatatatttttaaaatcagcaagatgtataaacaattctcactattaatactagtaagtttctycaaagttgaacttaggaaacaggaaaaaattggcacagaacatcctgtgtatcttaccaagataaattccaaataaattgcctgctggcagtacccattaattatttgccgacaatttttcagccagcacatgcttttttatttagctggtccagcaagtcactgcagttgtagttgttcatcttgtcacaggactgggtagaaagccaaatgcagaggtatgagctgccaagtaacccactatctgtg

SEQ ID NO: 499523 - DNA, 546 bp, Homo sapiens
gtgatttgccccatcaagagtcagcagacatttattaaaatccccctgttgggaggctgcccgacaagagagagagaaagagaaagagaggaagagaaagagagaaaaagagagaaagaaaagaaaggaagaaaggagggaagggagggagggagggaggaagagaaggggaaggggaaggggaaaggaaagaagaagaaggggaaattgacccgttagtggtggaattgtgtccctcaaaatttgtatgttgaagttctaaaccccagtacctcagaatgcgactatatttggtgatgaagcctttaaagaggtggtgaacaaaatgcgaatttaattaagctttaactgtttttttccctataccttgattagaaaatattcaactactaggccagggatggtggctcacagctataatcccagctctttgggaggccaaggcgggcggatcacgacatcaggagtttgagaccagcccagccaatacagtgaaaccccatctctactttaaaaaaaaaaaakttcaaaacttagccaggcgtt

SEQ ID NO: 499524 - DNA, 616 bp, Homo sapiens
ctgggcctgttgtcatcatgggctttatctcttatatcgcattctttctgtgactctcttttccagccacactgagcttctattagtctagtatatactgtgcaccttccttcccaaagcctttgcacatgctctttccctgctactgggacaccctattcacactgcaccactcccaagcctctcacatacacacactgtctacaacaaccttaagctcaacaatcacattttttctgagacttgcagtgaggtcagaattcctattagttgctcttatggaaaactctcctttccaattgtaattaatagtttatctactgtttaatgtccacttccccaggataataaaagcttcatgacagtagagaccatatctgttctattcactactgtattttaaacaaagcatcaaaacataacagactatcaatgaatatctgctataaaatcaatcagttactaatcaattaatcatcttgaacacttatccattcccttcattacatcaaagatgmctaagagtggtccttcttctctgagactctccaatacaaaggagaaggaaagttagatttggtgttttatcacagaaaaaaaaaaaaaccttgctcaa

SEQ ID NO: 499525 - DNA, 619 bp, Homo sapiens
tgtccatttggggggctttaggatatttgtattacacttgctgcttaagtgtccctaatctgaaaacctgaaatccaaaatgctccaatgagcatttcctttgggcatcrtgtcagccctcaaaaagttttggattttagagcatttgggatttcagatattcaaattcgggatgctaaacctgtaccaaaaattttccctctatctatcgtcctctgtcattagagaattttatagcttgttgaccacttaggaagatacccttgaaaagaccaagtatgtgactagggagaaaaaaatattaaggaaaaaaaaaagagaaatattagtttgaaactgctcatttaaaattactagtttcaatcaatgacaattttaagatattaaatacattctggagtaacttgtcaaaaaataaaaaggtgccattactgatattctccaaggtttttctaataagatcagggtcagtgatgggaaataagctggaagatgaatagagtgtcagaatgcaattgagttctaagcagttacagcaagttccccagtaaacacagcttgagcaagtttgttcctgatgatggttagggaggcctttggtgaaaatgacccagagaac

SEQ ID NO: 499526 - DNA, 600 bp, Homo sapiens
attttgttgttgtttatttgtgagtctactaaagtacactttgaatgactgctgattaaagcgtagagaaaaaattaagtaaaaaataaataacatcaaatcacatgtcccctctgatgaaaataatgtggaaaaacatatatcaatggagaaaaaaattatgaaggcctacttgttttagggtgatgacatctgattatattttttgctcttctcattttatcagttataaaatagttctactgctgttacaatgtttacagtaataacaaataaaaactatatatacatatacataaaattttggggtcactttggtccctacccaaattccttcgtgtctgtggtttaaaccgtcaccttgttgagctgacattgctttgccattccyatttcagaaacaaaaaagtgtagcactctgaaaatctccatatgcaatagatttaaatgccttctgccaaaagagcattctcttttctctcatcttgctttactaacagctattttgaaatcaaattagtttttacacctgtaaaagagaagagtttttttatcagccaaaatgagctagtttaggacaatcacaaagaagtcaaacca

SEQ ID NO: 499527 - DNA, 458 bp, Homo sapiens
gacaatttgggttagagctgtgctgtggactacagctatttgaaagtacagttttatttttatgacagtttgctctctgctgtctgggatatttacattttcytttcctatggagaaggtcagagtatgattgattcaacattaaaaataactttagattgtttaaagtgaggatgttctaaatgataatatttgtgaagtcctctattttgatatttttcacttaagatcagtgatttagaaattaagtgaaaatcttgttaccatttgaatgaacatactgatattaataaaatgataagtattttagatgatcatccaagttagattttgacagaatgcctagggtcttggagtaaccagcttttggcaattcctggctctctttttcatattcaaatttgtaaagaaagtagagaagagtaaatgtgtgtaggtgtcttcctcctggaagtagg

SEQ ID NO: 499528 - DNA, 458 bp, Homo sapiens
gacaatttgggttagagctgtgctgtggactacagctatttgaaagtacagttttatttttatgacagtttgctctctgctgtctgggatatttacattttcttttcctatggagaaggtcagagtatgattgattcaacattaaaaataactttagattgtttaaagtgaggatgttctaaatgataatatttgtgaagtcctctattttgatatttttcacttaagatcagtgatttagaaatyaagtgaaaatcttgttaccatttgaatgaacatactgatattaataaaatgataagtattttagatgatcatccaagttagattttgacagaatgcctagggtcttggagtaaccagcttttggcaattcctggctctctttttcatattcaaatttgtaaagaaagtagagaagagtaaatgtgtgtaggtgtcttcctcctggaagtagg

SEQ ID NO: 499529 - DNA, 603 bp, Homo sapiens
gatcaaataccttttttttacagtaccttttgccttttgaattctttattgttttcatttaagaaatgtggaaatctgaaacaaactatattctcaatcatgttagaaaaagtatatgtaatatgtattttttttaaagtccagtggctaagaacttagactgggttttgaaataataatttcctaacacagtttctcagtatgtttcctctagacaagagaaaactctgtaattataagattcttaatttaccctggtaatttcataagaaaaatgattaattactttgagcaatcagttatacagataatcatggttctttatttaaaccacaaaaaatagaaagcagggaagcttatgcataaaacataaagaaaaattcatttagtaaaaatgaaatcagtgttaaaatatttcttttgacacagtcagctaacatctttctatttttgctgagtaacaattatattttaagttcaactaactcttgacacagcaatggaatttgaagtgaatatactactttraaaaataaatgttgtatttagagtgctgacatttagaaaatggtagttttgtgaaatttgcaatgtgttttagaa

SEQ ID NO: 499530 - DNA, 603 bp, Homo sapiens
gatcaaataccttttttttacagtaccttttgccttttgaattctttattgttttcatttaagaaatgtggaaatctgaaacaaactatattctcaatcatgttagaaaaagtatatgtaatatgtattttttttaaagtccagtggctaagaacttagactgggttttgaaataataatttcctaacacagtttctcagtatgtttcctctagacaagagaaaactctgtaattataagattcttaatttaccctggtaatttcataagaaaaatgattaattactttgagcaatcagttatacagataatcatggttctttatttaaaccacaaaaaatagaaagcagggaagcttatgcataaaacataaagaaaaattcatttagtaaaaatgaaatcagtgttaaaatatttcttttgacacagtcagctaacatctttctatttttgctgagtaacaattatattttaagttcaactaactcttgacacagcaatggaatttgaagtgaatatactactttaaaaaataaatgktgtatttagagtgctgacatttagaaaatggtagttttgtgaaatttgcaatgtgttttagaa

SEQ ID NO: 499531 - DNA, 603 bp, Homo sapiens
gatcaaataccttttttttacagtaccttttgccttttgaattctttattgttttcatttaagaaatgtggaaatctgaaacaaactatattctcaatcatgttagaaaaagtatatgtaatatgtattttttttaaagtccagtggctaagaacttagactgggttttgaaataataatttcctaacacagtttctcagtatgtttcctctagacaagagaaaactctgtaattataagattcttaatttaccctggtaatttcataagaaaaatgattaattactttgagcaatcagttatacagataatcatggttctttatttaaaccacaaaaaatagaaagcagggaagcttatgcataaaacataaagaaaaattcatttagtaaaaatgaaatcagtgttaaaatatttcttttgacacagtcagctaacatctttctatttttgctgagtaacaattatattttaagttcaactaactcttgacacagcaatggaatttgaagtgaatatactactttaaaaaataaatgttgtatttagagtgytgacatttagaaaatggtagttttgtgaaatttgcaatgtgttttagaa

SEQ ID NO: 499532 - DNA, 608 bp, Homo sapiens
gctataatccatttgaaagacacatgctgttgcactgaatgacacagccaatgtcaacaggaaggaccagctacataacttctgtaacccagtgaaaaatgaaaagcaagaccccttgctcaaaaatttttaagggttcatttagtgaaaccattgcttcctgagactactatgagaartaaatcacaaaatccactgtgccttactaaaatcaacaggtagtaatgagggagtgaaggggaatgcaataatatataactttatatctttcccacatctaatacttttatttggcctctaatggtggtctcaaacccagttttaagtttacttgcaccagaggaagattatacattacccaagacgtgatattcttgtcatttaatttgactgtgccttttctgaaaggtaatttgtggtggatcaaaagttccttcctatgtaatcaaattagggctaaaggtgaaggtagctccattatcaagcagaggagagacttctgaggtcctctgtctatcacttataacatttgtttgacaacaaaccccatgacacaagtttacttgtgtaacaaatctgcacatgtacccctgaacttaaaataaaag

SEQ ID NO: 499533 - DNA, 608 bp, Homo sapiens
gctataatccatttgaaagacacatgctgttgcactgaatgacacagccaatgtcaacaggaaggaccagctacataacttctgtaacccagtgaaaaatgaaaagcaagaccccttgctcaaaaatttttaagggttcatttagtgaaaccattgcttcctgagactactatgagaaataaatcacaaaatccactgtgccttactaaaatcaacaggtagtaatgagggagtgaaggggaaygcaataatatataactttatatctttcccacatctaatacttttatttggcctctaatggtggtctcaaacccagttttaagtttacttgcaccagaggaagattatacattacccaagacgtgatattcttgtcatttaatttgactgtgccttttctgaaaggtaatttgtggtggatcaaaagttccttcctatgtaatcaaattagggctaaaggtgaaggtagctccattatcaagcagaggagagacttctgaggtcctctgtctatcacttataacatttgtttgacaacaaaccccatgacacaagtttacttgtgtaacaaatctgcacatgtacccctgaacttaaaataaaag

SEQ ID NO: 499534 - DNA, 315 bp, Homo sapiens
aagtgaatagcactgattctatgaggaatgaacattgccaaacaagtgttttgttttgcttttcaactcctctaaaaaaattcacatatatgcatgccactttcctgaaaaatatctgcctcataattgccataagaaactgtatggacaactcttaaacattctgaaagtagtcagggatgggggaaagcatttgctattttagtctgttcctggtcttataacaaataccacagactgggtaatttatgattacagagatgyatttctgaaagttccaggagttgggaagctcaagattatggcaccaacata

SEQ ID NO: 499535 - DNA, 597 bp, Homo sapiens
aatgtggacatatttggggacgcattatttagtctttcacagttataacagagcttttttttttttttttttttttttttttgatgaaatcttgctttgtcccccaggctggagggcaggggcatgatctcggttcataacaacctttgcctcccgggttcaaacaatttttccccctcaacctcctgagtagctgggattacaggcacgcgccaccatgcctggctaatttttctatttttagtagagacagggtttcaccatgttggtcaggctggtcttgaactcccaacctcgtgatttgcccccccaggcctcccaaagtgccgggattacaggcgtgagccactgtgcccagccaataacagagcttttttttttttcttcactatataatttgaagcaaaatgccccagtaatacatgaagaagctgcaggcattcagtgttctttcagtatcctttaagaaagatgaatagtcttttccctacatwtactgacttcacaacaaacttattcattttttgagatgcaaattacttcaatgtttcatattgatctaaattagctccctccttgtttctaatttttgattag

SEQ ID NO: 499536 - DNA, 519 bp, Homo sapiens
ttttagtctctactaaaaatacaaaagttagccaggcatggtggcatgcgcctgtaatcccagctactcaggagctgagacaggagaatcacttgaacacaggaggcggaggttgcagtgagccgagattgtaccattgtactccagcctgggcaacaagagcaaaactctgtctaaaaaaaaaaaaagaaaagaaagaaagaaaaaagraaggtattcagatcagcctcaactcactggtaaggattgccttaaatttttatccttgagggccaaggattagtctgtgtaattgaaaatatatcctgctggattaatgctatggaccatttcaatgcagaaacttgtgaaagacacttcttggttttctaaagtagaccttattgatgtataggaattattctataaataccttgaaggacatggatgagcataatattgcagattgaccagatctacttgtttagagtactagagatagtagccttatggtcagattattcagggtagctgttgaga

SEQ ID NO: 499537 - DNA, 519 bp, Homo sapiens
ttttagtctctactaaaaatacaaaagttagccaggcatggtggcatgcgcctgtaatcccagctactcaggagctgagacaggagaatcacttgaacacaggaggcggaggttgcagtgagccgagattgtaccattgtactccagcctgggcaacaagagcaaaactctgtctaaaaaaaaaaaaagaaaagaaagaaagaaaaaaggaaggtattcagatcagcctcaactcactggtaaggattgccttaratttttatccttgagggccaaggattagtctgtgtaattgaaaatatatcctgctggattaatgctatggaccatttcaatgcagaaacttgtgaaagacacttcttggttttctaaagtagaccttattgatgtataggaattattctataaataccttgaaggacatggatgagcataatattgcagattgaccagatctacttgtttagagtactagagatagtagccttatggtcagattattcagggtagctgttgaga

SEQ ID NO: 499538 - DNA, 519 bp, Homo sapiens
ttttagtctctactaaaaatacaaaagttagccaggcatggtggcatgcgcctgtaatcccagctactcaggagctgagacaggagaatcacttgaacacaggaggcggaggttgcagtgagccgagattgtaccattgtactccagcctgggcaacaagagcaaaactctgtctaaaaaaaaaaaaagaaaagaaagaaagaaaaaaggaaggtattcagatcagcctcaactcactggtaaggattgccttaaatttttatccttgagggccaaggattagtctgtgtaattgaaaatatatcctgctggattaatgcyatggaccatttcaatgcagaaacttgtgaaagacacttcttggttttctaaagtagaccttattgatgtataggaattattctataaataccttgaaggacatggatgagcataatattgcagattgaccagatctacttgtttagagtactagagatagtagccttatggtcagattattcagggtagctgttgaga

SEQ ID NO: 499539 - DNA, 519 bp, Homo sapiens
ttttagtctctactaaaaatacaaaagttagccaggcatggtggcatgcgcctgtaatcccagctactcaggagctgagacaggagaatcacttgaacacaggaggcggaggttgcagtgagccgagattgtaccattgtactccagcctgggcaacaagagcaaaactctgtctaaaaaaaaaaaaagaaaagaaagaaagaaaaaaggaaggtattcagatcagcctcaactcactggtaaggattgccttaaatttttatccttgagggccaaggattagtctgtgtaattgaaaatatatcctgctggattaatgctatggaccatttcaatgcagaaacttgtgaaagacacttcttggttttctaaagtagaccytattgatgtataggaattattctataaataccttgaaggacatggatgagcataatattgcagattgaccagatctacttgtttagagtactagagatagtagccttatggtcagattattcagggtagctgttgaga

SEQ ID NO: 499540 - DNA, 647 bp, Homo sapiens
gttttagtacaaatatccagggataaattattcaattgaatgcatctgagagataaatttttcaactgatcaagagaagatagatgttttagttcaagtgaagagagtgaattcactctttctccaccttgttgtactcttcaggccctcaatggactgcgtgatgaccatccacattagtaaaggtggcattctctttcaatttgctgataaaattggtaatctcttctggaaacaccctcacaaacatgcccagaaataatattttacgagctatctggcatcccttatcctagtcaagttgacacaaaaaataaaccatcacagtaaaaatttagtgtttcaaatttgtttcttagcattgctctaattgtatcctacaaattttgatattttgtacttaattttattttaatacgtataaagacttctttatccatgagatattaaatattgtgttgtttaatttccacgtttataaagatttttctgacgtctctctaatattggtttctaattgtttccactatggtaagagaacctatctcaaatattttaattcttttaaattgrttgaggttttatgaaccaaggtatgcttactttgggtaatgtgctgtgggcactggagaagaataaacattcag

SEQ ID NO: 499541 - DNA, 558 bp, Homo sapiens
aacacaaggaacatgggaaaagaatttaattatcctaaatgtctatattcttcttcttaatttatatggctagaagaaagaaacatttacttgttttagacatttgtaacattttgggtacagaaaatgtttggaggtacttgagggatttttggcttgttttttttgttgttgtttgtttgtttgttttgtcttgtgatttctctatcaaaggggcgaagaaagaagataattatttttagaagcaaacctttgtttcttaggcctcagcaatctggcaataagaaaagattaaaaacaagttcacaatgtaaaacttgtctggtactgcatgttcctattaatttttcaacaaagccaacctcccttaatctcttcctagataatcttgagaggttcctacaagtgtcatgcccartgctccatgaagctgctggtctccatggctactgcattatgttttatcactttctctttcttctttttcttagtaaatatccttcctccaaatgtcaaccatgctattgacactcactagagacacaactgcatctgcag

SEQ ID NO: 499542 - DNA, 558 bp, Homo sapiens
aacacaaggaacatgggaaaagaatttaattatcctaaatgtctatattcttcttcttaatttatatggctagaagaaagaaacatttacttgttttagacatttgtaacattttgggtacagaaaatgtttggaggtacttgagggatttttggcttgttttttttgttgttgtttgtttgtttgttttgtcttgtgatttctctatcaaaggggcgaagaaagaagataattatttttagaagcaaacctttgtttcttaggcctcagcaatctggcaataagaaaagattaaaaacaagttcacaatgtaaaacttgtctggtactgcatgttcctattaatttttcaacaaagccaacctcccttaatctcttcctagataatcttgagaggttcctacaagtgtcatgcccaatgctccatgaagctgctggtctccatggctactgcattatgwtttatcactttctctttcttctttttcttagtaaatatccttcctccaaatgtcaaccatgctattgacactcactagagacacaactgcatctgcag

SEQ ID NO: 499543 - DNA, 509 bp, Homo sapiens
gtctatattcttcttcttaatttatatggctagaagaaagaaacatttacttgttttagacatttgtaacattttgggtacagaaaatgtttggaggtacttgagggatttttggcttgttttttttgttgttgtttgtttgtttgttttgtcttgtgatttctctatcaaaggggcgaagaaagaagataattatttttagaagcaaacctttgtttcttaggcctcagcaatctggcaataagaaaagattaaaaacaagttcacaatgtaaaacttgtctggtactgcatgttcctattaatttttcaacaaagccaacctcccttaatctcttcctagataatcttgagaggttcctacaagtgtcatgcccaatgctccatgaagctgctggtctccatggctactgcattatgttttakcactttctctttcttctttttcttagtaaatatccttcctccaaatgtcaaccatgctattgacactcactagagacacaactg

SEQ ID NO: 499544 - DNA, 579 bp, Homo sapiens
catacccaacgtattatccttattcctatccatatgcttacaatgcatcttagtaaacacaggacataattacaaaggtaagctaagtctagtgacatgtttttacgatccagaaatatcaatgctgacagttaaaagaggaaaaacaagcacaaagcataaaaccaacagcagttccagtctaaaaattgtagtcttctgaaaccccttgagatgtattcatttatttaagtgcttctgagataaagcctctgtcccactatggttaaaaaagtctgggctctgtggagaagagaccctatcttggccctgacaactactgttgttaactgttgttgtttttaaacctcagttttatcatcaacaaaatatgtattaatataatacttaagaactttagagaattggtgacgcttctgaaagatatgtgacataaaatctcttgatcagaaaaatgtatagttttgattgcagggttttctgccactaaatctgtccctggatrtggtttaaattttgtgccccaaaatgtaaactttggaaaagctgcataagcaccatctgtaacacgtgagaaat

SEQ ID NO: 499545 - DNA, 579 bp, Homo sapiens
catacccaacgtattatccttattcctatccatatgcttacaatgcatcttagtaaacacaggacataattacaaaggtaagctaagtctagtgacatgtttttacgatccagaaatatcaatgctgacagttaaaagaggaaaaacaagcacaaagcataaaaccaacagcagttccagtctaaaaattgtagtcttctgaaaccccttgagatgtattcatttatttaagtgcttctgagataaagcctctgtcccactatggttaaaaaagtctgggctctgtggagaagagaccctatcttggccctgacaactactgttgttaactgttgttgtttttaaacctcagttttatcatcaacaaaatatgtattaatataatacttaagaactttagagaattggtgacgcttctgaaagatatgtgacataaaatctcttgatcagaaaaatgtatagttttgattgcagggttttctgccactaaatctgtccctggatgtggtttaaattttgtgccccaaaatgtaawctttggaaaagctgcataagcaccatctgtaacacgtgagaaat

SEQ ID NO: 499546 - DNA, 571 bp, Homo sapiens
tgaattaaattagaaaaacatagtcaggtattgctaaattgccttatggatagctacatagatattctttctacatatatatttaagtatatatataatatacttatatacttaagtatatatttaagtatgcatgtatactggaatatacatacatatttatgtatatatattctgtcttttattttctatgtgaagagagtagtggtagaggcctgctagtcaccctaggtatgcatgctcttggttttcaaagmatttctcaatttaaacaggttattaaaattatttattaaactacacatattttaactaactaaatcacaactttacttgtggacagtctgaatttcctaacggaataaaacttggcatctctaatctaatacccaatacacagtgtttggcattgtgtcattttatggacatgagcactacttctgtaaggaggaacagctctacgtctgccagaaactttgtttcaatagttaaaggagaatattatgtgaagtgcattaataatctttaatttactctttttgcttgtgcaacatgattttattgctatatg

SEQ ID NO: 499547 - DNA, 502 bp, Homo sapiens
ggtccttgaacaacacaggtttgaactgtgcagatccacgttatacgtggattcttttcaaccagatgcagataggattgtattccagaggtgccaarcccgtgaacagggagggccagcctttactgtacgtggattctgcagggtcttgagtctgcacggatttgggtatactcagggaatgctggaaccaatccagtgtataccaggggccattgcatttgaagaaaaaaatgcaatgatggaacaaaacttgtcctctcaattactatggaatcataaagtctgagacccaggtaaaaccttttttattttttatttgaccttcttatcttacaaataagaacataaagccctaacaattgagtgacttgcccagggtcacacacttaataacttacaatctatcctgaatccaaaattgctaatgcctcactccagactctctgaccaaggctcctgttgcagctttaatcttttcaagaataaaaatgaggcaatc

SEQ ID NO: 499548 - DNA, 502 bp, Homo sapiens
ggtccttgaacaacacaggtttgaactgtgcagatccacgttatacgtggattcttttcaaccagatgcagataggattgtattccagaggtgccaagcccgtgmacagggagggccagcctttactgtacgtggattctgcagggtcttgagtctgcacggatttgggtatactcagggaatgctggaaccaatccagtgtataccaggggccattgcatttgaagaaaaaaatgcaatgatggaacaaaacttgtcctctcaattactatggaatcataaagtctgagacccaggtaaaaccttttttattttttatttgaccttcttatcttacaaataagaacataaagccctaacaattgagtgacttgcccagggtcacacacttaataacttacaatctatcctgaatccaaaattgctaatgcctcactccagactctctgaccaaggctcctgttgcagctttaatcttttcaagaataaaaatgaggcaatc

SEQ ID NO: 499549 - DNA, 502 bp, Homo sapiens
ggtccttgaacaacacaggtttgaactgtgcagatccacgttatacgtggattcttttcaaccagatgcagataggattgtattccagaggtgccaagcccgtgaacagggagggccagcctttactgtacgtggattctgcagggtcttgagtctgcacggatttgggtatactcagggaatgctggaaccaatccagtgtataccaggggccattgcayttgaagaaaaaaatgcaatgatggaacaaaacttgtcctctcaattactatggaatcataaagtctgagacccaggtaaaaccttttttattttttatttgaccttcttatcttacaaataagaacataaagccctaacaattgagtgacttgcccagggtcacacacttaataacttacaatctatcctgaatccaaaattgctaatgcctcactccagactctctgaccaaggctcctgttgcagctttaatcttttcaagaataaaaatgaggcaatc

SEQ ID NO: 499550 - DNA, 386 bp, Homo sapiens
ctgccccaccatccccagcaccagcctccattataactgtggacaccaatctgcacgccgggggtgggggtcagggggtgtccagccatttaggccggagccatggtgctcraagttcagtgtgcaccagaagcacctggccagggtgtgttttcacctggcctcccacctccatcaggaccaggccttttgtgcactcctgatgaagaagcttgataaggaagaggtgagaagcctgagaggaagaagaaagagagggcagggaaaggggtgagaatgtgtgtccgggagcagtgaaggtcggctgctgatagccagatgggggcaggacatcagctttgttggccatactctgcatctgaactccctgaccccagctcatgccc

SEQ ID NO: 499551 - DNA, 386 bp, Homo sapiens
ctgccccaccatccccagcaccagcctccattataactgtggacaccaatctgcacgccgggggtgggggtcagggggtgtccagccatttaggccggagccatggtgctcaaagttcagtgtgmaccagaagcacctggccagggtgtgttttcacctggcctcccacctccatcaggaccaggccttttgtgcactcctgatgaagaagcttgataaggaagaggtgagaagcctgagaggaagaagaaagagagggcagggaaaggggtgagaatgtgtgtccgggagcagtgaaggtcggctgctgatagccagatgggggcaggacatcagctttgttggccatactctgcatctgaactccctgaccccagctcatgccc

SEQ ID NO: 499552 - DNA, 658 bp, Homo sapiens
ctatgaatgttcacgcctgcatcagttcatggaatcctgccaaaatcaacctgcaaaatgtttccatcacccccaaatctccctaggctgtgctttgtacagaccatttgttctgatgtcctctgctatccacaaaatagagggaaacaccatggccataagtgtcaaatgcttgctttgctcccctgctctgaactgaagttcagcagtctgccaaaaaagtcccaaataccccagggcaggtggagtgaaacaaacaaaatgacaccagcacagacgacaaaaccctgaactcatggcacagcctgtgtcacacactacgttgactttctatattaattttccaattgttatgtttggcaaatgccataattcactgactttatcatttgcctgttgctcgcctagccattttcagcaggttatcacaaaatgaaggagaaacttgaataaactgatggaataaaggaagatgaccagagcaagttaattgtccaattttcatgtgtgtgaggctcctctgggagctcattgaaagtgtttcctrgagagattcttattcagagggtagggtggggccttgaattttcctcacccatcccttggaggccataaagaatgagttaggagtttttcttggaggagaaggtagaagaca

SEQ ID NO: 499553 - DNA, 396 bp, Homo sapiens
gctgctccgtaggcggagacaggagaattgcttgaatccgggagagggaggttgagccgagatcgtgccactgcactccagcctgagtgacagagccagactccatctcaaaaaaaaaaaaaaaaaraaaaaaaggctaggtcaataaagtacttgtaaggcttcgcctgcccaagattatggcctggcaaactataatcagaaaattttgcctctaaaaattatctaaaaattggtttaagaaatggtttccaaatttgctaggaaaatgagtgatttttctcaaagtttagaagattgttacattgggtgacagatatttcttccttccttaagcatgttttcctttctaaatctcaattgatggtcaaatcaatttcaagaaatgccaagaat

SEQ ID NO: 499554 - DNA, 665 bp, Homo sapiens
ctgcgaggcgcccagtgcatcctgatcacagacacggcttcaaggctccgcagccgcgtgccacagggggcaggggtccgcgcggtactgcgatgagccctactcggcgtccctctccgggcggtagcttgaggcaggcgcctcgcgcgtcccgggctcatcccctccgccgccgccgccgccgccgccgctgggcccgcggccaggagcgagtgcaccctgcgccrggggtgggggggcacttagcgctgctgtccgtacagcatcccacctcgctgcgccaggggtaccgggtgttcgccgcctgggctcgcggcaccctcgggagtgaagctgccgacctgcaaagcagaaagagggcggtcagcgaagagcggctgcggcttggggctagcgtcccagcgccccggggaccagggttaggtgaccccgaaccgtccctagagggacggaggagctagtcaggagcggagccccggaggactaggcagcagccggctgcagtctccagtcccggaacaataagcagcaggcggtcggcggagactctccctcattgtctgccgcggacctgcccccgtcccgccccttctgccttaaacattgcgtttgcttttatatgttaataattatcaacctggcagctctgactcagaggcagtgtc

SEQ ID NO: 499555 - DNA, 537 bp, Homo sapiens
attgacaaaactgcttaagtgtcctcacattgctaatattttttcaaaccaccatgttagaattaaataagatgttacaatgcatttggtttactgttaattgaagtatcttactcaaatatgaataaatctacctaaatggcatgggtcaaaagttccaaatggaaagcaccaaccacagatgaaccagaaaataattttttaaagcacatgcccaaagggggtggggagagtatgtctcactgccagtgtatcaaaaaggttgtcactgtatccaaaaatcttgccatcaaaatgggcatataggccaggcacggtgggtcacgcctgtaatcccaacactttgggaggccaaggctggtggatcacctgaggtcaggartttaagagcagcctggccaacatggtgaaacctcgtctctactaaaaatacaaaattagctgggtgtggtggcacgtgcctgtaatcctagctacttgggaagctgaggcaggagaatcgcttgaacctgggagatggaggttgcagagagccaa

SEQ ID NO: 499556 - DNA, 324 bp, Homo sapiens
tgtgtcctgatttgaacttcattttaatggctttcccttagatggaggacagcagcaacttttaacaagatgaaaaatcttcgtagagaaatctgaaaaattacctatgagaaagacttccttaaagatatacataaatctaacaaaatggttccaaaagttggttttgctgctaagatgtctccagttattttgttattgttaaactctcaaaagaaattagtttgaatttcttcacttaggattggtggaaggcagtggtagtgaatgcaagtcatgaagagcgatgggtagtgttactcyaaattgctggcttcagttttt

SEQ ID NO: 499557 - DNA, 644 bp, Homo sapiens
tggagactatactagattatccaggtagacgcagtgtaagcacaggggttcttataagcagaaaaggaaggcagaagagagaaggaaccaaagagatggccttgtgggaatgacctgcccatctttgctgactttgaagatggaggaagaaaccacaagtcatggaatctgggcagtgaatggcaaagaaagggattctctcccagagcctcccgaaggaatatggcattgcctacaatwtgattttagccgaggcttctctttacaggattctgtccaccagaactgtaagatgataaatgtgtgttgttttaagccattgagtttgtggcagtttgttacagcagctatacaattatctctgagagctaattgtgacgtacttggtactaagttttccgggtgaagatccagaaatcctaccactcaccattccttcctttacattgactggaaagtttatactcctaagggttaattgccagattacacaatcaagggaatgcctgatatcctataatttaggagaaaaatttaagctctggcaggcaattagggcttcacagccaagttggggctcttgctccttttatcttgccactgccaagctaaatccagaggggtctgctttaaagcagaaggcg

SEQ ID NO: 499558 - DNA, 638 bp, Homo sapiens
acaacaagcaaagcgaccccaggactctgataaatagaaatacatcatggacagygaaaacattaacaattctggcgttggtgttgtcatcatcttatagcacctcctgtttccctggcaactcctcagaacccatacaggagcgcggccccatcagtgcatgctgaagggcgaagggctggtacccagaattatccatttcaagcagaaggaaaatggaccagttgtggtgttgggacacattacaggattgcctgaaggccagcagatgccatgttcatcagtgtgcaaataatatacaaggctgtaccagtgcaggtcctcactttaatcctctatccccaaaacacggtggaccaaaggatcaagagaggcatgttaaacacctgggcaatgtgactgctggcaaagatgatgcaatgatgtgtctattgaagattctatgatctcactctcaggaggccactccatcattggccatgcaatggtggtccatgaaaaaccagatgacttgggcaaagatggaaatgaagaaagtacaaagatgggaaatgctggaagttatttggcttgtggtgtatttgggaattcccagtaaacattccctaggatgaggtctgagtgccagtaacacatgt

SEQ ID NO: 499559 - DNA, 559 bp, Homo sapiens
ttccactgttcagtagttctaaagtccctccagctattgattatactgaaacctcatcccctcaacatatccacccttggtgattttccttcctctagtgctcagtggagagagtctaacccttcttctacccaacgggcctttctcatatgtccattcccacatctgagtcaycatttctttaagctaaacttccagatgtaccatgatgaaagtctaatagacataagcatctcttcttaaagatgagcttccagatggcaggagtgacaactaggtccaagctgtgggtacttggcacccacagctcttagtttcagaatctcctcctccccaggcttcatatcagccctggccatgcttgttaatttgggccaaatctaccagagtcccctctcctaaatcctaactgttggactaagcagggatcggtctcagcccctggataaaggactgctatcacatctgtctttgaggccttcaaagacttactaactagaaaaatgactaatgcaaggatttcagggcccaaaacagggggagtgggagtcctcaaagt

SEQ ID NO: 499560 - DNA, 257 bp, Homo sapiens
ctgacagctcctggtgcagttttagacacgtttaaaaacctcaaccccatagtaacaaatgattttcatacagttactcaacatgagggagtcattaatttttttttttttttcgagacagagtctcgctctgtcaccctgactggagtgcagtggcgcgatcgcagctcttggcaacctctgcctcccgggttcaagcgattctcctgcctcagcctctcaagtagctrggactacaggtacccacgaccacagcc

SEQ ID NO: 499561 - DNA, 592 bp, Homo sapiens
ttttagtggaaaagcaccctttttggaaacttgtaaaaaaacaaaaatgggaatttttgtgttttttaaaaagtttttataactaaaaaaaaaaaaaaaaaaaaaaatgcgggagggrgacacgggttattcaatggttgagaagtatttggtgtggaatttgtttcacgttcctttttttttttttttttttttttttttttgagacagagtcttgctgtgtcctctgttgcccaggctggagtgcagtggcacgatctcagcttattacaacactgcaacctctgcgtcctgggttcaagcgattctcctgcctcagcctcccaaatagctgggactacaggcacacaccaccacacccggctaatttttatatctttagcagagatggtggttcaccattttggccaggctggtctcaaactcctgacctcaaacgatccgccatcctcggcctcccaaagtgcttggattacaggcgtgagccacagcgcttggcctgtttcatgtttatttaatgagttttaaaacatgaacaaggcacttatggatgcgtggggcagcatgggggttggccttgtcacctggggca

SEQ ID NO: 499562 - DNA, 623 bp, Homo sapiens
gactagtatatgaagcttataaaagcagactactggtctactcacatttggatttatggatggtgggtgtgtgtttttccttcttagttttattaataatattaattttatctatgcattttctcttgcctaggcaccttcatgaataagcatatccatttatgacattataacattcagtaagggaccctggctcctcaacaaaataaaaataataggccacatttgttttgtgcactgaccagatgagactgtcaaggacagatcaataacattgagtgctgattttggtagtactctatgagagggccccaggattcatatttctaaatttatctgcctcagtgagcttatccrtcacccaaatatgattatgttcattgcaggtcagggttatcattaagtgtaaaattcttcactgacctaggattataacaactagcattcattcaataaaataaatacttcccagtctaaccctaatcctaacaaaatgctaaatcccccccataaagagcattacgaatttggtaactttcctaatttttttattttagactgacagtgttgtacttactctaaatttcccaaggcaaattagtctgtgttttggaaagaattct

SEQ ID NO: 499563 - DNA, 623 bp, Homo sapiens
gactagtatatgaagcttataaaagcagactactggtctactcacatttggatttatggatggtgggtgtgtgtttttccttcttagttttattaataatattaattttatctatgcattttctcttgcctaggcaccttcatgaataagcatatccatttatgacattataacattcagtaagggaccctggctcctcaacaaaataaaaataataggccacatttgttttgtgcactgaccagatgagactgtcaaggacagatcaataacattgagtgctgattttggtagtactctatgagagggccccaggattcatatttctaaatttatctgcctcagtgagcttatccatcacccaaatatgattatgttcattgcaggtcagggttatcattaagtgtaaaattcttcactgacctagrattataacaactagcattcattcaataaaataaatacttcccagtctaaccctaatcctaacaaaatgctaaatcccccccataaagagcattacgaatttggtaactttcctaatttttttattttagactgacagtgttgtacttactctaaatttcccaaggcaaattagtctgtgttttggaaagaattct

SEQ ID NO: 499564 - DNA, 562 bp, Homo sapiens
ctttgataagacaaaagatttctcttcactagaaccccaaaatggaataaaaacaatagcaaatgaattgtgctgtattayaaatgaaccacattgccacaatacagggcggggaagaaaagagctaacctacatgtcatcttggaaaacaatatttcaaccatatcctgaaagattaaagataaaaaaagaactatgcacaaatactgtgctctaattagtaaatttgtttttcacagaggtttggattagcaattctgaaacttctttatttatattctgatactgaataaataagtaaatttactataaataatgaaagcttattttctcattgttagagaaagagcttacaaataagtaatagggactattattagagagaaccccatgctgttaggtggaatcagaggtatcagtatgaactcatggtttttaatagatgtggaaatagatatagatgtatatgtgtgcttgggtcagtatacatacacatattttttagctctgctgctaagagagcctggaaataatgatatcccagttgcagaagaacacccag

SEQ ID NO: 499565 - DNA, 583 bp, Homo sapiens
tatattatatttctcaactcctcgtgctgacatgatccatggccatagagaaataaagtgggaccaaggaaagtaaaaatgagtctttcaggaggagagccctgagtcacccatctagtactgatctagtaaatgactttaataacacctccaaagaacaaaagaagaatttttatacttagtcgaccttatctttccaaggttcagccaggcattttagggctacagacaaataaatgtgagaaggacacagcctatattttttaaacttaaaaatgacatttttaaaggttctctctaaatcaatgttttataaattcaatcacttcaaatgtgtttaaaaagtttggtatttcaagtaactctagaatgattctttccacatagcaaatgattggcagttcatgtatgtgattgatatattcacttttgtaattaatcagagtccatccctaacagaaaaaaaaaaaaaagtgccataaygccagaggtttcttatcaggtttattcttgcctttgttttgtaaagactaggcaagttaatatatgtaaagcttttcaaaagagtctaacagttgtaagc

SEQ ID NO: 499566 - DNA, 639 bp, Homo sapiens
agctgccttcatgggctggcaacacaattcatttttactcacagccagtctttctggctttcttggctcctcaggtctgagaaaattggacctggcagtgtcartgccacttgacaaaagtctagataatctattgtatccattccctgagtagtatgaaaaacaactcatcacatacaggagacaaaaatacaattaaaggaattttcatcagaaatgatggagtcaagaaggcaatgacatgacatattcaaattactaaaaaaaaaaattgtcaacaaagaattctatgttaagcaatgtgtaacaacaagcaaagattagttctgatggttagttttatgcatcagtttgactggactaagggatgcctaactagccagtaaaatactatttctaagtgtgtctatgaaggtgttttggaagaaattagcatttgaatcagtagaattagtaaagatcagcctcactaatgtgggagaacatcatccaattcattaaaggcccaaatagtacaaaaaggcagaggaagggcaaattctgtcttctggagctgggatattcatcttctcctgcttttagacatcagaggtcctggtttcaggcctttaggtttcgggacttacaccagcagccccc

SEQ ID NO: 499567 - DNA, 622 bp, Homo sapiens
aaactggagaaataactactttgcagtaaagtcataaagattagagctcctgataggatgccaggcacacagaggaggctaagtggtggctataatgcatgctgtagctcaggtaagggaactgggtcgtgtgtgttgtagagcctattcttaaagccaatctttcgctaagggtttgtgttttagtattttgcattttaagatttttgatttttcatatgttgaccttcttttctattgccattactttctaaatgatgttacaatttaaaaagtggggaaaatgttcttagctgaactaaagagaaaaataatttgtcgtcagaacaagagagtgaggccattttagaggtcaggtgtagggggcaggggtgtggcatcagctatctggataaaaatgaggaattaagagaatagcagataacactagtacacagagtagtaaagtaagattggtgatgattttcaatccacctctacttgggctatttattcccttcgtcttaattttttctttctgtctgatgttctttggaaaaaatcagagtgtggcaagttggtcttgctcgtaggggtgctagaagaagttacayttacccaatgcattggatattagatatac

SEQ ID NO: 499568 - DNA, 651 bp, Homo sapiens
aaataaacagaaagatactaacagtaattttcccattgtctctcagttatagcaatactattcatttttctaactttctgatttttctacaattgtcaatttttaaataaactatatataattcattatataatataaatatacatatgcaagtgtgcacatatatacacttgtgtgtgtatgtatgatgaacaaatgtatatattaaacttggtttgacaaaagagaaggactggggactgacactttttggcttctaagtcctgggtcagcaccttaatacagtacactgttgggaattgttcctctttttttttatrtatatatattactgctgctattcaatccagatttccatttcacttagagattcactaagaaagatatgtaatcatggcacacatgtaatataaatgggctccttttaattcctttcttctttcccagcatcacagccctagcaaaataataaagctaggtcaagagctatattttcaggcttttaatgtgtttctcatattttacactaaaaatggtaagtcagaggtgagcaacaattatgggctttcttactaagcaatactgagcaaaggtctcaaggcacatgttcaacctacttgtttcttttgaagtggacaggaatctagagat

SEQ ID NO: 499569 - DNA, 651 bp, Homo sapiens
aaataaacagaaagatactaacagtaattttcccattgtctctcagttatagcaatactattcatttttctaactttctgatttttctacaattgtcaatttttaaataaactatatataattcattatataatataaatatacatatgcaagtgtgcacatatatacacttgtgtgtgtatgtatgatgaacaaatgtatatattaaacttggtttgacaaaagagaaggactggggactgacactttttggcttctaagtcctgggtcagcaccttaatacagtacactgttgggaattgttcctctttttttttatgtatatatattactgctgctattcaatccagatttccatttcacttagagattcactaagaaagatatgtaatcatggcacacatgtaatataaatgggctccttttaattcctttcttctttcccagcatcacagccctagcaaaataataaagctaggtcaagagctatattttcaggcttytaatgtgtttctcatattttacactaaaaatggtaagtcagaggtgagcaacaattatgggctttcttactaagcaatactgagcaaaggtctcaaggcacatgttcaacctacttgtttcttttgaagtggacaggaatctagagat

SEQ ID NO: 499570 - DNA, 592 bp, Homo sapiens
ttatgttacatgtatatctcacgataagtatttttaattgctcactttttaaatttcaactctatggcccatcaaatcttaattataacaccacttggtataatcttttcttattcttcttataagagattagcacagaggcactaatttggccttcgaaattagttgaattcaaacctttgctattctaattttatccatgccatcttggataaattaattcatttgtcttaacctatggagcgtgtgtgtgtgtgtgtgtgtgtgtgtgtgtgtgtgtgtgtattcagtcatataacaaatgctcattaaatagcacctatatatattcttttgtttaaattttccatctgggttatctctgtttagaaaacaattatcatttgctgatgacttcttattcttcacactccctctcacatctacatatttactttgatcccactgtcatcgcacatctgggccctcaccctyaaatgtccaagtgctgatgccaatgagctctcatctgttctctgggcctctagcctctttctcatcaaatcatattcctgccaagagaaggccctataaaatattttggaccatgtca

SEQ ID NO: 499571 - DNA, 618 bp, Homo sapiens
ggacagggcctggaatcaaggaaacgggtcatttaccgagaaaggagaagaatccagaagttctagggaagagcattccctgagaaactagcatgtggtagggaggctctctggtagcaggggttattgggaggatggaatgaccagtgatagatagaatggtaaaaaggataataggccttactcaacaatttccctcagaatgtcctaccaaagagracgaaatgagaaatgctgtaatgtagtgtgtaaattagactgtacctgagaggttgggagtagagagttgaatcaatttagaatcttctgcggttaacccttaggaaagaggagataagtatattttgcaaaaaagtaaggttcaccaatggtgaaatatgacaactaaaatttgaaatgtcaccacgtctctctctctctaatactttcagtggctaatgccacttgagaaaagttaaaacagaaaacattgctaggactgtggctaaaaagacagcatcagatctcaacccaacacagttccttttcagtactgtctctgcaaatcacatgtcctatctgcaagtgaatgaggactgctcaagacaaacccattcagagtctattatacactgcatt

SEQ ID NO: 499572 - DNA, 620 bp, Homo sapiens
agaagtgggctgaggaggagrtgccctagagctttccgttactggggaagggtggaagttgtgtgaattctttatttactcacaatgtgttctaggatacccacatctcacggtgtgtgcacttgatatttgtcgtatcttcacactgcatgttattgcattttaaagcattttaatagtatatggtttcacctactaaagcattttcatagaaaaaaataaacaacgttttcagtactctgggacttgcattacatgtatgctggtgtacttattattgtcccttaggtctcttaggctatattaatttatataatacacatatatatgcatatatttgtgtgtgtgtgtgtgtaaagagagagagagggagagagagatgtgtgtatatagaaataatggctgaaaacttcccaaattacataaaaaacattatctattgcatgtacaaatacaagaacataaatgaaacccaaatgggagaaacaccaaaagattcacgtttggaaatatcatggtcaaacttttgaaagttaaaaacaaagagaaatttttgaaaacagctagagaaaagcaactgaaaactaacttcttagcagaagtagtagaggctagaggta

SEQ ID NO: 499573 - DNA, 614 bp, Homo sapiens
gggctgaggaggagatgccctagagctttccgttactggggaagggtggaagttgtgtgaattctttatttactcacaatgtgttctaggatacccacatctcacggtgtgtgcacttgatatttgtcrtatcttcacactgcatgttattgcattttaaagcattttaatagtatatggtttcacctactaaagcattttcatagaaaaaaataaacaacgttttcagtactctgggacttgcattacatgtatgctggtgtacttattattgtcccttaggtctcttaggctatattaatttatataatacacatatatatgcatatatttgtgtgtgtgtgtgtgtaaagagagagagagggagagagagatgtgtgtatatagaaataatggctgaaaacttcccaaattacataaaaaacattatctattgcatgtacaaatacaagaacataaatgaaacccaaatgggagaaacaccaaaagattcacgtttggaaatatcatggtcaaacttttgaaagttaaaaacaaagagaaatttttgaaaacagctagagaaaagcaactgaaaactaacttcttagcagaagtagtagaggctagaggta

SEQ ID NO: 499574 - DNA, 614 bp, Homo sapiens
gggctgaggaggagatgccctagagctttccgttactggggaagggtggaagttgtgtgaattctttatttactcacaatgtgttctaggatacccacatctcacggtgtgtgcacttgatatttgtcgtatcttcacactgcatgttattgcattttaaagcattttaatagtatatggtttcacctactaaagcattttcatagaaaaaaataaacaacgttttcagtactctgggacttgcattacatgtatgctggtgtacttattattgtcccttaggtctcttaggctatattaatttatataatacacatatatatgcatatatttgtgtgtgtgtgtgtgtaaagagagagagagggagagagagatgtgtgtatatagaaataatggctgaaaacttcccaaattacataaaaaacattatctattgcatgtacaaatacaagaacataaatgaaacccaaatgkgagaaacaccaaaagattcacgtttggaaatatcatggtcaaacttttgaaagttaaaaacaaagagaaatttttgaaaacagctagagaaaagcaactgaaaactaacttcttagcagaagtagtagaggctagaggta

SEQ ID NO: 499575 - DNA, 605 bp, Homo sapiens
gctgtggaaatccttactttagagataacttctgcaaagctcctgttatacagtggactcgcccatacattggaaatgctgctgctgcctgaagcagagaattttcagcctgagatacttcttcctcaagattttccatcaagcatttgataactagaaaaagcaaacagaaaatcaaagtaatgtcaatcttaaaacatttgtaaatgtacgaacagcaaaatagttcccattaatatggccaactcaaatgaactttacactagagttttttaatcaaaaagagatctttcagggttatccaacagggtggctcatttctaggcagaactgagtgtcyttccctaaactgcctgtatccattacagcattcactcttagtccttcctcctaaacatcctctcactagggtatcaaaccccaggctgatgtggcatgtgctaattggacagcagatggctttcaaattaaaaaagaaaaaaaagaacagcttttctgagatgtaattcatatgccacaaaattcatacatttgaagtatacaatagtttttattagtcacatatgtacaaccatcaccataattaattttagaacattttcact

SEQ ID NO: 499576 - DNA, 420 bp, Homo sapiens
tggctcatatctgtaaccccatcactttggaaggccaagatgggaggatcacttgaggttaggagtcttgagaccagcctgggcaacacggtgagacaaaaaacttactctacaaaaactctacgaaaaaccttaaaaattagctgggtgtaatggtgcacacctgtagtcccagccattcaagaggctgagaggtgaggatcactcgagctcaggagttcatggctgcagtgagcagtgattgcaccactgtgctccagcctaggcaayagagtgagaccctgtctctattaaaagaaaaaaaacaaaacaaaacaaaacaacacagcctggcatataattgtaagtcaatataaacattagtttcctctctccctgaatataggtgagttttttattacagtaattaatgattattaa

SEQ ID NO: 499577 - DNA, 577 bp, Homo sapiens
agatgataatgaaggatgaatttacatctcccatcctgtacttcatagtcaaggttcttaagcctcctttaaaagtaatgcctgcagtatggcttgctccatttgcattacctcccagttgtctaacataattacgatggcattaagtcactgcccaattacatgcaactcattcattagaaagatgactcagggttttcatttttaaagtacatttaaatgtattaaattactctcttgactgaaaaattataggtacgcttcagcctagttttatttcccacacacttagatgcagctacaactgctttaaatgtgcagaaaactttttgttatatggttgaagtaatcaatcactctaaggtaaaaacttattttctaaattaagttgaagtactattgaaattctatgaactgatgggagactccygcattcactggatgctgtaacaaattaccacatacttggtgcttaaaaccacagaaacctattctctcatagttctggaagccagaagttcaaaatcaaggtgtcagtagggccatgcactccagaggctctaaaatctgttccttg

SEQ ID NO: 499578 - DNA, 549 bp, Homo sapiens
ttttcctgtttgaccacagtcaacgaagacagcacaagcaagaaatcccacattctaacacatatacacacatatacagggaaaaaagaatcatttcagcaggacacggtggctcacgcctgtaatctcaccactttgggaggccgaggcgggcagatcacgaggtcaggagatcgagaccatcctgacttaacatggtgaaaccccatctctactaaaaatacaaaaaattagccaggtgtagcggcatgcgcctgaagtcccagctactygggaggctgaggcaggagaatcgcttgaacccagcaggcggaggttgcagtgagccgagatcacgccaccacactccagcctgggcaacagagctagactctgtctcaaaataaaaaaaaaggaatcatttcttgtcaaaaaggaaaaaatgaaacaaaaaaaaaagattcaaagagggaactgaaatttgaccctcttgagaaccacacagaaggaaaaacaaagggtattattaaatcagaatacttggaaattacatcctcatattgtctttcc

SEQ ID NO: 499579 - DNA, 549 bp, Homo sapiens
ttttcctgtttgaccacagtcaacgaagacagcacaagcaagaaatcccacattctaacacatatacacacatatacagggaaaaaagaatcatttcagcaggacacggtggctcacgcctgtaatctcaccactttgggaggccgaggcgggcagatcacgaggtcaggagatcgagaccatcctgacttaacatggtgaaaccccatctctactaaaaatacaaaaaattagccaggtgtagcggcatgcgcctgaagtcccagctactcgggaggctgaggcaggagaatcgcttgaacccagcaggcggaggttgcagtgagccgagatcacgccaccacactccagcctgggcaacagagctagactctstctcaaaataaaaaaaaaggaatcatttcttgtcaaaaaggaaaaaatgaaacaaaaaaaaaagattcaaagagggaactgaaatttgaccctcttgagaaccacacagaaggaaaaacaaagggtattattaaatcagaatacttggaaattacatcctcatattgtctttcc

SEQ ID NO: 499580 - DNA, 424 bp, Homo sapiens
atacatgaaaattcacaatctcaatccaaaaaacagcttttgtgtttccaagtacctgagttttcacaaatgtcattttaccccttgcaaaaagaaagcaaacgagatatgcattgttaaatctaccaatgatctaagagaaactacaaaataactaggctgggcataatatccacaatgatccataataatgtttagaataggtagtatgtcatgcctgtaatcccagcactttgggaggtggagtggggggaatcatttgaggccaggattttgaaaccagcctgggtaacacagcaagaacctacatctacaaagaattaattaattaaaaaaaawttttttaactatcctacacacacactgggggcttcaatatatattctagtcacttttaaaatttttatttattaatttttttgaa

SEQ ID NO: 499581 - DNA, 575 bp, Homo sapiens
aatgcaaatgtcgggcagtcaacatgagctgccaccaataatataaacacgttgaatatagatgaagtcaccctccttttgccggggtcactacctgtgtgtcacggcagtgccgtcatcacatggatgaacttcatctgttttttatagatttccccccatgtaatacaggayacagtctttaaacaaagagtcaccggagttcctgatggccactggtctgagtctgtccctttggaactaagggccctcataactgcacttacctaccacaggcgtccctgtaagcaccactagagggcgagcatcttcaccaaacctgatggacccaagaagtctgacctgaatgtctccctgctaggcaggggtcctcagaggaatcttctatccagtccagatggagggaactggaagagtctcctcaaacccaggaccaacaaagagattccctccaagatcccaattagggagccaggacagggactgagagggaacagggaagggaaggcaccatgggtcccaaaacctggaactgatggagaaggtcccttccagaaactgtttggagagaacca

SEQ ID NO: 499582 - DNA, 575 bp, Homo sapiens
aatgcaaatgtcgggcagtcaacatgagctgccaccaataatataaacacgttgaatatagatgaagtcaccctccttttgccggggtcactacctgtgtgtcacggcagtgccgtcatcacatggatgaacttcatctgttttttatagatttccccccatgtaatacaggacacagtctttaaacaaagagtcaccggagttcctgatggccactggtctgagtctgtccctttggaactaagggccctcataactgcacttacctaccacaggcgtccctgtaagcaccactagagggcgagcatcttcaccaaacctgatggacccaagaagtctgacctgaatgtctccctgctaggcaggggtcctcagaggaatcttctatccagtccrgatggagggaactggaagagtctcctcaaacccaggaccaacaaagagattccctccaagatcccaattagggagccaggacagggactgagagggaacagggaagggaaggcaccatgggtcccaaaacctggaactgatggagaaggtcccttccagaaactgtttggagagaacca

SEQ ID NO: 499583 - DNA, 606 bp, Homo sapiens
gtctttccttcaatatcaaccaagctgttcagtcaatatgcggcagtgccctctggaaattagctttgacaatatcaggccaataaatggtccctctgcacaygagcaacataaacaattgccataagagtgatctaaagagaagagaactatctcaaaacaaacttccctttccttatagattgtctcagaatgttcagatcattatgggttcagaaacgcaatagattttaaataattagagagcaaaataaatagaggcaatcagtgtcttttaaaaaaaatgttaatttggctaagatggatctagtttcctcaacatcccttctgggttagagatggccaacagagtcatttgaatgagttgtaaagggtagaagtgacgtgacagacattactttgggaaggttaacttcagtgagactatgtaaattgtcttgttttgtgagttccagctcgtgctgctcaccccacttcatgttcagctcttattcctgacttctggctctgcggaccagcaacaattccaagcttaccaccaggtgtagaggctacagccttccacagaattccctgtcagttctactccgtggtcacacacagcag

SEQ ID NO: 499584 - DNA, 506 bp, Homo sapiens
ccttcctggcaactaaaagggttaaaattcargacagaagctaaaatgaagaagttgaggcaagacttgtatataaagacatcattttgtgactggcagagagaaaatgactacaaagcccagacaaattcccagacatgcatagaaaaagttactgtatttgtttatttagaacactaacataaacttggaaagaggaagaagcagtaatctccttaggcattacactgctataaagagaaaaaaagtacacttcccaaattaaagaaaatgtgaagcaactccatttctacctgtagtgccaaccccatgacatctcagttcttcacaaccttggttttcaatctggaaatagtttattgagggtgaattttatgtcactgtgtttgaaggaaaacataaaaagacactgttaccctgcaatgacttcctacaaaactcaaaataccctcctgtctatgcctgtcttccacagaggcatcccagatgacttcattgtaaaaaca

SEQ ID NO: 499585 - DNA, 458 bp, Homo sapiens
atgtattgtggtaattacagcatctacttaagtaaaatgaatggcagcaggtcataagaagggagagattggaacttcttgtcataaagtacctacattacatatgaagcaacattgtgtcatttgaaggttgatttaggttactggaaaatgtatgctgggaaatctagggcaaccaatagaaaacttactaacaagaaacataatggatatgctaaagagatgaaaccatataaaatgaccaattataacmcaagaagacataaagtgatggagggagaggggaagaagaaacaaacatgtagcaaataaataggtactaggatggtagatattaacccaattatatcaataattaacctcaaaactcaaagagaaatagataatctgaaaaggcctataccaaataatttgaatcaataatttaaaaccttccaaaggaaaagttaccactccca

SEQ ID NO: 499586 - DNA, 622 bp, Homo sapiens
gtgcaaatttttctggaaagtttggtcaggaccagtgggtgcagagatttgaaatccagatttaagagtctgacattttttttaatcacttgaactttttcacggagaaactgtgccctgtttatctttctattcatcaaacattgccgcagaataaacactcaataaatatttgtgcaaaaataaattactaatgacataatagctgcacatctgaaatgactgtgtctgtgtttacatgcacttatgtagagttttccccggaaaatttatttacatttttcaaaaccaattatatggaaatgaatgaatgaatgagmtattgcatataatttcactgtagactaaattagaagatattttttcccttttataaccaggagcataactaaggataccacttagcaaaattattatgattatgagtaaggtttcatttaaaaatattttgaaaggcatagacagagtatcatgaaataatctgggtgattgtaaaataaacaatttgcacaattacaggtccaccgaaggccagagctgcaaagggtatgtctgattgctggtgaagggtataattatctctgaggttgggaagggttatatgtgctggcttgtttgccaa

SEQ ID NO: 499587 - DNA, 409 bp, Homo sapiens
atatgggctttcagcttgtgcagggtggggtacaaggrtattgctgcaacaataggcaatgccatgtaagaggtattgaccagttctcagtagcaatgctaaatgttttatcagatgctatttttctttctatgttgcttcaagtgtgtcctaagcctttgctctaaataagtccactcattttttgatattttactggatgtgtatgaagaccagcatgaaacaactagacttgatgctatttgtgtagaagggtctcacacaaattacatagaatatatcagctgactatgatatgataaaatgagattataataacaaaagtacaaattgaaaggtgttaccacacaaagcataaaaattaattctcggtcaggtgcggtggctcaggcctgtaatcccagcactt

SEQ ID NO: 499588 - DNA, 409 bp, Homo sapiens
atatgggctttcagcttgtgcagggtggggtacaagggtattgctgcaacaataggcaatgccatgtaagaggtattgaccagttctcagtagcaatgctaaatgttttatcagatgctatttttctttctaygttgcttcaagtgtgtcctaagcctttgctctaaataagtccactcattttttgatattttactggatgtgtatgaagaccagcatgaaacaactagacttgatgctatttgtgtagaagggtctcacacaaattacatagaatatatcagctgactatgatatgataaaatgagattataataacaaaagtacaaattgaaaggtgttaccacacaaagcataaaaattaattctcggtcaggtgcggtggctcaggcctgtaatcccagcactt

SEQ ID NO: 499589 - DNA, 594 bp, Homo sapiens
tgtgataaccatgaaattacctgtttcacacttcctccaacttagggaagtgcagtgaggagagacttctstttattagaacaaaggaaacactttgatcttttctaaattcattagggctgagaacacagtagtctttaagagttgcagtgcaactggatataaggtgccctcttgtgccaatatttttttctgtgacatcaggcttagggaattcaatagtcatcctactttaaattcctagaagaccctctgaagaaggacaggtataatcaaggcttgaatgtaaagactggaataaatacccaaatcttcaatcctctgacactggtgaacatccaggagtgtcaagaatattcagggcaataagacctcatcaaatagatgaaattaggtaccagttaccaaccctggaaagatggatatatgtgatatctcagagagtgaattcaaaatttatgtttgagaaaagccaacaaactctaggaatatcacaaagaatcaattcagaaatttatcagaaaaatttaataaagagattgaaataatttaaaaaaatcaaacagaaatcctgaagtggaaaagtacaataga

SEQ ID NO: 499590 - DNA, 594 bp, Homo sapiens
tgtgataaccatgaaattacctgtttcacacttcctccaacttagggaagtgcagtgaggagagacttctctttattagaacaaaggaaacactttgatcttttctaaattcattagggctgagaacacagtagtctttaagagttgcagtgcaactggatataaggtgccctcttgtgccaatatttttttctgtgacatcaggcttagggaattcaatagtcatcctactttaaattcctagaagaccctctgaagaaggacaggtataatcaaggcttgaatgtaaagactggaataaatacccaaatcttcaatcctctgacactggtgaacatccaggagtgtcaagaatattcagggcaataagacctcatcaaatagatgaaattaggtaccagttaccarccctggaaagatggatatatgtgatatctcagagagtgaattcaaaatttatgtttgagaaaagccaacaaactctaggaatatcacaaagaatcaattcagaaatttatcagaaaaatttaataaagagattgaaataatttaaaaaaatcaaacagaaatcctgaagtggaaaagtacaataga

SEQ ID NO: 499591 - DNA, 572 bp, Homo sapiens
aaatacaatttactttttcatattcagatagagtttactatatatatttgtggattgcaaatatgacatacctaagaagaataaatatacagttttcctagaaaactaaggtatcaccaatttgaaacaatgaacatatcataaattaaagagtgatcttttacattcaaaagtacttcagtagatgttacccagcatattttccaagtcttaagtaacatagacaaaatgctggtatcaaaaattgagataattataatttagtgaatttcagaagtcatattgtagttctaagaagaaaaaattgtccagctagtttatttggatatataattttactaaggtatgttttgcctaaagtaaggtttactttacttctgttttgtttagtagattagttcaatacgaactgmtcttttaatagctagtagaactttggatttaatatttatttacaaagaagtatgggtttctatatttcctaaaatttgtaagcaaactatatttaatcatagagccccagcagatccttatgaaatacttaatttttatgctattgaggattggtttct

SEQ ID NO: 499592 - DNA, 417 bp, Homo sapiens
attattttacaatctccatgaacagagttcaactagtttttttttttaattttaaattaattttatttttaatatattttttctattggttctgtctttctggagatcaattttttttttaatctcctcttgtccttgagtatgaagaggcagcatctcagtttccatcattctatgccagcattttcacatagcattctctattttttcacaatttgtctttgtaatacagctatgagcctatgattatttttattctttttattttattctagagaaggggtcttgctatacctcccaagttgaactgaggcgcaggtgatcttcccaccccagcctcccaagtagtcgggactayaggtgtgagccagtgtgcctggctctatttttttttgtttttttttttgttttgttttt

SEQ ID NO: 499593 - DNA, 526 bp, Homo sapiens
tgtgttagtccattttgtgttgctgtaagagaatacctgagactgggtaatgtataaagaaaagaggtttaataagatcatggttctgcagtctgttcaaaaagcatggtgtcagcatctgcttggctttgagtgaggcctaggaagcctttattcacggctgaaggcaaagggagagcgaatacatcacatagcaagagagggaacaagagagaggtgaaggtgtcacactcttttaaacaactagctctcctatgaactaccagagtgagaacactctggacgggtgkcaccaatcccacaaatcatgggggatccgctcttatgaccaaaacacctcccaccaggccccatcccccaacattaggaataatatttcaaaatgacatttggaggggccaaatatctaaactatatcactattcattattgcaagttggatttccaggatctgacagtaagtggcaaaagcttgaattttggaaccatagacctagcttggaatcctggttctatcacttttcag

SEQ ID NO: 499594 - DNA, 582 bp, Homo sapiens
aacacaaacacagagcctggagcttcttgagcagcaggggtacctagtgggaagtgaacagatttctagagataactaaattgcccagactggagttaatcccatgcaacacacactggacaattcttcacctcagccttcaaccaaccattaacctgcaatattaacaaatggactatgctaataaaatctctggtgacctcagacttttttaaagtctggggccaggatctaatactgcttttctctatctttttttcacttggtctgattcagatttatattcaataaacatttactgagcctctactatccaccaggcagcacaccatgcctagtgcttccaattaatccaataatgagaaaaaattaagggccctgtttccatttttcccttccagcagaactgctgaggktgatggaaggtaagccaagcctttacaatgctgaaggctcaacaagttttggtgtccatgtctatagctgtctaataacaccttagaaagaaaagacctcaacctttatctgtaaaatagatactgtataatcaaacctacttctcaggaagaatgcatggaaaac

SEQ ID NO: 499595 - DNA, 367 bp, Homo sapiens
aattcatgctctgaaatcttcctcttctccccctcacccacctcagaaacatgtttcttaaagcctgtgttttagaatyactattcaaaattccttcattaataacatctgtctgtgcccagttatatagaataaggagacaaatcaatctctctggtttagattctttcaaagtgacctaaaacctttatcacactaaggttttccccaggtacacatggggagcagatgtggaataagagatagccaacaggtgcaacgcctaagagaaagcaaagggctcagagatcatttgaactccgccttataacgcagcctgtcagatgaactagccatccttgactttttgtcttcattgcgagctcac

SEQ ID NO: 499596 - DNA, 624 bp, Homo sapiens
aataaaaggcttctctctcactctgcaaatggcagggctgcttgcccctgctttccatggttcatggttcctcaggtgcaccctcacagttacgatattatttgcatgttcactgcacatttccttgcttgttcactgactgtctctcttcctaggctacaaattccaccaggacgtctctattgccattcccattctgaacacctggaacagagatataaatcaataaatatttattaaggaaggaaggaaaggagggagggaggcagaggttcataaagtcagggagatcrtctaggacacaatttaagtatctaggcaacaaattatcagtgtctccaaaggtaccttatgggggaggaagattttcctaaactatctctttctaaatttcataaaatcttgtcaaaaatataactcattatacttcatatcaacttatattcttgctcaaagccaccaagactattaatagactaacaaatgcttttcttaggagaaagtaccttgtatgctttttataatattttttctgattattaatgtatattcaacgtaaaacatttgaaaactatatacaaataaaaagatgaaatcatagtccaatccataagcctgtcacca

SEQ ID NO: 499597 - DNA, 605 bp, Homo sapiens
taataactgttgcacattatggttagatctatgtttttgctaaaccaattaataatatcttcattagtataaagacaaggtagcaggatcctttcatttttcacattgaaagagtagatattttaaacactgtaatttactttagccatacattcccaatgatatgactaattaatgaaacttcaaagacataacttccaaaaagctacttattttaaagtcattgttgcgcacttaatgacattaggttgggggcattgctgacaccctaactatccatgtcctggaattgactaaatcgtttaaaccaccaaaatgtttaatgtttttaaagaagaaagaaaaaagaaaattaattgcwtattatctcttttaaagacctgttgattatagaagaaaagattaaaaatggatagcctctctttgtcctcagtggatggcatgaccacaggacaaaaacatttcctttttagttaaaaacatttgcgggcccatagggcttctgctgattgtaaagaaaagtaagatgacagtgatggtggctaagcccatcttaggttggctttccccttccttttgaggtggtgttgaccctcatggaaggg

SEQ ID NO: 499598 - DNA, 522 bp, Homo sapiens
tggttaagaatccttgctgggaaacttactgtggtcatttggaggaaaaaagaaaaagacacactggctttttgagttgccagagttcttgtgctggttctttttcayctgtgtgggctgatgttcctttaactgtggtgtaatttgattataatcagtttactttatttcagaacattttcagagggtcaaggttttgttctgggtctttattcgtagctgaattcttgtccttggttttacagggtgtaagttagcaaaatatttttgctattgaagtttggtctgtgatccagtagatggtgcttaagtgtaatggccagtaggctggtaggtaggctcttgctcagccctgaggctcttctatgatttctcacatttgtagccatcttagttcccttcatttactttaaataattgtttttaataaataggtggtatacgcagtggaaggcatgttgttaaatactagaggtgagtaataagaaaaatatattatttccacctttgaggaaatggaga

SEQ ID NO: 499599 - DNA, 553 bp, Homo sapiens
caccatgacatttactaacaaatatttaaccattggtgtaggctgcctcccagawtgaagaaacagatttaggaaatcaaaaggaagatagagtgcaggaaagaaaaagtgtggagaaaataattagaaagaggtaggactcacagtttgaaatgcattctatttcataatgccagtaataaaaacaaatcctagtcaccactgaatcatttgtaggctgcattgctccttcttctgagactcgatatagttttctatcttgctgtaggcacattacctacagataagcagtgagggtaactattgtctttctactctttcaaattaaagtttagctgtgataattttcaattgctggaatatgcaatgttgggaagaaatagaagatatgtaggctggggagttagttataataggaaagttataataactaactaaaaatcaaacccatcttataaatattgttcctagtaattaaaagtgttttgaacacaaagcagctttatgataatggcacttaacagtgagtctatgggaatggacatactctctc

SEQ ID NO: 499600 - DNA, 553 bp, Homo sapiens
caccatgacatttactaacaaatatttaaccattggtgtaggctgcctcccagaatgaagaaacagatttaggaaatcaaaaggaagatagagtgcaggaaagaaaaagtgtggagaaaataattagaaagaggtaggactcacagtttgaaatgcattctatttcataatgccagtaataaaaacaaatcctagtcacyactgaatcatttgtaggctgcattgctccttcttctgagactcgatatagttttctatcttgctgtaggcacattacctacagataagcagtgagggtaactattgtctttctactctttcaaattaaagtttagctgtgataattttcaattgctggaatatgcaatgttgggaagaaatagaagatatgtaggctggggagttagttataataggaaagttataataactaactaaaaatcaaacccatcttataaatattgttcctagtaattaaaagtgttttgaacacaaagcagctttatgataatggcacttaacagtgagtctatgggaatggacatactctctc

SEQ ID NO: 499601 - DNA, 525 bp, Homo sapiens
tgccttcctaagcagatgagaaaactcaagatagatgaaggaagacatctgctctgcatctcatagggagtaaaatggcacagttgaaactcaagcattgtcttgtaaatctaaattcattgttttttctccactgtattacactgctcccctttgcccctgtattcaccacggccattgtctgttattgcataatcatagtattccagccatgcccccataattgtttttctyaaataaaatatatcattgaacaagtaatttttaaaaattttattctattttatttttatttaaaaaaattttttatttccataggttattggggaaaaggtggtgttttgttacataagtaagttgtttagtggtgatttgtgagattttgctgcacccatcactggagcagtatacactgtaccctatttgtagtcttttatccctcacccccttcccaccctttccccctgagtcctcaaagtccattgtatcattcttatgcttttgcattctcatagcttagctccc

SEQ ID NO: 499602 - DNA, 521 bp, Homo sapiens
gagaaaggccaacaaagatcaaaatggtagcttcattactgataatagctcaggtgaagaggatagcttaggtctgtgagaagactctgcccagccctctttcccaaatgtgttagctcccaaaaattcaggtctgtcttattaaaaaaaacaaaacaaaacaaaacaaacaaacagaaaagaatgcaccctcttggcaggagttacagcatataccaaagcaagagactgaaccacatatatatagttctttaaaaaaaagtcaatcagataaatcataccttcttccctgggargcagtgagaaacaggaccaaaagaatccaagaggactgcatgactgaagttcctcctcaaaaataggaggaatctccccaacaagatactgaggttagaattagcccctgaggcaacagcatgaataatatgggcattcctttttgggatcctcccctgtgcctgtgcccagtagtagacttcagtagggtttgcatatagactaaaatattgagggtagattat

SEQ ID NO: 499603 - DNA, 596 bp, Homo sapiens
ttgtatttaccaagaagcaaacctctaaaaacattaccttcttgatgaagtatcacatcaaagtggtcctcgatcacatatttctgtagactttacaacctgaatcttaatctatatcttctaaaatgagagagctaagttaaccaatttcttatgaaagtgctatgctagcaggttctccttgaaaggagggaccrtgcataaatttattccccacttttaatcaaggcctataatagtgcttggagtaatgtaaaaaccaagtatctcctgaataataaaatgaattcactctttcatagctctcctaaaataaactaatatttacaattagagggtatatcacttcctgaaatatacatatttttctaccataaaagacattttgttttcagagcaccttgaagatcttttattctaaaaattcagacatatttattcctacaaaagctaaagttatgcatatctagagcatttagactaaatttaagaaaaataaatcaaaggtgtgagataccagtggagagggaacactgtaacaatgtcctgaatatggtttatttgcttatgttatttatttattcattcactttcct

SEQ ID NO: 499604 - DNA, 533 bp, Homo sapiens
cttacagccttcaatgcctgcctttttttcatattcctttcctttttccaacttcttacacatgcaccctatttacatatataaatatattcatatttcaactctcacaaagtactggatgtaatttatackctatctttcttgttgcacaaattttcatgccaaactacagaatgccattatagaagaaaaaatctgggagtacagagagtaagcaaggggaaaaaaaaaagaaacccacggaacagtaacatttaatagctgagggaaagaaaaagaatcatagaagatgactagaagaaagagtccaggaaagagtaagaaaacccagtgttatagaaaccaagagagaaaaaaaaaagaggaagatatggttaacagaatcaatgcagaaaaggtaagtgtaataaagataaactggatttaacaaagaggtcaccctggtgacagcaattttttcatctacttttaaatatctgaggtttcaaatgtattgaaaaagattatcatgctcatgaaatacaaagctttga

SEQ ID NO: 499605 - DNA, 533 bp, Homo sapiens
cttacagccttcaatgcctgcctttttttcatattcctttcctttttccaacttcttacacatgcaccctatttacatatataaatatattcatatttcaactctcacaaagtactggatgtaatttatactctatctttcttgttgcacaaattttcatgccaaactacagaatgccattatagaagaaaaaatctgggagtacagagagtaagcaaggggaaaaaaaaaagaaacccacggaacagtaacatttaatagctgagggaaagaaaaagaatcatagaagatgactagaagaaagagtccaggaaagagtaagaaaacccagtgttatagaaaccaagagagaraaaaaaaagaggaagatatggttaacagaatcaatgcagaaaaggtaagtgtaataaagataaactggatttaacaaagaggtcaccctggtgacagcaattttttcatctacttttaaatatctgaggtttcaaatgtattgaaaaagattatcatgctcatgaaatacaaagctttga

SEQ ID NO: 499606 - DNA, 583 bp, Homo sapiens
caagcccatttgctgggatttggacctaagattattgaggtgagggattcccagggaaggtgaactctgttatgtgctgataaggtctggccctagtagtaagacatttgcctagagtgctattctttaaaaattccaaccccaaacatcagcagtcaaattcaggtggtactaaattttttcatgtatttgtcctttcgtgactmactatagacagcaatgacactgcagaaaattcagcttcagttataacatattaaacaccaaatgtgtgctaggcattacgcttaaagcttccatctgtaactgctttccttgtgacatccgtggattctcctcctccaaccctctcttgcctaagttcaggcaattccactaatgcctggactactttagcctctcgcattcctttgaaagttcccaatctcttctagcagtttgtaaaagtacgatccactatccaccttcatcacagtcaccaggagtgcttgttaaaattacaattcttggatccagatcaattgactcagaattactggtggtgaagcccaggaatctgcatttaaaaaatttcctgggtagt

SEQ ID NO: 499607 - DNA, 649 bp, Homo sapiens
tctattactcttcaggaaggttcttttaactgttgaaaagtaacctattttggcaaagtcctcattataataaaataataatcactaccatataaatyttactgtagtttgattctccagagcagaaaaatgtctacttcctttttcacatgacaattgctcctctccaggttatactatcctcatttcaggggcatgtaggatatggtttccagacttctgaccttcttaaaccagtggtgcccataagacctccagtggatacatatcagaacttcgcatcttaaaaaaaaaaacaacttttatttcagattgaaggggtacatgtacaggtttgttacattgcgtatatatggtacattgcataatggtgaagtttgggcttctagtggacccatcactcaaacagtgaacattgtacccaatacatattttgtcaaccctcatgtccttcccatctgatatgattaggctttctgtccccgcccaaatctcatcttgaattgtaatccccataatccccaggtgttgaggaaggaaccaggtgggggtaattgaatcatgggggcagtttcccccatgctgttctcatgatagtaagttctcatgagatctgatggttttataagcatctgccatttcccctgtt

SEQ ID NO: 499608 - DNA, 649 bp, Homo sapiens
tctattactcttcaggaaggttcttttaactgttgaaaagtaacctattttggcaaagtcctcattataataaaataataatcactaccatataaatcttactgtagtttgattctccagagcagaaaaatgtctacttcctttttcacatgacaattgctcctctccaggttatactatcctyatttcaggggcatgtaggatatggtttccagacttctgaccttcttaaaccagtggtgcccataagacctccagtggatacatatcagaacttcgcatcttaaaaaaaaaaacaacttttatttcagattgaaggggtacatgtacaggtttgttacattgcgtatatatggtacattgcataatggtgaagtttgggcttctagtggacccatcactcaaacagtgaacattgtacccaatacatattttgtcaaccctcatgtccttcccatctgatatgattaggctttctgtccccgcccaaatctcatcttgaattgtaatccccataatccccaggtgttgaggaaggaaccaggtgggggtaattgaatcatgggggcagtttcccccatgctgttctcatgatagtaagttctcatgagatctgatggttttataagcatctgccatttcccctgtt

SEQ ID NO: 499609 - DNA, 649 bp, Homo sapiens
tctattactcttcaggaaggttcttttaactgttgaaaagtaacctattttggcaaagtcctcattataataaaataataatcactaccatataaatcttactgtagtttgattctccagagcagaaaaatgtctacttcctttttcacatgacaattgctcctctccaggttatactatcctcatttcaggggcatgtaggatatggtttccagacttctgaccttcttaaaccagtggtgcccataagacctccagtggatacatatcagaacttcgcatcttaaaaaaaaaaacaacttttatttcagattgaaggggtacatgtacaggtttgttacattgcgtatatatggtacattgcataatggtgaagtttgggcttctagtggacccatcactcaaacagtgaacattgtacccaatacatattttgtcaaccctcatgtccttcccatctgatatgrttaggctttctgtccccgcccaaatctcatcttgaattgtaatccccataatccccaggtgttgaggaaggaaccaggtgggggtaattgaatcatgggggcagtttcccccatgctgttctcatgatagtaagttctcatgagatctgatggttttataagcatctgccatttcccctgtt

SEQ ID NO: 499610 - DNA, 649 bp, Homo sapiens
tctattactcttcaggaaggttcttttaactgttgaaaagtaacctattttggcaaagtcctcattataataaaataataatcactaccatataaatcttactgtagtttgattctccagagcagaaaaatgtctacttcctttttcacatgacaattgctcctctccaggttatactatcctcatttcaggggcatgtaggatatggtttccagacttctgaccttcttaaaccagtggtgcccataagacctccagtggatacatatcagaacttcgcatcttaaaaaaaaaaacaacttttatttcagattgaaggggtacatgtacaggtttgttacattgcgtatatatggtacattgcataatggtgaagtttgggcttctagtggacccatcactcaaacagtgaacattgtacccaatacatattttgtcaaccctcatgtccttcccatctgatatgattaggctttctgtmcccgcccaaatctcatcttgaattgtaatccccataatccccaggtgttgaggaaggaaccaggtgggggtaattgaatcatgggggcagtttcccccatgctgttctcatgatagtaagttctcatgagatctgatggttttataagcatctgccatttcccctgtt

SEQ ID NO: 499611 - DNA, 529 bp, Homo sapiens
tatcatgatgatggtgattaatcttcatgggttgtggaccattatgtgatcggattgaaaaggttctggctcaaagccagaagatctgggcgtgcatcccgcctctgacccacattagctctgggaccagggtgtggtcatctctccactcagacactctgtttatccgtccctaaatagaggggaccgtccccaccatgacagagctgatgggattcagggaagtaacccatgtatgtattctgtacgaaagacagcctgagcaaacctgggagcctcccatygctacattaattaattggaaggaggttgccagccagaaaccaattacaaagtccctccaggggcctctgcgggggcaaaaaggagggatgaggaagggcggtggtggcttctcccccactccccacccccaccccacttgtgcctccttagcagctggtcccgcactccaggcccacaaaggagaggctcattctaaacagctacttttcatgtggaagccactggatttgcatctgtccttccc

SEQ ID NO: 499612 - DNA, 529 bp, Homo sapiens
tatcatgatgatggtgattaatcttcatgggttgtggaccattatgtgatcggattgaaaaggttctggctcaaagccagaagatctgggcgtgcatcccgcctctgacccacattagctctgggaccagggtgtggtcatctctccactcagacactctgtttatccgtccctaaatagaggggaccgtccccaccatgacagagctgatgggattcagggaagtaacccatgtatgtattctgtacgaaagacagcctgagcaaacctgggagcctcccattgctacattaattaattggaaggaggttgccagccagaaaccaattacaaagtccctccaggggcctctgcgggggcaaaaaggagggatgaggaagggcggtggtggcttctcccccaytccccacccccaccccacttgtgcctccttagcagctggtcccgcactccaggcccacaaaggagaggctcattctaaacagctacttttcatgtggaagccactggatttgcatctgtccttccc

SEQ ID NO: 499613 - DNA, 438 bp, Homo sapiens
cttcttaaagtgctaggattacagacgtgagctaccacgcctgtcctcggtatttctaagaatggaaggaacacaaatccaaacaacaggtggcatttttgacctatcagatgggtaaaaatccagttttttaaaggtatagttttagaggcataatgaagcagtctcagactctgtgggttaaaaactaggacagtttttggggacaattttacagtaactataaaaaatatgaaacacttctagccattttcctacaagaatatccacaccrctgcacaaacttggattacgagcatgtttgtcatagaataaattgtaatcatggaaaaaagtgaacagaacttagatgtcaattaatagaggtcgattatattcatcatggaacggtcatacaacagatgcctctctggccacttaaaaagataaggtagatat

SEQ ID NO: 499614 - DNA, 576 bp, Homo sapiens
ctgccgcctaggcttcttaaagtgctaggattacagacgtgagctaccacgcctgtcctcggtatttctaagaatggaaggaacacaaatccaaacaacaggtggcatttttgacctatcagatgggtaaaaatccagttttttaaaggtatagttttagaggcataatgaagcagtctcagactctgtgggttaaaaactaggacagtttttggggacaattttacagtaactataaaaaatatgaaacacttctagccattttcctacaagaatatccacaccgctgcacaaacttggattacgagcatgtttgtcatagaataaattgtaatcatggaaaaaagtgaacagaacttagatgtcaattaatagaggtcgattatattcatcatggaacggtcatacaacagatgcctctctggccacttaaaaagataaggtagatattcatggagtggtgtggaaagatgcccaggatctgttatgtgagaaaagcaagttgaaaaagaacatgtgtaatagtatcccttctgggtaaaaagaaagaagtrtgtgtgtctatatgtctgtgtc

SEQ ID NO: 499615 - DNA, 343 bp, Homo sapiens
tccacagctcacttactctctgacagagtcattccttccatctgatcgcaaaagctgcattggagtgttccctgagcagagctgtgtgcattaagtgtttggcacccagcccagcccaggcaaatctgaaaggcaccgaaccagtcaataggtggccatcagataacaggagcttctagccagcagcccacgggcgatacactggaggggcaggttaggcaacatcaccggaacctattcagaacagagaggagcctrtttagaagaaggagtggccagagccctgcactcgggaaggagacaagtctttctagagactgatgagctccattgcttaaaaaaa

SEQ ID NO: 499616 - DNA, 543 bp, Homo sapiens
actaatctatagtaacagaagactkcttggggcaggagggtagcaaataattaattgcaaaagcggaggagggaactttttataggaatggaaatattccgcatcttaattgcagtgatgtttacactgatatatgcatttgtatgtaaataataacccaatgaaactgatttcttttaaaacataatgattaataaaatgttgggaactgggaagaatgggcataaaaggaccatcaaactaaagcgggtataggggggtgccacagccagagcagcaagaacagggggtggagtcagtatgcccagcggctatatgtgttaatagcaggagtcaccttaaatgatcacttagaggagttgagcacactgtgtgattctgtttattgggcagatggcaagagtaaagtatttttcactgttcactgtctgatgagaagtttttagccaagtcaacaatacatatttaggggaaagtagattttgcatgggacaattttatactgtatgatgtcttacacatcagagcactgaactgaatggg

SEQ ID NO: 499617 - DNA, 553 bp, Homo sapiens
ctgaagtcctcggtccagctacccactaggaatgaatgctgccagtaatcctgtgcacttagaagcagattgttccgcaactggacatcargtgagactgtagcctcaaccaaaattgagaatttaatgctgggagaccctagagcaggggacccagctaagccactcctagatttcctagatcccacagaaagcatgaggtaacaaatgtgtgtcattttaagcctccaaatttgtggtaatacttgtacacagcagcagaaaactaacacagtaacccattagatcatgcttcttcctaagatgaaagatagggcattatctgtgcattcagttccatactgctggatgacttgttttagttgtgtgtggaccttctgatggtaatcattccaacaccagttaagggtcaggtttgcttattcttttggtggaaaatgcatttattggatcatttgatgggacagtgacccccccacacacacacacagcatttaagcctctaaataccgtatatttgatcactgaaaaatggaaatgctaactgaaggat

SEQ ID NO: 499618 - DNA, 542 bp, Homo sapiens
aaactgaagtcctcggtccagctacccactaggaatgaatgctgccagtaatcctgtgcacttagaagcagattgttccgcaactggacatcaggtgagactgtagcctcaaccaaaattgagaatttaatgctgggagaccctagagcaggggacccagctaagccactcctagatttcctagatcccacagaaagcatgaggtaacaaatgtgtgtcattttaagcctccaaatttgtggtaatacttgtacacagcagcagaaaactaacacagtaacccattagatcatgcttcttcctaagatgaaagatagggcattatctgtgcattcagttccatactgctggatgacttgttttagttgtgtgtggaccttctgatggtaatcattccaacaccagttaagggtcaggtttgcttattcttttggtggaaaatgcatttattggatcatttgatgggacagtgacccccccmcacacacacacagcatttaagcctctaaataccgtatatttgatcactgaaaaatggaaat

SEQ ID NO: 499619 - DNA, 614 bp, Homo sapiens
tgctccattgtgagaaaaagaaatatgcatgttctagttcaaaagcagaaaacctcagtacctgaggcttctgttgtactccttgatctggtaatgatattgctacaaaagacattctacattgtaacagaggaggggaggatggcagaaattaatagccagcagtagtgatttttttcctgtaattttgaaatctttataacttttgccataatttataactgaaaatgtatattgtctttagtaagaattcatcatttgatattaaaccataatttattttgaaaaacggatttgtagtccaggttggggcaaattaataatacgttaatttttttgtgtttcatgctgtcttccctgaattacatcaactgtgcccccttcacatttcttgagagctaaattttcagtgcaaaaattttttttaagaggtattttccaaaaactatcattgagatacttttgcttcattgtagagctattttcttgttactttagaagtgtctgaattcaaagtcgaactgttggaaagtaatagagtcctaatttagaacttcagctcaatattcagactgaattgaarctcaagctccaccaatctctagctgtgtgac

SEQ ID NO: 499620 - DNA, 634 bp, Homo sapiens
tgcccagctcaaaaatcaggagagctctacttctactacaaacaaggaggtaacagataatcttagccatctccaccacagtaagaaaatggaggaactggtctatgaagaaaactataaagactgaaagctgattataagagctgggtcatttttgtcatacccaactaaaatggactggagaagccatggggaataagcactcagggcacaayacattgatccaaaaatgtgtttctctgcaaggctggcagctaagaatgcctgctgtaacctgaaagtggttttatcagatgactgctgaaacaacctgccgcaacttatactcagactagtttttctgctgcagtgacttagcaatcagagcttgccagctcctcaaaacattattagtgccaatgaaatttcccaaagaaccatgtgtaacatttctcctttttataaaacctatagtcttttctttatccttcagagagcacacttcacttacactgaaggctgtgccttcccaatctgcaggtgggtttttgttgttgcttttgttattttaaaatagaaaataaacttctctttttcttccacagatcttaccatgttttgtttacaaggcctgagataatttagccagaaaaaa

SEQ ID NO: 499621 - DNA, 352 bp, Homo sapiens
ttgtgtgtatgttttgtattatctatgtggatacatatattatgtgtagtattatggatataaaccgtatccacgtgggtgtatgaaaatgtgtgtatacatacataggctacagcaaacaatttactcattcaaacctggggcttgagtcattcttgcttcaagacatctcagtattaaaagagatgaaagttgccaccagtgtgctttattacatatgaggygagctcagcccagaaagctttttggagattagcatatttctggacctaagcaccttggctgtccttaacttggcccacagggtaaggcattcaaggccaggagttggctgctgctgacctcatactct

SEQ ID NO: 499622 - DNA, 503 bp, Homo sapiens
ctgatttataatttaaagtgttgttctagtttttgaagaccgagtgataggacgaagggctgactgtgacttccgctgggtactcccttacagtgttgctgctggatacccggatttagactctgaagtaaccctagattttaaagtgctgtctctctagttagtgaaattagaaccttggcagtatgcatcaagtaggaaatttgtagactttaacaatacattgcatatgttacaaacatttgtttgattagtgtattagaaggtgcaagtttgggtgcagggtaaattcaggcccagtattctgtgattctgtgaaatgtgattaactgtargggaagaaatgcacatggtatccagcattcattcatttatttgtttgtgtatatattcattcagtacctgattattgggtgctactagttgctggggctgagctgaagacaacattggcatggtttctacacccatggttggatggagaagagagcctgcacttgtct

SEQ ID NO: 499623 - DNA, 638 bp, Homo sapiens
taagatttgcagaatgagtgaacaaagaagagaccctgctccctgtgggcacctgttcccaacagaagttgctgagctgagctttattcttcacaaatttattaatcatctgaggcactgccccctcccctctcctcaggttgctgwgtgcatagggtggagaagagccagaagtattcagggaaaatcccttctaatgtaaagcagaggttgggaagagtcaacgtttacttaaaaattaaccagtggggccaactctactgaaataaattgaagctttaaaacaatttttttttttttggtctacttagtcattccaggagcagtctctgccattttgaggataggtgcagccatgggtaacagttttatgtctccttcagtaatgtttatttctgaacattcctggctaattatactgcttggtcaaccaaaccaggcaggccaagcctccaataagaggctctgtgagaattgcctggagacttgattattcatttcagtagccagaaagttgatcctgagtcgcggctgagtgcagccgtctggctcagtgtgcagaaccctgccctggctgagtagttaacttgttcagagccatgtccttagcctgattccaacagtgccactaattctca

SEQ ID NO: 499624 - DNA, 638 bp, Homo sapiens
taagatttgcagaatgagtgaacaaagaagagaccctgctccctgtgggcacctgttcccaacagaagttgctgagctgagctttattcttcacaaatttattaatcatctgaggcactgccccctcccctctcctcaggttgctgtgtgcatagggtggagaagagccagaagtattcagggaaaatcccttctaatgtaaagcagaggttgggaagagtcaacstttacttaaaaattaaccagtggggccaactctactgaaataaattgaagctttaaaacaatttttttttttttggtctacttagtcattccaggagcagtctctgccattttgaggataggtgcagccatgggtaacagttttatgtctccttcagtaatgtttatttctgaacattcctggctaattatactgcttggtcaaccaaaccaggcaggccaagcctccaataagaggctctgtgagaattgcctggagacttgattattcatttcagtagccagaaagttgatcctgagtcgcggctgagtgcagccgtctggctcagtgtgcagaaccctgccctggctgagtagttaacttgttcagagccatgtccttagcctgattccaacagtgccactaattctca

SEQ ID NO: 499625 - DNA, 638 bp, Homo sapiens
taagatttgcagaatgagtgaacaaagaagagaccctgctccctgtgggcacctgttcccaacagaagttgctgagctgagctttattcttcacaaatttattaatcatctgaggcactgccccctcccctctcctcaggttgctgtgtgcatagggtggagaagagccagaagtattcagggaaaatcccttctaatgtaaagcagaggttgggaagagtcaacgtttacttaaaaattaaccagtggggccaactctactgaaataaattgaagctttaaaacaatttttttttttttggtctacttagtcattccaggagcagtctctgccattttgaggataggtgcagccatgggtaacagttttatgtctccttcagtaatgtttatttctgaacattcctggctaattatactgcttggtcaaccaaaccaggcaggccaagcctccaataagaggctctgtgrgaattgcctggagacttgattattcatttcagtagccagaaagttgatcctgagtcgcggctgagtgcagccgtctggctcagtgtgcagaaccctgccctggctgagtagttaacttgttcagagccatgtccttagcctgattccaacagtgccactaattctca

SEQ ID NO: 499626 - DNA, 638 bp, Homo sapiens
taagatttgcagaatgagtgaacaaagaagagaccctgctccctgtgggcacctgttcccaacagaagttgctgagctgagctttattcttcacaaatttattaatcatctgaggcactgccccctcccctctcctcaggttgctgtgtgcatagggtggagaagagccagaagtattcagggaaaatcccttctaatgtaaagcagaggttgggaagagtcaacgtttacttaaaaattaaccagtggggccaactctactgaaataaattgaagctttaaaacaatttttttttttttggtctacttagtcattccaggagcagtctctgccattttgaggataggtgcagccatgggtaacagttttatgtctccttcagtaatgtttatttctgaacattcctggctaattatactgcttggtcaaccaaaccaggcaggccaagcctccaataagaggctctgtgagaattgcctggagacttgattattcatttcagtagccagaaagttgatcctgagtmgcggctgagtgcagccgtctggctcagtgtgcagaaccctgccctggctgagtagttaacttgttcagagccatgtccttagcctgattccaacagtgccactaattctca

SEQ ID NO: 499627 - DNA, 557 bp, Homo sapiens
ctgtacatgacacttcatttggcacactcatacctccatggttttccaaagagcctgcggggaatgatggcagggccatggtgatcagtacctgggaataaggtggggtgagaaaatgttatactggcatcctcatcaacatggtcagtctatgtcaggtgaacatggagtggcagctagagacttgttagtcatcattgctatatgtgctttaaaccatattacacattttttgagggcagaaagggacattatttctccagtgttttctttctgtgacttgaatgttttttccatggaaaagatcaccatgtgtcctggaggaaacatgggccttagagcttgatgaccttaaaggtggggttcagccctcttggtgctctggggggacatgtacctttatctcattgaacctcrgctttctcatctgcaaaataaatgcataataattaccccatgtatgtatggtgagtattgactgggattacacatgagaagtgctcagcacacctagtactaacacatagttgcataaaagttgatccaactaaaattat

SEQ ID NO: 499628 - DNA, 636 bp, Homo sapiens
tttcttttctgttggtcaatttaggtgggcaatagtctaattttcgtaagattggcaatcagaattacttgattacttttatatctccaccaacagtgtacccagtatatttgacacccagagcagattaaattttaactctccccttctttatgcaacaaacttattttctgtaatgattattatttcctttaacacttgttgcaatacattatgaattccctgaagtcagagaccatgtcttacttatttttgaaactttaggggctggtatttcccttgatttttagtaggtatgaaasaaatgcccatgagttgaataaacaaagaaatgaatggattattatctctagcatggccaagattgcttccttagtgacttttaatatgttacagatcatacacaattaattaagcagaggtttgcattttccttggtatgcttagaaaatgcctacaaaattctataaaggacttacacggttctatcagtggaaaacctatggacttgacaatagattcatgtattccaatgtcaagtctgatctcttcaattcaactctttcaagaccatagctcctggcatttcaaatgcttcagccataggcccaaagtgggtcagatgcctgaactgcc

SEQ ID NO: 499629 - DNA, 524 bp, Homo sapiens
agtattattatgaagtgaggttaaaatcattccatgagcaaaagtccagtctattttgaaatgagacattctttctgcctgaagtcttttcctcccactttatatggttggctcagtggcatcctgtaggtctcagctcagttgttagctcctaagaaggcytctgactcccctatttagagcaggcccctctgtatcagttactccctatcacgtcactctgtttggtgatctcaactacctgcctgctctccctttttccttagcaatcgaattgctacctaatttctaggtaagcctatggccaactagaatgatgtcttcctattccagctttcccttcagtcacaaactacattcttactgttgggacaaaacactaattacccttacagggaggagatatggccctcttctcacctttgtcctctatgcagatgtaatggctgaaggccaagcagccatctttggtctacgaggtagaaagcatacgttgagaatgatgaacaaatctggatctttga

SEQ ID NO: 499630 - DNA, 524 bp, Homo sapiens
agtattattatgaagtgaggttaaaatcattccatgagcaaaagtccagtctattttgaaatgagacattctttctgcctgaagtcttttcctcccactttatatggttggctcagtggcatcctgtaggtctcagctcagttgttagctcctaagaaggcctctgactcccctatttagagcaggcccctctgtatcagttactccctatcacgtcactctgtttggtgatctcaactacctgcctgctctccctttttccttagcaatcgaattgctacctaatttctaggtaagcctatggccaactagaatgatgtcttcctattccagctttcccttcagtcacaaactacattcttaytgttgggacaaaacactaattacccttacagggaggagatatggccctcttctcacctttgtcctctatgcagatgtaatggctgaaggccaagcagccatctttggtctacgaggtagaaagcatacgttgagaatgatgaacaaatctggatctttga

SEQ ID NO: 499631 - DNA, 625 bp, Homo sapiens
ctgacaactcaattatcatcaccttcaattttgttgaaaagaaagaaatgaaaattaactgacttgtaaaaggagtttttactcagccattctttttctaaatacaatcaccaatattttaaatattttctttacttaatgatctaaggattttttgtttcaatttatttatcagatttatactgaaaatttaatgagatgtgagagggagattatgtcatacatcattcaggtaactctaagaatatttyctcaaaatttctttgtcttggaagatgtttaacccacaccagcaatttttaaatcacaggatcagtaaactataggaagagagagatgtacaccattctttatgaagtgcccttctaaagagggaagaagaaaaggaatacagtgtaatagctctctgtggcaggcaattcattctggccaattcattttagggtggggtatgtatgaccattcaagatgcagatctcaattcctttagaaatgctgattctgaaacttttggaaagtccttttgaagttccagaagtttacgaagaaaacaattaccacaaaacagaccctctactcaggctcctatctctgctgcctttcccacagaccctagcaaccatgg

SEQ ID NO: 499632 - DNA, 625 bp, Homo sapiens
ctgacaactcaattatcatcaccttcaattttgttgaaaagaaagaaatgaaaattaactgacttgtaaaaggagtttttactcagccattctttttctaaatacaatcaccaatattttaaatattttctttacttaatgatctaaggattttttgtttcaatttatttatcagatttatactgaaaatttaatgagatgtgagagggagattatgtcatacatcattcaggtaactctaagaatattttctcaaaatttcttygtcttggaagatgtttaacccacaccagcaatttttaaatcacaggatcagtaaactataggaagagagagatgtacaccattctttatgaagtgcccttctaaagagggaagaagaaaaggaatacagtgtaatagctctctgtggcaggcaattcattctggccaattcattttagggtggggtatgtatgaccattcaagatgcagatctcaattcctttagaaatgctgattctgaaacttttggaaagtccttttgaagttccagaagtttacgaagaaaacaattaccacaaaacagaccctctactcaggctcctatctctgctgcctttcccacagaccctagcaaccatgg

SEQ ID NO: 499633 - DNA, 314 bp, Homo sapiens
acccttatgtctgttttgacaatcctatcacacatatacagactgtcacaaagggaaaatctttcagtttcctctcaggaagatcattatgtgccttttttattgattgtttcctgtggtatgtataatcctccttgtggttttgtgctgtccagggaacctgttgtgtgtaaacaaccacaggtgattagcgatcaatgaatgattttaacccacgagataaatgcaataggacatggaacttcatgtaaagagctgtttasttttcattccctacagatttaacttgattcttttcagttgaagggataaga

SEQ ID NO: 499634 - DNA, 576 bp, Homo sapiens
agctgtgcaactttgggtgagtttctgaacttctctgtgcctcagtttcttcctctgggagattaaagcttcctcctctgggagagtaaagatttaattaaatctttaaagattaaaccataagatggttgtgaggtaggtaagatctatcttatcttacctatcttaagcttatgcagtaagaaccatgccaggtgcttagtgtgttttgatgtcagctaatatgagggtaatgatgctcacaccaggctggcctaccaggcatccaggacgttcactcaatcggcaaggccagttagaggttggccccatggccagcagcccagcaccagcaggctacatggcaacggatcccacaccagtccacatgggcgcactgtgtttcaggcctgactcaggcaggcrtccctccaaccctcccacgggcacagtgacctcctgtgggtcatcattttcttctgtttcacccaactccgtactttagaaatgcctagagctttggcttttccatcacacacgctggctgagaaatagcttttctgcaaattgtctaaaagtgcgtttcaagcttaattt

SEQ ID NO: 499635 - DNA, 545 bp, Homo sapiens
ccactgagaagaggcagaacagggaraggagagagggagctagaggcagtgggcggagcaggggcagccagcggcttctgcatcaccggggctgctctcacacctctgctttggttctgcccttcttccctggctctggctggcccagccactgctgccacgttcccaccctgatataagtcaccccctggctgggctcccctgccaggtgaacccgcctgaggtcagaagggaggccacaggagctggggcgggaccactcacacaccttggaaatgccggccaggctagggctgcaaaacaggagaagctgcgatttccttaaagacacagggctcctggctctgaagaacaggcatgaatgggagcaggggggatgtggcgggcagaagaaaaggaggagagagaggcagagatgcccaggaaggctcacggagggggtcgggtattggagaaaatgggcatatttcctccccaccccaagagctgaagcagcaaaggacctccccacaagtccctctacggaaaacagagtggattttcaa

SEQ ID NO: 499636 - DNA, 623 bp, Homo sapiens
tgtcccttttgaagtctgtcccctttttttggcctcttgtctgcagtaaagttcagtgtaaacagtcctgcttgctctccactgtgctgtaggcattaggagaaaaactgtgaatcccacatcatgcaktcttgggtataacctcttcatgcctcagtttcctcaactataagtggggctccttataacctgcttcatagagctgttctgaggattgagccgcttaatgcaggtaagtagcccgttgccaggacctcctgagcctttcaagcatggtggttctgatggttgttactgtccgtcaggaacagatgctgtttgtgcccagtcctggttcccactgcagtcacctctgcaagctaagaggcagatgactgagaacaccttcaactctctgcctgaggacttttttttaatggctgtgggaatatgctagaacacaaaagggcaagaagaaaggaccctggacaaaggatcaacaccctggcagcagccctcaagcagtggatagacacccccactccctcttcctaagggggatactccgcggcgtgttaccccgtggctccccaggttcccagcaagtttgagctccagtcacccgtggtgtagccagccctgtg

SEQ ID NO: 499637 - DNA, 573 bp, Homo sapiens
gtacctcctgcaggctccctagcgtctggggtccactgtggggcggcctgtgcaggcccaccaggaaccatgcttgcacaggcaaagcaccttgcttgtggttgtgtggggggctccctcaggtgtgggagatgtgggccccattctcccaggagccatggctggtgacatgcagtcaggtccatcctgacgggcactggagtgcgggggacccaatggggacatgagggatccagcaccgtggaccagggccaggttcatttggttcgctcaggaaacatgtacacagcgccttctgcataggggctagggatgcaggtgggcagggcagccacagcccctgcgctcaggaagctggcgaggcaggctgcagaygggcactgccacacctcactgaggagggaatggcagagccaccctcaaagggcctgtgctgtgggggtgctgggcgcttcctgaacgccgggctcttggatttctgcagtgggggttctccgggcgtttgggaaggggaaggacctgatggaaggggtagtttatatttaactctggtgctgaagcaagggtcgcaca

SEQ ID NO: 499638 - DNA, 559 bp, Homo sapiens
agaggtgggaaagaaaggacacaaattaggtgatctggccagggtggctggagggggttgggggtgtggtgtgatctggtggaggaaggtgaagctggctggggcagggttgcagaggttccagtgctagggtgaagagctggaaatttatccctagggcaatagggagccaggggagggtttgagggaaggagggccaggctccaattgaagatcaccaaaaacaaaggctgctcagagggaggaggtggctgtggtccagatgggagagaggacaaaggcctggtcagggtgggggctgctggggtggggagaacggaggagggttgcaggccaggtgttgggaatagagggctagggtgatgctctggtttagagtatctgggggatgtgtgtgggaaccctgataggagcagggggtaagagtctgagatctgggggacytctaggggagatgcccagttggtggctggacccacagggctgggtctcagagtaggaaccggaggtggtgccagagcttgcagccatcctcacgaggcggtcactgaagcctgga

SEQ ID NO: 499639 - DNA, 554 bp, Homo sapiens
acactgtgggcttggagctgctgctgcaggcgggggaggggaacattagctgctggggccacctgtcccccgccacccgcccaggtccccatacatactcggatgatagagttcagctcgggagcggtgacctgcttggccctctcaatggctccaagacctgctgctggtgctggaagggggtcgggggagaggagaggcagtgattcctcctgatcctgggagaggagagggggacggccctgaggccaggaggagccccactaccaagtggccatcatgtctgctcctcccagtggttttcaaccccatcagaaagcaccctccctctctccaactgcttcctttcaccaagctcgtctcttcgtctggccaacagagacaaatggaaaagtgcagaaaacaattaaaagggttttgtgctaagtagttaggaaacagcttttgagtgagcccgggagaaaccctggatcctgacctatcctatgtgcacagccacctgcaaagaygtgaaacatgtgaatgtttgtgcagtacacaacctgcccaactgt

SEQ ID NO: 499640 - DNA, 625 bp, Homo sapiens
cagctggctctcagaagcttctttctgagtcctgcctgtggcctgggctgccctgggctggccagcacggggcagtgggggcacactctggagggagccaggggcgagtcacttccctctcccggcctcagtttccccatcggtcacgtgggaaggctgtccctccccctgtaggattgtggaaggattaaatgagctgaggccagtgcggcagacagcggggagggagccctcttgtcccctgtggctgcccttcctgctggctgctttgcaccgaaaagctgcggagtaaccctgggcggtggtgctccctggatggcgtccacatggggacccaaggcctgggaggctccaggagggacggtgctggcccaggtttctgtccctgtctgacctcggagttggtgttctgggtaccgcacygtccggcgcccaggctccgttttctcttctgtcaaactgtgtggtcaccctgatgtttcaggggccctgcaggacggagtggcagtggggggctgaagggtgtggtcaaactggagggcgctgtgtctgttgctattgttaaccgtgtccacactgatgggtgctgggccccgcaccgagcgcctttgtgcggcctgcagag

SEQ ID NO: 499641 - DNA, 581 bp, Homo sapiens
tactcaaaattccacctgaaaacatcttccatcagactgtgtgtcttcttcagtgtcttctattttggatattggcattaatatccatccacttgcacaagctagaaacttgggcataatttctcactcttcccccctcagccaaagtctagtcaatyaccactctctgatgattctgtgtcttaaaccatctcacgcctctgccagcaccacaggccacacttctgtcatcccttgcttggacttctaaagcagtcttcaagctactctcactgtatctactcttacccctcccattctctgcaccctcacaactcagcacacttgtcattttgtcttcaacatctgtcttcccagctagactaagaaggtccatgaggggaagagccatgtagatcttttgatatggtagtaccaatagcttgcatgttacttggtacaaagtggtatgaattaaatatatgttaaatgaataaatgaaagactgacagacgagggacaacagacacgtaaaatagagtaagggaagaaagaagaatgtgaacaaagacagtggaaagctcaatagcacaatgtgttca

SEQ ID NO: 499642 - DNA, 581 bp, Homo sapiens
tactcaaaattccacctgaaaacatcttccatcagactgtgtgtcttcttcagtgtcttctattttggatattggcattaatatccatccacttgcacaagctagaaacttgggcataatttctcactcttcccccctcagccaaagtctagtcaattaccactctctgatgattctgtgtcttaaaccatctcacgcctctgccagcaccacaggccacacttctgtcatcccttgcttggacttctaaagcagtcttcaagctactctcactgtatctactcttacccctcccattctctgcaccctcacaactcagcacacttgtcattttgtcttcaacatctgtcttcccagctagactaagaaggtccatgaggggaagagccatgtagatcttttgatatggtagtaccaatagcttgcatgttacttggtacaaagtggtatgaattaaatatatgttaaatkaataaatgaaagactgacagacgagggacaacagacacgtaaaatagagtaagggaagaaagaagaatgtgaacaaagacagtggaaagctcaatagcacaatgtgttca

SEQ ID NO: 499643 - DNA, 569 bp, Homo sapiens
tccttaatttgcttgactcctgtgcctaccttgggcctggggctctgtcctcttactcttggcaaggattaaggattaacctccatgctgartcaaagttacctcacactcagttttgttcaagatcaaatcaccaacagagtgagtggctgctgcacacttacagagatgtgaagtcctcctttcccagatgggagaattccttgcagactttattcttttcataatcccggcctaggaggcagaaatagaaaaatttgtatgtgtccccttttgatgaatattatgttacatgtacatgtataaagtgatcttccacgtggcctacaatgaaagtcgtattttctcaatgtctatatgcaatttcatattttgggggcctttctagctcttctctcataacaggccacaattttatgacattctgttatattttagtcaccagcagaacaaaaggagagagtaaactaatactgaacgtaagtgagtcaaatgatacatgtcaactagtgagtcagaagctattgatatggcaactattaggtcctatctttataatgataccaaaa

SEQ ID NO: 499644 - DNA, 489 bp, Homo sapiens
agtggttttgttcactgagacagacatatgagaataggtctgggcctaaaaataagaattttagtttgcaacatgttttatttatgtccataagacattcaaagggtactcagtaagcagtaggataagcctgaccaacctggactagtacagattcgggaggcatcagcagttgaagccataaggaccagtgtgtgtgtgcgcacacatgtgggtgtgtgcctgtgtgtgcatgtatgtgtttatgagttattccaaaatgacatgtttctttttgagtactccaagaattcaatctcctttggctataaagtattatcctggacagacatttccaaatttaacaaattaacacctaatcatccactcatgtcawttaaatttaatattcttattaattgagtaaattactgcacattaaaaatcaattagaatggggccaggcatagtggctcacacatgtaatcccaacaccttgggaggccaagg

SEQ ID NO: 499645 - DNA, 641 bp, Homo sapiens
cccaggtgtggctctcgtggccctgattcaatatgcactacacccagcagagctataagggtctggctccctctacctaaatttcaaaggatgacctggagagcctggagcccaggcagaaagcagccatgaggtggggccactgcagggaacccacactagggcaattcccagtggagccatggggggcatggccacattgagaccaacagttagagccactggcatatgattatatctggggagagctgcaggttcaagacccaggcaaggagccaccatggagatggggcctgctcaaagccccattaagagaactgccatgggaatggggctcctcaaagccatgagggcaagccatgccccagtgggttcagaaaggggaacttcaaccccrctaggactggcaggaagagcctcgagtcaaagaagattattttcaagctttaaggttttgaattgctcaggaaccattaccctcttctgcccttaaataagcatcctaactagtggaatgagtcacagaacctggaaatagacgtgtgacaaagatggcattacaaatggaatggaaatgtctatcctgttcctgtcccaccattgtgtttggaagcacataacatatttgatttcacaggttc

SEQ ID NO: 499646 - DNA, 567 bp, Homo sapiens
agaaagtaaggccagttggcctgaacaatattttaacctctatcttttcagggccccagggatttcatctccccacaggaaaaaaaaggaccaagccaggccttcaggttgtttgcatatgcctgtagctcaggctgccctgctgtgcagaatttcctccaagttgtatgcttgggtggtaggcatggatctaagatgcccccaaggttctcactacttagtgtgctctgaataagcgcctcctcttgagtgtgtgcaggcctggcctaattaggtgagccctttaaaaaacaggtgtaatggaagagacaaaatgtctaagaaattccacactgcagagatgtcctctctcttgccttggaggaacaactgccatttcatggatggggccacatggaaagggcytgcgagtaacctctgggtgccaagagggaaacccacccaatgactagcaaaaaaatgggatgattggccatacaactgcaaggaaatgaattctgccagcaacctgaggggttcagaagcacatcttcacttagtcagtcaagcctccacatgagaacacag

SEQ ID NO: 499647 - DNA, 603 bp, Homo sapiens
aaccaaaatgtggtatatccattcaatgaaatattattcaatcttaaaaatattaagtactagtacatgctataacatggaagaacctaaaattcatgatgctaactgaaagaagctaaacacaaaggtcacatattgtatgattctrtttatattaaatatcttgaatgagcaaatctattgaagcaggaagtaaataaatggttgctagggttatggggagacaggaatggagactgacttcttgaagggtacaagttctccttttggcctgaagaaaatgttctcaaactagatagtggtgatggttttgcatcactgtgaatgtactaaatgccactaaatttcattttatatgatgaattttatattgtatagttcaggcatatagtagatacttgaaaaatatttaataaatgaatgaatgctagtaagataatagactttttaaaaaataaataagttggttactaggactctaccattacaaagatgtttattgtaaagatttgaagccaaaatcaggcaccttttaggaggttattacaaaatttgtgtgacttgcatagaatcacaaaaagactctgaatagctaaagcaatc

SEQ ID NO: 499648 - DNA, 603 bp, Homo sapiens
aaccaaaatgtggtatatccattcaatgaaatattattcaatcttaaaaatattaagtactagtacatgctataacatggaagaacctaaaattcatgatgctaactgaaagaagctaaacacaaaggtcacatattgtatgattctatttatattaaatatcttgaatgagcaaatctattgaagcaggaagtaaataaatggttgctagggttatgrggagacaggaatggagactgacttcttgaagggtacaagttctccttttggcctgaagaaaatgttctcaaactagatagtggtgatggttttgcatcactgtgaatgtactaaatgccactaaatttcattttatatgatgaattttatattgtatagttcaggcatatagtagatacttgaaaaatatttaataaatgaatgaatgctagtaagataatagactttttaaaaaataaataagttggttactaggactctaccattacaaagatgtttattgtaaagatttgaagccaaaatcaggcaccttttaggaggttattacaaaatttgtgtgacttgcatagaatcacaaaaagactctgaatagctaaagcaatc

SEQ ID NO: 499649 - DNA, 603 bp, Homo sapiens
aaccaaaatgtggtatatccattcaatgaaatattattcaatcttaaaaatattaagtactagtacatgctataacatggaagaacctaaaattcatgatgctaactgaaagaagctaaacacaaaggtcacatattgtatgattctatttatattaaatatcttgaatgagcaaatctattgaagcaggaagtaaataaatggttgctagggttatggggagacaggaatggagactgacttcttgaagggtacaagttctccttttggcctgaagaaaatgttctcaaactagatagtggtgatggttttgcmtcactgtgaatgtactaaatgccactaaatttcattttatatgatgaattttatattgtatagttcaggcatatagtagatacttgaaaaatatttaataaatgaatgaatgctagtaagataatagactttttaaaaaataaataagttggttactaggactctaccattacaaagatgtttattgtaaagatttgaagccaaaatcaggcaccttttaggaggttattacaaaatttgtgtgacttgcatagaatcacaaaaagactctgaatagctaaagcaatc

SEQ ID NO: 499650 - DNA, 446 bp, Homo sapiens
cagcactttgggaggccaaagtgggaagatcacttgaggtcaggagtttgagaccagccaggccaacatggtgaaatcctatctccactaaaaatataaaaattagctgggtgtggtggcgcaagcctgtaatcccagctacttgggaggctgaggcagaagaatcgcttgaacctgggaggcagaggttgcagtgagccgagatcgtgccactgcactccagcctgagtaacagagcgagactcagtctcaaaaaaaaaaaagaaagaaagaaagaaagaaagaaagaaagaaagaaagaaagaaagaaagaaaagggtgaataggagcttgctgagaggcagagagagcagaagggcttgctgaatattaaaactggaagatgattcagaacttyttggcccaacttcttgattttatggataatgagcaggacagcagagtga

SEQ ID NO: 499651 - DNA, 590 bp, Homo sapiens
ggcctcctgctccccagagcctcactgaaggggagggcactgcctagagccagaggccaacagcaggggcctggacactgagcttctgatgcccacggcaggcctgggcacatgcctgccccctgccttcccaccacgatccgcaagccaagggtgcaccccaggaggctggcaggggcccctcacggctactctgtgggagggtcagacctacatgacygagtctggggagcttggcgagggcacccctctccagccaggactcagaggtctgccccctgctgcgagaagagcacctggtccaagtgtggctctggacatcctcagagctcagagctccgagctaggaggccagctcctctccccacacacctgtctcctaatgagctcattcattggctgccaggcagggttcaacagctctctcctgccgcataaaccctatttgtttaatggattgcattcaggctcatggcatttgttcccagggacagaactgctcctccggacatggtgggaaggaatggtccttttgagtagggctgtggggctgggacagtcctgcttccgggccaggaggggtctaaccc

SEQ ID NO: 499652 - DNA, 590 bp, Homo sapiens
ggcctcctgctccccagagcctcactgaaggggagggcactgcctagagccagaggccaacagcaggggcctggacactgagcttctgatgcccacggcaggcctgggcacatgcctgccccctgccttcccaccacgatccgcaagccaagggtgcaccccaggaggctggcaggggcccctcacggctactctgtgggagggtcagacctacatgaccgagtctggggagcttggcgagggcacccctctccagccaggactcagrggtctgccccctgctgcgagaagagcacctggtccaagtgtggctctggacatcctcagagctcagagctccgagctaggaggccagctcctctccccacacacctgtctcctaatgagctcattcattggctgccaggcagggttcaacagctctctcctgccgcataaaccctatttgtttaatggattgcattcaggctcatggcatttgttcccagggacagaactgctcctccggacatggtgggaaggaatggtccttttgagtagggctgtggggctgggacagtcctgcttccgggccaggaggggtctaaccc

SEQ ID NO: 499653 - DNA, 590 bp, Homo sapiens
ggcctcctgctccccagagcctcactgaaggggagggcactgcctagagccagaggccaacagcaggggcctggacactgagcttctgatgcccacggcaggcctgggcacatgcctgccccctgccttcccaccacgatccgcaagccaagggtgcaccccaggaggctggcaggggcccctcacggctactctgtgggagggtcagacctacatgaccgagtctggggagcttggcgagggcacccctctccagccaggactcagaggtctgccccctgctgcgagaagagcacctggtccaagtgtggctctggacatcctcagagctcagagctccgagctaggaggccagctcctctccccacacacctgtctcctaatgagctcattcattggctgccaggcagggttcaacagctctctcctgccgcataaaccctatttgtttratggattgcattcaggctcatggcatttgttcccagggacagaactgctcctccggacatggtgggaaggaatggtccttttgagtagggctgtggggctgggacagtcctgcttccgggccaggaggggtctaaccc

SEQ ID NO: 499654 - DNA, 483 bp, Homo sapiens
ctgccccatctatcttacaggacctgaggaggttcaaacagaccaggagaccctacggaaacctctcgtgctgcacataaacatggggaattagtttgactggcgtgaggatcatgtcctccctctcaaccccacttcctgacttgtgcctgatcctaaagtcagcgtctgcctagtgcctggtcagtttctagggctgtgactttttgccatgaaaaggcagcggtgtccttccgccttctggtaggactttcacttctgacaccagggagggcaaattggtggcctttcttattctgaccctgattggttgggaaatgattgcctaaaatgtyttgtagagaagcatcctgaggctgtgtctgggcttggtagggaagaatggtgtgatctgaaacaatactgtattatgggaacatacaagcacctatatgattacttttaaaaggtctagaccagcagtcccctccccaacttttttgg

SEQ ID NO: 499655 - DNA, 622 bp, Homo sapiens
gtagagagaattattttcacatttatattrctctaaatcatgctagccaaggaataatttatctcattaatttataacaaaatctgtttgtcacagcatgtgaaatatgaaaacaccatatagaattacacagtatattctgttttctaaataaacatatggatgcattttattttacaacttgaattatattatctctattacttattcaaggatatggaataatttttactttctgcttcaagactacagattgagctcatgaggtgcatatcttttctttctgagacaccattaaaatgacaataaagaaataaaaagcttttaaacttacaacaaagaagaggataggagaattctacaggaaacaggatatttcaacacacttatttcaaatagaaatgagatagatgagtttatcttgataagccaaagcacaggaagcttccactgtaaatatttatgaaaagttttatagcggaagagggttacagactaagagattgcaagataaatgaatagcaagagtgaaaaatgagtcctaaaatagtggcattaattggtggttttctggggtcatgatgaaagtactcaacaactgatacaataaacaatattaatt

SEQ ID NO: 499656 - DNA, 539 bp, Homo sapiens
caataaccctatcagtgcatactgactaattacaactcttgtatgcttagacatgtaacagtttacttgagcatagaatggctagaagcttagtattttaccctggccaaacaaacagaaagacaaaaacataaaacatgggcaaaacccaaaaccagtagatatttcttctttacagtaatgttaggagctgaataggggtacctaragtggataatatgtcttttgtctatttaggagaccctggttctgtgccaaggatgcctatttatagtggatccaagagcctgctggtcaagaagccctgccagggtgctaaaaacattaggcatttgagaaaggcttgaaacataaaagagaaagatgaagatgattgaacaggataaccatgtcctaggggaaatagagatatttcaggtaatagaagataacttaaaaaatatttcagttgagaagttcaaaataattgaaatatattacatccctaaaataacaacagtgtgcaaagaaattcagaaaagaatctaaactaaagtgga

SEQ ID NO: 499657 - DNA, 544 bp, Homo sapiens
tttgtctctaaaaatttcattatgaatgactaagtagagaatagatgaaaaagtattttaatttaatgttaagaatatgcattttagagcagggaacctaaagttgagataccatttcatttgtttgtagcctcttctcttataaaatagaaataataagatttaattcaatggatggttgtaagaatgaaagaaatgagaaaatgtgaaatctttttaaactatgtttttctacaaaaatgagatgttaagataataaagaaactgaccctttgtcatttaaaaaatagttttaaatataaacatcctagtctctcagtagaggtactaagaaataaggagaagattataggccttgatattaaaacaatcrgagtttgactcctgatttgaacacacattacctaaaggagccaatcaatgtatttcacatatttttgattatatactgccaaataaagaattgccctaaaactcagtgtcttaaaacaaccatgatttcgttacatttcatgattttttgggtcaggaattcaaatggcat

SEQ ID NO: 499658 - DNA, 558 bp, Homo sapiens
tgtgggcttcctccttctcaaatgtgccatcacagcattcctgttaaaagcatttttttagatgcatttcytaataccctcgaacaatttaccaaaacttcatttgagcttttcctgccaaggaaaccaaaagtgccatagtctttcatattctatcaaatttgtttccaatactgcacttaatgagtgcctctgaatgatgaatgatcacttgctttgctaaaacactgatgttcttctccggagcttcttcaaaattttaatatgatgatgctctgtctggttcttttctgaggcttcatcagcaacttgattgcaatctccaggattgtaatgttttgggtaaaatccttcccttcttattaaataatactgtacttttcagggaagaaatatcactaatggcacaagtttcaagtattcaaacacatgtagtattctcaatgctcaaaactccttgcgtgaactatgtgcattccgttaatcacagacgagcatgtattttatgcactcatttatgcattaaatccattcatcatacaatattttttggtgcat

SEQ ID NO: 499659 - DNA, 558 bp, Homo sapiens
tgtgggcttcctccttctcaaatgtgccatcacagcattcctgttaaaagcatttttttagatgcatttcctaataccctcgaacaatttaccaaaacttcatttgagcttttcctgccaaggaaaccaaaagtgccatagtctttcatattctatcaaatttgtttccaatactgcacttaatgagtgcctctgaatgatgaatgatcacttgctttgctaaaacactgatgttcttctccrgagcttcttcaaaattttaatatgatgatgctctgtctggttcttttctgaggcttcatcagcaacttgattgcaatctccaggattgtaatgttttgggtaaaatccttcccttcttattaaataatactgtacttttcagggaagaaatatcactaatggcacaagtttcaagtattcaaacacatgtagtattctcaatgctcaaaactccttgcgtgaactatgtgcattccgttaatcacagacgagcatgtattttatgcactcatttatgcattaaatccattcatcatacaatattttttggtgcat

SEQ ID NO: 499660 - DNA, 500 bp, Homo sapiens
aatacgtcaacctcagagctctctacatctaacagatgccacatttgctactaaagatcatttgaacttgaattagtaagatttgaacagccttagttctgcttaggcatatcagtaacatttgtgggtaaagcctgtaattagaaataagtaccaaataaaatgcattaataatttcaaaatgaagaataaaaagcacatcaactgtggaggagaaacagaacagtaggggttctttcaagccaacagaactttaaggacaaagatttgtaattaaaaatgaagtgaatttaatctttgctgctaatcactcctgcactgttagcctgttttcatcaaactaattgatggcatatggaacagatgcatggtgagattacagctccactttatgggagagttataacaaatgtgactttccctctattacatgcmttaacattcagaaaatgcactcctttgctttcttcacatgccaaaattggttcttttgtgcaaag

SEQ ID NO: 499661 - DNA, 567 bp, Homo sapiens
acaaaattaagagtttgttttttgaaaagataaattgacatttagctagactaaataagaaaaaaagaggaaataaaatagcaggtaaaaaagaagacattacaactacagaaatataaaggatcataggagtctataacaaacaattatatgccaacaaattgaataaccctagaagaaatggataaattgctggacacatacaatctatcaagactgaatcatgaagaaataggaagtctgaatggaccaataatgagtaataaaattgaatcagtaataaaaaatctccaatcaaagaaaagccccaaacttgattgctttactgctgaattctaataaacatttaaagaggagctaataccagttctaatcaaactactccaaaaaaatcgaagaggtagaarttcttcgagactcattctaccaggccagcattattctgttgtcaaacccagacaaggatgcaacaaaaatcaaaatcagggcagtcatgggatacatgtaactatggaatgcaaaatttggatatggagttagaatacctaactatgcaacactttgatt

SEQ ID NO: 499662 - DNA, 629 bp, Homo sapiens
tttctaattcaggaaagcaatatattctaccaagtttactacatttctgcctaacatctcaattagtcctcctgctttcactctactggctgagtgatccctctaaatagtttgcaatcaagttaaaccattcaatgttcaccattatctaaaggataaagtctcggtttctgagcataatttacaacaacttaatgacctcttacccatatatctttcctgcttcattgtttaacactccttgcttctcatttaatttctgtattaactatttttcagtatctcgaaggaactcttttttgagttataatttacataaagtaaaattcaccttttaccctgtacaatttatagctttgataaatgagtacagaaggctaccaacattagcaatatgtagaacgtttctgtcaccccaaaaytccttcatgaccttttctagtcagcccctccccctacctgcagtccctgataaccaataatcagttttttgttcctatggttttctttattccagaaagacagatacatagaatcaaatagcgtagaaccttttgaatatggatacatttatttagcataatacttctgagatttatccatgtcagtgtttgtatcagtaatgtgtt

SEQ ID NO: 499663 - DNA, 506 bp, Homo sapiens
taatgttgtaaagcactctcaaattgattaatattttccattgtagtatatagagtgaaaacccgaaaagtcagcaatgcagctaaaaattgtaaaggattgactttcaccaaatgctctactccaaaaaatggatacaaggcacagctactcaaataatcatgctatttagtaaggtgtattgtaattctcaattaagcatatcttaccaacagagttagggtagtaattttccatgttttgcattttaataatttgtttcctagctaacatatctggggataataaataatatagaacaagcaacctttttcctactaccttgctagcactcttaatactaaattataaataaacgatagaaatatttcaatatatwttttttaatatgccaaaacaaccagattaaagtaagtcctaatataatcttcactttgaaggtgaaacaactggtgagagattatgtgccaaaggtctcagatactacattgaaacccaggtctgtt

SEQ ID NO: 499664 - DNA, 673 bp, Homo sapiens
tgctgtaaggaataagattagcaaatgagttaaaatgtgctgctgagggttagttaatgcattatatcagtgttaattaaggtattattaaaaggctgactgttgcctcttgtattcctagaatttacacacacacttcattaatctttgccctccctgtgggataagccattgcacctgttcatcttcatgagcataagtatcgtctgcaatatagctggcatgcagctcaagacaagcatggatgatatgtggcaaatcaaggagaaaacatcctggcatttgatagggattttactttctcttcattttggtgatagaccctggccttttttaaattgtttattrgaatataattgtaagacatactcattaaattccttttaccatcatcaatatcaaacacccatttttgtcccaggcatatttgccaagatttagaatttaaaacatgtgacaattgtacaagtttagggaggatgtctctattttacaccatggaaaatatggctgatcagagaacacatgaaacagagaagtaaaatattggcaacgtagacaaacaaaagcatcatgtgcagaggattttttgtaagcatgggaaatagaatctatctagagattcttagaggtaagactttagagctttgaaggataaaataaataaaaataa

SEQ ID NO: 499665 - DNA, 384 bp, Homo sapiens
ctcagatatgtggttggattattttactattgaattcccttttyactctgatagtctatgcttacacgaaatttgaggtgattatataaaattttggggggttttcaggagagatcatgaagaactaggaagtattatttcctctggtaccttttcacaagctgaagtgctctaggatctaatgaacccagtattaaagactcttacagatattttaattgttttaatcagagcctattctaaggtttgtatgctgaagacatacaaacttgagatatctttgatgttagaattatgcttgcaatttgtattagctgttatttcagaataatctggttgaaacctcctagattcaattgtgactgtgcttaaaacatgccatgg

SEQ ID NO: 499666 - DNA, 384 bp, Homo sapiens
ctcagatatgtggttggattattttactattgaattccctttttactctgatagtytatgcttacacgaaatttgaggtgattatataaaattttggggggttttcaggagagatcatgaagaactaggaagtattatttcctctggtaccttttcacaagctgaagtgctctaggatctaatgaacccagtattaaagactcttacagatattttaattgttttaatcagagcctattctaaggtttgtatgctgaagacatacaaacttgagatatctttgatgttagaattatgcttgcaatttgtattagctgttatttcagaataatctggttgaaacctcctagattcaattgtgactgtgcttaaaacatgccatgg

SEQ ID NO: 499667 - DNA, 341 bp, Homo sapiens
aagagagcttaggaacactcccactgtcctgtcaactggcctcaacactgccgctggctcttcctgcaccactcccaccccgcccctgccccgccccacaggtgacctgtctgctgtctgcactcaatctaaaggaascacagatgcactcgcttcacttacctgaggaatcattacagcaggcccctcctttctcccctaaatttttgttctgtattggctgattcctatcatgaacgaaatgtggtcttccttctcttaccttaacacaaacacctcatctcaagtccacatgccctgcctggctcggcctggcttccctgttcccctttgcagcctga

SEQ ID NO: 499668 - DNA, 609 bp, Homo sapiens
cctccttcctgtatactcttcaactctcagctcaaattctcttcctcagagcacccttgcttgccccaacacctcagtaaaaatcagcacatgccccatcattatacgccctcttgacacatggaattcctgcccactgccccacctcacagtgtcactgggtttgcctgaggtctctcccaccgcgtgcaagtgtagggatgtctcttcagttcagcacgttaggccaatgctcactgtcacaacattggtatccagtacacgtggttaaccattgctattgtgaaatattataatgcaaaaactatggaacatgtaaactcacagcttaaygggtgagtgtaacctgaatttcctaatgtgaaatagcccattcaggtctagaaacagaggacagccagtaccccgcagctcctgtaccttgacttcctctttccagtggcaacttctctctccccgttgagttatgcagcatcctggatttcatggaaatgtctttctggcttgtcttcatgaacttacgtgtgaaccactcacttagtgtagtttgcccactgtggaactttttacaaaaagaaatattcatcttatattctttactgtctgatc

SEQ ID NO: 499669 - DNA, 609 bp, Homo sapiens
cctccttcctgtatactcttcaactctcagctcaaattctcttcctcagagcacccttgcttgccccaacacctcagtaaaaatcagcacatgccccatcattatacgccctcttgacacatggaattcctgcccactgccccacctcacagtgtcactgggtttgcctgaggtctctcccaccgcgtgcaagtgtagggatgtctcttcagttcagcacgttaggccaatgctcactgtcacaacattggtatccagtacacgtggttaaccattgctattgtgaaatattataatgcaaaaactatggaacatgtaaactcacagcttaatgggtgagtgtaacctgaatttcctaatgtgaaatagcccattyaggtctagaaacagaggacagccagtaccccgcagctcctgtaccttgacttcctctttccagtggcaacttctctctccccgttgagttatgcagcatcctggatttcatggaaatgtctttctggcttgtcttcatgaacttacgtgtgaaccactcacttagtgtagtttgcccactgtggaactttttacaaaaagaaatattcatcttatattctttactgtctgatc

SEQ ID NO: 499670 - DNA, 519 bp, Homo sapiens
agccttgcttcaccttttggttctgctgggctttcatgggtgctgtttgtttctctgggctgtgctgccctgggayggggtgtccaaggtttaggcctctcccacagggctgcacagcaaatgttgcaccgctgctcccgcaccgaggcctgactgcatccactctcctgcaatacagcaatggcttgtgttttggcataaaattccatcaggcagaggaggtatcaaatcattcaacctgccactagctccagagcagtgtcaaattcactaatgtacagagcagtgtcacctcgacagagaatgcctgccaacagagccagcatgaatgatcccggctaggagctgagaactccatgctaagtgccagacagaatgtggaaagagaagatgccagtacttcccatgaagcttagagtccacgtaaagacaatgcatgtgcaaggagaattccacagtagtgttatcattaagtaaaaataaaagtcaaaggcagggtgtggtggaggcctgttgagt

SEQ ID NO: 499671 - DNA, 478 bp, Homo sapiens
aaaaggagggagttctgacagattctcatagaagaaataattaggttacattgctactaaccctatagtgagttgcaaacttgcaaactactgaaaagtgggtcgctgggaccatcttaaccgtctctcttttgatttcccatcattaattctagaaggactactaggtgcatctcgcttatttatggagtccttacactaaagagccatttttctaaaggatggcagtagatgcttattattcacactcgtgttaagactataagctaaggcaaatgggtctacatatttatctataaatggacacttttcaagtgttgctgcattttgcatcctattttaaaggcaaccatgaaaatgagtaaatcttatgctgggaccctggtttcctctggagtctcttgcctgctatagatgagtgcctcctggtcagcttcaaattaattttggkggccttaaggaccatatttttacaagc

SEQ ID NO: 499672 - DNA, 576 bp, Homo sapiens
gagaggcagcagcgtgtttaagcatctaaggccgtcgaggagcctggggaatggaggcgagcgcaacagtgccaaaccctgagattctgacagcggcccctagaagaggagcttctcaccttcaaaggctgagaactgggagggtggatggaaacttgccgtctgactctttgagggtgggaggcaggctttagaatatcaggaaggatggcctgtattccagaaaccagacagcaccaggccaggaacgctctgtgctggtggtgaccataataaatgccaggactggaatataatacccagctccatctgaaatgtctgtgacgagcgcgacctgcattgctgatgtgacataagacacgtggtactgctgtgtttcaccggcctcgctgcacctcrttcaagccctgcctaaccccggtactccagggaggaacgtggtctccacattagccttgggtcctccttgacttgggtagccattccgaggcgggcacctgtttctccatattcaaccatgacagtgacacatcttcctgataacactcaaataaacagcgtttgtgttgtcacaca

SEQ ID NO: 499673 - DNA, 576 bp, Homo sapiens
gagaggcagcagcgtgtttaagcatctaaggccgtcgaggagcctggggaatggaggcgagcgcaacagtgccaaaccctgagattctgacagcggcccctagaagaggagcttctcaccttcaaaggctgagaactgggagggtggatggaaacttgccgtctgactctttgagggtgggaggcaggctttagaatatcaggaaggatggcctgtattccagaaaccagacagcaccaggccaggaacgctctgtgctggtggtgaccataataaatgccaggactggaatataatacccagctccatctgaaatgtctgtgacgagcgcgacctgcattgctgatgtgacataagacacgtggtactgctgtgtttcaccggcctcgctgcacctcattcaagccctgcctaaccccggtactccagggaggaaygtggtctccacattagccttgggtcctccttgacttgggtagccattccgaggcgggcacctgtttctccatattcaaccatgacagtgacacatcttcctgataacactcaaataaacagcgtttgtgttgtcacaca

SEQ ID NO: 499674 - DNA, 376 bp, Homo sapiens
tccaaggcaatgctactatacaaattctaatagtttctcctgctatgctttaagctttagcacagagcattcagattgcaatttgcttccagaaaaggaggtcctccatttgggggcagttaaagcttcattttaagtccaaaaatgatctacattcctcagccgtttagactcttagccactcaagagtctacattgttctgcactctgtacatttctaaataagtctagtccaaatacttaaaaggactacagaaaatggtaaatatttggaagamgaaaaagtttaagactttaaatgcaaattaaaagcatcaagccagtctaattccagggtttaaatctagatgtattttcttctgatgaatggtggaag

SEQ ID NO: 499675 - DNA, 442 bp, Homo sapiens
atccttgaaaaaatggatgtttccaggtctgaggcacacaaagtatattataaatctaaaatatcttactggccagaaagcaaagaccagtgggggagacaagtgactgataaggacacatcaataagaccatggtagattgtaaatggctccaattcttcaccccacccttttccatctaatttttccgggccttttctcatgactctaggctcagacacaggactagaattgggcaatggaatatcagtaagtagaagcgggctggtgcttaaaaagctcttacacagtggacttgctytctcttgggttctgctattgccatgagacaaacatgcctggtctagtgtcctggcccaggagaaggatcaaaggcatgaagaacaaaccgagttgctccagtcatccaagaagaggccactccagatcagccaacatccag

SEQ ID NO: 499676 - DNA, 555 bp, Homo sapiens
ctgactacagtagatgggctgtagatgaggaatcaaaaaacggatcatgagtggtgtagatcatcattgttggaagagcaaaggacattactttggacaagtgtgacctggaagggggtggaatttcagccagactgtgaggataaagggaagggaattgcaggaaagaaggaaaaagaaagcttgaacggcacaggcacctcctctcagacattgtwtcagatattgtgaaagacagtgctacgtagtggtaacggtgtagacactggggctagattcaacctgactttgaaaatcctgattctgccacttaccttgggctaatttcttagcccatctggggctgtttcctaatcagtgaaaattgggaaaagatattcatcccaatgtgtggtttcaagaatgaattgagataatcatgtatgtggaacacttggcaggtagtcagaaagtggtagctcctgtcagaatttttgctgtccaaaacagacccacaaaactgtcttatccattctgcagatgaggaaaactgaggcttaaagaaatgatatcatt

SEQ ID NO: 499677 - DNA, 468 bp, Homo sapiens
actctaaaataatgcaactgatgctttgcattccttagctgctcacatagccagagaattgtcccccttcacccaccaatttgccccacacccacttcaccctgtggtttgaggttccaaactactgttttaactcctgcccccgccctcaccctgctcagtattcttctaatccagagacagacatattgaccattaacttataggcaatatatcccctacctacttggaaactcatatgtaaaattttgyctgcaattaacagaagaccaacttaaggtggcttaaatgtaaatatatatatatataatcttaaataagaagaaatagagaggaaagtggtttcagggttgattaactccgaggcttaaagtcagcggcttcccttcacctttctctcatctttagtgagttagtttcatctttagactcatatgattatggtcccaagaaggctaccacagccag

SEQ ID NO: 499678 - DNA, 510 bp, Homo sapiens
tcaagtataaagcctgagtttatgtatggaaaggatccatctgttggtcaatactctgaatttaaaaggacgcacaccaaggcacatccttatgaaattccattacattgcagactaaaaataagattctaaaatcttcagaagtggtgacagtgagacaatgggaacaagccacatacaaagagttgggtttaggatagcataagacttctctaggggaataaaagctaaaatacaaatatacgatgtcttcaaaattccaagagaaaattatttacaacatataattatactcaagtaaaattgggagaaaaatctatttagacatgcaagatttcaaaaaacctcccatatgtcctttttcaggaagctactgaaggatgctgtcctgcagaaygagagtataatcacataatccaaaaaatgggataagaaaaaaagaagtgaaggaaattcagagtagtgataagagaagttccaggatgacatctctgtagcagccttagagga

SEQ ID NO: 499679 - DNA, 381 bp, Homo sapiens
  misc_feature (1)...(381): n = A,T,C or G
gaatacatgtgctacacttagtgactccaacagccacctctcatgaaagnaaatcacgctgagaaacgcaatgctttgtgaatagcaagatgggcttgccaattcttatatcacattcattcacaaatagagatgcctgtgcacaactatcacacagttgtcctttggtgtccatcggggattgattccgggactctccaaggataccaaagtccatggatgctcaagttcttttataaaatgatgcatayaacctatgcacgtaacctatgcacatccttccatataatttaaatagtctccagattatttatagcacatgaaacaatgtaaatgctgtctactattgttatactgtattgtttaggaagtagtgacaag

SEQ ID NO: 499680 - DNA, 554 bp, Homo sapiens
catttcaccggtgacaaattatttctaacacttctcatgctaattaacaaatcctctacagttacctttctagtactattgatttgcttccttcaaatgcaaactaaccaattctagactatgaattctctttagggcacttcatttgtttaattgaccactcctagttggctaattacctacayacttgtcaccatgtttatgctgatgcgttttaaagtagactatacataatatgacaaatttgaaatgttttccacactggtactttagttacaccatctataaatggtcaatgagagacttgtctcattataatcattgtgtaatagtacaatgcctgtcataggtctgctagaccctgagatgagaatttgtgtgcaagtgatttattaacaaagtattcccagaagaaacaataaaggaaggagagaagctgaacagggaaggagaagtagcctagcaagattatagcttcaggcacagtttcagaacatgtagcttcagtctgatctcataggagatttctggattttgcctcatcccagtctgct

SEQ ID NO: 499681 - DNA, 554 bp, Homo sapiens
catttcaccggtgacaaattatttctaacacttctcatgctaattaacaaatcctctacagttacctttctagtactattgatttgcttccttcaaatgcaaactaaccaattctagactatgaattctctttagggcacttcatttgtttaattgaccactcctagttggctaattacctacacacttgtcaccatgtttatgctgatgcgttttaaagtagactatacataatatgacaaatttgaaatgttttccacactggtactttagttacaccatctataaatggtcaatgagagacttgtctcattataatcattgtgtaatagtacaatgcctgtcataggtctgctagaccctgagatgagaatttgtgtgcaagtgatttattaacaaagtattcccagaagaaacaataaaggaaggagagaagctgaacagggaaggagaagtagcctagcaagattatarcttcaggcacagtttcagaacatgtagcttcagtctgatctcataggagatttctggattttgcctcatcccagtctgct

SEQ ID NO: 499682 - DNA, 551 bp, Homo sapiens
aagggcttggagataaagcatcaaaattgggtacaccagtcaatcaatataatcagtctaggggctggctgtgccctgcagaaggatgccaaccaggagggccacagggagtgaaacccaggccatattttgttctttgtgccagtgccctgaagtggggctgtacctgctggaaggaaggggtacctttcctttattttcattaagttgctatatggactatctcagtcctgtggccaatgcaagaaatttggctcagctttctgaggggctggtactgtatcctctatttcttcggatcactttgtgaggtcattattctccagtgggggcttgtgggagaggcagtggwggcagaaagcgcatgcccagaccatattctcccagctcagtcaggcttctctacctctgattgaacctgtactcacggtgaagcttcctgggccacctgtatccagcagctgacatggatgatttctctcatacttgtgaagattctctgatggtaaaatagactaccatatattaagacctctgtgtgcttcatttca

SEQ ID NO: 499683 - DNA, 551 bp, Homo sapiens
aagggcttggagataaagcatcaaaattgggtacaccagtcaatcaatataatcagtctaggggctggctgtgccctgcagaaggatgccaaccaggagggccacagggagtgaaacccaggccatattttgttctttgtgccagtgccctgaagtggggctgtacctgctggaaggaaggggtacctttcctttattttcattaagttgctatatggactatctcagtcctgtggccaatgcaagaaatttggctcagctttctgaggggctggtactgtatcctctatttcttcggatcactttgtgaggtcattattctccagtgggggcttgtgggagaggcagtggaggcagaaagcgcatgcccagaccatattctcccagctcagtcaggcttctctacctctgattgaacctgtactcackgtgaagcttcctgggccacctgtatccagcagctgacatggatgatttctctcatacttgtgaagattctctgatggtaaaatagactaccatatattaagacctctgtgtgcttcatttca

SEQ ID NO: 499684 - DNA, 601 bp, Homo sapiens
ttaatattgaagttactaaatatcagtccatgaactctgtcactcttatcctaaataccatagtggatattcttaacatctaccttcttcccaatctaaagatggtgccagtccaaattggcatctgttgttcttgttacaaatatagacattcatgtatgtatactgcctacaagattgtcttgcaacaaaaaggcaacttggaagcatttaatgtgaattctggcaatgtcagcatagctggtagcaaaagcaatagtttcgccactgttcttcasctaagataatggagcagaagaatctagacatctattgtcaaatctaagccctaccatgaactaggtgtgtgaccttgggccaatcaccttgattctctttgagtcacttctcatgtctataaaataagggggttggattagatcacttttaaggcctttacttgttggcagattctaaatctgaactgccttatccctaatttggggaacaatttctcattgcctctttcatttcagcaccatcgtctaaggcaccctatataaagactgatagtattttgttgttgttattttttccacgctttagagctattaagtggggt

SEQ ID NO: 499685 - DNA, 208 bp, Homo sapiens
aacacttactgagcaccaaccaagttctagggamtcaaagatagcaaatagttttcatctatacttgaagccattgcttcccactggtgtcctcttttccacatgagaccaccggctatgtagattgccttatcacttattaaaattttgcccatccttcatcacacatctcctgagcctgcttcttggtgaagccctccctgatcat

SEQ ID NO: 499686 - DNA, 617 bp, Homo sapiens
acacttttgccctgatgtgtttgtattgtttggaaaaatgaacacttaccaattaaattcaacaataaaaatggcccagtgggtgtaacgaagcaataaaaaaacagtattcttggtaagtgttgccatcacagtttgagattttatattgctgctgaggagtaatttctaaaacaattacttgtgggcaaatatattaataatattcaaatacagtcaaagttgaaaatcaaatctatgagatgggaaattttaagttcaggctgacattctgtccatgatatggtatatcctctgggctcacatactgcagcatgtattaattttattccaactgtgccctcttgatgacagtgcatttacaagagatagtaaataggttttgttgcagataattctagttttaaattcatgtattagtaaccttaattgcatttcaaatgagtggwaagttccttttgaagtgtctagaggaaatttttccaaatatatgtgtcaaggaatttgtcgtggtcactgaatataatggctagcagccacaagttcataaagtaattgctaatatcgttaagttctgaaggacaaggttatataaatactaacctagtgatatggga

SEQ ID NO: 499687 - DNA, 571 bp, Homo sapiens
atatatgcgaaaacatgctgtatatttactcattatatttttatctcgtttctttagatatttcaccaatgtaatctgcaattaagtgttatacaaaactctaagcttttaagtatatttataaataaagccattgtaggctttaattagtttttgttttctgtgttttggtaagttctttttacaggggatagtacttgatcgcccagtactggcactatttctagaactatgtgagagattttgtagacctctatttaaagcaacatgcccagataagtttcaaaatgaaataattggaatttcatgttggttctttcacayggctaatttaaagatctacagacttcaatagataagggaaggaatcagatacaaatgtgatagtggcatggagttttatttctgtaacaagtatttgttttctgtatttgatagttagaaatatttttaaaatgtgctagagctctattctttttctggtttatttgccattgacttcttatctacttatattactttctgggggcaaaattctatagtgacagaaaaagagagagagaattttaag

SEQ ID NO: 499688 - DNA, 509 bp, Homo sapiens
ctaagtaatcatatgaagatattatatataagtgttctggcaaaacgggccagtgaatgtcccagcagatagccagcgtaaataatcagaaatgtgaatgaatgggtcttagatatttcagattccaattttcaagtcaccccacactctgagtctttccaattgagacccccatatattatgaagtggggattaccctgttctttttttgtccttgcttaattcctgacccacaggatccattaacataacaaaatgactgttgttctatgccactaagtgtagggtggtttgctatcattgcaaaaataaaaactggagcaaataaaaacaactagaacatctaaagtttttggtaaaagccaggatttcagttaacgctagggctaaggaaaattaatatgatcagaaaatatagwtgaggactctggtatgctgactattttatatatcttgacctagatatgatccttaatttataattgtttattttgctctaaatatatgtt

SEQ ID NO: 499689 - DNA, 318 bp, Homo sapiens
ccaagtgggaaaagtctggtctaggagtttgatcttagtatagtaagaagactctaatgctatggtttttkccacacaatcttttaaataatatcataaccattagccctcatgtccctgtggaattctttcatttacacaccatatggaagttctgcaaaatactgtaatgtgaatgagagatatggtatctaaaataatatatccatcagagggctgccaactggctgttcatggtgaatcatttaaatttaaaatttgatgttctgcacggagaagtgtgcaatccctgttgaatttttgaagctccctgaagaa

SEQ ID NO: 499690 - DNA, 594 bp, Homo sapiens
tctttgtagataaatctttaggagggaaagytagacatgaactggcaggtcaaaatacgtgatgcgtttttaagttctggatgctttggtgagcttgtcctgcctgtttacagggctccgtgtgtgtccagtgctcacttcctttgccaacagtgggccttaccttaaaaaaattaatttgatagttgaaatatggctatcttcttatgggcataatttgcatcgacgtaatttctggttacatttaataacttttcctgtgtttgtttgcgaatgtttttccctacttggttgccttaattttggactatgtttttactttagcaagattttaggtttgtgcgttgtcaaatgtagtcattgttttctttaaggcaaagactctaatctggagaaggatggagcaggcctagcggaatgccagaaaggctgtgtcaaaatccatccatcagcctgagcccctcagtggttagggagaaccagtggctgacgctagttaaagcagtaaaggcagattttattcagagactcttcctgcaacagtggaaaagagacctccgtatggagggggactcaattgtgaacacagtggag

SEQ ID NO: 499691 - DNA, 594 bp, Homo sapiens
tctttgtagataaatctttaggagggaaagctagacatgaactggcaggtcaaaatacgtgatgcgtttttaagttctggatgctttggtgagcttgtcctgcctgtttacagggctccgtgtgtgtccagtgctcacttcctttgccaacagtgggccttaccttaaaaaaattaatttgatagttgaaatatggctatcttcttatgggcataatttgcatcgacgtaatttctggttacatttaataacttttcctgtgtttgtttgcgaatgtttttccctacttggttgccttaattttggactatgtttttactttagcaagattttaggtttgtgcgttgtcaaatgtagtcattsttttctttaaggcaaagactctaatctggagaaggatggagcaggcctagcggaatgccagaaaggctgtgtcaaaatccatccatcagcctgagcccctcagtggttagggagaaccagtggctgacgctagttaaagcagtaaaggcagattttattcagagactcttcctgcaacagtggaaaagagacctccgtatggagggggactcaattgtgaacacagtggag

SEQ ID NO: 499692 - DNA, 523 bp, Homo sapiens
cccttccgagtttgttgcttatcaccatatattgtcacaaccagttctctttcttccctaaactcttcaaggcctgcarcattaggaatggcggaggccttctgtgaatgaatgaaggcctgggtggaggggagcatgagaaatggagggtcttttccagtgagttgctggcaagcgctgtctcttcttgggtgaccccagccaaccccagctagaactctcttctgcctgcttttgaagatctctttcagagggtgagaagtgactcagacagcgtggtccaaagcattccattaggaatcactaactaagtaatctggatgcctcttactctaaactctacgttccagtcatcattctctacatctatcgacagagttttcagcccacaaccctgcttgacccatggtttccctgcagatttgtgtctgcctgctagacactcctaaattctgagttgttagtttctagggagccttggatttttacattgcttaggtgctttcagttgcaagtaatagaa

SEQ ID NO: 499693 - DNA, 651 bp, Homo sapiens
aaactgaatgatttctggggccttagcctttctgtccttctaaaagagcatgacatggtcctcacttcacaagatgctttgaagaataaaagaggtataaatattatagatccatagggtactattagacttgcttgtggacatttattgattcttctatgctgaattatgaccagattgctctcctgtattattttagcatgactgccaccacttactgacacattcttgccatcattcccaagtccatatgagcattctgagagtttgagagattagcatagcttcttccaaaggtttataccagagcatgtcacagaactccatctatcatgtggatacacatacggaaaggtatatataaatatatctatctttacttgatagcaaaccaagattttcttcattctattctcatgaccatgaaatcaagaacacaagatgtgctagttatgttataataataatattaataataayagctatcatttactgaggtttgctgtatatctggcactgtgctaagttatatccaatgactcatttacaatattatcatatatatgtgactgagatgtattcagtcttgtttactgtgtgctagttaggatgagagtttatcatatgaactgaacaggacaatatgcgagc

SEQ ID NO: 499694 - DNA, 611 bp, Homo sapiens
ttacttatttttttctgatatgtatatattcacctccattttgaaggctattagtctgggaaacctacaagaacattgcgtaggcaagctcaagtatgttaacaacaacaaaaatagttctgtgaatgcctttacataatataaggtctacatattctctctacatctgtgcgccgtaagactggattttgaaaagctraggcatagactgatagctctttaccacacttgttttttcttctttctggatacatagcttggctatatttccatgcaactgtgtcccggttaatgtgtaccacttttagagggtggtacatataaatgtttcttccagttctttcaacatgtgtcatttgaaaaaggagaactctgaagccctctaggaagttggagctataatactggaggccagtttcctgaattactccctggtaaaagccacccagacaagaaatgcctttatttgaatgttattaatgagaaacacattttaaactttcagccactttaactttgaggattgtttgttaaaacagctggtgttacccaaactgttataggagtctactaaatgtcatttcatttttttcccttctcaaactcagaat

SEQ ID NO: 499695 - DNA, 611 bp, Homo sapiens
ttacttatttttttctgatatgtatatattcacctccattttgaaggctattagtctgggaaacctacaagaacattgcgtaggcaagctcaagtatgttaacaacaacaaaaatagttctgtgaatgcctttacataatataaggtctacatattctctctacatctgtgcgccgtaagactggattttgaaaagctaaggcatagactgatagctctttaccacacttgttttttcttctttctggatacatagcttggctatatttccatgcaactgtgtcccggttaatgtgtaccacttttagagggtggtacatataaatgtttcttccagttctttcaacatgtgtcatttgaaaaaggagaactctgaagccctctaggaagttggagctayaatactggaggccagtttcctgaattactccctggtaaaagccacccagacaagaaatgcctttatttgaatgttattaatgagaaacacattttaaactttcagccactttaactttgaggattgtttgttaaaacagctggtgttacccaaactgttataggagtctactaaatgtcatttcatttttttcccttctcaaactcagaat

SEQ ID NO: 499696 - DNA, 497 bp, Homo sapiens
gcaccttgtgacattgctcctcagtactcatggttcttgttcattttatctccaggctctactcttggcattagtccatctgtctctctctttctctcataagggatgcctgttgaaagacacaaaactttgtccatctcttagtggaagcacagtgcattcctaatgatactcccctcccctttattctgcccccaggaaagggaaaatgtctttaatcttacgaattaggagtcgcatatggctcctctgcatctrtcaatatccagtgccacccatgtcagcctcttcagacagtctccttgaatgcctctctctcaatacatgatattaaggactcattccagatttccccttctcaaggactgggcaatagtgcaactgcaatgaaaatctctgcaataaaatcctcttctcctcagcactctcaactcacatatttaatatagatgacagactgactctagccgaagtacctctacaaagtccagtgcacc

SEQ ID NO: 499697 - DNA, 450 bp, Homo sapiens
aaatcgtgttgcaaatgactttttttkgtgaggtaaaatataaataacacaaatttaccatttaaaaaatttttaagtatagagtccaatggcattaagtacatttatatcattgtgtaactatcataacaaatgacttttatataagtaagtcaatggaaaattcaagtatatcatatctacaaagtatcttcaattattaaagtaaaaccatagttttaataaaaaacattatcaaaagacttcatataaactaataatcctattgctaaattcctgacattgttatttataggactgtcttttaaaatatatttacatttgaattttttaataacccaaagattttcatccagatttcatattaaaaataaattcattgatccatcatgatacagattgcatataagtatattaaatgacagactttttatcctagtttcattttaa

SEQ ID NO: 499698 - DNA, 462 bp, Homo sapiens
ctccctagttgccacaatgctattactaaatcagatgacagccagttgactcctagacatgacagcaagcccaaaagagatcagcaaagccacaaagctgaccacccaagacacacaaggaaaaagcatatattgttgtgtgccactaaggttttgtggttgctggctacatgtcattattgtggcaatatagagctgattcagcagatacatcagsactgtgttggcactgttttataataaagtgaattaaagagctttggaacatcctgtacagaaagcaatgaagagagagagtctgaagtgattatgaaaagaatattgagcaagaagaggaacttcttgactaagaagtggaactgagaggtgctcatcatgacgtttaaatatttcctgagaattctcagaaatattaggggtgaggagaaagctaaatttcctatagccaaatgtagcttggtg

SEQ ID NO: 499699 - DNA, 462 bp, Homo sapiens
ctccctagttgccacaatgctattactaaatcagatgacagccagttgactcctagacatgacagcaagcccaaaagagatcagcaaagccacaaagctgaccacccaagacacacaaggaaaaagcatatattgttgtgtgccactaaggttttgtggttgctggctacatgtcattattgtggcaatatagagctgattcagcagatacatcagcactgtgttggcactgttttataataaagtgaattaaagagctttggaacatcctgtacagaaagcaatgaagagagagagtctgaagtgattatgaaaagaatattgagcaagaagaggaacttcttgastaagaagtggaactgagaggtgctcatcatgacgtttaaatatttcctgagaattctcagaaatattaggggtgaggagaaagctaaatttcctatagccaaatgtagcttggtg

SEQ ID NO: 499700 - DNA, 462 bp, Homo sapiens
ctccctagttgccacaatgctattactaaatcagatgacagccagttgactcctagacatgacagcaagcccaaaagagatcagcaaagccacaaagctgaccacccaagacacacaaggaaaaagcatatattgttgtgtgccactaaggttttgtggttgctggctacatgtcattattgtggcaatatagagctgattcagcagatacatcagcactgtgttggcactgttttataataaagtgaattaaagagctttggaacatcctgtacagaaagcaatgaagagagagagtctgaagtgattatgaaaagaatattgagcaagaagaggaacttcttgactaagaagtggaactgagaggtgctcatcatgacrtttaaatatttcctgagaattctcagaaatattaggggtgaggagaaagctaaatttcctatagccaaatgtagcttggtg

SEQ ID NO: 499701 - DNA, 613 bp, Homo sapiens
ctgacaatttagcaatgaatctcccctttaattaatcaattggagtccrcatggaggaggtctgtatttactgtgtcaaaattttgacaaaagcatgcatgcaggggaatcaggcatgcacagaaaatccaatttctttccaataacattcaaatagtaatcagaaagctgcctacaagaaacatgcaactgcctttgcatagacaatgcatgtgtcattttttttttttgaaaaagagaggcagctttggttattagaataaacataacagtacaataaaatcaagatcagaagaatatgtttatgaaagaaaaacaaagttcattaatccaagaattggaataaccaagagtttttagagaatgagaatcagagaggagagggaggttcccattcttccccaacataaacagaaacataagctgaggttatatctcgctccagaagtgctgttaacgggacggttttgctgacagagagtgaggacagttagggaggatgaagggtaggaggcccacttcctgacatattctaaggcatgtggaatgtgggagagtggacacatgagtctgaaaaggtcacaggggatggggggtcctcctgtaaaagcca

SEQ ID NO: 499702 - DNA, 632 bp, Homo sapiens
tgacaaatatggaaatcattaacagactaaactgtacacaacaaccaaagtattaagaaatatcagtaaacaaaataaccagtacttctgatcctcaaagtccctgaactgagaaacagggccaagactcttggccatcccctgatccaagtctctcattctgcatgtcaagaggatactgytcaagattacacaattgcttgcaaccaagcaaagactctatctagatgtccttcctgcttgcccagtcatctccccaccaacaaatgctggttccctctttcctgctgcttcccaagacaccacttccttcctggccttgttttccattctatcttggcttctacccacagcctaattccaggggtgagaaggacactgcaatctgagccttccatgggacccacgtgtcaagtacggggagagaaagactgtagttttcctactgccactctcctcttccctcagcattttgtttcatgttgccattttaacattagtagtggctgctatattcatacttccttccagttaatctatgaatatggaaatgaggaccccagtatcgaaataaagacttagtccacctatctcagggataatctatacttctccacatactttaaagcttt

SEQ ID NO: 499703 - DNA, 464 bp, Homo sapiens
tatgtgaggtctttggccagtctgtcctcatgttcttccctcttgtctcataccactccacacatgcgccctttctccatgccacaccatggaataatttatggacttttgcaaatgttattcgtctgaagttttctcccatggtttttcatcaaaataccttttatggccgggcacagtggctcatgcctgtaatcccagcactttgggaggctgaggctggtggatcatttgaggtcaggaattcaagaccagcctggctaacatggtgaaaccccatctccactaaaaatgcaaaaattartcaggtggtagtggcgtgcgtctgtaatcccaagtacttgggaggctgaggcgggagaatcacttgagcctgggaggcagaggttgtggtaagccaagatcctgccactgcactccagtctgggcgacagagtgagaccctgtctcaaaaacaaaacaaa

SEQ ID NO: 499704 - DNA, 584 bp, Homo sapiens
gaagaggcgccttccgccatgattgtaagtttcctgaggcctccccagccatgtggaactgtgagtcaattaaacctcttttccttataaattacctagcctcgaatatttcttcatagcagcatgagaagggactaatacggtagggaaggagaaatctagacattggaaaatagctaataggtttactgaacctagaacatgtgcccaaactttagtacccactgttttcctcatagtttctcacttcatctttacaacaatcctctgaaaatgtaaaccattattcaacccagtttgcaggtgatgaagctgaggcttagaaaggcagcctggccaggcaccgggggagctgtaatttgcaggtagctttgtctgsgcccagggctgtacacttagagtctaattaatcactctgctaggctctgtttgaagaatttcttggctttatctcaattttgaaagaattttctccatggaaagccaaccatccaattatcagagccagaacactgcctgttactatgggttgaattgtgtctcctcaaaaaggtatgttgaagtcctaacccccagtacttcag

SEQ ID NO: 499705 - DNA, 584 bp, Homo sapiens
gaagaggcgccttccgccatgattgtaagtttcctgaggcctccccagccatgtggaactgtgagtcaattaaacctcttttccttataaattacctagcctcgaatatttcttcatagcagcatgagaagggactaatacggtagggaaggagaaatctagacattggaaaatagctaataggtttactgaacctagaacatgtgcccaaactttagtacccactgttttcctcatagtttctcacttcatctttacaacaatcctctgaaaatgtaaaccattattcaacccagtttgcaggtgatgaagctgaggcttagaaaggcagcctggccaggcaccgggggagctgtaatttgcaggtagctttgtctgcscccagggctgtacacttagagtctaattaatcactctgctaggctctgtttgaagaatttcttggctttatctcaattttgaaagaattttctccatggaaagccaaccatccaattatcagagccagaacactgcctgttactatgggttgaattgtgtctcctcaaaaaggtatgttgaagtcctaacccccagtacttcag

SEQ ID NO: 499706 - DNA, 627 bp, Homo sapiens
gtgcagactcatggggctatgaggaaacccatgttgtgtggatcagcagtcacaaggtgaaggctctcttcccacttcttccgcagctctagctgtgtggctttgagctagttgctatatgtctctgagacttcatttctaatttatgtaataggtatattaatgttagttatactttgctatataaacaaatcaagacttcgtggcttaaacrataaacatttcttatacagtttctgtgggtcaggaatttgggagtgactacacagggtggtttcagcttagggtctttcaggtatggagttcctttgacaaggtacctggcttcctccagagtgagcgatctaagacagcaagacagaattcacactgtcttttatgactaacctttgaagtcaagttctgtcatttctacactaccctattagtcacaaaagtcaatgctattcaaggatggtgcaaacgactgtgggccgtctgaggctggctagcacaatggagttattaatatctgccctgcccatcttacagaaccattgagaggtttggtttgcacacccacagcaaggaaaatcagcacccagaggatgcatctgtgaagagtcaaggcagcatctgctaaaaaca

SEQ ID NO: 499707 - DNA, 582 bp, Homo sapiens
ttcctgggtcttctctctcttcctcatggaaatctgctcattccctagtctctctagaatgggccctgccttagacccaaaaccctttccccacctatttgggggctggcttcctgacttagtggttgtgaccctgagacatgacggatgatagatctttctgatgaaaactgtcttccccamcccacacacacactgagcttacaagggcaccttctacttcccaatttgatcttgtacaattgggaggttctttttggttaataaaagcagccaccattgtagtaggtgtttagggccagctcctcctcacagcctcactgcaggttaccataaaagcaagtctcagactgaattcttccccccaaaacagacatttattagcaagcaggctcacatcagtcacctcctgagtgtgataaagtccagcatctctgttctttaggaggttccaacgagatcttgcatgaaagagaggttcagttaaggcaaatatcacaacagtctagtagtaggattggtgaaccatctagtcagactgaggttggcccgcattctcctgaaccagaagctgacacaaat

SEQ ID NO: 499708 - DNA, 524 bp, Homo sapiens
ttccttataaagtaggcttctaaagagcaagtaagggcaggagaggatgtgaaggggaagaataattaatatccacattcagccctaatttggttagtatggtttcattaataatggaaataacaacaattgccattgatgaagactatttatgtttctgtttcagaaacaatatctgctcttggagtcactgccaccaagggaataactttacctggaatatggactgggagctcaagccaaaagcatggacaagggagtcccagattacaggatactattatgactyttgcataaatataaactcctattagataaattgataagatgtgctctggttagctattgctgtgtaacaaaccaccccaaacagtggtttaaagcaatgacattctagggttggctgggctcagccaggtggttcttatgtggtctatcattaaggtgcaaaaagatagtggctgggttagggccattctgaagagttattcactcacaggtctagaacctgggctgaaggactc

SEQ ID NO: 499709 - DNA, 494 bp, Homo sapiens
tggagcaaagtcattgcagaggggagccagggtgggtgggattcgcctttaccatgtgtcagtgagaacaagcccaggagggctgaaagcrcgggtgaagtgggaggatttctggcaagaagctaagagtgttttatcctgacaccttctattttcttggtaaaataggtgacagggtcatttgctgatggcgggggcaggaagagggtcagagaattttagtgagtgaaggagtctgaaatacatgtagcacagaaaggggaaactcaaaagtgttgctgggtagggctgagaacccccccaagcctggagggggtgctctttggcgacctccattctcctaggctgcacgaggcagccccagcagcccaaggagtcacctgaaacaggtgaatcacagacttcagtgctccaggtccctcctctgcagaaaaaaacaccaggacaatcttcctcctttctaccctggggacatcttaagcgtgagctgtggc

SEQ ID NO: 499710 - DNA, 494 bp, Homo sapiens
tggagcaaagtcattgcagaggggagccagggtgggtgggattcgcctttaccatgtgtcagtgagaacaagcccaggagggctgaaagcacggrtgaagtgggaggatttctggcaagaagctaagagtgttttatcctgacaccttctattttcttggtaaaataggtgacagggtcatttgctgatggcgggggcaggaagagggtcagagaattttagtgagtgaaggagtctgaaatacatgtagcacagaaaggggaaactcaaaagtgttgctgggtagggctgagaacccccccaagcctggagggggtgctctttggcgacctccattctcctaggctgcacgaggcagccccagcagcccaaggagtcacctgaaacaggtgaatcacagacttcagtgctccaggtccctcctctgcagaaaaaaacaccaggacaatcttcctcctttctaccctggggacatcttaagcgtgagctgtggc

SEQ ID NO: 499711 - DNA, 620 bp, Homo sapiens
tactgtggaaaacatatgaaaaaggattgggcatgggcccagcagctgagaagcttacaatttagctggagagaaaagatgtaatacagataacatgatataaaatgctgtgtattagactgtatgtaagcccagactcaaaagagattttatttgtttgtttgtttgttttcaagacagagtcttgctctgtcacccaggctggagtgcagtggcacgatctcggctcactgcaacctccacatcctgggctcaagcagttctcctccctctgctgggattacagatgtccaccaccacacccagctaatttttgtatttttagtagagacagggtttcaccacattggccaggctggtctcgaactcctgacctcatgatccamccacctcagcctcccaaagtgttaggattacaggcgtgagccaacacacctggcctcaaaagagttttaaaacttggcatgcaagactgtaagtgttaacttgggctggacctggacagggagtttttagagcacttccttaatatactttctccttcccctttttagcatgaagggtttcttgacaattttcttgcacataggagacattcaacagatgtttaccagtttgac

SEQ ID NO: 499712 - DNA, 529 bp, Homo sapiens
ggagggaatggactagggatgcgaaccccagagaataaagggagctgggggcttgaactcctgtatcttgacgggggaaggggctgggtcctgcacttatgtcctggtggggagggacrggggtccagaatctggggttagaaggagactggggatctggactccaagatcctgagaaaagaagaaaggtgaggtggttcacgcctgtaatcccagcactttgggaggccgaggcgggcggatcacgaggtcaggagttcgagaccagcctggccaacacggtgaaacccccgtctctactaaagatacaaaaaattagccaggcgtggtggcgcatgcctgtaatcccagctactcgggaggctgaggccggagaatcgcttgaacccgggaggcagaggttgcagtgagccaagatcgcgccattgcactccagcctgagtgacagggcgagactccgtctcaaaagaagaagaaagctgacagccccaatgctgtatcccattgctcctcacctgtgtccacagcc

SEQ ID NO: 499713 - DNA, 583 bp, Homo sapiens
attagggtataactggctacagaaggctaggatcaaattgcgaagttttttttttttttttttcagtcaggctaaggaattcacacttcgtcctctatgtagtgggtactgatgattttttaagtctagggaaagacatattcaaagtagttctttagaaaaatgaattgatcccctcttaggtatagttggaagtaaaacaagacatactctaggcatgcatcatagagtaagtactcctcaagtatttgttgaatgaataagtgtaataataaggccatagcattgggawtgaaatggaaaggctaggagagatatcctgaaagaacaatttataaacctttgaaaatttaaatggcaggtataagaagagttaaagatagagtatagagcataggtatctgagggaagagaattcccactattgttcattcattatatccagtaggaataagatgagcttagtttcatttggttgagaagtaagggctaggaagaaaggttagccatgcctctacagtaaaagttattaaagctagatagaccacagtcttgagagagataaggtaaaaataagaggaca

SEQ ID NO: 499714 - DNA, 555 bp, Homo sapiens
tgtttcagaattttttgtgtgtttattttcaaggtaactagtaacttgcatagagtttttttgttttgttttgttttgttttttttgagacagagttttgctcagtcgtccaggctacagtgcagtggcgcaatctcggctcactgcaagctccgcctcccgggggttcacgccattctcctgcctcagcctcccgggtagctgggactaccagcgcccaccaccacacccagctaattttttgtatttttaatacagacaggtttcaccgtgttagccaggatggtctcaatctcctgacctcgtgatccacccgcctcagcctcccaaagtgctgggattacaggcgtgagccattgcatccggcagagtcatctaatctgtacacagtttagtaagaaaaaagtactatatcaaatatattggctatccagttaccagaaatctcctgatatttcttccccaacctctttctataaatattacttcttcttttccttccaaaagaaaaaaaaawtttccaaattcatgcaaaggaaggcaacgtagctcaat

SEQ ID NO: 499715 - DNA, 437 bp, Homo sapiens
ctgggtctgttccctgttctctggattctatcacgtattgaccatagaaagcagaattcctgggaactgttctggaaagtgcagctaaagtaaaatatgcttataggacagtttaccattaggggaagtcacactctttctcatgaaataaaaccatgtgagactttcaggtcccatcactgatgttgcttaaagagaccccargtaacctcattctgtccaatcacaaagcaaacttgaggctggtgtgagcagttacttttgtccctgcatatgtgctgagatagcagggaaagggcatgtgggaggcaggagtatgtgtaagagtttgcagtaagtggagaggcagttattatttctttttatgttcctgtgtgtgtccttctcttctgtttgcaaatatcacatgtagctaaggtacttgatttggtagtaga

SEQ ID NO: 499716 - DNA, 580 bp, Homo sapiens
ctaccgtcccgggcacgttgcttacagaggtattgggaaaggaaaaagtgcatcctatcccaagcccacttcaggagaaaaagggggccacctactgtagtgaagggacatcaccttatttcctacttaacaccatcacacataaagttaaagatgcttcattatacaggaaaatttcataggcccctcacaagcccttcttcgcacttagaagggcctatgataaccctttcacagtagggccctctcttttttttaaaaggtctttattcttataacagaagcctgtcaaatatctgtcagaataagctccctactaagattttatacacatcactggaaatttggggtgataatcctcagtacttgcagcaaagttctttgcwcaacatacttttatgggggccataagagatgcttctccctttgactgatgcctttagtacttaacagttagttgttctggcagtaaaatgtcaaattatgagcagtacctcatttattatttatgaatcatcatgaaaaaatggcaaaaaggtcaacacaaggacaaatctcccaaactaaagtctgcatagca

SEQ ID NO: 499717 - DNA, 561 bp, Homo sapiens
gaagacaggacagaagtgaggtgaaatctacgtaaagtcacctccctagaagcatcccccagtctccagggtagatgttctctatgcaggcaagaggcagtagtttgggtttaaagtagaaagcccaggactcacagcaaaatgacctgggtttaagggctgattgtaccaaatattatcagtgtgacttaggcaagtctctgaattccccaggagctcacttcccttcctcacaggtaaaatgaagggattagatcagagggtcattagaggccccttgcatctctagattcccacgatccaggtgatatgctgagacgctggggttggtaatgaaagaacccaaggcttggaccaagcacacaggaatgcttgagaggaaatggggtagagccacaaatgaggaccttcccaattctgcccctagccagctaygtgatgttaatcaaatctcgacttcgctaggtctcagattcttcctctacaagatgaagatgaatgtactatttgctcttcctacctggctgaaagttttgcattaatacaagtattaatacaagt

SEQ ID NO: 499718 - DNA, 585 bp, Homo sapiens
gactcttttagaatgaaaatatgtatcacttgggtaagaaaaaggatattggattgttgaaactaataaatagaatagtaaataactcagtacaatataatttttctattatgacactgaaatagattttaaaaaaaacttcagaaatgtcactgatgacaagaaacaaaagcaakgaaagaaattccttcataaagaaggtacgtatggaggaatccaccgattaagttgctgggactgagacacaaaaggaaaactgttgtagagagcccctgcctccgcagattcacaaattccatcagcgtgcaaagattcccaagttttctcctttgtaaaggagcaatgcttcaaagcagtcaatctggaaaacccattttcaagtgcataagcagttcatggtttggagtcacattccccttatgcatgtatacattcccctatgtataccaactagtaataaatttattttagtttatcttatataagaagataaagccccttctgttttgtaatattctgtataactcctgtagttataggcctctttgtccacagtccatacaacacagaagtccatacaccaca

SEQ ID NO: 499719 - DNA, 631 bp, Homo sapiens
ttttttaaattttatttatttatttatttttgagacagggccttgcactgtcccataggcttgagtgcagttgtatgatcatggcttattgcatccttgacctcctgggcttaagtgagtctcctgcctcagcctcccaagtagctgggactacaggcatgcaaccagctaatttttaaattttttgtggagatggggtctcactaagttgcccaggctggtctaaaactcctagattcaagcaatcctcctacctcggcctcccaaagtgccrggattacaagcacaagccactgtgcccagctaattggctcactttaaattgcacaatgcctggtggatttgctttcctaaaagtaagagaaacatggtctctttgacacctgtattgcgaagtcaattagtccgttgatgttcagtgctggctccatgagatcaaagatgagctgaatgtggtgagccaaagggagatgataggatgttcctgacgcaaagcttgtgatttgttctagcacattgttagaaatctgtgcaaataaaaacaaaaatattgtaagaccaatattctaaataatcttttactaagataaatcatttttactttttaagacagttgaatctatacatgatt

SEQ ID NO: 499720 - DNA, 566 bp, Homo sapiens
agaaacttaatagatgaagaaactagaaacatgcatgcccaaaaccctggcaggcttgttgtactacacgaattaaaatatgtctcttgagccaaatgtccttagaaagaagaaatggagttaaaggaattgaggtctgctctaattcatctttatttctttaaaataactgattagaaattttgccaaaatgtgtmtgtgttgacaaagatgtcataatgatggtaagatgatcagagctgtgtattatcctttcaccttactcacattttctgatatttcaacaatgattcaattatcatagaatttttaaattactaatgtccttaaggaaaaatgaaaaagatctcactcagaatgcgcttcctttcttccaaacactaataaaaacagatgaagtggatgtaattgtccttctgataagacaaaatatggcacttcatacttcccagtacttcctaatttttgcatgctctacttcaaatgcaaatccagtatatatccggaagtaaactgcacatagcaacctatcacgtctctaagaaaagcagtaaaaaccagtcttt

SEQ ID NO: 499721 - DNA, 611 bp, Homo sapiens
ttgcttgcactgagcacggtgctctttctttgatcttcttggcttcaaaacaaattagaccaaggcccaagcttcataggcagatgtttctggttgctggcttgtgtctgtagatgtttaagattcaaagactgaaaaatgaggcaaactaacatatttatggctccttccttaggttataatcaccaacagatgagtgaaggacacaggcagaaatctgaattttataaccgcacagcatctgaatcaaatgtctacttgaatagtttccattatccagatcacagctacaaggaccaggcctttgatactctgagcctcgatagctctgatagcatggagaccagcatctctgcttgctcaccwgacaacatctctaggtaagatttatttatgggtaaggtttctggtttggaaaagagcctactgctcacaaaaagtaaagccatcaatttgggaactgtatatgcacaagcccaaatttttgagacataaagggtctgtaacgcagaagagggttggtatcatgatggcctttgaaagtagtttctcttaccttgtgtaacttagctagtcaggcatcatataatctgtttccacctttatcctgt

SEQ ID NO: 499722 - DNA, 561 bp, Homo sapiens
caggcagtcatccagatcgcaatttacgctgtacttaaccctacaggagtcatgtcccttctgtctgtcagtgagggaaatggccrtgtacttgtgaaggagctgcaaatgtgaacactgagtggcaaagtcccaggactctgtgttattcatggccctggcctttgtccttggcctcctgcatattaactgggatctttaggagagtctctaaagaaaaccgaggcctagaaaatatgtctgcaaattgatggcataatactgagagagacagaatgtgcagcgttatctcatcaatttacaatagcatcattgcttctcttcgctcataatgtggctgtgaggcttatatttttcagagttctttctcatatatgaagtgccctgcaaaccaaagtttccttctgcttgcttgaaacactggcaagatttgcttttatctccagattttattttacatttgctttcagaaaacaaagtattattgtattctcatgaattactgcaatatcatttccagcaaatgtttgagagatacattgaccttgtctttcgcagaaa

SEQ ID NO: 499723 - DNA, 561 bp, Homo sapiens
caggcagtcatccagatcgcaatttacgctgtacttaaccctacaggagtcatgtcccttctgtctgtcagtgagggaaatggccatgtacttgtgaaggagctgcaaatgtgaacactgagtggcaaagtcccaggactctgtgttattcatggccctggcctttgtccttggcctcctgcatattaactgggatctttaggagagtctctaaagaaaaccgaggcctagaaratatgtctgcaaattgatggcataatactgagagagacagaatgtgcagcgttatctcatcaatttacaatagcatcattgcttctcttcgctcataatgtggctgtgaggcttatatttttcagagttctttctcatatatgaagtgccctgcaaaccaaagtttccttctgcttgcttgaaacactggcaagatttgcttttatctccagattttattttacatttgctttcagaaaacaaagtattattgtattctcatgaattactgcaatatcatttccagcaaatgtttgagagatacattgaccttgtctttcgcagaaa

SEQ ID NO: 499724 - DNA, 289 bp, Homo sapiens
tcagaaaaacagccttcggctctggagcccactccggcacggcctcaggtgctctaccccgcgggatccagggagtggccgccactcacagttgcccctcctgtccgctccggtccgctcccgccgcccgaggtccgcgacgccccgcccagtgggtggagtgtgaggcggggaggtcgctcgactcgccggcgctgtggcctsccgcggagccgctcagactttccctgccggcacatggacctggcccaaccctcacagccagtagacgagctggagctctcggtgc

SEQ ID NO: 499725 - DNA, 574 bp, Homo sapiens
gcgaaatgactcctaaactttctattccaattgccaagataaacgcgataatcttgcaagagcgtcctcatagctaacctatattgctcagctgcagcttaagcttaattccatctttctggcctttgaatggaagagaaaccagtccggactgtggagtccytaagagaaagaatgaactttacactgtaagacacaagactaattactttattaggtgcattctataagttgaagaggagaatttttggcaaataaataaataaataaataaataatcaaacagagactctggggcccgaggagctcaggaaaacggaagcggagtctttgcatagttctaaatgaacaggaggtggcagcagtaggcaacgcggattctcggcggaaatgcagcacttgcaaaaaccagggacagaaggctttgagaaagaggagaaggtcagaaggtgactaactatttctttttcgtagagaccatggtgtggaacattcgtcctctctaccaggggcaggatgccgcgtcctacatgatctgcctgggcatcccgtaccctgtcatgcccgcctggga

SEQ ID NO: 499726 - DNA, 594 bp, Homo sapiens
tgatctggtgttttgaactctagttatttgttcatgggtctttctagcaratgtcacattgcatttagtttgaattaattgggtaggtagaaactccatatggtatggtcaaggggtggcaagatcatcctcaccaaagagactatgtcctcttctggtccaacacctaaagtgactacctgtaaagggatttctttgcccaaagacattgaaaagcaagccgtagcctaactctctgacatgaccccggtatcatttcagcaataagacaccaaacattaaagttaatggggctagtctcagatctgaaccctgcatttatgccactgcattagcaatatgacacttgggaccatgagaatggcatgcagagaaagaccaaatccagaaggaagtattaaaggatgaagctgtaccatagtcccacctaaaataaatgagtattcattcccttcttagctattttaggttaagaggaaaggggaaggcctgacaccatggctcatgcctacaatcccagcattttgggaggttgaagcaggcagatcacttgaggccaggagttcaagaccagtctggccaacatggaaaaac

SEQ ID NO: 499727 - DNA, 549 bp, Homo sapiens
accagccgccatcaatcctggaccccccaggttaggagttgggccagttatgggtcaggccctttagcccacgacatccacacagtctgggtttcatccagcccaccccatcctacagaccaggtgcagtttgagaagtgtggcaagagggtggatcggctggatcagcgkcgttccaagctgcgcgtggttgggggccatccgggcaactcaccctggacagtcagcttgcggaatcggtgaggcacaactgcctgtctcccacagagaggagctgaggttgtgtcctctgtggttatcccactgggggctgggaatctatccctgcccccagaggtcctagccagaagatggcaggtctagcatctgtcccaggagtctgttacctgtcctaattccccactcctctaggcagggccagcatttctgcggggggtctctagtgaaggagcagtggatactgactgcccggcagtgcttctcctcctggtgagcctcccttgtgtttggggacccagtctcatcccaccttcccccttccccaggcaa

SEQ ID NO: 499728 - DNA, 549 bp, Homo sapiens
accagccgccatcaatcctggaccccccaggttaggagttgggccagttatgggtcaggccctttagcccacgacatccacacagtctgggtttcatccagcccaccccatcctacagaccaggtgcagtttgagaagtgtggcaagagggtggatcggctggatcagcggygttccaagctgcgcgtggttgggggccatccgggcaactcaccctggacagtcagcttgcggaatcggtgaggcacaactgcctgtctcccacagagaggagctgaggttgtgtcctctgtggttatcccactgggggctgggaatctatccctgcccccagaggtcctagccagaagatggcaggtctagcatctgtcccaggagtctgttacctgtcctaattccccactcctctaggcagggccagcatttctgcggggggtctctagtgaaggagcagtggatactgactgcccggcagtgcttctcctcctggtgagcctcccttgtgtttggggacccagtctcatcccaccttcccccttccccaggcaa

SEQ ID NO: 499729 - DNA, 549 bp, Homo sapiens
accagccgccatcaatcctggaccccccaggttaggagttgggccagttatgggtcaggccctttagcccacgacatccacacagtctgggtttcatccagcccaccccatcctacagaccaggtgcagtttgagaagtgtggcaagagggtggatcggctggatcagcggcgttccaagctgcgcgtggytgggggccatccgggcaactcaccctggacagtcagcttgcggaatcggtgaggcacaactgcctgtctcccacagagaggagctgaggttgtgtcctctgtggttatcccactgggggctgggaatctatccctgcccccagaggtcctagccagaagatggcaggtctagcatctgtcccaggagtctgttacctgtcctaattccccactcctctaggcagggccagcatttctgcggggggtctctagtgaaggagcagtggatactgactgcccggcagtgcttctcctcctggtgagcctcccttgtgtttggggacccagtctcatcccaccttcccccttccccaggcaa

SEQ ID NO: 499730 - DNA, 549 bp, Homo sapiens
accagccgccatcaatcctggaccccccaggttaggagttgggccagttatgggtcaggccctttagcccacgacatccacacagtctgggtttcatccagcccaccccatcctacagaccaggtgcagtttgagaagtgtggcaagagggtggatcggctggatcagcggcgttccaagctgcgcgtggttgggggccatccgggcaactcaccctggacagtcagcttgcggaatcggtgaggcacaactgcctgtctcccacagagaggagctgaggttgtgtcctctgtggttatsccactgggggctgggaatctatccctgcccccagaggtcctagccagaagatggcaggtctagcatctgtcccaggagtctgttacctgtcctaattccccactcctctaggcagggccagcatttctgcggggggtctctagtgaaggagcagtggatactgactgcccggcagtgcttctcctcctggtgagcctcccttgtgtttggggacccagtctcatcccaccttcccccttccccaggcaa

SEQ ID NO: 499731 - DNA, 584 bp, Homo sapiens
actggtggccacatatagctcttgctattctggaaaagccatgggatagaggtaaaaatgggactgaggggaagatcaaaggtaaacgccacatgaaccactactgtatacctactggtctctttctagaatttggcctgaggtgggcctggtgcaattcttagtgagacactacaagaatatrgatgtcacttgaggcaggtctaagggtttggttttgttctacatcatggatgacaagtccatggcctttgtgcttaattgatggtgacaatctttcccatgaatccttcccaagcccacttcccaggcggtcactaccaatttattggggttaaaggaaagttacccttatgttacccttatttcctatccttgctctggattctggagactagctggtcccagaggaaaccaaaagcaaatcaattttccctgaaagatgttctcaatctagtagaccactcagggcccagggctggggaatgaggtccccaaggtttacttttgtggcatttgtggcctggattccccttgctttcagactcctggtggtctccccgtctgatgctggcagcttcttc

SEQ ID NO: 499732 - DNA, 576 bp, Homo sapiens
cattcagtccttactgacaaggagaaggcaggaagaccattctccttttctctctgtagatgtggggttttggacaaatacttgaatttcctgaatgtcagatttctctgaaggaaaagcaggattccaaggattggcatcagtgcctttgctaatgcccatgcctgctcaggcctgctagtccacctttccgttcttcagtgacttacatgtgggcccgccacccctttctgcaccagaagggtggcccgtgttgcccttgttaggcttctattctgacagttgggggtgggagggagacaaggcatgggcctgagcctgctaagtagaagatgagaagatgcagttggggtgggcagtggggatgggagtgagttgctggggaatatgaaccgtggcctggggcaggcatagcctgcttctataggcttctcagggacttmcatgccccactcagagcagccccagaagcacatcctggcctggagctcctgcagatgccagtctgtcctcatcctcagaacagcatcccaggagtgactgcggtgcagaggcagggttgcctgcatgcccgag

SEQ ID NO: 499733 - DNA, 591 bp, Homo sapiens
ctgctcattcaacttagagttcatacagcctccagcttgggccccaagcctctggatccttggccagtgccaccttagctgcccttctgcacactgaatagtttgagtaaggaagcagctaaaaaagactcttctcagggagaaagtcctctcagagctacagagcccacagggtcctatgwttccaagtccctagcagacaggtggcagtggctccctgcaaagcctgtaggaaggcttcctgcagcttctgcttcccccacctcttaaaccacctcttgaccttgtactgcactgagccttcccatccttactgccacttaggcccccactgggtcggggtgcacgggcttccatggaggtccctaccagtccttggagatggcaagatgggcttccttgctagcaagaagagtcagctcattcaaagctaatgtctgacagagctgtccaccttagggtagccccaggaaggctcctgagacacgaggctcgtggctggtagcctgcacatctcctgcccatgtgccagatcaggatcttggaggtattagacagcagaaccctagctgaggcttcttgtcacactgg

SEQ ID NO: 499734 - DNA, 538 bp, Homo sapiens
tgtaggttttgctaatgcgcaggccaactaggtattcctggttccatggctcttctgggcatttctcctacaagtggcaactyggagccaggctcctgccctcttggggttcttccaaatcctagggcccaggcgtctctctggacatgctgcactcagccagcagatgatgggagagaaagaactggaggacagagaagtgacatatatatatctgctcacatacctttggctagactttggttccttggctgcatccaacagcaaggcaagataggacatgtaaccactgtgtgcccagtgaaaagggacctggtggtggaatgttagcttttttttttatttgccaaaggtctactcttatttttcctcattctataaactgtcaagttcctttttatttaaaaactaattatttttaaattaaagaaataaagttatctgaagaaaatatgttgtttgaacagtctggaatttttacttaaagagaaagctatagcaggtgcaaaaccagagtaaagaagctgatcagagttgc

SEQ ID NO: 499735 - DNA, 535 bp, Homo sapiens
tgtggtgcaagcagggcatgcacagacaatactccactcagyctgggaagctttcctgagccttgggagactggctcatcatgaatccgagccttctgtggtccctttataactatctgcaagtaataaattagcttcatggaatttatagtatatttaggtgttctgtctcaccaggctgacaaattggtactcagtgcacagggtaactcttcacaaatgcctgacatatatttatatgtctggaaaataaataaattgtcttcccactctaaggttatgatatgcataaatcttacatcaatgcatttaaaacaactaagactatgtgtttcctttatcaagcatgtatttaagcacctgccatatgccaggccctgtcctaggctctgtggttttatacctattcaactcactatcactggtaattactaggaaaagtaatagacttgttaaactgtcataaagtaattcactgggtcttcatttttaaaaatagtaggcatgagagattttattttccaagatatgactg

SEQ ID NO: 499736 - DNA, 593 bp, Homo sapiens
atccaccacatcccagcttcgtgttccaggttaagtctcctaaaccccttctgtgtttccacagtggtgtcatttcttccccatgtacttcacagggctgttatgatgatcaagtgatatagtaaaagggcgtaaaaactttgcaaatataaagtgctatacaaatggaagttcttattgtgagtagtgcccagaacacctgccctgagggaayaggagtattactaggaagagtgggaacaaatccaataggatgagatgccttggaagaaataggatgcaatgggagaggccggatagaagaaatgtctgtgggtttgggggctaatagatgacacctgtatatatatatggagttggaagccagtattagagagagagccagttgtgggagccagatatatggatataacaatgtcacctttgttattggtaaagcagtttggagaatgttgcttaggtctgtgagcaggagggctcactaatatttcatcactagcttaaatgtactcactgtcttggtcactggcaaaacaagaatgttcaggcctatccctggaaggacagtatctctttacttcatttcagagaaa

SEQ ID NO: 499737 - DNA, 622 bp, Homo sapiens
ttgggaatcagtcacacctaaaatgtcatcattgttatgactcttttgtgactatattctctcttctttcattttagtgattggccaggtcacacatggcagaagaaaataagattctggtgactcactttgtcctcacaggactcacagatcatccagggctgcaggcgcccctgttcctggtgttcttggtcatctacctcatcaccctggtgggcaaccttggcctgatggctctcatctggaaggacccccaccttcacacccccatatacttatttcttggcagtttagcctttgcagatgcatgcacttcatcctctgtracttctaagatgcttatcaatttttttatcaaagaatcatatgctatccatggctaagtgtgccacccagttttacttttttggttccaatgcaaccacagaatgcttcctgctggtagtgatggcctatgaccgctatgtagccatatgcaatcccttgctttatccagtggtgatgtccaatagcctctgtactcagtttataggtatttcatattttattggttttctgcattcagcgattcatgtgggtttgttatttagattaactttctgcaggtccaatattatacatt

SEQ ID NO: 499738 - DNA, 668 bp, Homo sapiens
tggtttgtttacacatagaatcatttattcattcaacaaaatgaatgagtcaaaggaaaaaagaacttgggagatggcagaatcaagtgaagctgttgcaagtgacaagagacctgtgcatatctacagcaaaagaaaaccctgagagggtaaccagagatgctgaaggcataaggcacacttgaggagacacaaggggaatgaatgtagccgtgggtagatgcggagggagctagcatctgatacagtcataacctaacccaggcgttgcaaacgcaaattttaggcaggtaaagtaaacttgggaggtgggctggccaggtgacatttaacagggcatggtggggattgaggcaaactggagacatcatgccctgtggaaagtgggcagccaagcctcagctcaggctttgcccatgcagaaacgagaacccagaattgccagatgctctgatatttcaagacaagcmgaaaagatgggtttttatatgcagtctctcgatgtgtatgttgttacaaatcttaaagattttttaaacattacgcaggccaaacaaaacacatctgtagtccagatggggcccacaggttgccaatttaggacctctggcttagaacaaagatgttagcatggtccctagacttggtcatggctctgagctcctgac

SEQ ID NO: 499739 - DNA, 570 bp, Homo sapiens
cagctggcatgtgattagcacttggaagccacttcataaagcatattttatgtcatgggaagaaggctgaaatttctccttttcaggcctttgtgcaaccctgtttctatacctgaatgctctttccctgtttttgtttgttttaatgctttgctctttcccatgattcaggcatcagcttaaaaataaccttttccacggtgttttccctgatcactttatctcaaaaggttctgctctctgttcatcatttttcyccattaaaacaacacgacacactgcttgttcatttatttttgtttccctcttttcagtgtctcataggcagtgagaactcagtctgtttcactcccagagttaccacactaagaattgaaccttgactttcccactttttagtgtatgacctagataacatctaacttgacccactgactttcagctttttcttctgcaaaatctggtgggcttgatatttatgtattttttagccatagtgtgaagacttttataatagatgtaaaaatgctttgtaaatgttaaagctccctaaaaatttattggattatt

SEQ ID NO: 499740 - DNA, 646 bp, Homo sapiens
gctgaatacttaggtctgacagtgagaagagtataggaaagtatttgagaatcattggtttatgacaaagaatgaaagctctgtgtattgatgcctagcttgatgactgcctgggaatatagaataaatgaagaaggtgaaaaatatgcatatattcatatctatactaacatggataaagatttatgtctataaatagacataacaaatatagraaaactagaggttaatcaaggaggaatattaaatttgtggttttcaagcctctactacgaatattttggggctgatattaaaactcatggctttggccactcttacacattagtaactgagttctgacagtcagtgacatgatccccatgtcattgttatgaattaaaaaaaagaggtgtagggaaataaagtgaccgaatccaagttatataagtaaaattgtgatatctttttctttcttttcgttgtcactgcccatcccctactcaatatgtttaggttataaattacttagccttaactggattattagtaattaaggctaagtaacttaaaagactccaagaagcatttctaaccttgattttcaatgaatttagcaaacatcaagcatctattatttgccaaatactgttagatcctagctata

SEQ ID NO: 499741 - DNA, 671 bp, Homo sapiens
ccttgtaatgaatatcctaataactccttgcattgacttacctgtccttctcccttagaggtaccctttgtacagtggtaacatccagcacttaatttttgttatatgttgggctatatgctgagaaaaaaaaagagacataatagttgtcatggtctagctgggaaaaggctaagtgccatggtatggagtatactgtagggagccccttagaaaacttaacgatgaaagaagagaaatgggaatgtcaagaggaatgttacttattgaaaggatgcctagggcatgtacttcctggtttgtgatgaatttagatattatcctaggtaagtatttattgctttgtagaagatctagttgacaccattgtgtggtttagaatatgatagctaccaataatatttagttgtttaaagtttactatagatctaaatgytatttcatgataatagaagtagttatattaaaaataacctcattccctcttatctaatgattgaataatgtggtataattatccttttattgatatcattttgagtagttctgtaatagggaacatgaaagatagtattggattacatgattatttgacaactctgggaaaatattccaatttaagattccaagtaatatcagaaatctttgcactatcgataaacaagtaggta

SEQ ID NO: 499742 - DNA, 453 bp, Homo sapiens
atatgattaattacaaataatacctgacatggtataaaaaacataagcaaccacttcagatacagcaggytgggaaagtcagtgaaaaaggagacgaactgaatctttctggagatagaggtctgaataggtgaggtagaggaagaaagggcattctgatcagtttaataatatttgcatgaaaatacagatgcagaaaaggaaaattgtgcttaggagttgatcaattagattgaatgtagtgttttcacatagaagaaattaacgtagaaaagttgaattagctttattttttcagggttttcaaagcctagaggtgaataaatatatctatgtttctagtaaattaattacattttctataataaatatttcagaaagcaaaaaaatagatttcaaaatagataaaggataaatacaaaggaaattggatgattatgacataggaaagga

SEQ ID NO: 499743 - DNA, 718 bp, Homo sapiens
tgttggagaagagaattagaagtaatttgcattcgtttggaatggacagcagtgcaaattcatggttttgccctagatatatgttaattatcctgctctctgtcataatatagtccaaagggacttgtttgattgaatcatcctgcagaatatcactttgatccactatattaatgaatcatgttaatcagacctaataggcaatacaccagctcgataggtgtataagcaaccatgctgttttgccacctttataaagaaggcatatataaagcacaggcatgaagttcaacaaagaagttccgaccctttgactaggctcacaatctggttgccaaccatctcacttgccttatatcctccacatgacctccacctgagtattaccacacaccattttccttatgcaatgcatttgtccttcttctccactgagtgacctaggacaataatggaatgcccacatcccttgtctcttatggtctgagttacaaagttatttgtgggcaagagattggtgtttcagaaaacttttcattcccatatagtctacatccaatcaacagaactggcagtacagctcctccacaactcatcctcatttcagacaactcgggaagaaactctcaggcaaacacttcatttatccctgcccatccagaggtactcactcctcttgtctaarttttaataccagcttcacatgcctacccttcct

SEQ ID NO: 499744 - DNA, 555 bp, Homo sapiens
tgtgattttttgaagacggagcctataaaaaggtaattacggttaaatgargtgaatatggtgaggtgaataaggttacatgaggtgaatatggtggagccctaattcaaaatggcttatgtcttgatgagaagagtaagagacaccagggatatacactcacagagcaaaggccatgtgagggcatagtgagaagatctgccagcaccttgatcttggacgtgtggcctccaaaactgtgaaaaaaaaaataatttctgtggtttaagtcaactagcctatggtactttgttgcggccatgctagaaatcaataatagaaagaaacaggaaaatctcccaacacttgttaactaaacaacacagagttagctctctatatctatgggttctgcatccatggattcaaccaaccccagatagatcataaatcttcaaaaaaaaaaaaaggatggttgcatctgttctgaatatgtacagacttctttttcttattattccctaaacaatacagcataacagctatttacatagcatttgtaatgtattctatatt

SEQ ID NO: 499745 - DNA, 373 bp, Homo sapiens
cccagctgtggtattaatggcttatcaagcaaacctatgcattaagagaaactgttttcatttagataaatggaagcagaggcaaaggaaaatgatgcaaggctcaccttgtgaaagtcacaaattagatacaaagcactgccacaggcaaatttgaattcaatagaataaagctagcagccatgaacatcaggtaataggcttatcaaatgaggtttgtattttttataatgtacattttatggggaccagtgtaaaaccagtaggcagaataaaatataattttaaatatratataataaaatataatatatattttatataatatatattttaaatataataaaatataattttaaaagaaaaattcaat

SEQ ID NO: 499746 - DNA, 553 bp, Homo sapiens
cagctgtggtattaatggcttatcaagcaaacctatgcattaagagaaactgttttcatttagataaatggaagcagaggcaaaggaaaatgatgcaaggctcaccttgtgaaagtcacaaattagatacaaagcactgccacaggcaaatttgaattcaatagaataaagctagcagccatgaacatcaggtaataggcttatcaaatgaggtttgtattttttataatgtacattttatggggaccagtgtaaaaccagtaggcagaataaaatataattttaaatataatataataaaatataatatatattttatataatayatattttaaatataataaaatataattttaaaagaaaaattcaatgagcgattctttttctaagttgaaaaacaacctgtctcaaatttgcaccaaatgaaaggcccagagaagtttgtaaatgagctccctcacctcctaaaaccttatgattctacccacagaatctcatcttctactcccacgtaccataccagcctccaagcctgcctcaagacaggaatatt

SEQ ID NO: 499747 - DNA, 620 bp, Homo sapiens
tggcaaaagaggagagcgggggtgaggagaaggctcttctgtttaaactctattagcacaggagcaacacatctcacttctgttgatagtccaccggcaagaactagtcacatcgaccattcttaaatgcaagaaaagtcaggaaacgtagaccctaactgacagtaacttttcaataaccacttatattatggaagggaggagcaccaagtttraggatcagctagctgtctcagccatggggaactacttattcctttactcatgctgacttctcactaatcagtttaactaaagtctgaaattagggctgaggaagtgaatggaactcttggctgatagagggagcatggatagtagaaagatcgttatcctttccacccttcctgaagctcctgatttttccagagcaagtatgggtccatcaaagaaatgatggcttgagaaggtacacaaatgcggcctcttggagaggggagatatggctattgggggaacaaggttaggatgtctgaataaattgagtcctcatttagttaagccttcgaatagttaatgttcattttactatttcactgatagagatctcatgttattttgtttaggatcagtgtttattg

SEQ ID NO: 499748 - DNA, 620 bp, Homo sapiens
tggcaaaagaggagagcgggggtgaggagaaggctcttctgtttaaactctattagcacaggagcaacacatctcacttctgttgatagtccaccggcaagaactagtcacatcgaccattcttaaatgcaagaaaagtcaggaaacgtagaccctaactgacagtaacttttcaataaccacttatattatggaagggaggagcaccaagtttaaggrtcagctagctgtctcagccatggggaactacttattcctttactcatgctgacttctcactaatcagtttaactaaagtctgaaattagggctgaggaagtgaatggaactcttggctgatagagggagcatggatagtagaaagatcgttatcctttccacccttcctgaagctcctgatttttccagagcaagtatgggtccatcaaagaaatgatggcttgagaaggtacacaaatgcggcctcttggagaggggagatatggctattgggggaacaaggttaggatgtctgaataaattgagtcctcatttagttaagccttcgaatagttaatgttcattttactatttcactgatagagatctcatgttattttgtttaggatcagtgtttattg

SEQ ID NO: 499749 - DNA, 620 bp, Homo sapiens
tggcaaaagaggagagcgggggtgaggagaaggctcttctgtttaaactctattagcacaggagcaacacatctcacttctgttgatagtccaccggcaagaactagtcacatcgaccattcttaaatgcaagaaaagtcaggaaacgtagaccctaactgacagtaacttttcaataaccacttatattatggaagggaggagcaccaagtttaaggatcagctagctgtctcagccatggggaactacttattcctttactcatgctgacttctcactaatcagtttaactaaagtctgaaattagggctgaggaagtgaatggaactcttggctgatagagggagcatggatagtagaaagatcgttatcctttccacccttcctgaagctcctgatttttccrgagcaagtatgggtccatcaaagaaatgatggcttgagaaggtacacaaatgcggcctcttggagaggggagatatggctattgggggaacaaggttaggatgtctgaataaattgagtcctcatttagttaagccttcgaatagttaatgttcattttactatttcactgatagagatctcatgttattttgtttaggatcagtgtttattg

SEQ ID NO: 499750 - DNA, 635 bp, Homo sapiens
acttcccagaggactcagaaatgacctaaaagtctctggcttcctcttaaattaatgtcacttacagagaccattttcgtttaagactcacttagctgataagaatgcagackgaacaagattagcttttgagaacgtgactgttcttgaaggaaatacatttccccaagtatcacaaatgactctgggaaatagtattctgtacgtgtgagattacataatcaatctttgtcctttgtcctgaatctagctaaacgaattaaatagcactgtttgctcacattctgacacattctagttccactaaggggtcaaatgtgcttataaatctcaactggccaattcaagcatcaaatggaaatctgtattttaatgattttatttaacattagtgtctcaattcttcatccacctgattatttttgttgcatgtaaccctattctgaaaattaggtcgtttgtcccttggtaaccatgactctcctcctacatttgtcagtgttcttattcatctcctaaaatatgtgggctcttgtttcagccactgaaacactgctgctccccagagctctgcccttggctctctgcaattctactacaccagtggctctcaggctttgtgcagttgagattat

SEQ ID NO: 499751 - DNA, 410 bp, Homo sapiens
ggctcctgaggcccagggcccggaccctctcaccatcttctagcttgtctacgatcgaggcaaaagagtgagatgcctaaaggggtgtgctgtgagcatccacagcctacgggaagccctgttatttatcctccatctctgccttccaaggctccaggcatcctttccacccttaccacctaccaaaggaaggtgttcagaaagaaatggctgcttgactatctggttttcataacctcctctacagtcttcaagtatgtgtatataacatggaagaggcttaaacagtgcgtgtgctgaaaaagactgccactagtgtcaccacgaaaggaaactactttatttctcytcaagcttcaggtgtgtgctgatcaattaaactgactttaattatttattcctgattctaa

SEQ ID NO: 499752 - DNA, 562 bp, Homo sapiens
tgctggtgagggctctcttcctggcttgcagatggccaccttctcactgtgtcctcacatggtgggaagagagaatgagagagagattgcttcttcttctcataaggccgccaatctggttggattagggccccatccttctgatctcatttaaccttaattacctccagaaagccctgccttcaaatacagtcacactgggggttaggactccaacatatgaatttggagggacayaattaaatctatagcaagcttcatggggaattgtgttgcaacagggactacccaagaaggtgaccaataatggccatcttgaagtctggctaccacagcccatgttttgtggcatctttggataatttctttctgatgcaaacagccttggaagacaggcagagtctctccctctagagccaaaagcaggcatgctcacctgcccattagagagggcttgggcttcctaaactcggggttcctctcctgtgacacagtccactgtgtgttcccaggatttctgaggctcttcatgttgatatgtgggaatttaggcttggaaacc

SEQ ID NO: 499753 - DNA, 562 bp, Homo sapiens
tgctggtgagggctctcttcctggcttgcagatggccaccttctcactgtgtcctcacatggtgggaagagagaatgagagagagattgcttcttcttctcataaggccgccaatctggttggattagggccccatccttctgatctcatttaaccttaattacctccagaaagccctgccttcaaatacagtcacactgggggttaggactccaacatatgaatttggagggacataattaaatctatagcaagcttcatggggaattgtgttgcaacagggactacccaagaaggtgaccaataatggccatcttgragtctggctaccacagcccatgttttgtggcatctttggataatttctttctgatgcaaacagccttggaagacaggcagagtctctccctctagagccaaaagcaggcatgctcacctgcccattagagagggcttgggcttcctaaactcggggttcctctcctgtgacacagtccactgtgtgttcccaggatttctgaggctcttcatgttgatatgtgggaatttaggcttggaaacc

SEQ ID NO: 499754 - DNA, 574 bp, Homo sapiens
tgcttaatggcaaatctctgattgctaactgaatctgaatgtatttttacagatttattcaatcaatcaacatgtccttagggtctgccctgtgccaggttctgttttaggcactggggacacagccatgaatagtaggtgaggcctgtgtgagcrtgtgggtgtgagtgtgtgtgagtgtgtgtgtgtgagtgtggtagagggggccggaggtgaacaggctgaggatcaggaaaggcttccaggagaagaaatgagttggggttaggtcagcaaagttgggcggggttagaaaggccagaggaggggagcagcagagaccaaggcctgagtgggagtgagcacaggggctgggaagagttggaggaggggattgggcagaggatggcaagagatggggctggagagggagacgcactcagatcagatcctgaggggcttcctgagaagagtcacctacacaggttgttaatgacccagcaatccagtgcccttcggggcaggaaaaaaaggttttctgcatattttatatcatggagatttcctgtgcccacacccctgccaagtgtatctc

SEQ ID NO: 499755 - DNA, 447 bp, Homo sapiens
tttgtaaaaagatcactgaaacatgactgtttattatgtgcaaggcactgcatgcagtaacrcaatgaacattctctgaaagaagaaaccatctttgtaattcaaactctactgcagtcaagtttaatgaagtgactcttatttaagtccctattacatgatccatgtaggaaatttctgttaggatttggtactagcattaactgtgtcttctttgagaagcatcacctgtcttttccttttatagaataatactagataacatccttagacatctcccatgtgccaggcactatgcccaacacttcacctacattttctcagggtgttcttacaatgtctctttgaagaaagtactgtcatcattccaccagtgaggttaagtaacagtcccttaaattttccactccttagtgccagaaagcttagagcaaaattttaagccca

SEQ ID NO: 499756 - DNA, 447 bp, Homo sapiens
tttgtaaaaagatcactgaaacatgactgtttattatgtgcaaggcactgcatgcagtaacgcaatgaacattctctgaaagaagaaaccatctttgtaattcaaactctactgcagtcaagtttaatgaagtgactcttatttaagtccctattacatgatccatgtaggaaatttctgttaggatttggtactagcattaactgtgtcttctttgagaagcatcacctgtcttttccttttatagaataatactagataacatccttagacatctcccatgtgccaggcactatgcccaacacttcacctacattttctcagggtgttcttacaatgtctctttgaagaaagtactgtcatcattccaccagtgaggytaagtaacagtcccttaaattttccactccttagtgccagaaagcttagagcaaaattttaagccca

SEQ ID NO: 499757 - DNA, 515 bp, Homo sapiens
tagtacctttcttgtcttatagcctaaaattatctcataccaaataggtagagtattgataaagataagaagtagaagcatttttgcagcccaaatttctagagaatacttgaagaargggagttaagtgttctcagcattttccaaagaacaaaactcgactggtttggagtttgaattaaatgaatctcagatgaaaatgtaaaatataggatttattttctagttccaactcacatttctcagagtaaccagaggactggcaaactctaaagctattaataccatagctaaaaggccctgcaacctcatgatagctagaaaatccactaacttttgggaggccacaggacacatctatacctctcatcgagaaaattcttaagaggcatcaaggagtgtagtacagtgattagagaatagattctacaaattgtggactacgactatgaccccatgtctaggctgatcaaaagaaacttaaattaggtgttgactaggtctgtcctctgacg

SEQ ID NO: 499758 - DNA, 538 bp, Homo sapiens
ctgtgactgtccttgtacttgtattcgagtgtgcatttatactaatttctctagacatgaaattgttaagtggaaggaatgcaaatcttcaattttaccaaaaaatgtcaaatggttttccagcaatatatgggatttcccattgccacattcttaccagcacttagtatagttaaatttttaaaatttctgttagcctgatgaatatataatgattgtggaaatttgcatgtcccttattactaatgaaattgagcaacattttgtacatttatttgtcatttagttttttttgttattttgcctagttacaattttgcccatttttcttctgtattatcttttaaaaatttatttatagaaatgattttaatattccagttaccagttttttgtttgtccattgcaaatatctttctctcttttttgtaatttttttctttatagttctttagataagaagatgtccttaacgttacataaaaaatgtatyaatcactccttcatgaataattttgtttgcaccttatttaagaaa

SEQ ID NO: 499759 - DNA, 554 bp, Homo sapiens
catttttaggttaagatggcccagtgaggcctggcttgatggaaccctgttttgtccagccactctctgtctcacttctaccccctctgtccctagtacttgtactgatgcttcttaggtaaagacctttgcaccattatgttctttgtcccaggaatgatccttcttttactattaccctgcctraagtcttctcaagcctcagcttctcagcctttatcttacttcttgggtaagctttgtctgatcctccactccatcctctagttgttcctccttggctcactctcatgataacctgtagatttaaggaaaagtacttacttgtctattttctgaaaagcacacgccaaactataattaaatacttatttttctttttatattagtctgtaagctctggagggcttttctctccccagtatcctataggctggtagaggtttttgtttgtttgtttttcttttcttttcttttttaaattttactttaacttctgggatacatgtgcagaacatgcaggattgttgcattggtatacatgtgccatggtg

SEQ ID NO: 499760 - DNA, 579 bp, Homo sapiens
ttttaggttaagatggcccagtgaggcctggcttgatggaaccctgttttgtccagccactctctgtctcacttctaccccctctgtccctagtacttgtactgatgcttcttaggtaaagacctttgcaccattatgttctttgtcccaggaatgatccttcttttactattaccctgcctaaagtcttctcaagcctcagcttctcagcctttatcttacttcttgggtaagctttgtctgatcctccactccatcctctagttgttcctccttggctcactctcatgataacctgtagatttaaggaaaagtacttacttgtctattttctgaaaagcacacgccaaactataattaaatacttatttttctttttatattagtctgtaagctctggagggcttttctctccccagtatcctataggctggtagaggtttttgtttgtttgtttttcttttcttttcttttttaaattttactttaacttctgggatacatgtgcagaacatgcaggattgttrcattggtatacatgtgccatggtggtttgctgcccctatcaatccgtcatct

SEQ ID NO: 499761 - DNA, 641 bp, Homo sapiens
tcttgggagttctcagctaaagggttttaatgttaagtgttaaatttgtgttttgcagtctgctaggaatcagcagctttttcatttccttcatttacaggcattgctctctaaaattgcttgtattgcaggaccagaagtcaagcatctgatctaagtgaaactctgaaagcctctttctgactatgcttccaacagaactatgggtactattgcatagctgaaggcaatattgtatgaggtttgagcccagattttggaataggtaactgataataatgctcctcacattgagtcagtgaggatttttgcagacactttgtggtgcttaattttatgtgacaatttgactgggctaagggatgccccgagagctgacacagcattatttctggtatgtctgtaagtgtttgtctggaagagatcagcatttgaaccaggagactgagtaaagatcatccccttgtgaatttaacctaaaattagaaaaggaaaaaaaaggatccctctcaccaatgttkgtggtgatcatctcatctgctaagagccaggttagataaaaaggcagaggaagagtgaatttactctgagctgggacatccatcttctcctggccttggacattggtactcctggttctt

SEQ ID NO: 499762 - DNA, 628 bp, Homo sapiens
gttcttaggcctttgagtttggaccagaactacgccattgrctttcctgggcctctggcttgcagatagcagtttgtaggacttctcagcctctgtaatttcatgagccaactcctcataatacctctcttttgatatatctatatatataatattggttctgtttctgtggagaaccttgatgaatacaaaaggataactgataacaatgctctcttgactgagtcagtgagtaatttcataatgaaaagttaacgtgctttctgggcttgaagaattctttctttaaaaaataagtataaaaattaaacttgagcataacaacaacaagaacaaacaacaacaaaatcctttggttacaataattccattactgtaaagcaatacactgcctcttatccaagcctgcttttggatgttgaggttccactgagacagcctaagggtgtacagcattttgtacagtgctttatgtgagggtaggtgcttaataagaattcattgaaagacaatcaatatgtacagatgattcaaacaatttgaagttgtttcattcagtggcatttgcttttttattttaattttactttaagttctggggtacacgtgcagaacgtgcaggtttgct

SEQ ID NO: 499763 - DNA, 628 bp, Homo sapiens
gttcttaggcctttgagtttggaccagaactacgccattgactttcctgggcctctggcttgcagatagcagtttgtaggacttctcagcctctgtaatttcatgagccaactcctcataatacctctcttttgatatatctatatatataatattggttctgtttctgtggagaaccttgatgaatacaaaaggataactgataacaatgctctcttgactgagtcagtgagtaatttcataatgaaaagttaacgtgctttctgggcttgaagaattctttctttaaaaaataagtataaaaattaaacttgagcataacaacaacaagaacaaacaacaacaaaatcctttggttacaataattccattactgtaaagcaatacactgcctcttatccaagcctgcttttggatgttgaggttccactgagacagcctaagggtgtacagcattttgtacagtgctttatgtgagggtaggtgcttaataagaattcattgaaagamaatcaatatgtacagatgattcaaacaatttgaagttgtttcattcagtggcatttgcttttttattttaattttactttaagttctggggtacacgtgcagaacgtgcaggtttgct

SEQ ID NO: 499764 - DNA, 655 bp, Homo sapiens
ccatgcttattatgacagttgttggattgkgtgggagtgatgtcaaagaagcaagaaagcatgtactctgggaacatgagcctgggcaatgaactgagaagcaaatgtttatatttaaaaactgttttcttttcccttttacaactgcatagaaagccaattagcaggttaagtcatgagtggctacaattagtagcatgtggttatagaacctgtccaggtttgatatgggctctggaaatttttgaaggtcttgcagttccctggaatcttctaactaggcaactgcttttcagcctctgtgtcatttggatagcagagcaacatactgatctcaacaaaatgaaatagtcaaaaacaactccctcaatccaagttccagttcacaaacatttcctttttgtatgatagatttccagtctgtcatttatacctccttttcctgttagaatcagactgggcaggacaaccttagatcatctcacagcagttgttcactgttggacttggttgacttttttctattttatcgtaatgtgcttctcacattgttttaccagttagtgacacaaagtgaaaaattaacaataatatgtaaaatttccctttatcttcatggaagaataaacaagaagactgtgaaataagatgttta

SEQ ID NO: 499765 - DNA, 618 bp, Homo sapiens
tgttaccagtttcattatcatcaaaaaaacaggcctcaaagaaactcttacaatggttgctttgtgtgttagcttgatttacttattaagaaactcctgtttacccttttgtagggaaggaagaaaatacccatgttttaaaaaaaaccacagtacaggacagactgtgttatggagactcatgattaagacacagccttaggacctaaaagacaattctatctctgcaacaaactcaatgaaaggtcctgaaaaagtaactgacttcataagttgtcctttactcaccatgatattgagaggtgacagtgtggtggcagccctcgcgtgctctcagcgcctccttggcctcggcgcccactctggccgtgcctgaggagcccatcagcttgccactgcactgtgggagcccctctctgggctggccaaggctggagccggctccctctgcttgcagggaggkgtggagggagaggtgccggtgggaaccggggtgcacgtagcgcttgtgggccagcgcaagtttcaggtgggcacaggctccgcgggccgcactcagagtggccggccggcattgctggccccaggcagtgaggggcttagcacccaggccagcag

SEQ ID NO: 499766 - DNA, 475 bp, Homo sapiens
agctgaatttctgattcaaccttactaatctttttttttttttttgagatggagcttcgcccttgttgcccagggtggagtacaatggagtggtcttggctccctgcacctccacctcccgggttcaagcgattctcctgcctcagcctctggagtagctgggattacaggtgcctgccaccaagctcggctaattttgtatttttagtagagatgggctttcacaatcttggccaggctggtcttgagctcctgacctcgtgatcctggctaattttgtattttttagtacagatggggtttccccatgttggtcaggctggttggtcttgaacttaactaatttttcattcagtgtattgatctgtctgttaagtccatgcatttccaactaaaatgttcaaatttacattgggtcataagcgtgagggaacttttwttttttttttaaacatgtattatctgcgttcctcag

SEQ ID NO: 499767 - DNA, 475 bp, Homo sapiens
agctgaatttctgattcaaccttactaatctttttttttttttttgagatggagcttcgcccttgttgcccagggtggagtacaatggagtggtcttggctccctgcacctccacctcccgggttcaagcgattctcctgcctcagcctctggagtagctgggattacaggtgcctgccaccaagctcggctaattttgtatttttagtagagatgggctttcacaatcttggccaggctggtcttgagctcctgacctcgtgatcctggctaattttgtattttttagtacagatggggtttccccatgttggtcaggctggttggtcttgaacttaactaatttttcattcagtgtattgatctgtctgttaagtccatgcatttccaactaaaatgttcaaatttacattgggtcataagcgtgagggaacttttttttttttyttaaacatgtattatctgcgttcctcag

SEQ ID NO: 499768 - DNA, 461 bp, Homo sapiens
ttagtcattatcacaaatattgctgaggaatgtgctgaaacgttatttggtggagagtactttggaggccctcactggattttttctgtggctttttaatgaagcattgttcttsacctatagtatagagataacgtgaaaagagaatcaggattaattgagatttaggattccccttgatttaaagacgtttattagctctcacgaagtagtggagcattgatccgcagtctacctcagcttcttttcctaaaacgtggtttgggcagaattgagaaagttaaacttgtcatcagtgacatttggggaaaactgggcagaattttacaaggaacttgtgagaattgccctatttgtaacctattcttttccttaaatgaatagtttctctttaacagggcatcctttttaaatgtaaaatttagattacatcttagatttgcgcttttataactactgct

SEQ ID NO: 499769 - DNA, 634 bp, Homo sapiens
tatcagtgttgagaaggcaaggacagatttggaaaccatcagcagtgatgaaataactctgaacatctttgccccaccagcaagtagaccagcaatagtatcaraagaaaagaaatgtgaagttgattactagcttctccattttgatcagaatttgctgcaagcaaagacgatgagtctagggatgaaaaacagactaaatgtggatccctgacatttaaaggatcctaattcatagctaagagggagaaacaactatttcttcaaattatgaaatgttatatgatacattcagaggttcccatctacaattcttttcttcttatctcctcctactttctttcaccttccttgcactcaagtcatattaacattttcaattttctgaataaactcaatacctaccttcttattctagcacttatccatgtattaggattactttgtatatgttttatcttccttagagactatacatttcttgagaacaggcccctgacatatcaatctcttcacctgtcatgtggcttaacacagctatttgtgacacaatgagtgcttagtatttgttgaaataacaaactttactatactgtatatagcgggtttcaaagttaaactggaaattttaaaa

SEQ ID NO: 499770 - DNA, 490 bp, Homo sapiens
tcctcctgctcctggccaaccccaacatakgccagcctgatgccgtcaaatccaaaccaatgccttgtttatgggaggaggatctacgtcttggcaaccttgatgttgtgactgctagtttagcaagttggtccctgtaaagatcaactatcctatgagtgagaagttaatggtgggaaagatcagttcactgggctccctcctcatgtgcgcactgtgtgtgtgtgtgtgtgtgtgtgtgtgtgtgagtacgagtgtatataatgttatatatgctatatgtataagtcatatatatatatcattttcagcccctcttttattcttctggatatatatatatgaaaggaacagatggatggaaaaagacacattcgattcctgaccacaagtaccaaatggatatacatatacatatatatatccagataggagaggccagcacccaagcacttcgcctccctagaggccattaaaggcccttaagtgg

SEQ ID NO: 499771 - DNA, 609 bp, Homo sapiens
tattctgtattctgccttgtaagtctttttttttttaaagtaatgaaaatttctaattggcccagtacatctgcattgatcttatctatggtatcaacacaaccccctctttgttgtattactcagtaagttcacataaatatctgcttctagcaaatattcttagagttcccagagcaggaatgcaaccaaaatgatataaagaaggtcacttcattggacataaattagaagaggcaagcaggatttcttcacacagatttcaccaactctaattcatggactcagagccataatggaaaygggagaaaacatgatatcattgctttctgtggctatctttcccctcccttcctctttatgcctagttttaactttccaaagccatgtcactgctattgacagaaaatctcaagaaagaagagagagaaaccagagtagaaacgccttttgttgaatttgggacgttctccgaacctcatccaatttttgtttatctttttttttaaattatactttaagttctgggatacatacgcagaacatgcatgtttgtaacataggtatacgcatgccatggtggtttgctgcacccatcaacccgtgatc

SEQ ID NO: 499772 - DNA, 628 bp, Homo sapiens
tcaacatactgaaaactgaatgaatacctttctctcagtattttcttactcgtcatattgtagcacsgtccatctaattgttcctgccaaaaacattcttagcacttctcttacctgcacatccacagaaccactaaatatagtgaattccaacttctaattaacttttttagctcttattttctatccatttccactggcacatctctagttcaatgcaatctcacctttctctggcactctgcaattgtcctgtaaatgcttcacacacacaaaaaacacacttttacctccttctgattcattattcatacagcagacagaatgatcttccaaagacaagcctaatattgttactcttttgattaaacctctatgtctttctgttgctcttacaataaagttcaaaaactcttacaatggtccacaaaagtctacgtaatatgatccctattcacatcctcagcgattatgtcattttctctttttccttatgcttcaaccacggtgtctttctcccacccgttatttgtttaaattaatgtagctcttcctacgtggtatctccagggagtagaagatagcatacagcaatgctatataggtgacttttaagaaatttagtgat

SEQ ID NO: 499773 - DNA, 628 bp, Homo sapiens
tcaacatactgaaaactgaatgaatacctttctctcagtattttcttactcgtcatattgtagcacggtccatctaattgttcctgccaaaaacattcttagcacttctcttacctgcacatccacagaaccactaaatatagtgaattccaacttctaattaacttttttagctcttattttctatccatttccactggcacatctctagttcaatgcaatctcacctttctctggcactctgcaattgtcctgtaaatgcttcacacacamaaaaaacacacttttacctccttctgattcattattcatacagcagacagaatgatcttccaaagacaagcctaatattgttactcttttgattaaacctctatgtctttctgttgctcttacaataaagttcaaaaactcttacaatggtccacaaaagtctacgtaatatgatccctattcacatcctcagcgattatgtcattttctctttttccttatgcttcaaccacggtgtctttctcccacccgttatttgtttaaattaatgtagctcttcctacgtggtatctccagggagtagaagatagcatacagcaatgctatataggtgacttttaagaaatttagtgat

SEQ ID NO: 499774 - DNA, 628 bp, Homo sapiens
tcaacatactgaaaactgaatgaatacctttctctcagtattttcttactcgtcatattgtagcacggtccatctaattgttcctgccaaaaacattcttagcacttctcttacctgcacatccacagaaccactaaatatagtgaattccaacttctaattaacttttttagctcttattttctatccatttccactggcacatctctagttcaatgcaatctcacctttctctggcactctgcaattgtcctgtaaatgcttcacacacacaaaaaacacacttttacctccttctgattcattattcatacagcagacagaatgatcttccaaagacaagcctaatattgttactcttttgattaaacctctatgtctttctgttgctcttacaataaagttcaaaaactcttacaatggtccacaraagtctacgtaatatgatccctattcacatcctcagcgattatgtcattttctctttttccttatgcttcaaccacggtgtctttctcccacccgttatttgtttaaattaatgtagctcttcctacgtggtatctccagggagtagaagatagcatacagcaatgctatataggtgacttttaagaaatttagtgat

SEQ ID NO: 499775 - DNA, 557 bp, Homo sapiens
aagagtatcctcggctaccccttatccttagctctatattcaatccacrtcaaaacataaatattttacctcctaaatatctcttcagtttttctgtttatctctatttttataagcaccatcctgttccaaactataattgtcaagtgaatgatcttatatatgcattgtggctgctaagcattctgcctatgtctagtttttccatcctctactttattgtgtagtctgtgtaatcatttgtatgcataaacggcttaaacagttttatttcttccaaatgctctttcttcaaagtccccaaaccctaacatattctagaagggcctatgatttggatgttgcctacctctcctacctcgtccaatgccacacttgcctttggtgccataaatagagtagtctccttttatccatgggaatatgttccaagacttccagtggatgcctgaacccgcagatagtaaaaaactctctatacattgtttttcttctatacgtacatacctatgttaaagtttaatttataaattaggcacaagaagagattaacaaca

SEQ ID NO: 499776 - DNA, 557 bp, Homo sapiens
aagagtatcctcggctaccccttatccttagctctatattcaatccacgtcaaaacataaatattttacctcctaaatatctcttcagtttttctgtttatctctakttttataagcaccatcctgttccaaactataattgtcaagtgaatgatcttatatatgcattgtggctgctaagcattctgcctatgtctagtttttccatcctctactttattgtgtagtctgtgtaatcatttgtatgcataaacggcttaaacagttttatttcttccaaatgctctttcttcaaagtccccaaaccctaacatattctagaagggcctatgatttggatgttgcctacctctcctacctcgtccaatgccacacttgcctttggtgccataaatagagtagtctccttttatccatgggaatatgttccaagacttccagtggatgcctgaacccgcagatagtaaaaaactctctatacattgtttttcttctatacgtacatacctatgttaaagtttaatttataaattaggcacaagaagagattaacaaca

SEQ ID NO: 499777 - DNA, 557 bp, Homo sapiens
aagagtatcctcggctaccccttatccttagctctatattcaatccacgtcaaaacataaatattttacctcctaaatatctcttcagtttttctgtttatctctatttttataagcaccatcctgttccaaactataattgtcaagtgaatgatcttatatatgcattgtggctgctaagcattctgcctatrtctagtttttccatcctctactttattgtgtagtctgtgtaatcatttgtatgcataaacggcttaaacagttttatttcttccaaatgctctttcttcaaagtccccaaaccctaacatattctagaagggcctatgatttggatgttgcctacctctcctacctcgtccaatgccacacttgcctttggtgccataaatagagtagtctccttttatccatgggaatatgttccaagacttccagtggatgcctgaacccgcagatagtaaaaaactctctatacattgtttttcttctatacgtacatacctatgttaaagtttaatttataaattaggcacaagaagagattaacaaca

SEQ ID NO: 499778 - DNA, 557 bp, Homo sapiens
aagagtatcctcggctaccccttatccttagctctatattcaatccacgtcaaaacataaatattttacctcctaaatatctcttcagtttttctgtttatctctatttttataagcaccatcctgttccaaactataattgtcaagtgaatgatcttatatatgcattgtggctgctaagcattctgcctatgtctagtttttccatcctctactttattgtgtagtctgtgtaatcatttgtatgcataaacggcttaaacagttttatttcttccaaatgctctttcttcaaagtccccaaaccctaacatattctagaagggcctatgatttggatgttgcctacctctcctacctcgtccaatgccacacttgcctttggtgccataaatagagtagtctccttttatccatgggaatatgttccaagacttccagtggatgcctgaacccgcagatagtaaaaaactctctatacattgtttttcttctataygtacatacctatgttaaagtttaatttataaattaggcacaagaagagattaacaaca

SEQ ID NO: 499779 - DNA, 456 bp, Homo sapiens
  misc_feature (1)...(456): n = A,T,C or G
agctgaaattatgttttaatataaatataggtattagaccatgttttcagcgtatagtgaaaaccagttttgtcaaatagttaacattgaactgaatgtatggataaaattnagctttctagtttatganaatgactaagagttaaaatatttttaagaagaaatggattacatatttaaataactattaagaaattattcatgtagcatagtttaagaaacaaaataacaaacaaaaatgtgcaagatctggcagcataatatggtgttctatgtatatatgaaatcaatgtatgtaaggtgaaattgaatgcaatgaatggacacagctaccccaaataayggaagcccaggagtttccattaaggatatattcagaagtattttaaatgaaaagtatttatttaaagaaacatatagctatttatatttgttagaattctatgtcagtgggta

SEQ ID NO: 499780 - DNA, 600 bp, Homo sapiens
ttttttctttttttagttttttagtacaagaaaaatctttatttcatcctagaatgttttaaaacaaacaaacaaaacaccaaacagtcagcgaaatgagtaaaaytgctaaccaaaccatcataaaatcatgctagctctacattaaaatatatcaaatttcaagcacttctctccgtctcctgaaaccactggtctgagccatcatctctcacttggatttccatgatagtcacataagagttttctctgctaatatccaaggacttagacctctcaaaacaagctgccaaagtaagccttttagaagataagtcagagctatctctcttctaagaactctgcatggctactctttacattcagtataaaagccaagatacccataatgctgataagtagggtgaccatataagttatgattcaatccagattagtgagtgaaattgtttatagtactaatgacagaacaatatacctaaaaataaattggcatgaacaagtaggatatttcatcaccctactgtcaaggtgccttattattttcccccgttacctttctgaccactgttgccatcattatcctctcctgtactgaat

SEQ ID NO: 499781 - DNA, 622 bp, Homo sapiens
aattatataacaagggtgaatccacttggtatattacatatgcacaataaaacaaagccttattttctctttttactatgctactccttgatttattgaaccatgcagaaaggggttggggtatagaaaaacagtagaaagaaaaagaagtaacatgatatctgtatatttaaatagtataaacagtaaaataatataaatataacacataaaattactctttaccrtttgatatatacagtactatttatatttatatatacataggtaaatatgtattattattcactattttataggtatacatttgtgtatatatattatatatttatacacacacataccacttccattttttagtttatgccacaaaatgtacatattctcaactgtcactttaagatgttaggttggttttgctgtaatatctgctattttacatactagttttgatatgcattgatctttgaaaataaaacaatttattaagctgacttcacaggatataaaatggattaatgcaagaggaaaccactgcctgtacactaactaaaatctcaaaatataaatggtagcttcagttttcagtaatcactttatgtgttgatattactgatcccag

SEQ ID NO: 499782 - DNA, 571 bp, Homo sapiens
ctaacattgattacctgacagaggtagtgctcgtcagcttccacattgtaaagttactctttttccctctttgtatactttattctttgaaataattcactctgctcagcccgcactgagggattttggattcctctgcactgggaatctgtctattctctcacatttattaatttatccaattatatatttcactaggtattaaaagataattactttatatatgaggttactatttgataatgtactgctgtcctcctcattctcttcctccctccctgcttccccccaccaaataataataaataataataataataataataataataataataataataatgcactgcttatttgattgctcaaaaggttctggctttggccattgtgagctctttcagttagtgcctgtgtccctytaacatacctctatattgtgattttggtgaattcttccttatctaaccttacaagatactctatactcattgccggacccactcctggaattaattatttagtaaggaacccaggctccgtttattagagaattatattagaaaccagt

SEQ ID NO: 499783 - DNA, 554 bp, Homo sapiens
gaatgtattaattgtactttttggggtyacaatcattgagctcaacttgtgttgtgagtacctgaagctaatatatattgagatttttatttatttattttgaaaagtttgcagactttttctgaaactgctctgcttcagaaaacaatgatgctggatgtgacataattaaatgataaatcgtctaaatacctatgactgtagtgcacaaacatgtgagtatttgtgaaagaatttagagaataatagctaaaatcataaagaaatggcaatacataaaatatttttaaagaacacctcatgtagtggtaaaaattaataattataattgtgcttaagttgaaattctatagtaattgagaatgtatgccatgagtggtggaacaaaaaaactatacaaaagtgatacaattcatgttctaggatagatattttcagtaatcagatataatgtttgtacaaatttgttttgagttctagttaacatatctttgaagatggccaaatagagctctggtctgctgctcccagcaagatcaacacagaagataggt

SEQ ID NO: 499784 - DNA, 554 bp, Homo sapiens
gaatgtattaattgtactttttggggttacaatcattgagctcaacttgtgttgtgagtacctgaagctaatatatattgagattttyatttatttattttgaaaagtttgcagactttttctgaaactgctctgcttcagaaaacaatgatgctggatgtgacataattaaatgataaatcgtctaaatacctatgactgtagtgcacaaacatgtgagtatttgtgaaagaatttagagaataatagctaaaatcataaagaaatggcaatacataaaatatttttaaagaacacctcatgtagtggtaaaaattaataattataattgtgcttaagttgaaattctatagtaattgagaatgtatgccatgagtggtggaacaaaaaaactatacaaaagtgatacaattcatgttctaggatagatattttcagtaatcagatataatgtttgtacaaatttgttttgagttctagttaacatatctttgaagatggccaaatagagctctggtctgctgctcccagcaagatcaacacagaagataggt

SEQ ID NO: 499785 - DNA, 651 bp, Homo sapiens
ttaaatgtatctgctgatgtattagttgagtaatgcattgtgcttcagagatgtttctcctaattctctgtggcatagagtctgctattccatttattggaatagaaaactgacttcttscagcaaaagactttagttgagaaacgtaattgcttcagtatcagtcaataacatttaatcttactaggttccttgaatttctaggtttgctccttcatttttggatactagtcagaacatcttcctggaagattttgtcctggaagattttgtcctgaaagataattgtcatatctcttttaagagctctcctttagactttcttctgaagaaaatttcacgttctctgtgccaatgggttattttttttctttttatcagaacttccccattgtatgttacaccttatgtggatatttttctctccctaaatttttgcaaagctctaattcagacagaagttcaattctgaaatgtgcatgtctggagataacttctaatattaactgtagaattatgtacaatgaatgactctaattcatttagtcactccataaaaaatgatcgagcatctaatgtatggcaaacacagtgtgaaggactatgaattcgaaagtcacttttatttgggcctgactatcttggagcttc

SEQ ID NO: 499786 - DNA, 559 bp, Homo sapiens
tggcatagagtctgctattccatttattggaatagaaaactgacttcttgcagcaaaagactttagttgagaaaygtaattgcttcagtatcagtcaataacatttaatcttactaggttccttgaatttctaggtttgctccttcatttttggatactagtcagaacatcttcctggaagattttgtcctggaagattttgtcctgaaagataattgtcatatctcttttaagagctctcctttagactttcttctgaagaaaatttcacgttctctgtgccaatgggttattttttttctttttatcagaacttccccattgtatgttacaccttatgtggatatttttctctccctaaatttttgcaaagctctaattcagacagaagttcaattctgaaatgtgcatgtctggagataacttctaatattaactgtagaattatgtacaatgaatgactctaattcatttagtcactccataaaaaatgatcgagcatctaatgtatggcaaacacagtgtgaaggactatgaattcgaaagtcacttttatttg

SEQ ID NO: 499787 - DNA, 559 bp, Homo sapiens
tggcatagagtctgctattccatttattggaatagaaaactgacttcttgcagcaaaagactttagttgagaaacgtaattgcytcagtatcagtcaataacatttaatcttactaggttccttgaatttctaggtttgctccttcatttttggatactagtcagaacatcttcctggaagattttgtcctggaagattttgtcctgaaagataattgtcatatctcttttaagagctctcctttagactttcttctgaagaaaatttcacgttctctgtgccaatgggttattttttttctttttatcagaacttccccattgtatgttacaccttatgtggatatttttctctccctaaatttttgcaaagctctaattcagacagaagttcaattctgaaatgtgcatgtctggagataacttctaatattaactgtagaattatgtacaatgaatgactctaattcatttagtcactccataaaaaatgatcgagcatctaatgtatggcaaacacagtgtgaaggactatgaattcgaaagtcacttttatttg

SEQ ID NO: 499788 - DNA, 657 bp, Homo sapiens
tttttgttactctcagcaactgatattttggagttattttatataccattttgccacgtcagataaatacagatattagtgtgtgaacataggaaagttactttattgtatgtctcagttttcccatttggaaagtaggtgaatgatagtatatttccacaagattgttatgaggcytaaatgaattaatgcctgtaaaacatatagattagtgtctgctactaaatacatattacataacttttactatttttgtagttttattagagaagagaatttctggatgagaatgcaggaaagacagaaagtttaagcctctatcaaacttgctgtggaatgatgggtataataagggaaataaagcaaatgagaggagatgagtttaattgttaagattgaagccaggtctaggggagtctcattgacttaaaataatttaaatttagtgacagatttgagtatgaacacttatagtttaaaattacccatttcactttgggtggagaatggactctttggaggcaagattgggagcaataaatctgattatgagattattgcaacaatgcagaagaagacaggagtgccttaccaaatacttaacacatgttttatttttcaaatgttttgattaacacaaattttatttgtgatatg

SEQ ID NO: 499789 - DNA, 657 bp, Homo sapiens
tttttgttactctcagcaactgatattttggagttattttatataccattttgccacgtcagataaatacagatattagtgtgtgaacataggaaagttactttattgtatgtctcagttttcccatttggaaagtaggtgaatgatagtatatttccacaagattgttatgaggcctaaatgaattaatgcctgtaaaacatatagattagtgtctgctactaaatacatattacataacttttactatttttgtagttwtattagagaagagaatttctggatgagaatgcaggaaagacagaaagtttaagcctctatcaaacttgctgtggaatgatgggtataataagggaaataaagcaaatgagaggagatgagtttaattgttaagattgaagccaggtctaggggagtctcattgacttaaaataatttaaatttagtgacagatttgagtatgaacacttatagtttaaaattacccatttcactttgggtggagaatggactctttggaggcaagattgggagcaataaatctgattatgagattattgcaacaatgcagaagaagacaggagtgccttaccaaatacttaacacatgttttatttttcaaatgttttgattaacacaaattttatttgtgatatg

SEQ ID NO: 499790 - DNA, 565 bp, Homo sapiens
ttaaccactgctagaaaaatggcacaagaaaaaagtaaaaacaatttaaagttgtatgatttatcttattaattccctgattctgtgtcataataagcagctcagattgatgtcacttgtgagaagacaataaaagattgagaagtggataaatggagagagagaaccaagcatgyaagtacacagggacaaaagaaaagaatacatacgcatcactgcacaatgcttactacgctagaacttaatgtaagataaaggaattaactggagacacagctaaacaggttgacaagcaacagttctagtagaccatctacaatctttctatacatctgtacacataaagatgtccatcgtacaaaaactttaggtttgattttagtagtatgtaacacttactaaatacatagatttcagtatatatgtggattatgtactacaaataaagaattcataatgttaaaatgtatgaaaagtaaatgcttccaaaactagatatatctctaattacattcagttgtaattatttaccaataaatattgtatcagaaccattgcccattaa

SEQ ID NO: 499791 - DNA, 559 bp, Homo sapiens
cactaacctaaagccaagtgcaggttctttgcttcactgacatttaagctcccatcttagattatatacctagaagacttaaataattttttatttttaaaaattgtcaaaacatgagatttaatgtatttaaatatactaatacaataacataaaaatacaatacaataatataaatataatataaaaataatataaatataatataaaaaaggaactgtatttttgcacatactttatggcctctatcagycaacaaatattaattacataactattatgtgccaggcactgcttttatatgcaggtataacaacatatttatcagctaaaagaaggaatattattctaggaataaagaaagtatagaaggtctgctcaaattaaagcagaagagaaataagacccataatagtcaagccacaaatatcagacacatttagtagatgaatgcccaacaataaaattatagaatttttaatctcaaagtatgttcactgtagatactggcaaaaattgaccaaataattacaaaactgagcagtaaataatgtgctca

SEQ ID NO: 499792 - DNA, 642 bp, Homo sapiens
ttctgcaataaacacacgtgtgcatgtgtctttatagtagaatgatttacaaactttgggtatatacccagtaatgggattgctggttcaaatggcatttctggttctagatcctgggaaatcgccacactgtcttccacaatggtttaactaaattacactcccaccaacagtgtaaaagcatccctatttctccaccatcctctccagcaactgtttcctgactttttaatgatcgtcattctaactagtgtgagatagtatctcattgtagtattgattggcatttctctaatgaccattgatgatgagctttttttcatgtgtttgttggccacataagtgtctttttttgagaagtgtctttttaattttttatcttcaaagagaatttaatatacgtataagtccaaataaaattcatcaagggaaacgtgtttgtctttcacttctaagtgtttacaatctaaaacaagtatgacattagaagcttccaattatttcaatataaattaatattttagtattattttaattttaataaatttcaacactagtttattcaattataataaattttaatattgatttgctgctgtrgctcattttgtacattaactcattgtccttttaaaattttgt

SEQ ID NO: 499793 - DNA, 641 bp, Homo sapiens
ttctaaatctgaagccacttctagctgtcttgcctctgtcaggtaacactcgctgttcatgctgttcactccagcttcctctcacaaatcatttctgtctaatccatagtctctctgaaaggctttggtaccgctgccctctcactatgaagtgtgcttgtcttattgaagctcgtgcttcagtacggctctgaaggcagcaactggagggggagagtgcggctggaagtgcacaacccacaragcagttgtgggcagtgccactctcctgaaccaagcttccccagctcacccagtttgggaagggaaagccttctgccctcttcctttctctatgtagcaccttatttctcctccatctgtcgatagcccctgattttcatctccattggtctatagtttccctttctatttctattaaaatcacaaacccagagtggactttaggagcttttatcctccatgtaggaaggactagattcaaaacacgtcgaactaccacctggacaactctcttccttccttcccactgcagtgttagcttctttccagttactcatcttcacagaataaaaccttaggtcacaccctagtcatatttttagaaaatggtgccttatatacaaatatgaaatacaaac

SEQ ID NO: 499794 - DNA, 631 bp, Homo sapiens
cactattattatccccagtagaagaaaactgtagcagagcctagtttcatttaagtgtttattttgtacaatagtttttatatttcttcttgctgaggtttttttttttttttgagacgcggtcttgctctgttgcccaggctggrgtgcagtggtgcgaatcttggctcactgcaacctccacctctcaggttcaagtgattcgtctgcctcagcctcctgagtagctgggattacaggcacgtgccaccacacccggctaatttttgtatttttagtagagacgggatttcaccatgttggtcagactggtctcaaactcctgacctcgtgatccacccgcctcagcctcccaaagtgctgggattacaggcatgagccaccacgcccggcccctgctgagggttttaaaagccaaataacattttatcacaaaatgtaaaattaggcataatcacgtaaactaatgaaatgcatagtccagttctattttgatttttcctatcaaagcattaatatgcttctcattttcatggactttatggactagcagttgacactgatctgaatatgtagcctacacagtggttataaaagtaaattgattttggaataaccttagatttacata

SEQ ID NO: 499795 - DNA, 651 bp, Homo sapiens
ctaccaaaagcagctacattttccctttattatactaaaaatattctaaatggaccacatcatccccaacagtgggcctttcattttatgctaaacaaagaaccaaaaaattgactgataggagagctgagaagtaatttttctatttgtgacatccatgaaaaccacaccgtgtcatcattgctcctcccaggacattaagtaagaatctgtccttcccagccaggcattttatactaaacctgggatggtgggctccctatccaatgacttgggctgtaacacagggaaagcctaattattaatcaatccaaattctccctgaagttgtaggtagctcaccaaatcataatcaagtaagcctgatcagaaattcagacaaaaaatacctatatcctttacagaaaaatcaacctaaatatctatgctgtctctacaatgaaatggagtttctgagcaattactctatgaacctcaagtatttcagtcattaagaagatatgaktataagtctgtacttacttgtgatggaaatgtaacttgactattttagaataatttctaagcactctgccttaaaaacagatggcttcttagatagaatttctcatggctcaacaagaatgcttgaagttgttatatagttcctta

SEQ ID NO: 499796 - DNA, 516 bp, Homo sapiens
gaggatgtaagagtagagcccagagaagtcttgcctggattttgttctttgcacaagttctttaacctttctgggcatcactttcttcatctgtaaaatgaagcagtttttagataatcccttaagatcacttctgctctaaatttctgtaacttatgaaaccaatggccttaagaaagtggtaaaatctcaatgtcttcctgytgatcttgaaatcaggggaaagggcatttgtttgtaatatactttaatcaaaaaataatatctctaaactactgaattgtaatatacttgttctaggctttgtgatacataaattacacgctcctcattcctgcctgatatgcatattaaattcaccttaattagcaatttagtttaaaagcttttattagataattgctcacagtttcaagtccttatctatgggaaggctattgacctgttttctattggaaataaatcttgtatataagcttttggtaatgatgagattccgagtctatagacatgtag

SEQ ID NO: 499797 - DNA, 620 bp, Homo sapiens
agacaacttgattcaatttgatgccctcttgctgcctgtctaatatctatgggtttttctgattcctctttactggccatctgtggtttggtgcatgtggccattctctatacactggttttgatttaatagatgaaatatcattattgtgtttagacctgttctaattagagcttcacttaatttggtggttggataatagaaaagccatcagatgagaaatcaaacttcctgaattctagtcctggttttataattatctgtatcatgtcatctcttgaactctcaagttcctcacctggaaaaatagaataacacctgccctactttaggcgttagaggattggtatcagattccagtgaaatgtgtatgtagagcctctattggctctaaggaacaaataaatgttgactatccatggtagatttttcccaggtattttaagattcacatcttttggcctattctgaggccaaatggttttagtaccaaccagaagatgcttaaagyacctacctctttgagggtagactagtctgtcatcatttctttgtttcaggactcttttgtggatcggtatagtacaaatacattttgtaaaaactaaagtagttaaaat

SEQ ID NO: 499798 - DNA, 431 bp, Homo sapiens
aatatgccatctcaacatgtaatatctcgygcagagggctgacatagataacactactttgatggaaaatttatgaaagagctttgacatctgctctaccctcgattacctagaaaaaaagtctgaagcacagattaagtataatactttttaatggatgcacaataccaggacagcataagtgacggacaagggaagtgagacagtgaaggattaggagcaagacaatatgtgatatgttaccatgctggccaatgtaaagtgtgctgcaagaagacaaatgcagttgttaggcagttaaattctttaggctgtgggcaggtcatgcagataaactatgctttggagtagtcaattggaaagaaaacaggagctaaaacttattttccagttccttcctatctcctgtctcccaatggacttctgggttt

SEQ ID NO: 499799 - DNA, 608 bp, Homo sapiens
aaaatgatgcctgagctgaccatcaccaaatgggaaggagttttctaggaagtcaataataaggaagtggggaagtatgaggtgagtgtcttagtctaaaggaaagcaaacataaaagtggaggtatataaacaggtttgttttattcagagaaccactagttgtccactccttatagctaacccaggaagtggacagtaaagtgggaagtgatatggcagagaacggccagtgttacatgtggtattggcatgcaattggaattgatgatgtataaatatcaagttccaagctgccacccaataatttcctacagtattgcttttcttttgcttttgattttcgacacaggcctcagctatcactctagatatttcgcttttcaattaataatcattctgggtgagaaatcagtcatttactagaaataagaatatcactatcaccatttcagatgtttccaatttattcttgttgayttaagatcttataccaattcaaatttatagcatgtgcatttgtatataacaatggggtttggttttaatcacagtatggggttatttcactattcatgaatatgtatgataggtcaaaaggaatggagt

SEQ ID NO: 499800 - DNA, 608 bp, Homo sapiens
aaaatgatgcctgagctgaccatcaccaaatgggaaggagttttctaggaagtcaataataaggaagtggggaagtatgaggtgagtgtcttagtctaaaggaaagcaaacataaaagtggaggtatataaacaggtttgttttattcagagaaccactagttgtccactccttatagctaacccaggaagtggacagtaaagtgggaagtgatatggcagagaacggccagtgttacatgtggtattggcatgcaattggaattgatgatgtataaatatcaagttccaagctgccacccaataatttcctacagtattgcttttcttttgcttttgattttcgacacaggcctcagctatcactctagatatttcgcttttcaattaataatcattctgggtgagaaatcagtcatttactagaaataagaatatcactatcaccatttcagatgtttccaatttattcttgttgatttaagatcttataccaattcaaatttatagcatgtgcatttgtatataacaatggggtttsgttttaatcacagtatggggttatttcactattcatgaatatgtatgataggtcaaaaggaatggagt

SEQ ID NO: 499801 - DNA, 615 bp, Homo sapiens
ctcagggtgtaagaatcttggcaactttcccctggaagttgctcttcaccctctggggtattgggaggctgtccttagtaacaggcctcataatatttgccaaatcaggagctgttgctagcagcagggcacccaactggctgaacctgattgggtcagggttgcagtggctgggtactaagccctggatgggtgtgtctggactctcaactcaagttcttgtctgaacacttccctcttcccctctcagggtcccccagagttggaagctttgtccaatccccttcctctctcargcaccagcagtttgttcctggatgtgtgttcctgactcccagcctgggacagtctccctttcttcacccctggcccatggtgtgctgggcctgcttgagcaaactcaggagacctgattgtgtgcatctcttcccagctctgcattcagtgacatcatggtggcagcttgaaatcagccatggaatatttgcaccacggaaaatggcaaacactacagaacagacttatcttccctccctgacagagagccccttgtgtaacaataacacgccactgccccatccctgagcagagtgctgtgtgttgcagcagagtggg

SEQ ID NO: 499802 - DNA, 502 bp, Homo sapiens
agacttccttgaatccctggcaaaagcaaatgattctcccttaggcttccagagtctcagtgcttgcatacaccattgcttttaacattttcctgaaagtatggaaaatgtgtatttaatgtgtctacactccccacactcactcaccattttcacattaaactatgcccttctcaagggtgaggaccacgctgcaataagctttatatcctcatggccctacacagagtctgacacaatgtaggtgctcaacaatgcttctcgaactgaagcaactgcccctgccgtgctcttgggtggtggattcacaggagaaggagctaccagccccgatgggagaaatgctgcagcttcacaggacaygacacagaaaaaggagtgtgaccaaaatccagtatgaggaggcctaagggagacagaacagcaggatattccaaaggggtggagccactcctagaagacttctagacgaaaggactcctcttaggtatcagaatcttgc

SEQ ID NO: 499803 - DNA, 483 bp, Homo sapiens
ctgtcctctccccgcttctgtaattagacagctccctccactcctgctccagaagacctgctccacctccaacattcttcgccactcagggacagcaccacagacataaccccaggcacccctgaggagctggggaagtgagcagctcatgaaaactctaggagaatgacacacatgcacacctccctcccaacaaccgtgaccttgttgattcttggaacaggttcctgaaagccttgttgggccagtgagatttagccccatgcatggaatttcatgaaaatarggaggccttgctagacacagagtataagcactctcataagctccataacttcttgctctatattcagcagagacccctggcctgcttctctcacacctatcaaatgccccccacctgcagacttaaaccccttccctccaggtttattccaggatcagcattgaaatggtgctaccccagggtgccctacaatggac

SEQ ID NO: 499804 - DNA, 561 bp, Homo sapiens
caggcagacgtttgggcctgcttgtcctcctggggggatccaggaggtcactgtcaaccagagcctgctgacccccctccatgtggagattgaccccgagatccagcgagtgcgcactcaggagcgggagcagatcaagaccctcaacaacaagttcgcctccttcatcgacaaggtgggccaagcaggaaggaggaagggagctcttggggaagaagcgggacctctaatagagggtgggctgggccagggctgctgtagcccacttgtactagggtggtggttgatagagctctggagctctcccggtctgagcctgggatgccgagacgtgggtggctggaggcggccttcaggtcttcaccgtgcctgtgcggggggagtctccagtctactcatgagtccggtttgccaagyccaccttgcccgtgttgaagcctgtcctaccaccatgattaatacgattgattgcacagtagccttacctcatcatcaaaaaatggattgtcctcatagctcctcttagtggggtggcctgcattgccttttgtcattttacag

SEQ ID NO: 499805 - DNA, 573 bp, Homo sapiens
ggccttggcctcctaaagtgctagtattagagaggcatgagccacctctctcagcctgaggccaggattttgagaccagcctgggcaatatagtgaaacctctgtctgtataaaagaaaaaacaaacaaacctgtaaccgtgtatttgagtttggatgtgtgttatatatggctgtgtgtgcacaggtatgtgtgtgacgttcgtaggaaggtggtgtgcacgggactctgacgggtggtacacgcacatgcttgtgcctgagatgaggatgtgaggtggtactgcaccttggcgtgtgcgtcaggccatgcaagtgagagggcaggtggggtgtgtgtgaacctgagagagtgtgtgagggacaagagggcgtgtgtgctataggctgaggttgtgtgcccacagggtsgggggtgggcctgtgaggctgtttgttctgggagataacccatcaaacatgtgtgctttgtatttatatggatacatgcatataaagacacgtgctcaaaaacacctgcttatcatcatgcacctctgccctcctgaaaattctcattgttttcagtctgaag

SEQ ID NO: 499806 - DNA, 599 bp, Homo sapiens
cacgtatactgttataatctcccacgggcgatcttgatgtgatggagaaccagagttaaggggaaggactctgtggactgagccatagctgggaccttccgctaggcttcatgctcacccagtgggatgaccttcttggtttggcatcagtggagaggagggtgagagaatgttgaaaatgtgagaaaggctgtgtgcagtggctcacgctgtaaccctagtactttgggaggctgaggcagaaggaytgcttgcatccaggagttcgagtcaggctgggcaacatagtgagatcctgtctctaaaaaaaagaaaaaaaagtgtgggagacctcaacatcttcaggctgctgggcttgtgtctccttcctccacaacaaggctgtgctgtcctccctcactcttgttctaataatttctaatcatatctcttatcacaagcaaaatttcaaaccagagaacattcacagattttcatcttcagtgcgtaaagctctatggtggtggatgtggatcaaaagctttcagagttggcgggacttggacattctaattcaaaccctagcagatgtgagaaccccctcccactgagccagtgga

SEQ ID NO: 499807 - DNA, 574 bp, Homo sapiens
cgatcttgatgtgatggagaaccagagttaaggggaaggactctgtggactgagccatagctgggaccttccgctaggcttcatgctcacccagtgggatgaccttcttggtttggcatcagtggagaggagggtgagagaatgttgaaaatgtgagaaaggctgtgtgcagtggctcacgctgtaaccctagtactttgggaggctgaggcagaaggattgcttgcatccaggagttcgagtcaggctgggcaacatagtgagatcctgtctctaaaaaaaagaaaaaaaagtgwgggagacctcaacatcttcaggctgctgggcttgtgtctccttcctccacaacaaggctgtgctgtcctccctcactcttgttctaataatttctaatcatatctcttatcacaagcaaaatttcaaaccagagaacattcacagattttcatcttcagtgcgtaaagctctatggtggtggatgtggatcaaaagctttcagagttggcgggacttggacattctaattcaaaccctagcagatgtgagaaccccctcccactgagccagtggacag

SEQ ID NO: 499808 - DNA, 552 bp, Homo sapiens
tgggtcctgtcagacagagctaggaggaggccatgcccaaacatggggcaacaccaggcaccaccccctcaccaggtaagcctgccaccttagcacttttaccatttcagcttattttcaaggtgtgtttggtagcctggaacaaacttattgccttggaggcaaacccagcccatgaatatytgggattaattatctctccttcgtttgagcccaacaacctcctcaaatgtatataaagggatttattttgcacaggtcttcatttcccatccctcttcctctgactctcagtgtccctgcttaacttacactcttctcttcgccaagctccttaccatgagcagacaagccagcaagacatctggtggcgggagccagggtttctccggccgctctgctgtggtctccggcagcagcaggatgagctgtgtggcccactctgggggagctggcggaggggcctatggcttccggagcggagcaggtggctttggcagtcgcagcctctacaacctgggcggcaacaagagcatctccatcagcgtggca

SEQ ID NO: 499809 - DNA, 565 bp, Homo sapiens
ttttgttttgtttttaagggggagaggttcttccctagattaatttcttctttcattcactcaggaacaaatgtcaagaaggtagcactcataaatctaacaaggcagatgaactcttttctacttttttttttttttttgtattttcacctggaatgggctaagtacagtgaatataatcacttggatgatttgccaaaatcaaactatttttctagtattatttttgtattgatttgtgtggatcaggttaaatgtgactaatgcttttctttctttgagargtatccttacaattccatgatgttcttagagatctggccactggtcaaacagtacctttctgaagtactgaccttctgagttgtcctttctttcttgagccaacattttgtacttcagattcttttttctcttgggggcctaccttcaaccaagtaaaatactgtgattagaagaagagagagtatgagccaggcacagtgactcactcctgtagtcctagctactcggggaggctgaggcaggatgattgcttaagcccaggagttcggggttacagtga

SEQ ID NO: 499810 - DNA, 429 bp, Homo sapiens
aggggaattttaacatttttagagacaatagacagtgggtggcactcaatccaactttcaataaatgaatggaaagaaaaggatgggcagagaattgcttgaatccaggaggcaaaggttgcagtaarccgagattgtgcccctgcactccagcctgggcaacccagccagactttgtttcaaaaaaaaaaacaaaaaaaaaaaaaaaaaaaaaaacctgtcacatttttcacaccaaaaacaaaaacaccaaaatcacatcaacaagaagtaaaccttgttctacaagccaccaaaccaacacaaacctgatgcttttggataatgaatcttgtctgtcaataaaaccgcagtatggcttggccaaatcagtaagaatgaggagacgtgcagtgaggaggattcacatcaatcagaaagcggtccgca

SEQ ID NO: 499811 - DNA, 429 bp, Homo sapiens
aggggaattttaacatttttagagacaatagacagtgggtggcactcaatccaactttcaataaatgaatggaaagaaaaggatgggcagagaattgcttgaatccaggaggcaaaggttgcagtaaaccgagattgtgccmctgcactccagcctgggcaacccagccagactttgtttcaaaaaaaaaaacaaaaaaaaaaaaaaaaaaaaaaacctgtcacatttttcacaccaaaaacaaaaacaccaaaatcacatcaacaagaagtaaaccttgttctacaagccaccaaaccaacacaaacctgatgcttttggataatgaatcttgtctgtcaataaaaccgcagtatggcttggccaaatcagtaagaatgaggagacgtgcagtgaggaggattcacatcaatcagaaagcggtccgca

SEQ ID NO: 499812 - DNA, 613 bp, Homo sapiens
ttttcttttccatctattattttcttaaaagaaaaatttttccaaactatggataatgatttcatatttccggtatatataagtgtcttgaggataggaatgatgcttacttgatagaatataccccttgcacattcacaataaagctagaaaccacttgcaaatgtcttctttgtagacacttaaaaaatactaattgtatggtttacatataattgttagcgcattttctaaaatctaccattagtgacctcataccggcaacagaagaagaagtaaaagtaattggaagtaatttgtaagataaatagtagatttttataagtcatagatcatcataaagatggtttttagatamaaatttatttgcccaaaatataatgaagaattaagtgaccagtgtagggcacttacccatgagaaaaactttgtatctgttattggttgattctatggtcttctgttctaatagcaaaggaattgtcatccactagtgtttttgatactgaagtgtaaacttccagggagttaggaaattaaatattttataattaaatatcacatataggaatatatcctaaggaagcaattgaacaggagcaaaaaatgcaca

SEQ ID NO: 499813 - DNA, 615 bp, Homo sapiens
gtatttaatatgcagaatctctgcccycacagtgtgtggctgcttatacctttgctcactgttttattttaattcgcttgaattcttatttttattttttagcctcggctcctagatatcacctctgtctgcatggcttagtggtcagccaatgactgggcagagactttgcacaaaaaccataggcccattattaagtctccactctttgctgatgtgattgtatgttagaaagagtattaaaagttcaagtagtttacaagtcagactcagttatttacttgctgccaagtcctctcatgtctcctctgtacatgtgtttagcttcccagttagttaagaatgcacagaaagtttatggtttcttcatttccaagatttccctgttaagtttcagaatggtttccagtcatcccaactggaactacaaccaaaggatagcagagctacaggttttccccattttttttttccctacagtgtttactttcattgacaacactgctgggcatgagtttccactctctactccaaatcatgtcagctcttcatggcagtaaagccactggttttgaaggccaatcttgccctgatgaaacttccacaatgacatag

SEQ ID NO: 499814 - DNA, 671 bp, Homo sapiens
ctggagtgcagtggtacaatcatagttcactgcagccccaagcttctaggctcaagcatatgggctcgaaatcagcctcttcctcaccccagagtagttaggactgcaggctcatgccaccatgcccagctaaataagctgttgattattttggaaatattttaaataatgaagtacttcaaaaaaattttttctaagaagaatgttaacagtttatttgaaatcttaagtaaaatcaacttaaayacaaaatagtgttacactaagaaatacaccaatattttctaacaaatacatgcataatgaaaatacatatttaaatccaattatgcaagctacaaggtaaaaattttcaacttggggacttgctaagagtcacaaaattctggacactctagatgctctaaggtaaaaatatacttttagaaaaccattagctgatagtttcaaatactactacttctgaaaagccttttgacattttaaaaagaaagtacacattatgagtcaaaaacactgtggggttaaattccttactagaaagaaattaatttctcctacctaaaaacttctaaattatctaccactaattaataattcacaagtaccatgaaaacatatttcagttataaaatattatgtttaatacttaacttaaaaaaattcctgat

SEQ ID NO: 499815 - DNA, 647 bp, Homo sapiens
atgctgctttattctcttttcccttctcctcactcccagttgcattacatattcctctcacttgttcatgcagacacttgactgtctcttctgttgcctgttggtgtatttttctaaaaggaattgtggtgaaagctagtataatacatttctcttcatttgatagggtatggatctgtagtgcccactgaaatctcatattgaaatgcaatccccaaagttggacatggggcctggtgggaggtgattggatcatgggggcagtttctcatgaatggtttagtaccatcccgcttggcactgttgtcacaatagtgagtgagtgagttatcacaagatctggttgtttaaaagtgtgtagcacctccctcatctcactctgcctcctgctctggctatgtgatgtgtctggtgtctgctcccccttagccttcctccatgactgtaagttttctgaggcctttgcagaagccagggaggtgccactatgtttttgtacagcagaactgtgagccaatgtaacctcttttctttataaatcacccagtctcaggtatktctttattgcagtatgagaatggactgatgtaccattgatagcaaacacttcatcaaatcctgtttatgcctttctttcacaagtggtc

SEQ ID NO: 499816 - DNA, 625 bp, Homo sapiens
gtaagaaactattccatcctggaaaagatagatattttatttattacaattgctacatattctaaatatggattttccttgtgctggaccactatctcagaaacataaagtgatttagcctcaacaaattccatataaaattgcctcaaaccaaaggacccagttgacaatgaaggagatgaaataaaggacacattaccattgaatatrctagtagtactattatcacataagctaaaagctagcagcctaagagtgtgctggaatagcctcttaaaccattgtaaggaaccagcttaaacatgatactatatagttttaagtgtgttattattcaagatgaggattaatacttccagtcaatgtccattatttggtgttgtatccccattagttgtaatatataggtttgagaaccaaaaagtagaagtagaaatggtttcctcataccatcattctcaatgtctattttggaaatgtgcacttcctgtctatataaatttagtcactgttgcactagagacattagttccaggggagggaatgcttctacaaggggatataagaattacagtaaacctaaggctaccacttggatactttagaacctctcatgacactagac

SEQ ID NO: 499817 - DNA, 488 bp, Homo sapiens
tgagggtgacctggggaagttgaacttgcagatactgcctgaagtgagggcagtttggcctaactctggtagttggtgttagaactcatagggaaggagaatctctaggcagaagtcaggactgtgaggtccagtcacccctacctttggggagagtctagttatatgacacaaagagttaagaaaattaacttccattcatgctcattactaaaaagttgagcaactctgtgaattagcaaatggactgtccatctggaatgttctttcatatgtctgttctaaagacttggtctgataggctacttctacagcccaagggaagataataatttcatcgagggctgtaagttattcaacattttgtccctctctgagaacctacaagagtgcttccctatgatagataattaaaataataatagtagtaatagtagwagtaattattttattttattttacttttatttttcttagagatgatgtct

SEQ ID NO: 499818 - DNA, 570 bp, Homo sapiens
ttttcctccattgtcctcaacagcttttatttttatttatttwttttttttgagacagagtctcactctgttgtccaggctggagtgtagtggcaggatctcagctcactgcaacctctgcctcccagcttcaagcgattcccctgcctcagcctccctagtagctggaattacaggcacctgccaccatacccagctaatttttgtatttttagtagagacagggtttcaccatgttggccaggcttgtctcaaactcctgatctcaagtgatgcacccgcctcggccccccaaagtgctgggattacaagtatgagccaccatgcccagcatgtcctcaacaccttttaatgtgttatttaatttatatatgtattggtgtccaccgattattgacttcccccattagaacacaaattctgtgaaagtaaggatcttaattttgtataccagtgtattttcaggtgcataaacagaaaatgattgataagaatgatatatggcggcggatcaagatggcgaaatagaaggctccactgatcattccctctgcaaggacaccaagttaa

SEQ ID NO: 499819 - DNA, 583 bp, Homo sapiens
caggagggttgacacatgaaggtagagagggctggaacatcctccctggctactgtgggagcgcttcctgcttttagagacctgccctgatgcattttctgactctcaggtacaagctggtacaactacaggaactgagtcactactactrccttatatttggatcccagagacctgttaatattctatactattctaggggctggggtttgggaacttttttaaaaagcatcatacaaaaaccttcaccaacttcccagagttgtactgttacctaaaagcacttaggtactattatgcaaattgtacatgcattatttccataaaaaacagtcacaaatgtcaattagtgctcattagtatgcaataaaattctcatttgaaaactattaagagccaagaatgaattccacttggctgccctcctttaatgagaaccactgagaagtaccctgtgctatttctcatcagcaaaacagtaaggtgtaacaacaaatcaagcttcaagcaacagcaggagtagacagaataaacacttgaaggtttcagagactggttttggacagttcaagttttatgctgc

SEQ ID NO: 499820 - DNA, 583 bp, Homo sapiens
caggagggttgacacatgaaggtagagagggctggaacatcctccctggctactgtgggagcgcttcctgcttttagagacctgccctgatgcattttctgactctcaggtacaagctggtacaactacaggaactgagtcactactactgccttatatttggatcccagagacctgttaatattctatactattctaggggctggggtttgggaacttttttaaaaagcatcatacaaaaaccttcaccaacttcccagagttgtactgttacctaaaagcacttaggtactattatgcaaattgtacatgcattatttccataaaaaacagtcacaaatgtcaattagtgctcattagtatgcaataaaattctcatttgaaaactattaagagccaagaatgaattccacttggctgccctcctttaatgagaaccactgagaagtaccctgtgctatttctcatcagcaaaacagtaaggtgtaacaacaaatcaagcttcaagcaacagcaggagtagacrgaataaacacttgaaggtttcagagactggttttggacagttcaagttttatgctgc

SEQ ID NO: 499821 - DNA, 574 bp, Homo sapiens
ttgttttgttttgctttgctgaataccagaaaccacatatgaaaaatacacaggttctggatcattttttcttctccaaagaatatggagaagacttatgctagggtgttaaaataagaacagattactttaatctaatcagtgactaagttgatcgggaaatggacttcaatattttatttgaccgggtctatttctggtttcctttaactggtcaggcataatccgtcagcagtcccaactgaaagcttagggtgtttttcaggccataccacattggtgggctttacattctataataatttttatcttcctagtgtaataagattgcaagtagctctgattagcttctcagctttttagcaccttctttgtgtttggatttttgcaacctcttggtctgcgctacttataaatcagtgaatgacttggaaggaaaattgcttakactattgagttgatttttctgggcctcttttctgtccatgatcatggtttctcatgtcctgaatcatttggtttccttgaattcaatttttttttttcctccccagccctatcagactgtggaata

SEQ ID NO: 499822 - DNA, 522 bp, Homo sapiens
agagaaactgggaaggttccrggggtagttctggctgaagcgcacagaagacagaatgaggtttagggctgtacttgggacttgtaggtgggcacagtggtcagcagatccaaaatgatcaccagggctgtcccatggaacatttctctccagttaggaccctgaatcatgatggggcaaaagctggaagcctggagtccgccttcccctgctttgggtgagtcctcctgtgtgtgatcctgagttgctcgtctgcacgaaaataagggattagaagtcatagggagcagcaggtgacctaaggcctccctgcaatggtgcagaggtggggccaggggttccttggcaagaggggaggaaatgagaggaggaaaagccatagaagaacacagaagaacagaataacatggctgttatggaggtaaagcgaaggtgtcccactgaggtgagtggaattggctggttagagcacgttaccttggcaaaatggtaaatatcagggcaatctaacatgatcacaca

SEQ ID NO: 499823 - DNA, 567 bp, Homo sapiens
ctggtgaattggccttggcagattacatccattcagagtagatcctgtttatacatctgtgcaaagtaaagtcattttacaagaatagataaaaatagaatatcagtaatatgcttcaataaatgagacaaaaggacatggcttgacattctataaacttcatagggataacaatagatatgtcactaaatgaaaaggttattrtggaatctatgcatcttttaaaacctacagacttaactgtaagagacagtctgttctaattctatttcccatgtttgtttgcatatttttaaacatatttgtccgctttcataaagttttataagagtcgttgtagaggatgcacacctctaaaaagcagttgccaagcattcaacattatacaggatcatatagtcttttttggttatgaccatatttatttttaaaaactatggagatgaccatggaccaagtggctctgaaaaataaacatagattgtaagaaaaaataaatcttataggagttcaaatcattgtaattctgggatgttcaatgggtcagaaaaaggactacagtgtgag

SEQ ID NO: 499824 - DNA, 524 bp, Homo sapiens
cttgtctctccataaagcatctctggatgtttttgttaatggcctgatgttttccaggaggtctcggcacacactggtagatcagggagagaagccagggagtataagtaacaatgtaacaatacttaacagataggcagctcttggtggataatcctatttaaggcttaaaataactgtggaattattctaagaaccagcaacaccacttctaggtgtacactcaaaagaaytgaaagcagagcctcaaagagttatttgtatgttcatgttcatagcagtatcattcacaacagccataggaggaagcaacccaatatccatccatggatgaatggataaacaaaatgtagggtttttttgtgtgtttttttgtttgttttgttttttttgagacggagtctcaatctgttgccaggctggaatgctgtggcaccatctcggctcactgcaacctctgactccctggttcaagcaattctcctgcctcagcctcccgagtagatgggattacaggcatgtgc

SEQ ID NO: 499825 - DNA, 457 bp, Homo sapiens
agataagcctggaaatttgttttatttaggcaaggtctcacggtgttgtccaggctggtctcgaactcctaggcttgagcaatcctcccgcctcagccacccaaagtgcagggattacaggcttgagctaccatgcctgacctcactttttctccactaagtttatagtgctttctaggccgccttgtcagcgtattaggaaacacttgtgaacatggaatggggtgtgtgtgtgtgtgtgtgtgtgtgtgtgtgtgtgwgtgtgtttaagataaagcaccatgtgtaattgtaaggagagaggaggtatggtgtcctcattttcccaaaaacttaggcaagttttaaatggtatcaatgagagttacatctgcaagtattttagttgctatggagtgactagcatgtgacagtactgtgtgacaaggtgtagaaacgtcatctcttgggtgacttg

SEQ ID NO: 499826 - DNA, 457 bp, Homo sapiens
agataagcctggaaatttgttttatttaggcaaggtctcacggtgttgtccaggctggtctcgaactcctaggcttgagcaatcctcccgcctcagccacccaaagtgcagggattacaggcttgagctaccatgcctgacctcactttttctccactaagtttatagtgctttctaggccgccttgtcagcgtattaggaaacacttgtgaacatggaatggggtgtgtgtgtgtgtgtgtgtgtgtgtgtgtgtgtgagtgtgtttaagatraagcaccatgtgtaattgtaaggagagaggaggtatggtgtcctcattttcccaaaaacttaggcaagttttaaatggtatcaatgagagttacatctgcaagtattttagttgctatggagtgactagcatgtgacagtactgtgtgacaaggtgtagaaacgtcatctcttgggtgacttg

SEQ ID NO: 499827 - DNA, 602 bp, Homo sapiens
acagtgtgacataaacatacattttcagacaagttttcattactgggcaactatgrtatctacccaatgttgtggccaaagttggaatattcacagttcccccatacttatgccctccgtgttttggttttccagatacatgctgttgcttgtacttcaaatacactttccctatatctctgtcaattcacgtctttctcaaaaagaacagagaagtcaaatggctcctctactaaacctctaaacatatatgatttctcctgtcttgacatttttaccaattcctgttctcattataagctatggtatccgactttcacttctcttcctctaacacccctggctttcttaccccattgtctacatagctcaacttcttgcaagttgtccattcttgctctctcctctgtctacagcgatttgccttctgctcccactgttcacaaaacttctgtcctccatgtattcatttacaatgttttagccttgggctgaccatacaccagctgttcacaaaatttatgttgaactgaatgacactcgaatcaataaatacaggaaaaaaggggaacagaaggggaagcaaacaacatccttcttca

SEQ ID NO: 499828 - DNA, 602 bp, Homo sapiens
acagtgtgacataaacatacattttcagacaagttttcattactgggcaactatgatatctacccaatgttgtggccaaagttggaatattcacagttcccccatacttatgccctccgtgttttggttttccagatacatgctgttgcttgtacttcaaatacactttccctatatctctgtcaattcacgtctttctcaaaaagaacagagaagtcaaatggctcctctactaaacctctaaacatatatgatttctcctgtcttgacatttttaccaattcctrttctcattataagctatggtatccgactttcacttctcttcctctaacacccctggctttcttaccccattgtctacatagctcaacttcttgcaagttgtccattcttgctctctcctctgtctacagcgatttgccttctgctcccactgttcacaaaacttctgtcctccatgtattcatttacaatgttttagccttgggctgaccatacaccagctgttcacaaaatttatgttgaactgaatgacactcgaatcaataaatacaggaaaaaaggggaacagaaggggaagcaaacaacatccttcttca

SEQ ID NO: 499829 - DNA, 602 bp, Homo sapiens
acagtgtgacataaacatacattttcagacaagttttcattactgggcaactatgatatctacccaatgttgtggccaaagttggaatattcacagttcccccatacttatgccctccgtgttttggttttccagatacatgctgttgcttgtacttcaaatacactttccctatatctctgtcaattcacgtctttctcaaaaagaacagagaagtcaaatggctcctctactaaacctctaaacatatatgatttctcctgtcttgacatttttaccaattcctgttctcattataagctatggtatccractttcacttctcttcctctaacacccctggctttcttaccccattgtctacatagctcaacttcttgcaagttgtccattcttgctctctcctctgtctacagcgatttgccttctgctcccactgttcacaaaacttctgtcctccatgtattcatttacaatgttttagccttgggctgaccatacaccagctgttcacaaaatttatgttgaactgaatgacactcgaatcaataaatacaggaaaaaaggggaacagaaggggaagcaaacaacatccttcttca

SEQ ID NO: 499830 - DNA, 602 bp, Homo sapiens
acagtgtgacataaacatacattttcagacaagttttcattactgggcaactatgatatctacccaatgttgtggccaaagttggaatattcacagttcccccatacttatgccctccgtgttttggttttccagatacatgctgttgcttgtacttcaaatacactttccctatatctctgtcaattcacgtctttctcaaaaagaacagagaagtcaaatggctcctctactaaacctctaaacatatatgatttctcctgtcttgacatttttaccaattcctgttctcattataagctatggtatccgacttkcacttctcttcctctaacacccctggctttcttaccccattgtctacatagctcaacttcttgcaagttgtccattcttgctctctcctctgtctacagcgatttgccttctgctcccactgttcacaaaacttctgtcctccatgtattcatttacaatgttttagccttgggctgaccatacaccagctgttcacaaaatttatgttgaactgaatgacactcgaatcaataaatacaggaaaaaaggggaacagaaggggaagcaaacaacatccttcttca

SEQ ID NO: 499831 - DNA, 555 bp, Homo sapiens
tcatttaacagaccatttgcgtagacacttgaggatgaagataaattttcaggcagattaataacaatggggagagttttcaaggcagaggagatgacttttataaaacgaggaaagcatgaagtttatatagcttgaaaagtgtgttgtattcaggtagtaatgcactgactccatcactcttgcattttgtttgtttgttttgaggcggagtctcgccctgtygcccaggctggagtgcagtggtgcgatctcggctcactgcaagctccgcctcccgggttcacgccattctcctgcctcagcctcccgagtagctgggactacaggcgcccgccaccacgcctggctaatttttttgtatttttcttagtagagacggggtttcaccgtgttagccaggatggtcttgatctcctgacttcgtgatctgcccgcctcggcctcccaaagtgctgggattacaggcgtgagcccccgcgcccggccacactcttgcattttttattgtaggctctgaggaaaggtctgcttccacgtgtgttcagattgtta

SEQ ID NO: 499832 - DNA, 555 bp, Homo sapiens
tcatttaacagaccatttgcgtagacacttgaggatgaagataaattttcaggcagattaataacaatggggagagttttcaaggcagaggagatgacttttataaaacgaggaaagcatgaagtttatatagcttgaaaagtgtgttgtattcaggtagtaatgcactgactccatcactcttgcattttgtttgtttgttttgaggcggagtctcgccctgttgcccagrctggagtgcagtggtgcgatctcggctcactgcaagctccgcctcccgggttcacgccattctcctgcctcagcctcccgagtagctgggactacaggcgcccgccaccacgcctggctaatttttttgtatttttcttagtagagacggggtttcaccgtgttagccaggatggtcttgatctcctgacttcgtgatctgcccgcctcggcctcccaaagtgctgggattacaggcgtgagcccccgcgcccggccacactcttgcattttttattgtaggctctgaggaaaggtctgcttccacgtgtgttcagattgtta

SEQ ID NO: 499833 - DNA, 571 bp, Homo sapiens
ccatttgcgtagacacttgaggatgaagataaattttcaggcagattaataacaatggggagagttttcaaggcagaggagatgacttttataaaacgaggaaagcatgaagtttatatagcttgaaaagtgtgttgtattcaggtagtaatgcactgactccatcactcttgcattttgtttgtttgttttgaggcggagtctcgccctgttgcccaggctggagtgcagtggygcgatctcggctcactgcaagctccgcctcccgggttcacgccattctcctgcctcagcctcccgagtagctgggactacaggcgcccgccaccacgcctggctaatttttttgtatttttcttagtagagacggggtttcaccgtgttagccaggatggtcttgatctcctgacttcgtgatctgcccgcctcggcctcccaaagtgctgggattacaggcgtgagcccccgcgcccggccacactcttgcattttttattgtaggctctgaggaaaggtctgcttccacgtgtgttcagattgttatacacacttagttccttgagtgggtatt

SEQ ID NO: 499834 - DNA, 562 bp, Homo sapiens
ggaccagcctttcctcctagagactgtccctgttccttcttatgcttttttcatgggcctttccagcagcacgaacatttcaaatatctctgcctttccctcctgccccgtctctcagaaatcaactgcacatggtctcagcttttaagggctcatagtgattagattggactcatatacggtcctcattttaatattcataattctaactgcaaagtctcttttgtcaggtaatacagmatattcaggtctcaaggattaaagtgtgagcatctttgggggtttttattctgcttacaacatttacctagagtataaattcaagacataaggcagaatcttatgagaaaaagaaagtactattttgaacatacctgtggcaatcctaaatgggaattagattcagatttggcagttcttgataaaagtcaaggctgaagaaataatttggtagtcatcatgttatacattttgtaaatgaagccattattatatatgagagggttagcattcacccagggagacttcaagtcagtttacaaagttaatattctatggcacg

SEQ ID NO: 499835 - DNA, 562 bp, Homo sapiens
ggaccagcctttcctcctagagactgtccctgttccttcttatgcttttttcatgggcctttccagcagcacgaacatttcaaatatctctgcctttccctcctgccccgtctctcagaaatcaactgcacatggtctcagcttttaagggctcatagtgattagattggactcatatacggtcctcattttaatattcataattctaactgcaaagtctcttttgtcaggtaatacagaatattcaggtctcaaggattaaagtgtgagcatctttgggggtttttattctgcttacaacatttacctagagtataaattcaagacataaggcagaatcttatgagaaaaagaaagtactattttgaacatacctgtggcaatcctaaatgggaattagattcagatttggcagttctkgataaaagtcaaggctgaagaaataatttggtagtcatcatgttatacattttgtaaatgaagccattattatatatgagagggttagcattcacccagggagacttcaagtcagtttacaaagttaatattctatggcacg

SEQ ID NO: 499836 - DNA, 562 bp, Homo sapiens
ggaccagcctttcctcctagagactgtccctgttccttcttatgcttttttcatgggcctttccagcagcacgaacatttcaaatatctctgcctttccctcctgccccgtctctcagaaatcaactgcacatggtctcagcttttaagggctcatagtgattagattggactcatatacggtcctcattttaatattcataattctaactgcaaagtctcttttgtcaggtaatacagaatattcaggtctcaaggattaaagtgtgagcatctttgggggtttttattctgcttacaacatttacctagagtataaattcaagacataaggcagaatcttatgagaaaaagaaagtactattttgaacatacctgtggcaatcctaaatgggaattagattcagatttggcagttcttgataaaagtsaaggctgaagaaataatttggtagtcatcatgttatacattttgtaaatgaagccattattatatatgagagggttagcattcacccagggagacttcaagtcagtttacaaagttaatattctatggcacg

SEQ ID NO: 499837 - DNA, 537 bp, Homo sapiens
accagcctttcctcctagagactgtccctgttccttcttatgcttttttcatgggcctttccagcagcacgaacatttcaaatatctctgcctttccctcctgccccgtctctcagaaatcaactgcacatggtctcagcttttaagggctcatagtgattagattggactcatatacggtcctcattttaatattcataattctaactgcaaagtctcttttgtcaggtaatacagaatattcaggtctcaaggattaaagtgtgagcatctttgggggtttttattctgcttacaacatttacctagagtataaattcaagacataaggcagaatcttatgagaaaaagaaagtactattttgaacatacctgtggcaatcctaaatgggaattagattcagatttggcagttcttgataaaagtcaaggctgaagaaataatttggtagtcatcatgttatacattttgtaaatgaagccattattayatatgagagggttagcattcacccagggagacttcaagtcagttta

SEQ ID NO: 499838 - DNA, 644 bp, Homo sapiens
caggcacctaagaatgacttaatttcctgtggtgttcctttaaaacaattttccaaaacaggcaaatcttgctctctccctctctctttctctttaaaaagtaacacaggcttatttttaaagttgcaatcaaaacagacaggtaaaaagtagaaaattaaaatgacccatcaggcttgtcttaaaattaactactgataatattttggtatatgtcctcatatgttttartgtattttttcaggtttgttctatcaaaacctaatttaacaaaatctgagcaaatcatccacttcctttcctaatatccttttatactgtgtgtttatacatgtggttatgaatatatgttcacaagtgagggtatatatacacatacacacatacatgtgtgagatagagacataggcagaggcagacagaaaggcagagaatagctaggaaagttgagctcaatttaatattgtaattataatatgcatgctattttaaaattgctttcatttctgaatttagacagcatatagaacttgataaatacagtaattagaaatccgagagttatttgcatacttacacatctgaagtatcttcctatgtacagataaacattaaccacaattatctacacatgttgcttaaat

SEQ ID NO: 499839 - DNA, 644 bp, Homo sapiens
caggcacctaagaatgacttaatttcctgtggtgttcctttaaaacaattttccaaaacaggcaaatcttgctctctccctctctctttctctttaaaaagtaacacaggcttatttttaaagttgcaatcaaaacagacaggtaaaaagtagaaaattaaaatgacccatcaggcttgtcttaaaattaactactgataatattttggtatatgtcctcatatgttttagygtattttttcaggtttgttctatcaaaacctaatttaacaaaatctgagcaaatcatccacttcctttcctaatatccttttatactgtgtgtttatacatgtggttatgaatatatgttcacaagtgagggtatatatacacatacacacatacatgtgtgagatagagacataggcagaggcagacagaaaggcagagaatagctaggaaagttgagctcaatttaatattgtaattataatatgcatgctattttaaaattgctttcatttctgaatttagacagcatatagaacttgataaatacagtaattagaaatccgagagttatttgcatacttacacatctgaagtatcttcctatgtacagataaacattaaccacaattatctacacatgttgcttaaat

SEQ ID NO: 499840 - DNA, 644 bp, Homo sapiens
caggcacctaagaatgacttaatttcctgtggtgttcctttaaaacaattttccaaaacaggcaaatcttgctctctccctctctctttctctttaaaaagtaacacaggcttatttttaaagttgcaatcaaaacagacaggtaaaaagtagaaaattaaaatgacccatcaggcttgtcttaaaattaactactgataatattttggtatatgtcctcatatgttttagtgtattttttcaggtttgttctatcaaaacctaatttaacaaaatctgagcaaatcatccacttcctttyctaatatccttttatactgtgtgtttatacatgtggttatgaatatatgttcacaagtgagggtatatatacacatacacacatacatgtgtgagatagagacataggcagaggcagacagaaaggcagagaatagctaggaaagttgagctcaatttaatattgtaattataatatgcatgctattttaaaattgctttcatttctgaatttagacagcatatagaacttgataaatacagtaattagaaatccgagagttatttgcatacttacacatctgaagtatcttcctatgtacagataaacattaaccacaattatctacacatgttgcttaaat

SEQ ID NO: 499841 - DNA, 508 bp, Homo sapiens
gctgtcatgttaaagccatgattgacacttgtttgcatackatttgagaatttaatatttggttgaaattctctgatcctaaaacatactgcttggaaatacacattttgttttcatacacatgagatgttgcatgcataccgaaattaaagaattacaattagttggtacccagcttgcatccttaagcaatctttgtaaatactatttttcttattaacgctgctttctgttctcattaagtttcaacagagtactctcagtaatttaaaacatattgttccttcagttaaataggcaatttccctctcaacaaatgcctggaccttaaagtaaggtgtggaaatggacaaaatagtcccaaatattttaaccagcaatataaacttttgcaatgcttttataggatgtttaaaataacaagaaagacttggttctcgtgattttcaccaacggtggttacaaacagtcttcttctttactatgtttgaatggcatatttcacttc

SEQ ID NO: 499842 - DNA, 502 bp, Homo sapiens
tcatgttaaagccatgattgacacttgtttgcatactatttgagaatttaatatttggttgaaattctctgatcctaaaacatactgcttggaaatacacattttgttttcatacacatgrgatgttgcatgcataccgaaattaaagaattacaattagttggtacccagcttgcatccttaagcaatctttgtaaatactatttttcttattaacgctgctttctgttctcattaagtttcaacagagtactctcagtaatttaaaacatattgttccttcagttaaataggcaatttccctctcaacaaatgcctggaccttaaagtaaggtgtggaaatggacaaaatagtcccaaatattttaaccagcaatataaacttttgcaatgcttttataggatgtttaaaataacaagaaagacttggttctcgtgattttcaccaacggtggttacaaacagtcttcttctttactatgtttgaatggcatatttcact

SEQ ID NO: 499843 - DNA, 508 bp, Homo sapiens
gctgtcatgttaaagccatgattgacacttgtttgcatactatttgagaatttaatatttggttgaaattctctgatcctaaaacatactgcttggaaatacacattttgttttcatacacatgagatgttgcaygcataccgaaattaaagaattacaattagttggtacccagcttgcatccttaagcaatctttgtaaatactatttttcttattaacgctgctttctgttctcattaagtttcaacagagtactctcagtaatttaaaacatattgttccttcagttaaataggcaatttccctctcaacaaatgcctggaccttaaagtaaggtgtggaaatggacaaaatagtcccaaatattttaaccagcaatataaacttttgcaatgcttttataggatgtttaaaataacaagaaagacttggttctcgtgattttcaccaacggtggttacaaacagtcttcttctttactatgtttgaatggcatatttcacttc

SEQ ID NO: 499844 - DNA, 508 bp, Homo sapiens
gctgtcatgttaaagccatgattgacacttgtttgcatactatttgagaatttaatatttggttgaaattctctgatcctaaaacatactgcttggaaatacacattttgttttcatacacatgagatgttgcatgcataccgaaattaaagaattacaattagttggtacccagcttgcatccttaagcaatctttgtaaatactatttttcttattaaygctgctttctgttctcattaagtttcaacagagtactctcagtaatttaaaacatattgttccttcagttaaataggcaatttccctctcaacaaatgcctggaccttaaagtaaggtgtggaaatggacaaaatagtcccaaatattttaaccagcaatataaacttttgcaatgcttttataggatgtttaaaataacaagaaagacttggttctcgtgattttcaccaacggtggttacaaacagtcttcttctttactatgtttgaatggcatatttcacttc

SEQ ID NO: 499845 - DNA, 627 bp, Homo sapiens
cgccaccgaacacaaaaaaactgctttgagtttgcatatagttacrgtagtactgaaaaatcctcgcaatttaggtttttgttttcagttttgtttctctgttttctagtgcataatgacttaataaatattcatttaacaaaaattgaaatctcaaaggtacatataaataaacaatataaataaccatccttattacagttaactttgtgctttaaaaaaaaaaggcatccaaagaaagacagacgtattcatgcaataaaatcttagcaatccctgcaatagttttccagaattatcagccctcccatcttagtctggacagaatgaaaaaaaaattagttctctcgtgttattctttgagctccaactaggaaaaattactgaaaacagctggacgttacaactgttttgggcagagaagtcacactgttcaggaggaccccacggtagaaactgttttaaaaaagttctttttacttgaaattacacaagaaagcagaaaatgacattgcaaaaaggaaaaaagtataggcaggaacattgttacagaagccaggtgacaatgagaagtagagagtagaaagcaatcaacccttttgaccactgagaatgaggatagtagaa

SEQ ID NO: 499846 - DNA, 627 bp, Homo sapiens
cgccaccgaacacaaaaaaactgctttgagtttgcatatagttacagtagtactgaaaaatcctcgcaatttaggtttttgttttcagttttgtttctctgttttctagtgcataatgacttaataaatattcatttaacaaaaattgaaatctcaaaggtacatataaataaacaatataaataaccatccttattacagttaactttgtgctttaaaaaaaaaaggcatccaaagaaagacagacgtattcatgcaataaaatcttagcaatccctgcaatagtttwccagaattatcagccctcccatcttagtctggacagaatgaaaaaaaaattagttctctcgtgttattctttgagctccaactaggaaaaattactgaaaacagctggacgttacaactgttttgggcagagaagtcacactgttcaggaggaccccacggtagaaactgttttaaaaaagttctttttacttgaaattacacaagaaagcagaaaatgacattgcaaaaaggaaaaaagtataggcaggaacattgttacagaagccaggtgacaatgagaagtagagagtagaaagcaatcaacccttttgaccactgagaatgaggatagtagaa

SEQ ID NO: 499847 - DNA, 627 bp, Homo sapiens
cgccaccgaacacaaaaaaactgctttgagtttgcatatagttacagtagtactgaaaaatcctcgcaatttaggtttttgttttcagttttgtttctctgttttctagtgcataatgacttaataaatattcatttaacaaaaattgaaatctcaaaggtacatataaataaacaatataaataaccatccttattacagttaactttgtgctttaaaaaaaaaaggcatccaaagaaagacagacgtattcatgcaataaaatcttagcaatccctgcaatagttttmcagaattatcagccctcccatcttagtctggacagaatgaaaaaaaaattagttctctcgtgttattctttgagctccaactaggaaaaattactgaaaacagctggacgttacaactgttttgggcagagaagtcacactgttcaggaggaccccacggtagaaactgttttaaaaaagttctttttacttgaaattacacaagaaagcagaaaatgacattgcaaaaaggaaaaaagtataggcaggaacattgttacagaagccaggtgacaatgagaagtagagagtagaaagcaatcaacccttttgaccactgagaatgaggatagtagaa

SEQ ID NO: 499848 - DNA, 627 bp, Homo sapiens
cgccaccgaacacaaaaaaactgctttgagtttgcatatagttacagtagtactgaaaaatcctcgcaatttaggtttttgttttcagttttgtttctctgttttctagtgcataatgacttaataaatattcatttaacaaaaattgaaatctcaaaggtacatataaataaacaatataaataaccatccttattacagttaactttgtgctttaaaaaaaaaaggcatccaaagaaagacagacgtattcatgcaataaaatcttagcaatccctgcaatagttttccagaattatcagccctcccatcttagtctggacagaatgaaaaaaaaattagttctctcgtgttattctttgagctccaactaggaaaaattactgaaaacagctggacgttacaactgttttgggcagagaagtcacactgttcaggaggaccccayggtagaaactgttttaaaaaagttctttttacttgaaattacacaagaaagcagaaaatgacattgcaaaaaggaaaaaagtataggcaggaacattgttacagaagccaggtgacaatgagaagtagagagtagaaagcaatcaacccttttgaccactgagaatgaggatagtagaa

SEQ ID NO: 499849 - DNA, 240 bp, Homo sapiens
acattgaatttttttaaatgtaaggaaaataaagatcacttgtaatcccaccactgagaatcactattaacatataaaaaatctgtgtataaatgtaatatacatatacacatgtgtatatatacatgactatacacatgtatgtaagtagcatgtgtgtatatacatgtaagtagtatatgcatgtatatatacctgtatagacataygtatatatacacatgcacacacacacacata

SEQ ID NO: 499850 - DNA, 640 bp, Homo sapiens
aaataaaaactttaccttttataagtctttcaagagagtccaactgtgtagtaagcagtatttctttgttttttaatatctcaaatttaacttcatatagttctaactgaatttcataaaattgtattkctaattcatctacaacatttatatttttttcttgttctggaagatcttccatcttattttcatagaaaaaagaaaaataagttaaaacaaatagtatattaaaaacaaactttagaagcattctagctattttctattccttgttccgtactaaatataaaagagcaaataggaaagaaacactttttcatttcatctagtgatgctaatactttatcccatccttgaaacagagaaaaacatttaggttttgagaaacataaatggcaatgaggtattattatgtattgcatatcggtgtccccccaaaattcatatgttgacactgtaactcccaatgtgatgttatttggaggtgggtcctttggaagtaattaggttcagattatgtcaaaaggatagcacccccatcatgggattagtgcccttattagaagagaaagacagggatcactttctttctctccaaacatacacacagaagaaaggctatgtgagcactcagttaaga

SEQ ID NO: 499851 - DNA, 491 bp, Homo sapiens
agctgtctactagacaggaagaggatccgcaccagacagtgaatctgcaggcaccttgatcttggacttcccagcctccagaactgtgagaaatacatgtccrttgttgaagccacccaatctgtgacatttaatattgttacagcagccttagccaactaagacaggtgtttacagtgttttctgctttaaagtcataagattataggaaaaaacttaagtgtctaagatccttcagggaagtatctctttgattattttaaagctgtactgaaaacattgctggattgattttcaagtacagtacccacttcaatactgggcttggtgttactataaagtgaatcctacagtgtggtattttgaaacatcttaaccaaaggaaaactttatgtctaaccttccataggagatggtgttggaataagtgaagaaaagaagctctttaacaatgcctggaaagaaaagtgctatctaaaaatacaagtgtg

SEQ ID NO: 499852 - DNA, 491 bp, Homo sapiens
agctgtctactagacaggaagaggatccgcaccagacagtgaatctgcaggcaccttgatcttggacttcccagcctccagaactgtgagaaatacatgtccattgttgaagccacccaatctgtgayatttaatattgttacagcagccttagccaactaagacaggtgtttacagtgttttctgctttaaagtcataagattataggaaaaaacttaagtgtctaagatccttcagggaagtatctctttgattattttaaagctgtactgaaaacattgctggattgattttcaagtacagtacccacttcaatactgggcttggtgttactataaagtgaatcctacagtgtggtattttgaaacatcttaaccaaaggaaaactttatgtctaaccttccataggagatggtgttggaataagtgaagaaaagaagctctttaacaatgcctggaaagaaaagtgctatctaaaaatacaagtgtg

SEQ ID NO: 499853 - DNA, 491 bp, Homo sapiens
agctgtctactagacaggaagaggatccgcaccagacagtgaatctgcaggcaccttgatcttggacttcccagcctccagaactgtgagaaatacatgtccattgttgaagccacccaatctgtgacatttaatattgttayagcagccttagccaactaagacaggtgtttacagtgttttctgctttaaagtcataagattataggaaaaaacttaagtgtctaagatccttcagggaagtatctctttgattattttaaagctgtactgaaaacattgctggattgattttcaagtacagtacccacttcaatactgggcttggtgttactataaagtgaatcctacagtgtggtattttgaaacatcttaaccaaaggaaaactttatgtctaaccttccataggagatggtgttggaataagtgaagaaaagaagctctttaacaatgcctggaaagaaaagtgctatctaaaaatacaagtgtg

SEQ ID NO: 499854 - DNA, 491 bp, Homo sapiens
agctgtctactagacaggaagaggatccgcaccagacagtgaatctgcaggcaccttgatcttggacttcccagcctccagaactgtgagaaatacatgtccattgttgaagccacccaatctgtgacatttaatattgttacagcagccttagccaactaagacaggtgtttacagtgttttctgctttaaagtcataagattataggaaaaaacttaagtgtctaagatccttcagggaagtatctctttgattattttaragctgtactgaaaacattgctggattgattttcaagtacagtacccacttcaatactgggcttggtgttactataaagtgaatcctacagtgtggtattttgaaacatcttaaccaaaggaaaactttatgtctaaccttccataggagatggtgttggaataagtgaagaaaagaagctctttaacaatgcctggaaagaaaagtgctatctaaaaatacaagtgtg

SEQ ID NO: 499855 - DNA, 571 bp, Homo sapiens
ctaccttgtgttatcatgttccttcagtttgaagatctccctttaccatttctagattttctgacagagaagtttttcagtctgtctgggtatcaattttggctttatctctgactctacacaaatcactttgtctcaccttgggcctctcatgtataaaataggaataagtggccrggtgcagaggctcatgcctgtaatcccagcactttgggaggctgagacgggcggatcatgaggtcaggagatcgagaccatcctggctaacgtggtgaaaccctgtctctactaaagatacaaaaaaattagctgggcgtggtggtgggcacctgtagtcccagctactcgggaagctcaggcaggagaatggcatgaacccaggaggcggagcttgcagtgagccaagattgcaccaccactgtagcctgggtgacagggtgagactccatctcaaaacaaaaaaaacaaacaaaaaaaaggaataagtataatataatgtaaataattaaaattatatataaaataagtgaaagtacttactcagagagttgctgtgcaaatgacatgaaat

SEQ ID NO: 499856 - DNA, 571 bp, Homo sapiens
ctaccttgtgttatcatgttccttcagtttgaagatctccctttaccatttctagattttctgacagagaagtttttcagtctgtctgggtatcaattttggctttatctctgactctacacaaatcactttgtctcaccttgggcctctcatgtataaaataggaataagtggccaggtgcagaggctcatgcctgtaatcccagcactttgggaggctgagacgggcggatcatgaggtcaggagatcgagaccatcctggctaacgtggtgaaaccctgtctctactaaagatacaaaaaaattagctgggcgtggtggtgggcacctgtagtcccagctactcgggaagctcaggcaggagaatggcatgaacccaggaggcggagcttgcagtgagccaagattgcaccaccactstagcctgggtgacagggtgagactccatctcaaaacaaaaaaaacaaacaaaaaaaaggaataagtataatataatgtaaataattaaaattatatataaaataagtgaaagtacttactcagagagttgctgtgcaaatgacatgaaat

SEQ ID NO: 499857 - DNA, 369 bp, Homo sapiens
gatccacttttaccaccttttctcagaaagagggcaaggccttcaacgaagttcttttccacccaggctcccagctaacgcggctgagctgagttaatggggaggaggctgaaacaggcaacactagtcagggtttcctcggtccccaggaagccccacaatgcccagctcggggcttgcccttggtctgaagcggagggaaagaagcctcatctcaatcccatacttcatagggaaccctttacctccctcacctctgagaccccccatgacaactctccaaagacatattgctttcccygtttcacagatgaggaaactgaggcctagattatggaaatcactccgtcaaagtcacaaccacggatg

SEQ ID NO: 499858 - DNA, 468 bp, Homo sapiens
acacacattcacaccattgcatgtgcgtgcacacacacattcacacccacacaaattcacccacgcacacacacattcacacatgcatacacattcacacacatgcacatgcacacacacattcacacccacacaaattcacacatgcacgcacacacattcacacacgcacacacattcacacatgcacattcatacacacacacacattcacacacacacaacccgtttctctggggtctyctgccctcctgcctctgcctctcccctctctcttctccacagattggcttcacctgctggggcacaggccaccagaggcagtcgccatggctgtcaacccctcacaggtcaagcccacagagccacccaattcagcctccctgggttctaattccaagagaagtttccaaggaggaaaaacaaaatttaccattaggtgaggtgtccaccctaagctggtcccgc

SEQ ID NO: 499859 - DNA, 525 bp, Homo sapiens
agacacaaacatgaaatgtgtcacttcacttaaaaagctgtgttccctgtggtctagtgtcagagctgtgtcctatttagaggggccagctcagktccccccatcccctcactcgagatctgagaatgaccttcaccatccatgacacccactaatcctgaatgtgcgtgtttggtttcacttcttactcacgtgctagcttgagggtaagcctcagtttcctcatctataaaatgggggcgacactatctgtttcatgggagacttcctgaaagctgtggcacatggcctggatcatggtcatcactgaagttgtattagtgcctcctgtcccctcttggtcagtgcctatgcctggagagccaaaccaaaccacatagaaagcaaaagcaatgggcggagtgctggctaaactcagatgctcccagggcctagggaaggccccacatcacagcaggtgctccacaccagtgagtcacatttgtagcttgtcgggcctgggggacctcagaggggatggggtcc

SEQ ID NO: 499860 - DNA, 540 bp, Homo sapiens
tggcctctaagatggtgcactcagatggtgaaagtcaatgctgactgttaacaggactgtctatgcatggcttcyccatgtggcttggatttctcgcaatatggtggctggatttggagggaaagcaaaccaagaagtcagaagcaaaactgccaggccatgaagagccatgcctggacctggcactgtgtcacttcagccatagtctattggtcaaagcagccacagcatcatcccagattcaaggaggtggagaaatagatccacctcttgatggaagggtggcaaggtcacattgcagaggagttcatggaatgggagacatggctgcctccatcattggaaaatgcaatcggccaaaattgttgatggggcaggaccttctcaatcccatctcaactccatgacagtgggtaggtcacttcacctgtcagagtctcagttttctcagcaggggaacaagggaattgactaaatatgtcaaaagaccttccacctttacagcactgcattcagagtaaagtttgggaatacatatcc

SEQ ID NO: 499861 - DNA, 540 bp, Homo sapiens
tggcctctaagatggtgcactcagatggtgaaagtcaatgctgactgttaacaggactgtctatgcatggcttctccatgtggcttggatttctcgcaatatggtggctggatttggagggaaagcaaaccaagaagtcagaagcaaaactgccaggccatgaagagccatgcctggacctggcactgtgtcacttcagccatagtctattggtcaaagcagccacagcatcatcccagattcaaggaggtggagaaatagatccacctcttgatggaagggtggcaaggtcacattgcagaggagttcatggaatgggagacatggctgcctccatcaytggaaaatgcaatcggccaaaattgttgatggggcaggaccttctcaatcccatctcaactccatgacagtgggtaggtcacttcacctgtcagagtctcagttttctcagcaggggaacaagggaattgactaaatatgtcaaaagaccttccacctttacagcactgcattcagagtaaagtttgggaatacatatcc

SEQ ID NO: 499862 - DNA, 540 bp, Homo sapiens
tggcctctaagatggtgcactcagatggtgaaagtcaatgctgactgttaacaggactgtctatgcatggcttctccatgtggcttggatttctcgcaatatggtggctggatttggagggaaagcaaaccaagaagtcagaagcaaaactgccaggccatgaagagccatgcctggacctggcactgtgtcacttcagccatagtctattggtcaaagcagccacagcatcatcccagattcaaggaggtggagaaatagatccacctcttgatggaagggtggcaaggtcacattgcagaggagttcatggaatgggagacatggctgcctccatcattggaaaatgcaatcggccraaattgttgatggggcaggaccttctcaatcccatctcaactccatgacagtgggtaggtcacttcacctgtcagagtctcagttttctcagcaggggaacaagggaattgactaaatatgtcaaaagaccttccacctttacagcactgcattcagagtaaagtttgggaatacatatcc

SEQ ID NO: 499863 - DNA, 536 bp, Homo sapiens
ctgcttgaacatatacggtttgtcctctttgggagtcaaaatgaggggaaaccattgtttccactcaaaatggattcaacatggcgaatctcaagacaagttttgacccacagtgacctgagttttctgtttatagtgagactccaggccatgtgagaaattgttgatctwgaatttggtttcttagtccatttgtactgctataacaaaatccctgagactggtaatttttaaagaatggaaatttattttcttatggctctggaggttgggaagtccaagatcaaggtgctggcagattcagtgtctggtgagggctcctgtctacttccaagatggaaccctgtagctgcatcctctaaagggaaggaaggctgtatcttcacatggcagaaggaacgaaaaggcaggatagtgctcctttcaacttcaagacctttcataagggtgcctctcaaaggccacacctcttgatactgtggtactgaggattaagttgcaacaagaattttggaagggacacttctatacaaacc

SEQ ID NO: 499864 - DNA, 496 bp, Homo sapiens
gttcttcaaaagaacaagcaagattcacagaccaccagctagctagattaatgaagaaaaaaaaaagagagagaatgtatatttaaaacttamggaatttcctttgaaccagtaatttcatcaagggactctgcatttcagtggcccaaatggcaaagatttatgcccaacaatttccactgtagtgccataaaaaatggtaaaaatataagctatgtcagcagtagggggacacttaagtacacagagaaacgctcatacaatagaatattctgcagaactgagaagtatgagtatgaggcaacacagggaaactattcctatactcctgaattcaactgggaagctacaaacaagattcataaaaaatttcacctttgggttctttgctttactgcacagctttctgttttgttttgtttagataccattaaaatagaataccttgggacaacttcctccaacaaccccaaagcagactcagcaaccaagcatc

SEQ ID NO: 499865 - DNA, 496 bp, Homo sapiens
gttcttcaaaagaacaagcaagattcacagaccaccagctagctagattaatgaagaaaaaaaaaagagagagaatgtatatttaaaacttacggaatttcctttgaaccagtaatttcatcaagggactctgcatttcagtggcccaaatggcaaagatttatgcccaacaatttccactgtagtgccataaaaaatggtaaaaatataagctatgtcagcagtagggggacacttaagtacacagagaaacgctcatacaayagaatattctgcagaactgagaagtatgagtatgaggcaacacagggaaactattcctatactcctgaattcaactgggaagctacaaacaagattcataaaaaatttcacctttgggttctttgctttactgcacagctttctgttttgttttgtttagataccattaaaatagaataccttgggacaacttcctccaacaaccccaaagcagactcagcaaccaagcatc

SEQ ID NO: 499866 - DNA, 333 bp, Homo sapiens
atgatcgctgtgtcatggggccactgctctgggcccaagtccctttgggggcagctggggtggcaagtagcagccagccttagtgcctttgacatttatgtccctgtgctataggacagagggtctgtctgtcatcacagactgatgtagccttggcccctggcaatcattttctgtttcaagtgttcagtttggtgtagaattgwagttcagtggatgctatcagaagaaaaaggacagagtgtcacgtggaaaattggagataaactgataactccagggttagaggaactgactcatccgcccccactggcttgtggtggaggacagtct

SEQ ID NO: 499867 - DNA, 628 bp, Homo sapiens
acttagttattcacttcaagcttcyaccgtcgactattctatgtctcatagtttgaattattgagaaaaaatctgcttggtgcctggtcatctggggtaggctgaagaatgcccccatacttcctcccaagtataactgcactctaatccatggaacttgtggatgttaccttatatggaaacatggtctttgcagatgtgattaagttaaagattttaaaatggggattatcttggattatcagggtgggtcagtgattatgcaatcacatacatccttataagaagaaaacagaggaagatttggcacaaatagaagaagagaagctgatgtgaagatggaggcagagattgaaatgatgcagccacaggcaaaggaatgtttacagtcatcagaaactggaagagacaaggggcagattcttctccagagatagactctaaggggagcagagctcccttgatttcagctcagtaatactgatttcagatttctcatgcggaattgtgaaagaatacatttttgttattttaaaccataatatttgtggtagtttgttatagcagccacaggaaactaatgctaatacagcagccaatggattcattcatcctgcactaagtgtcc

SEQ ID NO: 499868 - DNA, 478 bp, Homo sapiens
catgacttttattcttggatagcctctgctgccgaaaaggaatatggtatgaactttatatactgatgtggaatattcccatgaaatattaaataaaaaaagtgagttggccaggcgcggtggctcacgcctgtaatcccagcactttgggaggccgaggcgggcaggtcatgaggtcaggagttcgagaccagcctggccaacatggtgaaaccccgtctctagtaaaaatacaaaaaattagctgggtgtagtggcgggcgcctgtaatcccagctacttgggaggctgaggcaggagaatcgcttaacctgggaggtggaggttgcagtgagctgagattgcaccactgtactccagcccyggcaacagagtgagactccgtctcaaaaaaaaaaaaaaaaaaaaaaaaaaaaagcgagtcacagcacaatatatgtaatattgaacatttctttaaaaatgaaaatctgtccag

SEQ ID NO: 499869 - DNA, 630 bp, Homo sapiens
ctgtcagcagcagagcctggaccagaacccagcttgtcraggtccagagtccatgcagcttaaacttaaccactgtgccgtactggctgcatcaaagtcatgtccttctgtgccaactctgttctcactaatctctggcttctcattgcactgatagcatccagcccttgccaggccctgcaggatctgcactggtcccacctctgatctctctcaggccatttccctctgcccactctgctctggtcagaatggactggggttgcagaatgaaacacaggatgcgcggttaaatttgaacttcagataagcaatgggacttttttggtataaatatatcctgtgcaatatttgggacatatttacactaaggaaatattcattgtttatctgaaatccacatttaacttctgtttgtgtgtatatgtgtgtgtgcatgcatgcatgtgtgccactgaatctggcagctctggcctggactcattctgttcccccaactgctgagtgcatgcccgcatcatggccctcactgcactttttcctctgatgcagtgctcttctcccgctatgcctggctggctccttctcctttgtattttagcttaggtatcacctcctcagggaagcctt

SEQ ID NO: 499870 - DNA, 560 bp, Homo sapiens
gctgtatacattccccaaggcttaccaaagggtacatctaacatggatgcgttttattrtgtgtcagttgcacctcaataaagttgatttttaaaatgtcacttagacatgaaacagtcttcataagactgacatacaaggaagggacccatcaccacagagagcctccaaatggagcctcctttgaaggaaacccccttcaaacacccctgtgctgagcattttctgtgtacacccactctcctgccatcctgttctgtgtccagaagtttgaccagaatggactgcataaagactctcttgtccactgtgttcttgttagattagaccaatgcaaggtaccagcaggagatctaagggcaggggataaatgggtgggagttatttattcctctagcagatcctgcagggttgtggcaggctgctcatgtccctggactgaaggtcacagctccctccaggcacccctgcctggaccatgctccccttccaggttctggtaaacctttcatcctcccaccctttcagaatctgtactgtccctgaggtgtccctagatc

SEQ ID NO: 499871 - DNA, 560 bp, Homo sapiens
gctgtatacattccccaaggcttaccaaagggtacatctaacatggatgcgttttattatgtgtcagttrcacctcaataaagttgatttttaaaatgtcacttagacatgaaacagtcttcataagactgacatacaaggaagggacccatcaccacagagagcctccaaatggagcctcctttgaaggaaacccccttcaaacacccctgtgctgagcattttctgtgtacacccactctcctgccatcctgttctgtgtccagaagtttgaccagaatggactgcataaagactctcttgtccactgtgttcttgttagattagaccaatgcaaggtaccagcaggagatctaagggcaggggataaatgggtgggagttatttattcctctagcagatcctgcagggttgtggcaggctgctcatgtccctggactgaaggtcacagctccctccaggcacccctgcctggaccatgctccccttccaggttctggtaaacctttcatcctcccaccctttcagaatctgtactgtccctgaggtgtccctagatc

SEQ ID NO: 499872 - DNA, 514 bp, Homo sapiens
tggcatggtaggtagccggtgcacttggggccactgtgtgcatggccatattaggtgctttaccagcaacatctcattttcctctcaagtaacccttttgagacagggccaacatcattccattgcacagaggaggcctcagctcagggatgagaagcagagcacccagtctgccatggaagctggggaccttgggaagactgttaaatgggcccctgggcctcccactgcaccacactgtcccttgacagccacagtcacaagtctaagccacattgacaacagtggagggggctgctctggactgaattgtgtccccccgaaacttgtatgttgaagccctaacacccaatgtggctgtatctggagatagagtctttaagaggtaattaaggttaagtgaggtcataagggagggctgtaatcttgtaggattktggccttgtacgaagaggaacagagggagatctctgtcccctccatgggcacacatggaggaaaggccatatgagga

SEQ ID NO: 499873 - DNA, 435 bp, Homo sapiens
ccagacctctgtcatccatcccactggccccaccactcaccccgctcagatttccaattatttgtcctgttttgaattcaagtgggatattagcagtgagtctggctttattaatggcggcatctttagtgttatcgactttctcactcactcctcgctctcactccaagctctgtttcctttaattaagccccaagctaagtgctgagcaggtgatgtgagtctggaacagcctttgttctgggatttaggcactttctcatgagcttgggaatggagagacagcrtgctactgcctttgaagtctgacatccatccccacaatcagaaaagtgggacagtgtagagcgtcaggccagagaggcagaaactatactctgtccccactcagcctccctacctgtaaagttgggggtgagacgcatgagagtgtct

SEQ ID NO: 499874 - DNA, 266 bp, Homo sapiens
caatcactgccgttaccaccacctaaatgaactgactttttcataagaggaaaatggcagatgccaggtagtacctcaggcattgcattaaaaacatacgtgagaaattgccttcattctctaagaaataattggaatggattttgtaaagcactggaagtactttaaaaattagtgaggaaatgacatcagagaaatttgggttattgataacattaakaactatattgtattgtgagtgtctgtggcctgtgacacaaaagtta

SEQ ID NO: 499875 - DNA, 653 bp, Homo sapiens
tgtcagcctccttaggggtttgcctcagctaaagacagccacatcccccactgatatgtccaccttctggagaaaagaggggcgtgaagtgaaaggcagaggaaagtagaaaggctcagagctctctccccaacttggtctatgaattctttactcagaaagttgctgaggctttcattgaagatgcacaatgtcttgactcccaatcttgcttccttccttctcttccacaaatctggattccaagaacactttataacaaacctgctgcatgtaaatctccatcttagaatctgctcctaggcagcacaacctgtgccacttacaggaattaaacatcattctctagagcccatcaattatttgtagcattcaagtctgagaatttaatggggaargatacagaaagcagcctacctatgtctttcaagtctttgatggtggctttgaaaagaactaaatggatgaggcctcctctactaccctatttctcattcccttcccccttccattgtacaaataaaaaacatatgctttcctatatgccaatgagactattttaatagcctcaagacaactggtcctactggtaaattaatgacaagaagtaaatttgattactgacactcaaatatagaactataattttgcag

SEQ ID NO: 499876 - DNA, 624 bp, Homo sapiens
cccttcacttgaagggttgggtttcaccggagatccatttctgtctgcctaggaatttgtctgtctcctgttgctatcactagcacacayctttttgctaggcacatggattatcatatgtccaaactctgctgcaaaattacaaggacattggatcagctctggttactagactgtgagcagaaataaaatgtgtcatttctgggttgagtcattgggaatattctaatctctctttctttccatcacaactgggctggtctcatattgacatgtcaacaagattaaagagatcttgattgccgagtcattacatggaggactactgacttggagagtttacaaaactcatagtagactttgcatgagtgagaaaagtttgttataagccactatgattttggagttaatttttttatgacagcatatcctagcctggcctaactgatacatttagaacacagtattaagtagtttttttttttgttttgagacagggtcttgttttgtccctcaggctggagtgcaatggcctgatcatggctcattacagcctcaaacccctaagctcaagcaatcctcccacctcagcctcccaagtagctgggacttcaggtgtgtgcc

SEQ ID NO: 499877 - DNA, 624 bp, Homo sapiens
cccttcacttgaagggttgggtttcaccggagatccatttctgtctgcctaggaatttgtctgtctcctgttgctatcactagcacacacctttttgctaggcacatggattatcatatgtccaaactctgctgcaaaattacaaggacattggatcagctctggttactagactgtgagmagaaataaaatgtgtcatttctgggttgagtcattgggaatattctaatctctctttctttccatcacaactgggctggtctcatattgacatgtcaacaagattaaagagatcttgattgccgagtcattacatggaggactactgacttggagagtttacaaaactcatagtagactttgcatgagtgagaaaagtttgttataagccactatgattttggagttaatttttttatgacagcatatcctagcctggcctaactgatacatttagaacacagtattaagtagtttttttttttgttttgagacagggtcttgttttgtccctcaggctggagtgcaatggcctgatcatggctcattacagcctcaaacccctaagctcaagcaatcctcccacctcagcctcccaagtagctgggacttcaggtgtgtgcc

SEQ ID NO: 499878 - DNA, 420 bp, Homo sapiens
ctggacactttctatcatttttctcatttagctatacatgatgtttatttcttctctcccctcactagaaagcttcatgaagtcaactgattatttaaatgcccctatagctgtatcaaaaatcctgcttataaggttaaaaccttaagcaggatttctcctgtatttctcctgtaggcgcttctggtacatcaggaggatatgtccctggaagggaaasaggtcagcgtgatttaaaccctattctactttgccttatagtaaaagggaaacccagcagcagcacatccatctcaggttggcctggaaaaggaagtgctagaagttgttcattttccattcgctacagagacagagtatcctcaggaaagggcttccagtgctttagggctacattgatgcttccaagcataaatgggg

SEQ ID NO: 499879 - DNA, 479 bp, Homo sapiens
ctggattactggcctgaggttaggtaaatgcaagttgagagtttagagaagacataaacacatttggataatttgatggtttgcatatttagctgcaagcaatcatgactcagttgtgatctgtattcaggaatacttcattgagttacaatatgaaaaacacatctgtaaaccaaatgatacattttcataaatttcttccttatgcataatatataaatgctaagtttaacatttgatgtttcttcttttaccctttttccaatccattttccacacagcagccagtagatatgtatrtaggtagatagatgaaattataattagaataaaattaaaaagccatacttgacatataatgccatatatatttggcacctgcttgctctccaacctcatctcaggacactatctgacttaataaattgagcaacatgagctatttgctgttttttgcttgtttgtttgtttgttttttg

SEQ ID NO: 499880 - DNA, 507 bp, Homo sapiens
ctggaacatcaggtactggggacactggccctggtaacacagcaggtaagacaaagcacatctagttgtcagagcaatggtcaaacacaaaggtcttatatataattagcataagtccaagtgagttttaaaaaaagaagttaattataagagaatgaggaaaattctagcagtaatgtttaataatgaacttttgtcaaaaagcatttgcagcatggcaacaatctataggcagaacctcgttatttttcaaattggatacaactggaagatcagatgccacaaccactttagcttcccgtgaagtcacatttggaatattatttatatctaaaaktatgtttaattagcagaagtgtgagctctgatttcaaaatttaatttatcaaaagagattatgaagaattcagtacttgtaaatagataaatgcaaatgttaccgaaaagtgtgggaatcctcgattcttttctaacttggaagaaataattcagccaagagatgcatag

SEQ ID NO: 499881 - DNA, 642 bp, Homo sapiens
gtcaggctataactgacattaaaagtgtcagarcaaagggaaagcataggggagatgcccttaatccactatactttagaaatctcagttctgtgctatcagcacagaatagggaccagtacatttgcagcagtgagcctgaaccattgttgttgataaccagggaccccaaccagtatctgctgcctcaactaccagtagccctgtgagtaaacacaccgatgcagcctcagccacagcagtgacaatctctggaagcaaaccaggtaggtaaaatgggagaccctgcacttgccaaggggcaatatgggatgttcgtgtgaatactgttcctcagaatcaatgtcatgttgttaagcgagtaaatcacttaacctctgtaacctctgtttttgtatctgtaaaatgtgggtcaaagtgatctattttgtgaacttgggatgaggagccaagaaaatagtgaatagtgtaagtcaaagtacatttttcaaatgtggaaaggatcattattgttatcgatacagaaaaatgaagatttctgtaatttttaggtggaagttaatttaagtgagaattggttatatcatagcttaagaaattctgtgaatgcgtcctttccatttttgcctttgccacaggtac

SEQ ID NO: 499882 - DNA, 619 bp, Homo sapiens
tttatcattcaaaggacattgggaacatttagggcatgctttaccctcactcaaaagataagtatgggtttgccagtagacaaagaacaattggtttgcttttatttttcttaatcaatttctaatgcaattattttaattttcagaatagaaatagaaagttgaagatgcccatattttcaattacataacaaatacaaaattaagtgtgttctatgggtttaatttgactggatgtaaaattttccaactgtgcttcaatgccacggtttgacttcaatgtgttgttcaggcatgaaaaagtatgcattaytgtcttataatagcatgcttcaatgtattgtgaaatctatggtcaaaatccaagtgtttcagaagtatttagaggcaaaaggaatgtaccaatgggcatttcacttccactgaatctagtgaaatttaattttgtgaaatgctcaaagacagtttaaggatttaaaaatgattttcccaatatatttgtcatatttttgacaaatagttgggctacaattaagagccagggaccaagtctctcagcacaggagcacaacaataacaggtacaatattaacactttaggattgtaccaaggatataa

SEQ ID NO: 499883 - DNA, 340 bp, Homo sapiens
ctgccctgtggaggaaatgccagtttactaaataacgagtaagccactgtttccaacctgtcctgtggtttggaaaaggtattatagagcctgtcctgtggtttgattacggagcctgccctgtggtcacttgttcttcagatgaactgatttttgtgcagagcacacgtgttggattctgcctggtaagagtttttcacatatgatagcaaaaaacgacggaaagggaagcttggggtgcaaatgcaagttcagsataaaccacatcagcaaaaggacaaaggctccacaaggcaggcgcacaggctggttcagggccatgtgtgggcggctggtggca

SEQ ID NO: 499884 - DNA, 340 bp, Homo sapiens
ctgccctgtggaggaaatgccagtttactaaataacgagtaagccactgtttccaacctgtcctgtggtttggaaaaggtattatagagcctgtcctgtggtttgattacggagcctgccctgtggtcacttgttcttcagatgaactgatttttgtgcagagcacacgtgttggattctgcctggtaagagtttttcacatatgatagcaaaaaacgacggaaagggaagcttggggtgcaaatgcaagttcagcataaaccacatcrgcaaaaggacaaaggctccacaaggcaggcgcacaggctggttcagggccatgtgtgggcggctggtggca

SEQ ID NO: 499885 - DNA, 137 bp, Homo sapiens
tgacttgaagttgggctttccagattcaaawatctgccccagatgagatttagatgcagagggttagtgtccttttccccagggggatggcgtgatgatttgttcaagattgtgttatagtagctgccccttttaag

SEQ ID NO: 499886 - DNA, 535 bp, Homo sapiens
tgtcttatgttgggccatgactccaattgccaccaatggagtgactagacatcccttaaggaccaggagagtccctgcaaaattctaattgcatagccttccactcacaaaagtgtctagattggatgagaaattatatgtctgcctacatactctgtagcaggtaacacgcatacacacatatatttattctgccaacatccaccaaacaccaattaagtgccaggtcccatgttgagctccagtgcaatgtagaactctagcacaaaaatgacaggttttaaagagccatgaaaactttgttacataccacatctaagaagacatgataacagccaaaaaatagtacagttccttagacagacaacaaacagataggcacattagatagatkatataaaccatgtacaaccaacaagtatttgtaagtgactgaaatcttccactgccttgctaccatggatgtcaagtgggaacagattatagcaaaaatgtttatttttataggcaggtagcataatccacaacaggaata

SEQ ID NO: 499887 - DNA, 548 bp, Homo sapiens
caattaagtgccaggtcccatgttgagctccagtgcaatgtagaactctagcacaaaaatgacaggttttaaagagccatgaaaactttgttacataccacatctaagaagacatgataacagccaaaaaatagtacagttccttagacagacaacaaacagataggcacattagatagattwtataaaccatgtacaaccaacaagtatttgtaagtgactgaaatcttccactgccttgctaccatggatgtcaagtgggaacagattatagcaaaaatgtttatttttataggcaggtagcataatccacaacaggaataaaagcaccaatacaactatctttcctttctctgatttaacatattatttctccttcaactttcaaaacaaaacataattcacatattttaggctgaaacaacaattgaatacatttgacatccctatcaaataacttaagtaaagacttcaagaaggcagccaggtaagtaagccttgtgctctaggatcaaggctagatcccatcaacaaaagaagaatcagga

SEQ ID NO: 499888 - DNA, 548 bp, Homo sapiens
caattaagtgccaggtcccatgttgagctccagtgcaatgtagaactctagcacaaaaatgacaggttttaaagagccatgaaaactttgttacataccacatctaagaagacatgataacagccaaaaaatagtacagttccttagacagacaacaaacagataggcacattagatagattatataaaccatgtacaaccaacaagtatttgtaagtgactgaaatcttccactgccttgctaccatggatgtcaagtgggaacagattatagcaaaaatgtttatttttataggcaggtagcataatccacaacaggaataaaagcaccaatacaactatctttcctttctctgatttaacatattatttctccttcaactttcaaaacaaaacataattcacataytttaggctgaaacaacaattgaatacatttgacatccctatcaaataacttaagtaaagacttcaagaaggcagccaggtaagtaagccttgtgctctaggatcaaggctagatcccatcaacaaaagaagaatcagga

SEQ ID NO: 499889 - DNA, 646 bp, Homo sapiens
ataaccactgaggtgtatgtgtgtgttacaaactcatgtttttatatttaattgtcagaagaaaatgtcagatcccagattttatcattgaaacacagcatttaaaaaatactcaaaatgtgggttatatctgtatatttctaataatttctgttggatggtttttaaaagtatatgacattggtgcctatcatttttgcctcatagsagtttttttgtttttgctaattttgtttggagcaatgcacgactttggttttcatattttaaaagaaaaattatatgttatttggcctgaggataggctatataaactgcaggttagtactgagaagtaggattttccacaaactattatttcaaacctagggaagcccaccataatgagaagagcggggccaacacccatgtcactgtggagaagtacagaatatgcaatggaagagttgtttatctgatataagcggtaattggaaactgaaaaattcctgctctggaaaaaagatattctgctcttctgaatctaacagaggaagagacaaacagaaaccatcaattattgtttcaggtatacccagagtaccatctgtaccataaactacaactcaactgttgaaaatcataacttccatcaaaattctaacag

SEQ ID NO: 499890 - DNA, 532 bp, Homo sapiens
tgttgttcagatttcagtagaaggacgttcccatccacagccccgagggcacagaataagacaggcgccgcttgaagatagagactagcattggaaccaggtaagccctgctcgttagagaactttatgttaacctaaagtagagaaaaaaaagagatgagagtagagaccattttatgtaaagatgatctgaatacatttaatctctcctgaataaatccttatagatttctatacggtatttccyttgcccactctcaccctcagctttctttgcaggagacccccttcaccacgtgctgccgtctcaggattggcactgctgccaaggatcatgcattgtgtttggtgattctcacatcccctaataattcaattatgccagcactgagtgtaagtttcccacgtgaaggtgatagcagtcaggcgagaagacagcagggagcaaactgttcccacttctcaggccagaaataggagaaacatcaccttgtgtttaaagcacttgtcaacctggaatctgacactgtca

SEQ ID NO: 499891 - DNA, 532 bp, Homo sapiens
tgttgttcagatttcagtagaaggacgttcccatccacagccccgagggcacagaataagacaggcgccgcttgaagatagagactagcattggaaccaggtaagccctgctcgttagagaactttatgttaacctaaagtagagaaaaaaaagagatgagagtagagaccattttatgtaaagatgatctgaatacatttaatctctcctgaataaatccttatagatttctatacggtatttcctttgcccactctcaccctcagctttctttgcaggagacccccttcaccacgtgctgccgtctcaggattggcactgctgccaaggatcatgcattgtgtttggtgattctcacatcccctaataattcaattatgccagcactgagtgtragtttcccacgtgaaggtgatagcagtcaggcgagaagacagcagggagcaaactgttcccacttctcaggccagaaataggagaaacatcaccttgtgtttaaagcacttgtcaacctggaatctgacactgtca

SEQ ID NO: 499892 - DNA, 518 bp, Homo sapiens
acataagctttccaccttactttctggcatctgcccaatattttactattacaaagtgtcataaatacttgatatgagttacatttgaatgcttaaacaagtggactctgaacagcaagttcttcaaccttagggaaactttaattgccttagatcgttctatgtgtttgtttgttgttaatggatcgaacagtattcaccagcaaagtgagaaggctgcccttactctggtcaccgtggcatgactgatgcaygatttctaagctgtgctgggctaagcagacgtgcaattgaacaggattccaggaacccactgactgagacttaccaaatagaagaactttacattggaatcatcctcatatgcttcactgtttagggagtaatgcacagtaacaaccttctggtgattacattcaagctgctttggttctggaacaatcttcaggaagctgttcgttcgggagtaaaagcgtgagactaagaagtgagcatccaagtactgaggcgtcaaccag

SEQ ID NO: 499893 - DNA, 445 bp, Homo sapiens
gatatgagttacatttgaatgcttaaacaagtggactctgaacagcaagttcttcaaccttagggaaactttaattgccttagatcgttctatgtgtttgtttgttgttaatggatcgaacagtattcaccagcaaagtgagaaggctgcccttactctggtcaccgtggcatgactgatgcatgmtttctaagctgtgctgggctaagcagacgtgcaattgaacaggattccaggaacccactgactgagacttaccaaatagaagaactttacattggaatcatcctcatatgcttcactgtttagggagtaatgcacagtaacaaccttctggtgattacattcaagctgctttggttctggaacaatcttcaggaagctgttcgttcgggagtaaaagcgtgagactaagaagtgagcatccaagtactgaggcgtcaac

SEQ ID NO: 499894 - DNA, 518 bp, Homo sapiens
acataagctttccaccttactttctggcatctgcccaatattttactattacaaagtgtcataaatacttgatatgagttacatttgaatgcttaaacaagtggactctgaacagcaagttcttcaaccttagggaaactttaattgccttagatcgttctatgtgtttgtttgttgttaatggatcgaacagtattcaccagcaaagtgagaaggctgcccttactctggtcaccgtggcatgactgatgcatgatttctaagctgtgctgggctaagcagacgtgcaattgaacaggattccaggaacccactgactgagacttaccaaatagaagaactttacattggaatcatcctcatatgcttcactgtttagggagtaatgcamagtaacaaccttctggtgattacattcaagctgctttggttctggaacaatcttcaggaagctgttcgttcgggagtaaaagcgtgagactaagaagtgagcatccaagtactgaggcgtcaaccag

SEQ ID NO: 499895 - DNA, 445 bp, Homo sapiens
gatatgagttacatttgaatgcttaaacaagtggactctgaacagcaagttcttcaaccttagggaaactttaattgccttagatcgttctatgtgtttgtttgttgttaatggatcgaacagtattcaccagcaaagtgagaaggctgcccttactctggtcaccgtggcatgactgatgcatgatttctaagctgtgctgggctaagcagacgtgcaattgaacaggattccaggaacccactgactgagacttaccaaatagaagaactttacattggaatcatcctcatatgcttcactgtttagggagtaatgcacagtaacaaccttctgktgattacattcaagctgctttggttctggaacaatcttcaggaagctgttcgttcgggagtaaaagcgtgagactaagaagtgagcatccaagtactgaggcgtcaac

SEQ ID NO: 499896 - DNA, 445 bp, Homo sapiens
gatatgagttacatttgaatgcttaaacaagtggactctgaacagcaagttcttcaaccttagggaaactttaattgccttagatcgttctatgtgtttgtttgttgttaatggatcgaacagtattcaccagcaaagtgagaaggctgcccttactctggtcaccgtggcatgactgatgcatgatttctaagctgtgctgggctaagcagacgtgcaattgaacaggattccaggaacccactgactgagacttaccaaatagaagaactttacattggaatcatcctcatatgcttcactgtttagggagtaatgcacagtaacaaccttctggtgattacattcaagctgctttggttctggaacaatcttcaggaagctgttsgttcgggagtaaaagcgtgagactaagaagtgagcatccaagtactgaggcgtcaac

SEQ ID NO: 499897 - DNA, 415 bp, Homo sapiens
agatcttgttcctgaaaatccagtatgacctctgccacagccaactccccagctttcagaagatggctcaaagacgcgtgggtatgagcagcttctctgttaaatgccattcccttgtttttttcaaaagatcatagattacggccggacactttgggaggccaaggcgggtggatcatgaggtcaggagttcgaggccagcctggccaactggtgaaaccccatctctactaaaaatacaaaaatcagccagtcgtggtggcacacacctgtaatcttagttcctcaggaggctgaggcaggagaattgcttgaacctcagaggcggaggttgcaatgagckgagattgtaccactgcactccagcctggcgacagagtgagactctctcaggaaaaaaaaaaaaaaaaagatc

SEQ ID NO: 499898 - DNA, 574 bp, Homo sapiens
cctggagaggggtatgtgggttccgcaggcacccagtatggcaggacatggctggcattagacctgagggcaccctgatttgtcccttggtcctgccttctgttttccaggcctgactgtcatcctgggagagaagagggcgagcacactctcctccctcatgaaaaagagggagaaaggcaaggcatggaggggtgtgggtggaaagcgagtggcagggctgttttcacatccttgctgggaacgcgtggcaggagactgtctgactgggacgtggcccctgtctgagccaggcctgcctgtgcatgctgcctccctgacttcagcctctattgtctgtgaaaggcacacacttgtacacatgtgcagaggggacrtcccctgttggtcctaatttttaccctcattaatatgatcatcatggcatctatattcccatttccccagccctccgtggtgccctgccaggcagcctggtccatgtccctgttctgctgcctgaggtggatcccagcaaacaggttctgagggatgggggctctcctttgtttgccttgtagaagtagcagcagca

SEQ ID NO: 499899 - DNA, 615 bp, Homo sapiens
ctggagaggggtatgtgggttccgcaggcacccagtatggcaggacatggctggcattagacctgagggcaccctgatttgtcccttggtcctgccttctgttttccaggcctgactgtcatcctgggagagaagagggcgagcacactctcctccctcatgaaaaagagggagaaaggcaaggcatggaggggtgtgggtggaaagcgagtggcagggctgttttcacatccttgctgggaacgcgtggcaggagactgtctgactgggacgtggcccctgtctgagccaggcctgcctgtgcatgctgcctccctgacttcagcctctattgtctgtgaaaggcacacacttgtacacatgtgcagaggggacgtcccctgttggtcctaatttttaccctcattaatatgatcatcatggcatctatattcccatttccccagccctccgtggtgccctgccaggcagcctggtccatgtcccygttctgctgcctgaggtggatcccagcaaacaggttctgagggatgggggctctcctttgtttgccttgtagaagtagcagcagcagtgacttctgaacatctctttgggggctctgctgggctttca

SEQ ID NO: 499900 - DNA, 390 bp, Homo sapiens
gcccttgtggtgcttgcattctaatgggggagacaaacaatacgtataatacaatcaaacgaaatrcgcaaacataataatgaacataatgggtaagcaaagtctaggaaattaagaggctataagtgctatggaaaatataaaatgaagagaagggcaggaggatatagaacactctgggaggtgagaagactggaaagctaaacacaaggcttaggattgatatcattgaggcaacgacatttgggcaaagtcttgacggaggttatggagttggccacatagacatctaaggaaaatctaggcctggcagtgagatcagctagaaaaaaacaaggcccataaagttaaagtgtgtcttgtgtgttcaagaaacaacaattaagttag

SEQ ID NO: 499901 - DNA, 429 bp, Homo sapiens
attaaaatgtaagctccatgagkgcagggagcttctctatctcttttactgctgtacctccactcttataataatgtctggcacttaatagacactcaataaatatttcaccctgtgactttcatacctcctgacattctaccaatgatctcagtttgtgataatataattatcaacttagttagctttgaatttctctagcaagattataaaaggtagtaaacaggggtgaagggagaaggattgacgaacaaagtgtctggagagtggagattagagaaatggagatagatggagtagcatgaaagagatccctaagacaggtggagaagctggtcaatggccaccaacaagtaatagcctcacatggccactgagccgctctagtatcttgactatctagttaggttctagcaatcatttcttcca

SEQ ID NO: 499902 - DNA, 650 bp, Homo sapiens
tatatgacatttttctttggctactttgttttatcattgtacaacttttctctctaggtcaagctcattgtgtgataacccctcatttctggatagtctttcattgtatagacacatatcgtcctgggtagttctcgatttttgttttyagaaacatgcatcaaaagtgtcccccgtttattcccccacaacacacaaaattccaataatcctttcattgctaaatgttgccttcaaatcatttacatgattaggaaaaaaaataatgagaaatctgtgtgcactgttacaaccaaggcatgcagtagaaacagttctggtagagggaagtaatactgactaaaatttatgttaacatcagtgacagatgtggctggtccttttctgggagcagacagtagcagacagtactagaaaagtactttaaagaagtctggggtgggagggatttacaagaagatgaggttgaagacctcaaaggcaaaggtcttgcttaattttcatttttgttgagaacaaacatcagcagactccagtggactattcactcaataaccaatccctcctgaacacagagctttccttacagtaaaaggccacatgccaggaaaaggagctacaaacacccaaaacaaaccatggacttaatc

SEQ ID NO: 499903 - DNA, 599 bp, Homo sapiens
tctgggagcagacagtagcagacagtactagaaaagtactttaaagaagtctggggtgggagggatttacaagaagatgaggttgaagacctcaaaggcaaaggtcttgcttaattttcatttttgttgagaacaaacatcagcagactccagtggactattcactcaataaccaatccctcctgaacacagagctttccttacagtaaaaggccacatgccaggaaaaggagctacaaacacccaaaacaaaccatggacttaatctgaacgtgtgttgcaacacataagtcacactgcagattcctttccttcagtagaaattaaaatgcatgcagcctaagaayatcagggggacatatgctgttcaagaaaccagaagataccaatcctctaaacttggaaaaacaaaaaaataaaatacagaaaaaaagcctttttttctctatgaatatgagaagtgattttaaaatatgcattgtcagggtccatattacagacgtcacaaagtcaaaaagagagttaagtgtttgtgtagctcattttctttatgcacagacctacgaaatggtattagagctgccctgaacaaaacagca

SEQ ID NO: 499904 - DNA, 636 bp, Homo sapiens
tgttatgtttagatgaaagtgtaatcatctggggtgtttaattaaaatacagattcctgcatgtcagagggaatccaaatttctgagggtgcatctcaggaaagcacatcttttartaagccctctatgtgattattaggtactctataaagtctgagatataatattttagatagttcatgagtgttatattgttaaagaaaacaaacaaaacaaaaatgtcttaaaagatatacaacgttgtatttgattgaagggctacatactaggtgctcttgatttagagtaacttgaggggggtgagggataaaagatgacaaattgggtacagtgtatactacttgggtgatgggtgcaccaaaatctcacaaatcaccactaaagaacttactcatgtaaccaaacaccccctgttccccaataacctatggaaattaaaaacaaaaaagataagaaaagttaagtgtattgagtgcacagaatactgttgattgtctctttcaattgccattccaatattctcctagcatatccctctaaactatcatggctggaaagctaaaaactccatttatcagacgccctttaagttatccagggttgtagatgggacttcggttctgccaattaggcgtg

SEQ ID NO: 499905 - DNA, 504 bp, Homo sapiens
accctgcctgccttagagaaataaagtttaattgcgatctgtagttaggccattgtcctatcacctctattttttwaaaaaaacaattactttagtgaatgaatatttaataattacaagaattgttgactcaaggttaagtattgcaaggggagacgcttcatttggaatggtttgttactgtgtctttagaaattaagattgaaagagaagcgatagattattaaactacaggtcgccaacacagcaaggctttgaaagttgtacttttttgaacggaaagataatgcaaccacaataataatagctaacatcattatgtgatgcacttattcatgtgccaggtgccagactaagaacttcgcatagattatctcattaaattctttcatcaaatctattagtgtagatcttattattttattcccattttatggacgatgaaatacaaggttaattttcttgaccaaccatatctagtaaatggcagagctctaatttaaa

SEQ ID NO: 499906 - DNA, 643 bp, Homo sapiens
ggctgtatagatgaaattccttttctgctccacagttaatgcagctctgtggctttgttctgtaagctaggccrgatggagtgtgtgtgcagagaaatctcttgaaacaaaatgtggtcgcttttgcaaccgttttgccccaaagcacatttataagcaagtaaattccagtttgttcctttcaaattcttgtttccgtgagccaagcacaaaactctggaagactcgattattttaaagttatttgaatatcatttgctgacactgtgcaagaattttcctgggctaaatagttcaggttcattcggattaaggactttcattagcagttaagtaaagccttttctgtctttgaccctgtaattaagaggctgtgactccggactggcatctgagaaacctatacaaatgttaatagagagccccaaaattactctcagttctctggagagtgatttcaaacaagatacttctttgtttatggtccctaggcttgagtcagatcccccttagaccacaatttgacaaaatacattctgttagaaacggttgcagtttttgaaagtggagacagagaggtcatcctaagaggtaacatggtcactcgggcatgtctttgcagtggggaaagggggatcaagtg

SEQ ID NO: 499907 - DNA, 529 bp, Homo sapiens
accagtgccccagccatggcccagggtaaccaaattccttactgttctgggggacagaaatgccaataacgcgaagttcagccaggtaaactatgctgattctcaaaccaacaatctctgggtggggttggaaactcagacctgggaagagcatcagcaagccctggggtttaagagcactcctgacctccagacctacctctttagccagtctagggcacttagggctcagcttaaggttctttatctttcgttccacactcccaggatcctcctgggacaaatgggaaaagaagataaagtttgatggctactagagtcaatggagttaaaggcaatgctgcccttggaactgttggaaataccaaagaacaattgcagatcaagagcagcagtgagtgtggagacayacactcacacttaccataatagaatagaaactagagggtttgtgttcacttatcagctccactacttcccaacttataacatttgcctactcaccaactagtaaatatctgctacatag

SEQ ID NO: 499908 - DNA, 211 bp, Homo sapiens
tatctctttttcctttgctgaattgcckgaataatttggtgctgtgtgaaaaaaaaaatgcaagtatagtgccctgtcatttttgttaaagaaaacagttttgaaagttaagcaaagtaaacattttgcaaagttaactgaagcaaaatcagtttatttctgatttccagaggcaagtaaatgatgacatgtgatggactcctcactaaac

SEQ ID NO: 499909 - DNA, 479 bp, Homo sapiens
tggctgcatctcaggccttactttagaccaagcttgtccaacccgcggcccatgggccggccacatgcggcccaggacggctttgaatgtggcccagcacaaatttgtaaactttcttaaaacattatgagrttttttttttgtaattttttttttttttagcccttcagctatcattagtgttagtgtattttatgtgtggcccaagacaattcttcttccagtgtggcctagggaagccagaagactggacacccctgccttagactttaagctcaatttttttcctacatggatcacatttcacattttcccagaatagcaaaattgtggactctggaattagatggtttgaattggaaactctttattcctatccacaagctgagtccttagtgcctcacttagcttatctgtcaagcggggataacctcactcttggacttttgtaaggcactcagaacaatgttcaatgaaga

SEQ ID NO: 499910 - DNA, 270 bp, Homo sapiens
tttctctcccctgacacatttctgctcagaacagatctctgacctttgaagttttagaccaatctgtgygctaataattcattaatgggttttagtttttcattcacatcttagtcacagactttctggaacagattgtttcttaaatcaaatttaggacatctacttaaagtacttttgaaatgcaaagatttttttttgtaaatagtgatttccaagtggaatcattttgtttctattatgacactgacaggttattaaaatctatac

SEQ ID NO: 499911 - DNA, 640 bp, Homo sapiens
tgctatcaatcaacttatgcaggctgttcctcctgaagagtgatataatggcttctaatgttcctcctgaagagtgatataatggcttctaagtattggacaaaacttctacttttgagcattgtgaggtttttcaactggcaaaacaaatcaaagttaaataactttcccatcyatacctaggctctaggctctagaggaggagtgccaatggagctttgagaaacaaggtaggaggagagaaaattagaaccccagattgtctatggagtaaggacttagggtgagataggccaaaggcccctgaaaagttctaaaccctgaaaaggtttggggagcattaaaaagttagttaaacgtatacattctagttaatgagtgagaacatggctagaccaagtgggatgtgaaaatggcctgggacagctatgggaaagggaaaatggtaaaataattgttgaacttgaaaaaagaagcaacagcaaacattaagtgataagaatagtaaacaaacaaatagccagtatctttgtttctttaattttaaaatggaaagtgaagtcagccaaactatgtgctgggcttctcagagaggctctttgtgtaagaaatgaaaaaatgccaaaacaagatttttaat

SEQ ID NO: 499912 - DNA, 489 bp, Homo sapiens
cagattttaaactggaaaagaagagaactgaaaggcaggtgagggaaaagggaaaggtactatgatcaatrgactagaagtccagataaggtcaaagtcttattgaagttgaacattacagggaaaagacaatagatgagagagtgaaatggagataatgaaggagtagcaattattgatcctaagaaataagattacaatgtggtgataggaatgggtggctgaaggaggataagggacaaaatccttgaaggaatggaatttaaagtgactgaaagataaggctattggaaaaatcatatttgaatataaagatattaccaagaattaatacagaagatgggtttgagagaatgactctgaactatgaaatgaagatttttgattgatatttttgttcaatgggctaacgatacaaatacaataggccaagacaaatgtgttggcaaagacatagccaaacacattttgacaagatactctcaattt

SEQ ID NO: 499913 - DNA, 275 bp, Homo sapiens
ggacccttttaataagagaacaatgaaacgacttcattaagcattttattaagactttaaaagagagtaaacccaatttcttattctataataacttggttttaaagttatctagacctcgaatggccaaaaggtttttgtttttgtttttgtttttgttttgagattgagcctagctctgtcrcccaggctggagtgcagtggcgtgatctcaggtcactgcaagctctgcctcctgggttcacgccattctcctgcctcagcctcccaagcag

SEQ ID NO: 499914 - DNA, 474 bp, Homo sapiens
gctatttcactgttgtaatacagtaagtattttgttgactttggttttatttacatcagtattatttaattcagtgaacacttattgagtattatttaattcagtgaacacttactgagtatgtatgaatatacatactcaataagatgtggaatggccatcttagmgactgtaaataattacagtgccataactacaataataaaaacatgtatgagatgcagacaagagagagtgcttgccacccatttgtttctagaaaattcacctaggctaaagcatctactgcaagtccacattgaaaatgttagggcctcatcttgatgtttgaagctgataattttgggtgtcaccagtagttttagcccaactccacttttatttactccagcttgaatttttgaaagtttaagactttaagccatgtaaagtgagacaatttatcattttcctgcactaatttttaaaaaatca

SEQ ID NO: 499915 - DNA, 546 bp, Homo sapiens
tgcaccacagcctacttttctttggtgtgtgacatggtttggctctgtgtccccacccaaatctcaccttgaattgtagcccccgtaatccccatgtatcaaggaggtaattggatcatgggggcggtttcccccatgctgttctcatgataatgagtgaatctcacgagatctgatggttttatatgtgtctggcattactcctgcttgcactcactctctgttgccaccctgtgaaaaaggtgcctacttctcctttgccttccaccatgattgtaagtttcctgaggcctccccascaatgcagaactgtgagtcaattaaacctctttcctttttaaattacccagtctcgggtatttcttcatagttgtgtgagaacagattaatacagtgggaatatattagacattgtattagtgtgaaaaattactagtgtgattagaatgaaatgaaaaattactattcctttccttaactgtgggagaaaaccaacagaagttaagaaaaacaggtagatttaaaatctgctttcaatggtatatt

SEQ ID NO: 499916 - DNA, 498 bp, Homo sapiens
cccccacatggctttctagctcacagcagatctagccttctctgagcagtgaagatgggatgttttatggtcattttccctggtgtggagagcccaagtggagttcttcagcacaccctacaccatcccctcactaacacccccacctgtccagtcttacctgccttcatatcaaaagcactcagttaacccagagggcttcagccctgccctgcctgactttctaggaaacccctctctccacccaccctaatcagacactgtctgaaggttccccctcatcattttaaaaggaagagaaatttttctgacacagaggttctggtgaagtggcyagctcccacatcacagggtgatggtggtttggactggaccaggatcagacagtgctgtcctggggctggccatctgataaggggctccagaaagggcagtgatggacccctgggaggcttctgctctcctgatcacaggtttttggtgagaggacctattggc

SEQ ID NO: 499917 - DNA, 669 bp, Homo sapiens
ggaaacttccatgctttcacataataaaaatacaaaggtaatggatcaaatgtcaagtcaaattctgtaagccaaaatatgtttgattagttttaaaacatgtattattatattataataatatgtattattagttttataaaaaacccacacgttatcactattgtttaacatttacaaggacctttttacatattaaaaatttcttattatgaaaagtttgatgcatactaaatatatgttatatatgtaagttaccaggtaaacattacaattaatactggtgaacccatcacccaacttaagaactaaaacatgacaagtaagtagctctatatctgcaggctctgtgactatcctgttctcctgccttccttccaaagctggccattagcctgaattttgtttttagcattcctttactgttaagaataaacttttatcacacacctgtttccttaaacaatgtgttgtttagagtctcttgttattcaagtttacaaatattatatattctgcrtactcttctgcaactagttctcttcattcagtatttctaagatttagttatgtgtatgttactaaacataattatggcttattttttaaaagatacgtgacattctactgggtaaatcaccacaatttattaatccatgctcctgaaat

SEQ ID NO: 499918 - DNA, 562 bp, Homo sapiens
tgcttcacagacccttctgctcatggttcagcaaagaaagcaagtctcatggtcaaggctgacctcaaacaggcaaacctatgaggaagtaaaccgaaccagaactatgttgtgtcactgattacaatagtcttcctaggcactaagtattcagtccactctctttcctgttggaaatatgcactcctggaaggagaaaacccaaaagtcccatgtggtaagggcatcaagctcaaaaagaaggatctttggtaatacactgtagtccttacctcagggagcaatgtgcttcatgtgaggatgggagtcctcttgaaccrgaaacctctgaacaaaaagggcaagttatctgccccacatacatccaatacatactggggatacatgttcaggataacctccatataactcttcccatttagaaaggagaagaaggggagacacagcagtgctggtctgtagtaactgaaatctcagcaagtagaaattttaacgatcctctatcccaaagggaaagaaaggtttcttgattagaccttggagaacactccccagtccattg

SEQ ID NO: 499919 - DNA, 547 bp, Homo sapiens
caaatttccttgcctttcttctcagcttaaaaggcatcattgtgccctatggtatttttaaaaagatttaaatttaaaaaatttaaattttaaatccaacatttttagtttggtcccaacaattcttcatgatctgttctttgcctctttttcatatgtgcctgacacgatagccatggtgagctacttgggcctaccatatagtttcattcctctgggcctttacacatgctgcttgcctgggcatgcctgcagcagactagaggcccacaggcactgggacaatggggtggagccaccaggaattcacaccttatgcaggggaggaasctggcctcttcagcttcagtatggtggccctggtattcaatgggggaggtggaaatctgctctcaggaccccctctcttcactgagaagtttctttttgcttaataaattctgctgtcctcatccttcaatgtgttcatgtgcctaattcttcctggtcatgagacgagaacccacattagctgagctacaggagcaaaaaatcctgcatcatcacc

SEQ ID NO: 499920 - DNA, 571 bp, Homo sapiens
ggagagtaagacagacaaggaccctgactcacatagcttacaacttaacagtggacataaatattaaacagacaactacatccataacccagcacatagaattattgtgacaaatcctgtcataataaattttcctagtacgcactaaccttgtccaggagtgtcagggaagacctcctcagagagggcatacttgggatgagctctgagggatgagtaggcattaccagataaagaggccctagagacrggaaaaagcagggctcttaagtaaagggatgccaaggtggctagaactgagtgtacaaggtcctccctacctcacaggtgttcaaagattaaatgaggtaattggtggtatacacaagtgacactttgagaaccacttaaggtcctaaatgcctgttgaccaagttgaatttcccacaatactcagctttaggccctgcacagaataacctctccataattatttgataatattttatatttttagggtgagaaaaggactttgaaaatctccatcctctcatttaacaggggaggaacttaggaccaaaaaagaagtagc

SEQ ID NO: 499921 - DNA, 595 bp, Homo sapiens
aggaagttcagagacgagagcgggccttaaacagacaggtggacgtggccgtggaaatgatagctgtactgaggcaacgcctgacggaatctgaggaggagcttcttaggaaagaagagtaagtgttgctgacaggggatgctaaccccattgctttaagcagcaccccaatcsccttacaagcaaatgctaagcaaggttgatttttgctatttgcaggtgccttgactgcatttcttattgatatagttgaaccaggaggaacaaggctttgatatcatttaccctctgtgtgcacggtctgcaacctagcagcattaaagtcaaatatctaattccttctcaactgggaatttgtaaaccacagactatgcttttagagagaagactagcacagcctagccatggtgggatccattcctagcaccaaatggcgtgcaagggtgagttgaatgggaaggcagaaagggtgagctaagtgagctgttcattcttgacagtctccgtattataaagtcaatgcaagatgctgtcttaagttcaaaaacattcctccagtataaataagtttggtttatttgccattttgtattat

SEQ ID NO: 499922 - DNA, 589 bp, Homo sapiens
cgggccttaaacagacaggtggacgtggccgtggaaatgatagctgtactgaggcaacgcctgacggaatctgaggaggagcttcttaggaaagaagagtaagtgttgctgacaggggatgctaaccccattgctttaagcagcaccccaatcgccttacaagcaaatgctaagcaaggttgatttttgctatttgcaggtgccttgactgcatttcttattgatatagttgaaccaggaggaacaaggctttgatatcatttaccctctgtgtgcayggtctgcaacctagcagcattaaagtcaaatatctaattccttctcaactgggaatttgtaaaccacagactatgcttttagagagaagactagcacagcctagccatggtgggatccattcctagcaccaaatggcgtgcaagggtgagttgaatgggaaggcagaaagggtgagctaagtgagctgttcattcttgacagtctccgtattataaagtcaatgcaagatgctgtcttaagttcaaaaacattcctccagtataaataagtttggtttatttgccattttgtattatctgcccaggttaat

SEQ ID NO: 499923 - DNA, 595 bp, Homo sapiens
aggaagttcagagacgagagcgggccttaaacagacaggtggacgtggccgtggaaatgatagctgtactgaggcaacgcctgacggaatctgaggaggagcttcttaggaaagaagagtaagtgttgctgacaggggatgctaaccccattgctttaagcagcaccccaatcgccttacaagcaaatgctaagcaaggttgatttttgctatttgcaggtgccttgactgcatttcttattgatatagttgaaccaggaggaacaaggctttgatatcatttaccctctgtgtgcacggtctgcaacctagcagcattaaagtcaaatatctaattccttctcaactgggaatttgtaaaccacagactatgcttttagagagaagactagcacagcctagccatggtgggatccattcctagcaccaaatggcgtgcaagggtgagttgaatgggaaggcagaaagggtgagctaagtgagctgttcmttcttgacagtctccgtattataaagtcaatgcaagatgctgtcttaagttcaaaaacattcctccagtataaataagtttggtttatttgccattttgtattat

SEQ ID NO: 499924 - DNA, 495 bp, Homo sapiens
cacagtttcaagttggtaatacattagagaacagatttttatgtgtggagaggccacactgaggaaatgaggaggaaaggcagaatttgcattgatggccagaagagagtgaccttgaaggggcggcagggagggctgctagagatggcccctgagtagaccaggtgatttctgatttgagaaccagaaggttgcccctgtttcctgctggataacacactcattttatacatgcagaaaataaggcctagagcaggggaatgacttgcccaaggatagagatttagtagcaacgctgaacctggaatccaatttccctgtctctctgctgagtgttttttccattagttcactgtgtcccagccagactcctgaaaatgtgatttttttttyccccaaagcgtcaagacttatgtaatactgagtgtggcccattttggatgggcttgcttctttgctattttgagagggctgccatggtgacatcatttattt

SEQ ID NO: 499925 - DNA, 572 bp, Homo sapiens
gcttgtcttaaaagcaatacatccaatggtttcccatctcatttgtaataaaaccagaagtctcacagtgacctgtgaggtcctacctrgctccctcctccatgtagacccccttgctgtacctcagacccatctgctgtccctggtttgctcttcctaaacacctgcatggcttcttccacaggtctctgttcaaatgtcaccccattcaaaaggtcgtttctaactttgctttttaaaatattattcactcctttccttcctctgtcactgtccccttgcacccagtttcaattttcttagcacttatgaccatctgacatatatttatttgtttgttttatagtgactatcttcctctattaaaatacagtctgtaaatgtaatcacaaagaggtgattacctctctcgtcattgccatggagtactgcctagggtgttaactgacaaatagtaggcactcaataaatatgtgttgaatgagtgaattccttgccttatatttcccttttgtgttctgacatttttgccttgcagagaagttgtcacattcaaccatttcctggaagcg

SEQ ID NO: 499926 - DNA, 572 bp, Homo sapiens
gcttgtcttaaaagcaatacatccaatggtttcccatctcatttgtaataaaaccagaagtctcacagtgacctgtgaggtcctacctagctccctcctccatgtagacccccttgctgtacctcagacccatctgctgtccctggtttgctcttcctaaacacctgcatggcttcttccacaggtctctgttcaaatgtcaccccattcaaaaggtcgtttctaactttgctttttaaaatattattcactcctttccttcctctgtcactgtccccttgcacccagtttcaattttcttagcacttatgaccatctgacatatatttatttgtttgttttatagtgactatcttcctctattaaaatacagtctgtaaatgtaatcacaaagaggtgattacctctctcgtcattgccatggagtactgcctagggtgttaactgacaaatagtaggcactcaataaatatgtgttgaatgagtgaattccttgccttatatttccmttttgtgttctgacatttttgccttgcagagaagttgtcacattcaaccatttcctggaagcg

SEQ ID NO: 499927 - DNA, 283 bp, Homo sapiens
tttctctacctgcaaaactaaataaatactgytaaaaataaaagatgatctccaagatctctaaacattaaaattttacaataaactggttgaggtgacacatgcctatattttcagctactcaggagtttgagactggcctggacaacatagcaagaccctgtctctaaatttaaaaaacaaattacagtaagataatcttagaccagagaaaggaaagtgaaatagctatttggattataaactgttttagtaactcaaatgtaatgtgtggtggtgacaa

SEQ ID NO: 499928 - DNA, 550 bp, Homo sapiens
ttttctctacctgcaaaactaaataaatactgctaaaaataaaagatgatctccaagatctctaaacattaaaattttacaataaactggttgaggtgacacatgcctatattttcagctactcaggagtttgagactggcctggacaacatagcaagaccctgtctctaaatttaaaaaacaaattacartaagataatcttagaccagagaaaggaaagtgaaatagctatttggattataaactgttttagtaactcaaatgtaatgtgtggtggtgacaatatctttgattcctgggaaggtcattgtgaaagggaatagaaaatgccttgaagtcaaaatataaggctctcaaatagaaaaataaatataacatttaagtattgtcaacagagaaccaagttagaaaaaactagttatagtctgaaacaatgctgtttaaaagactgtagtcaccagtgtaaactgactcaggcaacacttcccagggtccatgccgtggacaactgactaatctctctataaatactaaaagataataaggttc

SEQ ID NO: 499929 - DNA, 550 bp, Homo sapiens
ttttctctacctgcaaaactaaataaatactgctaaaaataaaagatgatctccaagatctctaaacattaaaattttacaataaactggttgaggtgacacatgcctatattttcagctactcaggagtttgagactggcctggacaacatagcaagaccctgtctctaaatttaaaaaacaaattacagtaagataatcttagaccagagaaaggaaagtgaaatagctatttggattataaactgttttagtaactcaaatgtaatgtgtggtggtgacaatatctttgattcctgggaaggtcattgtgaaagggaatagaaaatgccttgaagtcaaaatataaggctctcaaatagaaaaataaatataacatttaagtattrtcaacagagaaccaagttagaaaaaactagttatagtctgaaacaatgctgtttaaaagactgtagtcaccagtgtaaactgactcaggcaacacttcccagggtccatgccgtggacaactgactaatctctctataaatactaaaagataataaggttc

SEQ ID NO: 499930 - DNA, 540 bp, Homo sapiens
ctgacttactctggacaccacctgaacttatagcttccttctgtcagaaagtcagtatgcctcaggccattctaaaggtccttccagcaccttacctgtcatgtgcattctcttcttccctctgctgtgcagtgtggtcaccctgatatcttggttctgttgattacctcttctctgataaatcaatccatgaagataaattggctggttctatcccccttctcagtccgtgtatgtgactttttagagatcttcttgcctctttggggtaactcaaaggattgactccaataggtggtattttaggacagggcaggattttgagcactgtgatatctcttaaacttcactgttgaaaaagcaatatatacacagaactagccctactcaaagagttatttgagcccatgaattcatatttacaygacttctcagagagattccacatattcaagcaacaatcatttagagagaaaacaaaatcagcttattaataaataataaaattgtttataatcaataataataatcatgaaagtg

SEQ ID NO: 499931 - DNA, 632 bp, Homo sapiens
tactctggacaccacctgaacttatagcttccttctgtcagaaagtcagtatgcctcaggccattctaaaggtccttccagcaccttacctgtcatgtgcattctcttcttccctctgctgtgcagtgtggtcaccctgatatcttggttctgttgattacctcttctctgataaatcaatccatgaagataaattggctggttctatcccccttctcagtccgtgtatgtgactttttagagatcttcttgcctctttggggtaactcaaaggattgactccaataggtggtattttaggacagggcaggattttgagcactgtgatatctcttaaacttcactgttgaaaaagcaatatatacacagaactagccctactcaaagagttatttgagcccatgaattcatatttacacgacttctcagagagattccacatattcaagcaacaatcatttagagaraaaacaaaatcagcttattaataaataataaaattgtttataatcaataataataatcatgaaagtgtctgaatttcctgatataaagaatacactaaaaaccctctttttacaaaaattatattgtggctttgtgttaattgaagtctctttcacattgtgaaa

SEQ ID NO: 499932 - DNA, 462 bp, Homo sapiens
gacattttttccaaataattttttctctcattttcttgatggagagggtcttgattttccagagccctaattgtcagtgtagtttgactttggataatccagcactaaatgtgagaatttaatgctatattattataaaacgctaagtgtgctgggcatagaggtgcattcttgtagtagtcccagctgtttggggggctgagatgggaggatcgcttaagcctaggagttcaaggccaacctgggcaatatagggagaccctatctccaaacaaaacacacacacacaaacaaataattgtgccctgtgttcacccactcactccccattaaatttgtrtattatagggataggagatttcctgagctggttgccaggaaagagatttggaacaggtgcaactctttaacatactgaaaaacaatataagactgtgatctggatgtcagggccaggggagg

SEQ ID NO: 499933 - DNA, 597 bp, Homo sapiens
agcccaggagtactagacctgtctggacaacatgatgagacaataaataaataaataaataaataagaattacaaaaaaatgaaaagacaaatccaatgcaaggtacaaatccaaaatttttatcatagattcacaatccatataaaattaatccatccaattgctttgaaagtttctaagcacttactctcatcttctgtacttaactcgtcacggatgagtatcaaacagctcacagtccccatctatggaccatggaccacacttggaattgtgctggtccacaacatggcaccactctgtcttaaaaatctgacttcccataatttcccctgcttcagaaaagcagaattrttctcaactaatacttcacagaaagaacttgacaaaacttaatagcaggtgttatctgaaacaaaggagaatggggaggggattctgtggtggcccctactagaatgtgggaaatgttgaaggcacagatttttacctgaatctccactgcctggaactgtgcgtggtacatagtcatagctcaataatagtttctgaatgaatgaaataaacttgggaagcacagaatttaacaaagccaa

SEQ ID NO: 499934 - DNA, 370 bp, Homo sapiens
gtattcattgttatctggacaatctcttgtcagttagagaatattttcacagsaagttagaagcgatttcagaaattcccctctgcagtttctcagagtggatgttaggcctcatcaaaaagacatttggttcagagattgaaagtgggcagcctataaattgctgaggtatttagctgggcttagcagttttcctttgaggaggaaaccatgatcctgagtgctcactgagtacagcagggaagtgcctaagttcacgcagcctctggcttcaaaaaatcccagccttatcatgtgctcctgagccaaggagcataacctctccaagccttaattcccttcacctgcaaaatgagagcaacactagtac

SEQ ID NO: 499935 - DNA, 370 bp, Homo sapiens
gtattcattgttatctggacaatctcttgtcagttagagaatattttcacaggaagttagaagcgatttcagaaattcccctctgcagtttctcagagtggatkttaggcctcatcaaaaagacatttggttcagagattgaaagtgggcagcctataaattgctgaggtatttagctgggcttagcagttttcctttgaggaggaaaccatgatcctgagtgctcactgagtacagcagggaagtgcctaagttcacgcagcctctggcttcaaaaaatcccagccttatcatgtgctcctgagccaaggagcataacctctccaagccttaattcccttcacctgcaaaatgagagcaacactagtac

SEQ ID NO: 499936 - DNA, 561 bp, Homo sapiens
ggctgcagaccctaggctcatctcctaggacctctcaccctttcactgcccctacccctaatcatctgctgtggatcatgagaagccattgaattgaaatgacactgcatatatttcaattctcagagacagcagggtcctctttctgctccttttggagaaaggctagttccaactgcccatgaactagctgctcttccacattgatccactagatgtcctcatagatctactttgtattaccattgacatcctggggaaaaccttgtctgagaattgggatttgggaagggaacaatgggtgactaygtaagaaagaaaattagcaaacaccaaaggagagaggatgctttgtgtggccagggagtagataagaaacttacttctgtttgaaataaatcctgaaattttcaaagttgcactttgagacctaaccttgggaatttaaagtggaactcttcatatctaaaattaaccttctaacctaaatcagctctagaaaaggaaacagtcactgagaaatggaaacaaaacaccagtggttctgaatatccatgattc

SEQ ID NO: 499937 - DNA, 530 bp, Homo sapiens
gacagtgcatagatgggcatctgcacaccatagagcatgggctatcttctgggaagggagctgactgcttgcattaaaatgatcttcattttggccaatgtcagctttctgggctggagcctgttggatcacactcagtcaagaaaggacccaggggctgccttccctccctccaaggtcaaaaatgtagcatgctgacatccttggctgggcttcctatattggcaagartacttgaataggaaatggcctgaaggattccagttcagtaaatatttcatgagtaaaagaatgaataaatgaagggcttcccaacccttaaaggaattggtgatgtgctagaagccagatcgccctagatccatgaagcttcccaaaactttctaagcagcaacttactatatagtatatatatgtaaacataaaaaactgggatgtacaagaagagtaagagggaaaaatgtagtaagaaagaacaaggacatgactgaaggaactagaaaatgatcaaatggcaggtgcaattgata

SEQ ID NO: 499938 - DNA, 471 bp, Homo sapiens
ctgttagaatccttaggtcctgggatcattagaaaactgtgacttcaggtctcatcattcctcatccccctgaaaccccttctttatggcttgtccatccctaaaataggtctggagatcgtcagcaaattcaawgtgtttttgggagagggagggaaagttggaacacaaaaagaggagaacagatggggaaagaagacattcctgtcctttcaaattccatcaaaatttcttttttgatgatggtcttgatctcaactcatctttttctgttgttattgttgttttttgagatgggacctccttctgtcacccaggctggagtgcagtggtgtgatcatagttcactgcagccttgaacttttaggttcaagcaatcctctcacctcagcctcccaagtagccaagactacaggcgtgcaccaccatgtctggccatatctttgaggtccagttggtgttgagacttca

SEQ ID NO: 499939 - DNA, 650 bp, Homo sapiens
ttcacagtttcctttgcagatgcaatcagagtcacctatcacattcctgtttctgctttttattgtgttcctttgctatcgcgtttgtgtgatcttttcctgaaaaatgacaggtagtgtttctctgctcactgtatcagtgacatattttccacracttctctattgctattttaaaaatataacattttatagatgtaatcttagttgtttgtaactaggttttgttataggagcaaatttcctaaatggcatgttggtttaggtacattttttaaagaaagggaaaaatattttctgcaaaatagtttcctctaaattgtaagtgaaggaaaagctctgttagtaagattataatgcattttcctgatttcttagtacatcgaaattcatgaacattatttttatgtaagtgattaagttgtggcttttaataacacgttgttagagcaaaaagagctatcccttttgatttacttgtgtatttactgggtgacttacagtgctttacatattagaattggtttgtcaacaattaacattctaggtttttatataacccatacttcaggtaatataggattattaaactacaaccagtgtgttagaaatctgcctactggtaatacaattcttacgtataacagcag

SEQ ID NO: 499940 - DNA, 536 bp, Homo sapiens
tagaatcagagagaagtaaaggaagtcttgtaatcccatggaccctctaagacacctcatgaaattctggataaggataggtcaactaccytatcctgcatgtcagtttggtttgcatcctatgcatgaggttagtgcccctgttgtctccatagtctatgctgtcatagaagtaatggggtctacaggcaaaagggacagaaacataaaataagttgtatggaatgactttgacacacatacttaaggatacagggcttggaacatttcagtgtattccttgtgcagagtgtgagccatttcattcaatacacctgctgtgaagatagcacacatgcctcaagctggcagataaatctagccagctattcagtgcatttttgtcttcacctattctctataggcaatagctcatgtgcagtcttaaaaactttacttcttttcttaaaagcaacaagagcgaaattccatctcaagaaaaaaataaagaaataaatggccctgaggccagatgcagtggctcatgcctgtaatcc

SEQ ID NO: 499941 - DNA, 536 bp, Homo sapiens
tagaatcagagagaagtaaaggaagtcttgtaatcccatggaccctctaagacacctcatgaaattctggataaggataggtcaactaccttatcctgcatgtcagtttggtttgcatcctatgcatgaggttagtgcccctgttgtctccatagtctatgctgtcatagaagtaatggggtctacaggcaaaagggacagaaacataaaataagttgtatggaaygactttgacacacatacttaaggatacagggcttggaacatttcagtgtattccttgtgcagagtgtgagccatttcattcaatacacctgctgtgaagatagcacacatgcctcaagctggcagataaatctagccagctattcagtgcatttttgtcttcacctattctctataggcaatagctcatgtgcagtcttaaaaactttacttcttttcttaaaagcaacaagagcgaaattccatctcaagaaaaaaataaagaaataaatggccctgaggccagatgcagtggctcatgcctgtaatcc

SEQ ID NO: 499942 - DNA, 536 bp, Homo sapiens
tagaatcagagagaagtaaaggaagtcttgtaatcccatggaccctctaagacacctcatgaaattctggataaggataggtcaactaccttatcctgcatgtcagtttggtttgcatcctatgcatgaggttagtgcccctgttgtctccatagtctatgctgtcatagaagtaatggggtctacaggcaaaagggacagaaacataaaataagttgtatggaatgactttgacacacatacttaaggatacagggcttggaacatttcagtgtattccttgtgcagagtgtgagccatttcattcaatacacctgctgtraagatagcacacatgcctcaagctggcagataaatctagccagctattcagtgcatttttgtcttcacctattctctataggcaatagctcatgtgcagtcttaaaaactttacttcttttcttaaaagcaacaagagcgaaattccatctcaagaaaaaaataaagaaataaatggccctgaggccagatgcagtggctcatgcctgtaatcc

SEQ ID NO: 499943 - DNA, 550 bp, Homo sapiens
ggttcatctgtaagggtctgacaggtctttgaacatccacttgatttggcagttaaggagactgaagttctgagatggaagtgatcaggccaaggttacaaagcaaaggggctttaaaagaacagggcccagagagagttttcaggcttcctagttctctgttatttcagcctcccaccatcttgtaagagctactcaatctcagagcagaggmcatttacataaagcacacatgggcagtgaagagcccaagaaacccacaatgccccatgcacataggggaagggaggagcagtcagagctggtttccaacacagagggaaagtggcacctgctgatgcccatccctgctcccaccagccttacccacttcagaaacgctgttccccctcttccctcccaacccagctcctgtcgtttctttacctcttccaggacgtctgccttgaataacttctcacatttagttactttatgaagatgttttcctctgcctttttttccatcccctttattcgttattttaaaatgtatgaattattactaaata

SEQ ID NO: 499944 - DNA, 562 bp, Homo sapiens
aatattttaaactattttaattggtatkcaatagttaaaatgcacgtggtacaaaattaaaaagatgcacaagtgcacactggaaagcaaggctcccgtcctccggccacaggcagctcctcagcggcctctggggcctgggcgtcaccctcacccttcattcactgtcaggtggactgagacccacctgcctctctgaaaggcaaacgtctccaaagaccagctcatctggggacaaaaatctacttgaactgacccaaggctgccgatggactttaccatcactctgtagagtttgctggtgcaggttttgctgcagaaatgttcatgagttctagatctgaagtgttatggaacaggcggcttctttcttttctaaaagctaagaaaatgccaaatgccaaaagacagctaataggtaaatgcatctcagcatctcaggcccatggggtctggagtgattcctaccttggctgtggagactccagaacagcagggccctggcggcgggtggcaaggctttaggactgacctgggctccagtcctgggtgtggcatttgc

SEQ ID NO: 499945 - DNA, 501 bp, Homo sapiens
ggacacaggcagacaaagggacagaggcgtggtggtgcaggaacacaggcatagtggtgcaggacagagggacacagatatggtgatgcagggacaaagagacacaggtgtggccatgcagaaacagagggacacaggygaacagagggacacaggcagacagagggacacaggcatggcagagcagggtgggggtgctattaaccccacacgtgggaccagagaacattctggggtgatgagatctggacctcagaggccaaccacagtttccctgccgaggacaagaagctgaggtcacccacaaccttccatcaccaaaggtcagtcatctgcagggcccatgccgagagggtggagtggcggtcaggcctcctttgtccctcttcagcttgccgtccccttgctggcagaggccgggaccggtgctgccaaggaggcagtgagaagccctggaccagagcctggcaggatggagagacggcaggtgacaggacagca

SEQ ID NO: 499946 - DNA, 511 bp, Homo sapiens
ggcacagaacagagggacacaggcagacaaagggacagaggcgtggtggtgcaggaacacaggcatagtggtgcaggacagagggacacagatatggtgatgcagggacaaagagacacaggtgtggccatgcagaaacagagggacacaggtgaacagagggacacaggcagacagagggacacaggcatggcagagcagggtgggggtgctattaaccccacrcgtgggaccagagaacattctggggtgatgagatctggacctcagaggccaaccacagtttccctgccgaggacaagaagctgaggtcacccacaaccttccatcaccaaaggtcagtcatctgcagggcccatgccgagagggtggagtggcggtcaggcctcctttgtccctcttcagcttgccgtccccttgctggcagaggccgggaccggtgctgccaaggaggcagtgagaagccctggaccagagcctggcaggatggagagacggcaggtgacaggac

SEQ ID NO: 499947 - DNA, 501 bp, Homo sapiens
ggacacaggcagacaaagggacagaggcgtggtggtgcaggaacacaggcatagtggtgcaggacagagggacacagatatggtgatgcagggacaaagagacacaggtgtggccatgcagaaacagagggacacaggtgaacagagggacacaggcagacagagggacacaggcatggcagagcagggtgggggtgctattaaccccacacrtgggaccagagaacattctggggtgatgagatctggacctcagaggccaaccacagtttccctgccgaggacaagaagctgaggtcacccacaaccttccatcaccaaaggtcagtcatctgcagggcccatgccgagagggtggagtggcggtcaggcctcctttgtccctcttcagcttgccgtccccttgctggcagaggccgggaccggtgctgccaaggaggcagtgagaagccctggaccagagcctggcaggatggagagacggcaggtgacaggacagca

SEQ ID NO: 499948 - DNA, 501 bp, Homo sapiens
ggacacaggcagacaaagggacagaggcgtggtggtgcaggaacacaggcatagtggtgcaggacagagggacacagatatggtgatgcagggacaaagagacacaggtgtggccatgcagaaacagagggacacaggtgaacagagggacacaggcagacagagggacacaggcatggcagagcagggtgggggtgctattaaccccacacgtgggaccagagaacattctggggtgatgagatctggacctcagaggccaaccacagtttccctgccgaggacaagaagctgaggtcacccacaaccttccatcaccaaaggtcagtcatctgcagggmccatgccgagagggtggagtggcggtcaggcctcctttgtccctcttcagcttgccgtccccttgctggcagaggccgggaccggtgctgccaaggaggcagtgagaagccctggaccagagcctggcaggatggagagacggcaggtgacaggacagca

SEQ ID NO: 499949 - DNA, 501 bp, Homo sapiens
ggacacaggcagacaaagggacagaggcgtggtggtgcaggaacacaggcatagtggtgcaggacagagggacacagatatggtgatgcagggacaaagagacacaggtgtggccatgcagaaacagagggacacaggtgaacagagggacacaggcagacagagggacacaggcatggcagagcagggtgggggtgctattaaccccacacgtgggaccagagaacattctggggtgatgagatctggacctcagaggccaaccacagtttccctgccgaggacaagaagctgaggtcacccacaaccttccatcaccaaaggtcagtcatctgcagggcccatgccgagagggtggagtggcggtcaggcctcctttgtccctcttcagcttgccgtccccttgctggcagaggccgggacyggtgctgccaaggaggcagtgagaagccctggaccagagcctggcaggatggagagacggcaggtgacaggacagca

SEQ ID NO: 499950 - DNA, 333 bp, Homo sapiens
cctaccgatggatagggtgcagcctggctccctgctgcagtgaggaagccccttgtgagctgcctctaacctgcacccagcactcagcccagagctgctgcatcaggcctggctcgcaggaggctggccttgctgccrctcgtccctgctctcctccaggtacttcccctgccgctccggcttgcgtgaagtctcatgtatatttcattgactgcgcttggcatgtaatgaaaaggtcgcctgcttccatctctgtgaccccgctagactgcacgtgcacccggtagcacttttctctccttgttcctggtattatgtctgacccagagtaaa

SEQ ID NO: 499951 - DNA, 481 bp, Homo sapiens
cctggctccagcccccttggctcagcagaggaggggctggctcagagcagaggggaagaagcaaaagctggtttgagggtgggagggaagctccctggttcccgctgggaggaaggggaggcagtccccatttgggccaagtggctcactggcgctgatgagataagctgtcagcaattcagctgccggccccaggctgaggctggaggggaggggacaccggcagcgaccagctggggcgccccaccatgaggaggttcaaaggggctgcccacgaggcaggggcatcctgcttctgctagctcccctactccatttagtggtggraaggggctatccatggggccaccttctgagtattgtctcagcaccgaaatcgagcatctgggcacctcagggggtgtcagaaagactccccacttctctttccaggagggaagtcagggtctggagtagcagctgggatccaagcccacctgaa

SEQ ID NO: 499952 - DNA, 167 bp, Homo sapiens
ttccatatgcagtttcaatcaattcaccagatttcaacaccactttttattattgatctctgtcatatctgccactgatcatgaaggcrctctggaattctttcaatttttttttttttttatgtatctgatctgttagtaaaactgtcttcccttttttgtacaga

SEQ ID NO: 499953 - DNA, 594 bp, Homo sapiens
tgggattataggcatgagctgttgtgcctggcagcatagaggatttttagggcagtgaaaatactctatgtgacactgtaatggtggatctgtgtcgttatatattggtctcaacccacacaatatacaacatcaactgtgaactttaatggaaactctgctctttgggtgattgtgatgtgtcagtgtatatggttatcaactgtaacaaattgcacctctggtagggggttttgttaagggtgaagctatgcctgtgtggggccagtgagggtatatggggaatctctttatacttgctgaattttctgtgaacctaatactcctctaaaaaataacgttagtttgaagaaaataaaaatacattttgacaaaytcattccttcccaggatttgcaaaagctgatatcacaaagggtgtctctgatgaggtaaggtccggaagcacttgtccctgcaattcctgttggagagcctttaagaacttctcagcagggctgtttgaaaagcttaaagctaagaaaggcctttgtctaaaagagcctggttgaaatccctgctcccagctccttgctgtgtgaccctgggcaagtc

SEQ ID NO: 499954 - DNA, 594 bp, Homo sapiens
tgggattataggcatgagctgttgtgcctggcagcatagaggatttttagggcagtgaaaatactctatgtgacactgtaatggtggatctgtgtcgttatatattggtctcaacccacacaatatacaacatcaactgtgaactttaatggaaactctgctctttgggtgattgtgatgtgtcagtgtatatggttatcaactgtaacaaattgcacctctggtagggggttttgttaagggtgaagctatgcctgtgtggggccagtgagggtatatggggaatctctttatacttgctgaattttctgtgaacctaatactcctctaaaaaataacgttagtttgaagaaaataaaaatacattttgacaaactcattccttcccaggatttgcaaaagctgatatcacaaagggtgtctctgatgaggtraggtccggaagcacttgtccctgcaattcctgttggagagcctttaagaacttctcagcagggctgtttgaaaagcttaaagctaagaaaggcctttgtctaaaagagcctggttgaaatccctgctcccagctccttgctgtgtgaccctgggcaagtc

SEQ ID NO: 499955 - DNA, 604 bp, Homo sapiens
gcgtacatgggatttgacctctcccatgcttcgtaggatggagacctctgattcactaagaataacgtgagcacttagatgctacccatacatctttttaaatagttcttcagtaaaggtgttgacttcttctttgggattcttcctaataagtttgcgatttatttagagattggggagttatcaatattgtgtaatatgatttatatatcagcgtagagagagccaaagtcccaaatcagcaggaacgtgaaagtctttttaaaatcacaaaattcttgaccacacaaaaaatcactctacagagatttgtgtcagggtttttgaagcaatcacttcacaacaaataagaaagacaaccagccagcaatgatgtggggttgaacacgatttgcagtaagccattsaaaaactccaaagcatgtctaatatttatctcaagtcctccttctctttgtccctccctttcttctcatgtccctccgttcgttttctttccttctctttctctttctttcttttccctttctctgtctctaacattttgcagcagaattattattatctgaattgacaattaagggatctgtcaatcagtggtttg

SEQ ID NO: 499956 - DNA, 567 bp, Homo sapiens
aatgctgggaaagggaggagatttgcggccatgtaatatgggtaggtgaatttcacttaatattgtggcagaatgctctatcayaacagatgctaaaggactacatttccttcctcagctctttcttttttctttctttctctgtttttgtctctctttctctctttctgtttcttttcactctttctttctttctctctttttttttgacataggatcttgctctgtttctcaggctggagtgcagtggcatgatcacagctcattgcagcctcaaacttctaggctccagcgatcctcccacctctgcctctcgagtaggtgggactacaggcacgtatcaccatgcccagcaattttatcttattttttgtagagacagggactccctatgttgcccaggctggtcttaaactcctggactcaacaaatcctccagcatcagcttcccaaagtgttgggattataggtgtgagccaacaggccctgcctaacttttttttcttaaccagttaagaaaaggcatgtgagtgaaagaaacgtaatagagtcacccatcttctgagg

SEQ ID NO: 499957 - DNA, 567 bp, Homo sapiens
aatgctgggaaagggaggagatttgcggccatgtaatatgggtaggtgaatttcacttaatattgtggcagaatgctctatcacaacagatgctaaaggactacatttccttcctcagctctttcttttttctttctttctctgtttttgtctctctttctctctttctgtttcytttcactctttctttctttctctctttttttttgacataggatcttgctctgtttctcaggctggagtgcagtggcatgatcacagctcattgcagcctcaaacttctaggctccagcgatcctcccacctctgcctctcgagtaggtgggactacaggcacgtatcaccatgcccagcaattttatcttattttttgtagagacagggactccctatgttgcccaggctggtcttaaactcctggactcaacaaatcctccagcatcagcttcccaaagtgttgggattataggtgtgagccaacaggccctgcctaacttttttttcttaaccagttaagaaaaggcatgtgagtgaaagaaacgtaatagagtcacccatcttctgagg

SEQ ID NO: 499958 - DNA, 567 bp, Homo sapiens
aatgctgggaaagggaggagatttgcggccatgtaatatgggtaggtgaatttcacttaatattgtggcagaatgctctatcacaacagatgctaaaggactacatttccttcctcagctctttcttttttctttctttctctgtttttgtctctctttctctctttctgtttcttttcactctttctttctttctctctttttttttgacataggatcttgctctgtttctcaggctggagtgcagtggcatgatcacagctcattgcagcctcaaacttctaggctccagcgatcctcccacctctgcctctcgagtaggtgggactacaggcacgtatcaccatgcccagcaattttatcttattttttgtagagacagggactccctatgttgcccaggctggtcttaaactcctggactcaacaaatcctccagcatcagcttcccaaagtgttgggattataggtgtgagccaacaggccctgcctaacttttttttcttaaccagttragaaaaggcatgtgagtgaaagaaacgtaatagagtcacccatcttctgagg

SEQ ID NO: 499959 - DNA, 590 bp, Homo sapiens
tgatgcatttttaactttcttatgtaaataaatatagtgaattaatataacaataaaagtrtactggtaagtttatgtaatcaaattggggtaactgagatacctatcatcttaaatattgtctttttttaatgcgaggaacactcaagttatttttttccagctactttgaaatgtacaattgatgaatgttaagtgtagacaccctactaatgtatcctgaaaatatgtacacgtatatcaaccaaaaaatctaaaaaaacaagtatactaagaaatactcagataagttttcctaaaaaaattacttaaaaatacgcattcaattttactcagttattgtgttaacagttgactatctagaactttggactaggagcagagggtatatagtacagtgtaggtttatcaaatattgttttagatttaaaagaaacgtgttccttttataggttttgaaaacaaagcccaatgaagttaaacagctagtggaaaataaacaagatgtggataattgtgtaaacaggacccaactctcctagcttcttatgtagtacatggtccctgctcatctgcagactcattggtga

SEQ ID NO: 499960 - DNA, 590 bp, Homo sapiens
tgatgcatttttaactttcttatgtaaataaatatagtgaattaatataacaataaaagtatactggtaagtttatgtaatcaaattggggtaactgagatacctatcatcttaaatattgtctttttttaatgcgaggaacactcaagttatttttttccagctactttgaaatgtacaattgatgaatgttaagtgtagacaccctactaatgtatcctgaaaatatgtacacgtatatcaaccaaaaaatctaaaaaaacaagtatactaagaaatactcagataagttttcctaaaaaaattacttaaaaatacgcattcaattttactcagttattgtgttaacagttgactatctagaactttggactaggagcagagggtatatagtacagtgtaggtttatcaaatattgttttagatttaaaagaaacgtgttccttttataggttttgaaaacaaagcccaatgaagttaaacagctagtggaaaataaacaagatrtggataattgtgtaaacaggacccaactctcctagcttcttatgtagtacatggtccctgctcatctgcagactcattggtga

SEQ ID NO: 499961 - DNA, 442 bp, Homo sapiens
agctgccttactctgcttggatccatagctccttctgctcacctcagggaatccactgggctctgcctgggttcccccttctttgtgctgcagcctgaaaactctgaaggcagtgagtttgggaaatcaaatagttcagatccttcatttccagtctctcaggattcatcatccttcattgttggatggcttgtgccttaaactgttgttttcatactgtttgcctttaagtgtttgcagttgttccagataaaagggtaaatctggtcccagtttctctagttaatgcctgtttcgatacaagtaaagagggaggttgaattgtagcttccctagctggtaaaatagtgaacaagaaagctaaagaaatatacctggtacaaaacaccaaaaaggtctgaaaagttytggaattattttttaacttttaaatggattgctg

SEQ ID NO: 499962 - DNA, 562 bp, Homo sapiens
ttacattttgacaaagagatgcctaatgcatagtcctgaacaagacaagctttgcagtatatgaataagggattcatatttggaagattactgaaaatcatttagtctgggctctcattttatagatcaggatactgactgaaattagaagctttctcctgaatattccatttgctagtggtaaaattgagcctgaaacccaggtcttttgaaggctagttttgtgaattcccattatgccgtaaggcttgactcwtttagctttttactaaattgagctgtgtttgcagcctcttgaaagtaaaaattcagaagtaaagcctatagttctctatagatcataggctcatggacaaagaaagatgatgtggagaggtaaagaggaaaagaacaaggaagttctgtctttaattacgggaaatttgcttgactagttcttagtgttttcaagaatgagaacccctttaatgacacagttaccacatattagtatttttactttcatatatttactttcatatatattccatgtcatgatagacatagaaactcacataatttt

SEQ ID NO: 499963 - DNA, 620 bp, Homo sapiens
ctgtcaaagtaagctcttcgtgtcagcacaatcacatccaggttatgcctttgtggaagagtaacctgcttctatttgctgaaagtaggcataccaatttatccaaacccaggcaactcgacccttcaaaataggcaatgttatctcacttatatctttgactataatttcaaggcaactcatttgaaatactaatttactttagatatgaaaaacgtattctttacatctgacaagataccacattttaacaccggccacaggtaagggaacgtagttataaatatagcatcaacttcttgaggaatgatacacatctatcatataattgaaataagatctattatgagrgaagttcttcacagtgagcacgtctccatcatgaaaatcatcctaattgctaataatacctacaacattttcattagttatacatataattatgaaagtatatgtattatagaattggatgtcagaaggatcagtattatcagctagagcaaaataaatataggaaagcatgctatagttaaaaagtaataaatttgtatccagatgaattggatttgagtctgagtacctccactgatggagtcaatttatcaccataaacatgtttc

SEQ ID NO: 499964 - DNA, 495 bp, Homo sapiens
aactgatattttaaagtatagtaactaggaaggggcaaaactgggattcacatccrcctaccacaatctaacaaccttgatttttccaccttccatactggtagcttcaatcttttttctccaagaaaaaagaccaggtttataggtacctgtattgtagcagaaacttttccagatggcaaatatatgcttattagtgatgaatcacctgcacacagatttgaggatcacaagtaattttcaacctcataagtggaagaagctgataacattggtatgttctctgctctggcgaagactgattcctaaatacaggcaaatagatgtaagattttgatggatctgtgtttgaggacttaagaacaatagaagcaactataagatcaaagcaactcctaatttaaattattgggcaataaaaagtcatgtatccgaagtttagcatcatcttcctcatatcagactctgttttgtcaatttaacatttattctttc

SEQ ID NO: 499965 - DNA, 638 bp, Homo sapiens
cacacacaccagtgggcattcctaatccattcttacaagacgtatggtggccattccatgttgttgttgttcttgttgttgttttgtggaagaaattgtcactttctttggtgtttataacacttctctcttctgtttctgtagattttgtgaaaaactcctcagtcctttagtaggttcagcctaytgctttattttgccattaaatattgtggtttatcaaatctcattgctagctacctgtattcctgcttcattcattcagcccaggttatctcaacatcatctctggtcttaattatatatattgcttcacacccaacctctatattggtatatcttgcttacttaacagttccaccttcatgtttcaaaaacagccctcgtagtatgcacaccttcacataacaccacacttttccagattttcattcatctgtgtacttaaaccagaaaccaaggaaacatctttgatatctcttgtttaccctttagattaaactcatcattaattcttttatatctaccttctaaatacattcccaaactttgcttcccctccaaattgacggtccccactctattgcaagctgtcaagacgcttctcacctaaactgccccaaccacatcctcgctag

SEQ ID NO: 499966 - DNA, 616 bp, Homo sapiens
agaacactttatgacaaccggtgagggaaacacaacaatcaagccaaataatgctgagaacagtacctctcgactggaatgtggatactcattagctgttctcagcaagccttcatggccatgactttatggtacccactgtggaagaatgtgaaatgtctaaaaacgttcccatagtaatctatgcccacagtgcagctatttttaaagtacgtaactgatccaactcagttctatattcagtgagacacacagattcctaggttggaaggatgaaaggatgaataaggccaaaaggaattgtgcctttctcaagctcagaacaaaccaatcaataaataaaagatatgaacaagctaaatgatattaaccttgccaccaaaaagtcctaaaacaaccatcagctttatctaaaatattaaactgcaaaataaccatmtctgaagacattttatcttaacttgggaagggtggagcttcacaggaatggatggttggtgtcagaaatcaaggatttagtaatgggctaaagtaatggactatcttggaggcaagtaaacaaagggagtgtatgaccagcaggtgatttattgtgtctgtctgagagtgtgttcag

SEQ ID NO: 499967 - DNA, 497 bp, Homo sapiens
cagctgctgctccaactccctgagtagctccttgctgacccaacccttccagctcaaccggctcaggcatcctccataggacccccagcaccttccctgttcttcattccaacattaaattgtcaacacctagcaaagcaaggccctccagagctcctgttacaggagggggctctatttaacttagttggtatctgtgccctgccagttactaaatatttcgaatatcgcacttaaatgaaataagaaagtgtgtgcacaggcacacgygcacacacacacacaccccgctgagcataaatttaaaaagcatatttgttaagggttgagcattgtgcttcaacactctttctttgaaggaacttactatatttttttgtagtcaataacttctacttttttagtactttttgatattatcattctaccttaagttggacatttcttcacaaagcagctcaaaatatttgagtggcagctttttttaatgattcagg

SEQ ID NO: 499968 - DNA, 476 bp, Homo sapiens
tgtgggcctgagattttaacagatctttcctttctgttagatatcttgacttcttgactcctggtgtctctctctctctctctcttttttttttttttttttggtgatagagtctttctctgtcacccaggctggagtrcagtggtgcgatctcagcttactgcaacctctgcctcctgggttcaagtgattctcctgcctcagccttctaagtagttgggattacaggtgtgcaccactgtgcccagctaatttttgtatttttattggagccagggtttcaccatgttggccaggctggtctcaaactcctgacctcaggtgatccaccagcctcaacctaccaaagtgctgagattacaggcgtgacccgccacaccttgcctgactcctggtatctctcttcctttcttaacaatctggtaaatctagttgtgtctcatcctgggcatttgcagcctgtctctcaaccaagg

SEQ ID NO: 499969 - DNA, 512 bp, Homo sapiens
aatgcccagaatattgtctgcttttaaaatttttatataaaaggctttccttggtctgttgacccttgaatatttttgtaatttagctttattctttaacttttataatgcttaaacctggtttgtactttttctgcagatatttgacttatcttccatrttctatattagttttactaatgaaaaacaggaaactttgcaaatgaagaaacattcttcccaagggtcatttattctcagagaagtgctgtcccaccctcctggtggttacagctaggagagcattcccagtgaactgaaaaagttcccattctgtttctaggcaatcatctctggattaccatggctcctgcaaagccaatggagctatgtgctgaaatctcttcaccacaaagcaaaagtctaaccccaacgttcacctagagagttactgaaactctgttatctcctctttaaaacaaaatattttttatatggaatagcagcaattaatagttacagttttcaaacac

SEQ ID NO: 499970 - DNA, 492 bp, Homo sapiens
tctcctacctcagcctcctgagtagctgggattacaggtgcccacgaccatgcccagctaatttttgcatttttagtagatayggggtttcaccacattggccaggctggtctcagactcctgacctcaggttttctgcccaccttggccttccaaagtgcttggattacaggcgtgagccaccatacccggcctaaaatttgcatttttaaaaaaagtttttacatttaaaaaattactatcatttgataatatctgaaatatattagtaataagtttgtaacagaaaatagaaattatgaatagtaaagaggaaggtggatctttgtgaatatatgcaattttagatagggtatttatacacggattagaaaagaagtactctaggaatgagaatgtaattaggggataaaaatctttcatctggatgaaaagtaatgggaacagatgtaggctaatggcatgcatatgtcatacatacccttgctctaa

SEQ ID NO: 499971 - DNA, 600 bp, Homo sapiens
tgtggacacataaatgtgtggagtaagcattctcatttgtttgatgatttcctgaactgggggcgatttgatcagcacattggaggaaggtggagggagataacacaattgctgtaatgacctaattttccaataaaagggttttcagaatcccaaaataaaacattgtggtatataatgaaaataaattgagctgcagtgctgatgaaaacartatcattggtgacgcttttccatatccaagggaaaacttggagatttattgcttgtatcggacctagttcatatcaccaaagtctgatctcttcaatacatttaccatatgtgtaagcactaatctttttttaaaaaaatagaacttctatgggtaaaacgtcaatataaaaacaaaatgaaataaccgtatgatatgactcatcactttgatagtttctgtttgttggtgttagtattcaagtggttgtcaacaatttttgcatacaacaattattatacatttaatcctgataaaattcagttaggcgattatatatatataatatatgcacatattcctatgcaattattattattgtcacttaagcaaagataatagagact

SEQ ID NO: 499972 - DNA, 600 bp, Homo sapiens
tgtggacacataaatgtgtggagtaagcattctcatttgtttgatgatttcctgaactgggggcgatttgatcagcacattggaggaaggtggagggagataacacaattgctgtaatgacctaattttccaataaaagggttttcagaatcccaaaataaaacattgtggtatataatgaaaataaattgagctgcagtgctgatgaaaacaatatcattggtgacgcttttccatatccaagggaaaacttggagatttattgcttgtatcggacctagttcatatcaccaaagtctgatctcttcaatacatttaccatatgtgtaagcactaatctttttttaaaaaaatagaacttctatgggtaaaacgtcaatataaaaacaaaatgaaataaccgtatgatatgactcatcactttgatagtttctgtttgttggtgttagtattcaagtggttrtcaacaatttttgcatacaacaattattatacatttaatcctgataaaattcagttaggcgattatatatatataatatatgcacatattcctatgcaattattattattgtcacttaagcaaagataatagagact

SEQ ID NO: 499973 - DNA, 611 bp, Homo sapiens
gatagtaaatttcaagaagtaaattaatgtattaatgactgttctgaaaatatatgtattttttaacttgtaaaatgtgttagagaaaaaaatgagacacttaagagatcctcccaggtatcctccgagtggggataaaacgtccactagagggcatttctccctggacgctctgttgtcaaggctgtaagctcattccccaaaatgctatgaactcattttatcaaattgggagtaactaactaacyaaaaaaattgaatgtgaagtattctgatgcttccagattcacacaaataagatcagaaccaccttccatttcaaaattgacagaatttgagaggctatccatttctgataactctcctagtgtcaagcatgttgcatgtgtacttttttttaaccactaaaacaaatttgaaagtaaaatgttattatacaaatttagggagagatgagaaaactagagtcaactaatctatgtgtattgtgctcttattgtcatgatttctatgtggtttcatgcccaatgacgtctttgtataaaaaatatacagatagatataactatgcttatttttcttatgtgtgttatgcgctgtttagttgtata

SEQ ID NO: 499974 - DNA, 611 bp, Homo sapiens
gatagtaaatttcaagaagtaaattaatgtattaatgactgttctgaaaatatatgtattttttaacttgtaaaatgtgttagagaaaaaaatgagacacttaagagatcctcccaggtatcctccgagtggggataaaacgtccactagagggcatttctccctggacgctctgttgtcaaggctgtaagctcattccccaaaatgctatgaactcattttatcaaattgggagtaactaactaactaaaaaaattgaatgtgaagtattctgatgcttccagattcacacaaataagatcagaaccaccttccatttcaaaattgacagaatttgagaggctatccatttctgataactctcctagtgtcaagcatgttgcatgtgtacttttttttaaccactaaaacaaatttgaaagtaaaatgttattatacaaatttagrgagagatgagaaaactagagtcaactaatctatgtgtattgtgctcttattgtcatgatttctatgtggtttcatgcccaatgacgtctttgtataaaaaatatacagatagatataactatgcttatttttcttatgtgtgttatgcgctgtttagttgtata

SEQ ID NO: 499975 - DNA, 590 bp, Homo sapiens
aagagacagataaatcaagcaggctttggtgatgatcaagctgacctgagctcatatcccttttccagcacttactggctatgtgacttcattacgttatttaggctctgcaaagctcaatattttcatgtgaataacaggaatgataacatcagcctcccatgactgccataagctttaagcgagataatacatatacgttatctagtacaatgtctggacaacagttggtattttataaatgatttcaataaaaattatccttcaaacccctcacccaaccccactcgatcaccagctatgtccctattaggcctctttgattttgaatataggttayatcccgtatccctggcttttccaccatcaaaattctagggatacagcagaaagctgagacagagtctagagcaacacaacatctttgtacaacttgggagtgatactcaactaaaacgcacccagtaagggtgtcatgttttttctacctacatccacgctgactgatgagcgcctgtgccacttgtcactatgttgtctctcagttccaatttacatggccttgtgataacagagccagaccctggaaa

SEQ ID NO: 499976 - DNA, 614 bp, Homo sapiens
gtaatcccagctactcaggaggcagaatgttaggtttcatcaatgaggcactggagtgacatcgagaggacatagctgcagaaagatcatcgccttctaggttctggccctttattattattatttagcctgagagcctaacaacccatgtgaacaaagtttctgctgcactctcacaccttgctcttcctactgtgaatttttttttttttagatgaaatctcactctgtcgcctaggctggagtgcagtggtgcratcttgactcactacaacctccgcctcctgagttcaagtgattctccaacctcagcctcccgagtagctgagattacaggcatatgccatcatccccagctagtttttgtatttttagtacagacagggtttcaccgtgttgtccaggctggtcttgaactcctggcctcaagtgatccacccgcctcggcctcccaaagtgctgggattataggcatgagccactgtgcctggccactactgtgacttttaagcagctctggtctgctcaccccctctgacaatggagggctgcttctagagaccagctctagtctatgcggccagtttctcccagtgacaggtgtgtgttcttat

SEQ ID NO: 499977 - DNA, 359 bp, Homo sapiens
tgctgccaatcaggagtaggagaggccaaatcagtgcgtgatgagatcaagttgctgtgggcagggaartgggctgtgagttcaggagattcccaaggagctaaccaggaaaattacaaaaaatggggagatccttaatgtggcttgaaggaagaagagaagagaagcctttggggcaggggtttgattgtccacagatcggataagagaattggggagcaggtatgtagtgatcataaaacaaggcaggtaatgagaaatgcactgtatagactaagagggcacctccattggtcagattttatcgtttgctttttcattgcctctctgggaagtgtaaggtggtcattgagtaggag

SEQ ID NO: 499978 - DNA, 512 bp, Homo sapiens
gcatgtgggtgtccccactgttcctacgtaaaccccccatgggacaggaatgcaggcttctcagcaaaggtgatggaggcctatagtcctccagatgactgagggtggatgatatggtttggctgtgtccccacccaaatctcgtcttgaattgtagctcccataatccctatgtgtcatgggagggacctggtgggaggtaattgaatcatggrggcaggtttttcccgtgctgttctcacaatagtaagtctcatgagatctgatggttttataaaaggcagttcccctgcacatgctgccctgcctgctgccatgtaagacatgcctttgctcctccttcaccttctgccatgattgtgaggcctccctggccatatggagctgtgagtccattgaatctctttcctttataaattacccagtcacgcatatgtctctattagtagcatgagaatggactaatacagtggaggagaatcctaagtaaaatcttcagagacacattggct

SEQ ID NO: 499979 - DNA, 511 bp, Homo sapiens
atcagggacaagacacctgcaaatccacttcagggccagggtcagggcagggccagttcagggccagggycaagacagggccagggtcagggctgccagggtcattggcagggccagggccatggcaggaccagggtcaggagcaggggtcaatgccaggccaaggccacagataggaccaggtctgtgctagggccagtgtgagggccaaggtggggtcagggcagggccaaagggagggcagggccagggcagggtggagcaggcccagggtagcacagggttaaggtagggcacgaccaaccagggcaggtctatggctggggccggggcagggccagagccagggcacggccaagacagtggcagctccaggacagggccagggttaggaccacagacatgtccaaggccagtgccagggcaagggcaagggcaggggcagggccagggtcatctaagaattagggacaaagccaggcccagagctgggccaggaccggtacctggc

SEQ ID NO: 499980 - DNA, 511 bp, Homo sapiens
atcagggacaagacacctgcaaatccacttcagggccagggtcagggcagggccagttcagggccagggccaagacagggccagggtmagggctgccagggtcattggcagggccagggccatggcaggaccagggtcaggagcaggggtcaatgccaggccaaggccacagataggaccaggtctgtgctagggccagtgtgagggccaaggtggggtcagggcagggccaaagggagggcagggccagggcagggtggagcaggcccagggtagcacagggttaaggtagggcacgaccaaccagggcaggtctatggctggggccggggcagggccagagccagggcacggccaagacagtggcagctccaggacagggccagggttaggaccacagacatgtccaaggccagtgccagggcaagggcaagggcaggggcagggccagggtcatctaagaattagggacaaagccaggcccagagctgggccaggaccggtacctggc

SEQ ID NO: 499981 - DNA, 511 bp, Homo sapiens
atcagggacaagacacctgcaaatccacttcagggccagggtcagggcagggccagttcagggccagggccaagacagggccagggtcagggctgccagggtcattggcagggccagggccatggcaggaccagggtcaggagcaggrgtcaatgccaggccaaggccacagataggaccaggtctgtgctagggccagtgtgagggccaaggtggggtcagggcagggccaaagggagggcagggccagggcagggtggagcaggcccagggtagcacagggttaaggtagggcacgaccaaccagggcaggtctatggctggggccggggcagggccagagccagggcacggccaagacagtggcagctccaggacagggccagggttaggaccacagacatgtccaaggccagtgccagggcaagggcaagggcaggggcagggccagggtcatctaagaattagggacaaagccaggcccagagctgggccaggaccggtacctggc

SEQ ID NO: 499982 - DNA, 511 bp, Homo sapiens
atcagggacaagacacctgcaaatccacttcagggccagggtcagggcagggccagttcagggccagggccaagacagggccagggtcagggctgccagggtcattggcagggccagggccatggcaggaccagggtcaggagcaggggtcaatgccaggccaaggccacagataggaccaggtctgtgctagggccagtgtgagggccaaggyggggtcagggcagggccaaagggagggcagggccagggcagggtggagcaggcccagggtagcacagggttaaggtagggcacgaccaaccagggcaggtctatggctggggccggggcagggccagagccagggcacggccaagacagtggcagctccaggacagggccagggttaggaccacagacatgtccaaggccagtgccagggcaagggcaagggcaggggcagggccagggtcatctaagaattagggacaaagccaggcccagagctgggccaggaccggtacctggc

SEQ ID NO: 499983 - DNA, 446 bp, Homo sapiens
tcttacaaaacataggtgctcaaaaaataaacatgtgcatgaatatttacagcagtaatattcatacagtcaaaaagtggaaacaatccatatgcttgttgactcataaatggacaccmaattttcagctataacaaagaatgaagtacttatatatggtataatattggtgaaatttgaaagcattatgttaagtgcacaaaaggacaaatatcacttgattttattcacatgaaacatcaggaattggcaaatcaattgggatgtaaattagattagtggtcattagggctcagggaagcagaatagggtgtaacaactttatgcataatgggtttttggaagggacatgatgaaattgccctggaacattgtgaatatactaaaagcaagtgcattgtatgctttaaaatggttgttattaattttatattatgtgattttta

SEQ ID NO: 499984 - DNA, 446 bp, Homo sapiens
tcttacaaaacataggtgctcaaaaaataaacatgtgcatgaatatttacagcagtaatattcatacagtcaaaaagtggaaacaatccatatgcttgttgactcataaatggacaccaaattttcagctataacaaagaatgaagtacttatatatggtataatattggtgaaatttgaaagcattatgttaagtgcacaaaaggacaaatatcacttgattttattcacatgaaacatcaggaattggcaaatcaattgggatrtaaattagattagtggtcattagggctcagggaagcagaatagggtgtaacaactttatgcataatgggtttttggaagggacatgatgaaattgccctggaacattgtgaatatactaaaagcaagtgcattgtatgctttaaaatggttgttattaattttatattatgtgattttta

SEQ ID NO: 499985 - DNA, 446 bp, Homo sapiens
tcttacaaaacataggtgctcaaaaaataaacatgtgcatgaatatttacagcagtaatattcatacagtcaaaaagtggaaacaatccatatgcttgttgactcataaatggacaccaaattttcagctataacaaagaatgaagtacttatatatggtataatattggtgaaatttgaaagcattatgttaagtgcacaaaaggacaaatatcacttgattttattcacatgaaacatcaggaattggcaaatcaattgggatgtaaattagattagtggtcrttagggctcagggaagcagaatagggtgtaacaactttatgcataatgggtttttggaagggacatgatgaaattgccctggaacattgtgaatatactaaaagcaagtgcattgtatgctttaaaatggttgttattaattttatattatgtgattttta

SEQ ID NO: 499986 - DNA, 456 bp, Homo sapiens
gccttcctggacccttgcaggggctacattcatttcacagaacttttccatctgaccattgtgcagaagtcgagataaaaactcatttttcttggaagggtctgatagccaatgtgatacatggcaattgstcagttatgtaaatacacagagaaaattttagaattcttacccttggaatgatgaactataaaccaaaaaggctcagggggaaaaaaaaatgtaaatacgtcctgggactatttttaactgtcattatttacctttttggggcagggatggactattgtatatttagccagatttaaaatgcacacattatttaatgcatgattattagcagaaatatgttaaacagccattaatagatgttgattcattccgattgaagccgctttttcttcttttcattttcttggctccaattaagttgcgttcggatgaaacccttcagct

SEQ ID NO: 499987 - DNA, 634 bp, Homo sapiens
catccatttatccatcatccatccatccatccatccatccatccatccatccatctatccattcgtccatccatccattcacctactatccatccatcatccrttcatctacccacccatcactcatccatccatccattcatccacctgactttcaccaggcctgccatggccaggccctgggctagggctagagaaatgaacgagacttttttcttgccaccaagtaaaccaagtccatcaagggagacagaagtggtggacgaaattaactgagacccaagctgctgcatgctctaagagaagtgggagctgagctcgcatggcatcagcacagagggagggggcctgggatattggggtggacccactattggcacacagagcttacttagccagaattagaacccttctacaacacagatcataatataaagctgcatagactgcactccatgagagcaagggctatagctacactgtatccccaccttctggtcctatggctacattatatcccagctcctggaattgtggatacactgtatccctcatttctggtactgtaactgtcctaaaggagatgcatctatgtctgtttagtttgatttgaatgatgcatccaattgcagag

SEQ ID NO: 499988 - DNA, 634 bp, Homo sapiens
catccatttatccatcatccatccatccatccatccatccatccatccatccatctatccattcgtccatccatccattcacctactatccatccatcatccattcatctacccacccatcactcatccatccatccattcatccacctgactttcaccaggcctgccatggccaggccctggkctagggctagagaaatgaacgagacttttttcttgccaccaagtaaaccaagtccatcaagggagacagaagtggtggacgaaattaactgagacccaagctgctgcatgctctaagagaagtgggagctgagctcgcatggcatcagcacagagggagggggcctgggatattggggtggacccactattggcacacagagcttacttagccagaattagaacccttctacaacacagatcataatataaagctgcatagactgcactccatgagagcaagggctatagctacactgtatccccaccttctggtcctatggctacattatatcccagctcctggaattgtggatacactgtatccctcatttctggtactgtaactgtcctaaaggagatgcatctatgtctgtttagtttgatttgaatgatgcatccaattgcagag

SEQ ID NO: 499989 - DNA, 634 bp, Homo sapiens
catccatttatccatcatccatccatccatccatccatccatccatccatccatctatccattcgtccatccatccattcacctactatccatccatcatccattcatctacccacccatcactcatccatccatccattcatccacctgactttcaccaggcctgccatggccaggccctgggctagggctagaraaatgaacgagacttttttcttgccaccaagtaaaccaagtccatcaagggagacagaagtggtggacgaaattaactgagacccaagctgctgcatgctctaagagaagtgggagctgagctcgcatggcatcagcacagagggagggggcctgggatattggggtggacccactattggcacacagagcttacttagccagaattagaacccttctacaacacagatcataatataaagctgcatagactgcactccatgagagcaagggctatagctacactgtatccccaccttctggtcctatggctacattatatcccagctcctggaattgtggatacactgtatccctcatttctggtactgtaactgtcctaaaggagatgcatctatgtctgtttagtttgatttgaatgatgcatccaattgcagag

SEQ ID NO: 499990 - DNA, 634 bp, Homo sapiens
catccatttatccatcatccatccatccatccatccatccatccatccatccatctatccattcgtccatccatccattcacctactatccatccatcatccattcatctacccacccatcactcatccatccatccattcatccacctgactttcaccaggcctgccatggccaggccctgggctagggctagagaaatgaacgagacttttttcttgccaccaagtaraccaagtccatcaagggagacagaagtggtggacgaaattaactgagacccaagctgctgcatgctctaagagaagtgggagctgagctcgcatggcatcagcacagagggagggggcctgggatattggggtggacccactattggcacacagagcttacttagccagaattagaacccttctacaacacagatcataatataaagctgcatagactgcactccatgagagcaagggctatagctacactgtatccccaccttctggtcctatggctacattatatcccagctcctggaattgtggatacactgtatccctcatttctggtactgtaactgtcctaaaggagatgcatctatgtctgtttagtttgatttgaatgatgcatccaattgcagag

SEQ ID NO: 499991 - DNA, 478 bp, Homo sapiens
tatcaaaatctacctttctatctctttatcactctctgagctaaagttctacaatttgtataagaaaacaaagaaggaaacctttgtgacattgagttaggaaaagatttcttaaacaagacaaaaaactgaatcatacaaaaaaatcagtgaggcagacttcaaaaagttagtcttttgtaattcttttctttataagaaaatgagaaggtaagccacagattggaggacaaattacaaaatctatatctgacaaaagtcttcgaaaaagttttctcttcaaaagaaacccaaacttggaaaaacacaaatgtttttcgtctgataaatggataaacaattgtagtacaaaatattgttacagtgaaacaacgtagatgaatctcaaaatattagtctaatatgagagrctatagtgtaatatttatagctttattgacatgaaattctagaaaatgagacccacagttaaaaaaaa

SEQ ID NO: 499992 - DNA, 409 bp, Homo sapiens
attagagttcaaggtgcctatgtacactctccttgggcaaccacagttactctttcgacttgagttattatctaagtgctgctcattcccaaatctctaccctcagcagagacatctctactgagctcttgacccatatattcaactgactcttagaccctcctctcaaatgcctctggcacttctacttccgcatctaaaactgaacttctgtctccaaatgtacttcccttcatagctttccagagtatcgtcttctctattccctaatatataacttttatgtgattctttattcctccacctctcccattcaaaaacattcttacagccctagcatttctaccccttaatattaggtgtrtatactcccttctatctcctctgtccctgcataaacacaagcatt

SEQ ID NO: 499993 - DNA, 602 bp, Homo sapiens
aaaaaattcaagacatataaagactcctgagaaagttaattttcctatgatacgcasggcaccagcaggaaaacaaagacacattgtggagcactcatcttataattggccagctaatatatttctgaacaacttcatcagagtaactgtcttatagatgttggctactgttactgccccatgtgcaagccacacatatcatgctaaattaattgaattatttttaggaacacctccttagattgaagcagcatctatcacaacaaaggtgtgcatcaaatcttagctattagcattttaaaactattattagtcttacaaataaagaaatttgctatgttgtaaaatcttagcaataaaaatatttttataggaaaatataattcctttcaacattaaacaaatcaactatttttgcagtatatatagaatctaataagcccttgaccctaaatattccactatacaatagttgccaatgttatcttatgagagctgtgagaaaaccatttctcgttgttcatcagaaaggtgagtgtgtgttcaacatgatttttgcataagtaaatgcccattgcagagtagaaactgtggattcagtt

SEQ ID NO: 499994 - DNA, 218 bp, Homo sapiens
tgagacactgcgcccgtccacctcctcttttacttkggagaaatgcacagattctgggtgccatgtgcatttgttttgggagtgataattgatctaacttatggaaataatactagatagttagcggatggattctgtatctgatgagagttttgggcaaaacgaattcctagtttctgagtcttatttttcccctgattcaagaaaactgtgaatta

SEQ ID NO: 499995 - DNA, 639 bp, Homo sapiens
tagatgagactagttacgtaacaaaaaaggtttaaaaaataatttctgctaactggaatgctttttgttgttgtttatttgtttgtttttttgcagccataggagttttagccaattcagaggccttgctccccacaatttggaacattcctttggatttgaccaagtcaggaagagatgggagaaaagtgaaacaacaacaataaaaccccaagcataaacaaacaaaaagagttaagcaaaacaacaactgcacaattcatatgattactgagtgttctaatggtaaggagagtggtgaagccatgcgtggtgatgtagagtacttccacatcyctggtgagaagctgccccttgggtctgagtttctgggaggggagagggagaagctgggtgaggcaggcatgaatcttgaggagtcagggctgggggaccgctcatattctcccgagacctgtgagtctctgggggactcctgggtgcatggggctggctcccgcaggaacctggggatggctgaagagtaactgggagccacaggagagtccctgaggcctgggggtgaagagatgaaagacacaggggtggagcaccgtgaggctcgtgagtttgtaggtgattcctgggtgtggggggctg

SEQ ID NO: 499996 - DNA, 417 bp, Homo sapiens
agcccactggtcaaagtgaacaaaactaaatgaaaaaataaaaccaagaaaaccaaactcaggattattaggtattctgtaatgctattttatctttggactcacagaaaatagttattattattattactattattattattattattattttgatatggagcctcactctgtcacccaggctggagtgcagtggygcaatcttggctcactgcaacctctgcctcctgggttcaagtgattctcctgcctcagccttcagagtagttgggattacaggcaggttccaccatgcctggctaacttgtatttttgatagagacagggtttcaccatgttggccaggctggtctgaaactcctgatctcaagcaatctgcctacctcagcctcccaaagtgctggaactacaggcatg

SEQ ID NO: 499997 - DNA, 417 bp, Homo sapiens
agcccactggtcaaagtgaacaaaactaaatgaaaaaataaaaccaagaaaaccaaactcaggattattaggtattctgtaatgctattttatctttggactcacagaaaatagttattattattattactattattattattattattattttgatatggagcctcactctgtcacccaggctggagtgcagtggtrcaatcttggctcactgcaacctctgcctcctgggttcaagtgattctcctgcctcagccttcagagtagttgggattacaggcaggttccaccatgcctggctaacttgtatttttgatagagacagggtttcaccatgttggccaggctggtctgaaactcctgatctcaagcaatctgcctacctcagcctcccaaagtgctggaactacaggcatg

SEQ ID NO: 499998 - DNA, 315 bp, Homo sapiens
taacaacccctccttgcctgcagccatttgaatcagagattgtttgcattaataaggcgttagcctttttttttttttttttttttttgtcaaatgccattcgttcaatgtcccacatttgcccgtgaaattcagggcaatgaagctgacaaaatgtaatttacttgcattgaaatgggccagatccacgatttactctcccagcctctcaagctggatttcacattcagtggccttcctgaattatcrgagaggaagtcaacttccctgagccacaaacagcaaggctgtagcaggtgggcagcccccagagca

SEQ ID NO: 499999 - DNA, 322 bp, Homo sapiens
gactgttatgtttccactcaccttcttatgcatttctcgcttagtccaacatcccgcatcattctttctccaccaaagctagctccagagcttcagckcttcttgaattttgtcgttttctaagtttcttctttattcccattgatacttgctaggataggatgcattggtggccccagatgcacaagtgatattggcaaagcagaaatgggctatggatgtcaaagagatgctgctgtcccttattcttggatggagaagtttgatgatacccagaaagatccagtatgtcctaaaagacccaagagagatgtataggcag

SEQ ID NO: 500000 - DNA, 485 bp, Homo sapiens
atgggcactgagtacttgttgaataaacatttgtcaaatgcacaagtgagtgactttgtgcccatggattcaaggacttcttgcagtaggtcctgggttcttcccagaggtcctcagtccgtatcttttgaaaaatagttttgagacatacatagtttctgggaaaccaggtctgtttattccccacaacagagtcaccacacttcaattaaatggatgcaaaatactgcctttctattgagttttctaatggatacaactctagatatttctcagaaaaatgccsaggccagtagacctctaggccccattttggatttttatgctcagtagatggttatcatagtcccttaggttgttatttagtcaaattatgttcattttatcgcctgtgcttttcctcatatttcactccctttgatttgtttttcttttcttttctaaattcccatcaaggcatcatattacccctaattgcctgcaat

SEQ ID NO: 500001 - DNA, 669 bp, Homo sapiens
ctgcaccgggcaaatgcagcatacggtgacactgtaacctccctgaaacggcaatgaaaatgcacctgacccagggaggtgccactgtgtggaagcctgccccttcctcggtagggaaaagatggcctgacctgccgcttcattcaaaggagtccacgyctcctcacctaggttagagcaggtggcatcatccacacaggtgctccaaaacccaagctggagctgtcacggatttatgagctcctgtctgtttcacggtgctgcttctcaccgagcctacttcatcatttaaattattaacagtgaaagtgcattgactgggggagtcggtggaatacaggatcctgaagagggtggaagggtctcaatacagtttcatctctctcatgcaactcaccctcatcagtctccagatctgggctgctgaacatgcatggaataaacggaggggatttttaaggcagtttctgtttaggctctactcattaaaaacaaaacaaaaaacaaaacaaaacaaaaaactccattacctaacctagtcttgcctatagttttcagaaatcatgagaccatcaaaagtctactttgcctggtaaaaatgtcatccccacccagccttccctgtggccacttgcctatgctgacattgtattgctttgcttggtagca

SEQ ID NO: 500002 - DNA, 669 bp, Homo sapiens
ctgcaccgggcaaatgcagcatacggtgacactgtaacctccctgaaacggcaatgaaaatgcacctgacccagggaggtgccactgtgtggaagcctgccccttcctcggtagggaaaagatggcctgacctgccgcttcattcaaaggagtccacgtctcctcacctaggttagagcaggtggcatcatccacacaggtgctccaaaacccaagctggagctgtcacggatttatgagctcctgtctgtttcacggtgctgcttctcaccgagcctacttcatcatttaaattattaacagygaaagtgcattgactgggggagtcggtggaatacaggatcctgaagagggtggaagggtctcaatacagtttcatctctctcatgcaactcaccctcatcagtctccagatctgggctgctgaacatgcatggaataaacggaggggatttttaaggcagtttctgtttaggctctactcattaaaaacaaaacaaaaaacaaaacaaaacaaaaaactccattacctaacctagtcttgcctatagttttcagaaatcatgagaccatcaaaagtctactttgcctggtaaaaatgtcatccccacccagccttccctgtggccacttgcctatgctgacattgtattgctttgcttggtagca

SEQ ID NO: 500003 - DNA, 628 bp, Homo sapiens
tgcaggcaagatttgttcccttgtttgtctggagctttggttttaatttgtaatrtttgcttaatctactattagttgggctgaatttaatttaactcattgtagcaattcatttctttcaatctcctgttattgggtatcactcttaagttgtaagtgagtttgccttccctaatcatcatgtaggaatctgttggcccagttatttctctttgcaagtaatatctgcaattaaaaatgtatataattgcagagagagcagtgtgataagaatgctgaatgggatctgtaccttccatttttttcattagcttttatattttaagtgaaatcaggtaaagtgctggtaaggagttacttcctctcccacccccaccattgtcaactgccaaatggagagacaataaatggtagccagacagattctctttcttactgtaaagccataaagccaaaacctagcacatagcaatgagttttaaaaattaaaacaaaacaagacctctagcttggcttatagccaatcacagctttcagatggtggagatcattctaaatttagaggaaaaaagtaatcgtgggtctttcttcaaaatttaattttaaaacttgctccacaggtagactt

SEQ ID NO: 500004 - DNA, 533 bp, Homo sapiens
gctctaggtgacacacctaatccatctttggaggggaaaggccctcttgggtctgaaaataattattgtttctttccatcagcctcttattttttctcctctctctgtgtctgctgtacttgctttcagttttgcttccaaatctagaggtgcagtgtgattttctggctgagtggtgtctgcctcagtcatatatctgcacccccacttcagaagactgcttcttggtgaccccttggctctgtcacctccaacatatggagtcaactgccagcagcgggccatttccattcagtgattttgccagattcagagatttgcatttayaaagtctctctctgccttatttgcttataacaaggctcactgttcgtttcttgttaagttttatctcataaacaaatattactatgggagtcccagccaataattattaaatcctgacttctttttattttcttataccgagaatgcgttgactataaatgcacaatttaaacttcacgggatggtttttttttggcccacctctc

SEQ ID NO: 500005 - DNA, 479 bp, Homo sapiens
gggaacagagaaaatacttaatacaatggtcattatttttaaagttaggcttgctggattttggtgggaaatcaagatggcttccttctgaaaactgagtctgtctcatgtctgatttcacagaaacaactttgagatggggattcttgagcacacgagttactgaatgagaactctcggggaaaagggagtgagagctgcaggatggggcagagaaaggagtaagttagaatgtgctttcaggtgaagtctcctttcattcccatcccaggggaagctctggggcataaattgcctgtcctctgtctgtcctggcttgagaaaaggcttctgtggaccccaccccaacccacccaagtcagttatgtctactggacacccagggccgtggcttgagagatctaactcccagcacttcctygcaaagcagctctcttcgcccaaagccacttttatggggaaggctgcagacatgagca

SEQ ID NO: 500006 - DNA, 419 bp, Homo sapiens
ggtcagcccgctcctttcttggagaggaatcttatttccttaataaaccttttgcttggtttactgattggtctcttggtcgaattctttctcctaagaagactgagaaccaaggacccacacttcccagtgatagtgttagtcacggaagcacactcacaatgtgagaagtgccagtttcacttagggatgtccttgaagatgcagtaaacattattacttttattaaatatttgtcctcaaatgcacrtctttttactggtctgtgacaaaatgcgtatagcactataccgcacactgaattcctatggctgtcttgaagaaaagcacttaggtgattgagctgtaagctaagtttgagtttttcagggaacaccattttcactgaaaagaatgactaagaaattatggttattttg

SEQ ID NO: 500007 - DNA, 573 bp, Homo sapiens
gaataagaggaaagaaagaagtagaagagagtagagatgacatcatgagaacacagagaggctcagatagagaaaatgggtgcatgagcatttctgggatctaggaaagctgaccacatgtctttgactcatgtttattatctggatctttgctctaaatccctcatggcataagcaagcagaagtgagtttctcttccttgcaatcaaatcccacttaattaggaatcctaattaggctccaggaaaagcacctcttattttgttgcacttcactttatcgtgttttgtagatattacttttttttttttttttttaacaaattgaaggtttatggcaaccctgcattgagcaagtctatcggctccttattcccagcaacatgtgctcactttgtgtctctggcacattttgataattcatgcaatattttaagttattattattacmgtatctgtatggtgatcattgatcttctgtgtcactgcaattctttgggggcactatgaactgtgcccataagatgaagaacttaatcaataaatgtcatctgtgttctgcctgctccaccaa

SEQ ID NO: 500008 - DNA, 656 bp, Homo sapiens
tattatagacctacacttatggcacctgagtttcacttttgtttcaagttacttaatgccagattacacctgtaactttctctctctcctccctctctctctctctctctctctctctctctctctctctctctctctctctcccccctcttctcttctttccatggagtctcgctctgtcgctcaggatggagtgcagtggcatgatttcagctcactgcaacctccacctcctggrttcaagagattctcctgcctcagcctcctgagtagctgggattacaggcacctaccaccatgcctggctaatttttgtatttttagtagagatggggtttcgccatgttggccaggctggtttcgaactcctgacctcaagtaatctgcctgcttcagcctcccagagtgctgggattgcaggtgtgagccaccatgcccggccacctcaaacatttctttaaaaagacacacacaaattgcaaaccgtttgctatttaaaaatgtaataataagctcaaaactttggtatggatttatatagtgacctagccgagaaatatttaataaccacaggcagcattttgggagttcaccatatgccagcagacagtatagggcaagttctttgcatgaacacgatcatttttcctatatca

SEQ ID NO: 500009 - DNA, 601 bp, Homo sapiens
ttggaaagccttggtgtgatgaattgtcaccctgtgtgcctccctgggagggtcagaagggcctggttctgggcacagggccactgggtcctgctggcccttccccattggtggttttaaggactgctcctatctcaggatggaggggagtggagaagccagtcccccctggccagctccttgctgtgggcactccctaaaacatctgtggcctttgggagaatgaaagagaaatgagccgcagccatgcsgtatcccgggggctggcaggtgagcacaagatgggtcaggatgtagttctggctgtgtcagtgtccgagaagagggaccattctgtgggccttacgtaaaccacagcacaggggactcagcttctggctaagagagtgaacccctggagtccaagggcctgggttcaaatcttggttctgttatctacttgctgagagccctgcagcagctactttaatggctccaggcttccgttttctcatctgtgaaatgggaagagcaaatagacctccctcaaagagttgctgtaaggcttaaatgtaaaggactttgaatagtacttgacacagagtacgtatgcaagaaaagg

SEQ ID NO: 500010 - DNA, 601 bp, Homo sapiens
ttggaaagccttggtgtgatgaattgtcaccctgtgtgcctccctgggagggtcagaagggcctggttctgggcacagggccactgggtcctgctggcccttccccattggtggttttaaggactgctcctatctcaggatggaggggagtggagaagccagtcccccctggccagctccttgctgtgggcactccctaaaacatctgtggcctttgggagaatgaaagagaaatgagccgcagccatgcggtatcccgggggctggcaggtgagcacaagatgggtcaggatgtagttctggctgtgtcagtgtccgagaagagggaccattmtgtgggccttacgtaaaccacagcacaggggactcagcttctggctaagagagtgaacccctggagtccaagggcctgggttcaaatcttggttctgttatctacttgctgagagccctgcagcagctactttaatggctccaggcttccgttttctcatctgtgaaatgggaagagcaaatagacctccctcaaagagttgctgtaaggcttaaatgtaaaggactttgaatagtacttgacacagagtacgtatgcaagaaaagg

SEQ ID NO: 500011 - DNA, 601 bp, Homo sapiens
ttggaaagccttggtgtgatgaattgtcaccctgtgtgcctccctgggagggtcagaagggcctggttctgggcacagggccactgggtcctgctggcccttccccattggtggttttaaggactgctcctatctcaggatggaggggagtggagaagccagtcccccctggccagctccttgctgtgggcactccctaaaacatctgtggcctttgggagaatgaaagagaaatgagccgcagccatgcggtatcccgggggctggcaggtgagcacaagatgggtcaggatgtagttctggctgtgtcagtgtccgagaagagggaccattctgtgggccttacgtaaaccacagcacaggggactcagcttctggctaagagagtgaacccctggagtccragggcctgggttcaaatcttggttctgttatctacttgctgagagccctgcagcagctactttaatggctccaggcttccgttttctcatctgtgaaatgggaagagcaaatagacctccctcaaagagttgctgtaaggcttaaatgtaaaggactttgaatagtacttgacacagagtacgtatgcaagaaaagg

SEQ ID NO: 500012 - DNA, 467 bp, Homo sapiens
atacaatcctccagacctacaggatagcayaaaatctgattttcatgtgactaattttccctagtgtttactcaaaagagaatatataagtgtttctttaagtctcctcaatagcagtaaaaactatccagtaaaaactctcagaagggtggtgcactgaccagaagtaagactgtaacacaacttttccactccgcaggagaccacagcaaaaatgaagaatgccgcagagtcaaccctaaagagcgaatgagagagagggagggagagtgagggagagccaggagtgtggacggagggtctgggaggcctggggagatgacactgttgaggaccaacttctgcttggtagccctttgacccaatcaactgtcaggggccttcccctctgtcttgggaactcttgatttggttgccaacaacagtggcttgatgacagtggaaagaccaccactgtccataaaaca

SEQ ID NO: 500013 - DNA, 530 bp, Homo sapiens
tgttgatgacagcagtgatagcagccacatcttatgatccctcatctgtaaaatgaagaccagaaggcttccgaggtctcttcctaccctcaccttcccasttcagccatgacggctggccactacttgtagatgaaatgacatggacactgccttcggcatgggggattttgatgagcttgtgtgactcaatacactcaggccagagcgagtccccaaataaaggctctgtataaaataccttcgccttggtaactgaatcttctccttatgtaattgtgtatttctatcattttccatgaagaaattttaggacacggaggcacctaaaaaatgcctcgccttgcatttttcatcacaaaattctggctggaacttttcaagcaaactggaattattcttctcaaaattaggccattaacttgctctaagtgaaagtttgctgaagttattcagtagacaaggaagggaactaactgcccaactctgggtgtttacatctttttgttttcttttctcaattggaaaca

SEQ ID NO: 500014 - DNA, 530 bp, Homo sapiens
tgttgatgacagcagtgatagcagccacatcttatgatccctcatctgtaaaatgaagaccagaaggcttccgaggtctcttcctaccctcaccttcccacttcagccatgacggctggccactacttgtagatgaaatgacatggacactgccttyggcatgggggattttgatgagcttgtgtgactcaatacactcaggccagagcgagtccccaaataaaggctctgtataaaataccttcgccttggtaactgaatcttctccttatgtaattgtgtatttctatcattttccatgaagaaattttaggacacggaggcacctaaaaaatgcctcgccttgcatttttcatcacaaaattctggctggaacttttcaagcaaactggaattattcttctcaaaattaggccattaacttgctctaagtgaaagtttgctgaagttattcagtagacaaggaagggaactaactgcccaactctgggtgtttacatctttttgttttcttttctcaattggaaaca

SEQ ID NO: 500015 - DNA, 530 bp, Homo sapiens
tgttgatgacagcagtgatagcagccacatcttatgatccctcatctgtaaaatgaagaccagaaggcttccgaggtctcttcctaccctcaccttcccacttcagccatgacggctggccactacttgtagatgaaatgacatggacactgccttcggcatgggggattttgatgagcttgtgtgactcaatacactcaggccagagcgagtccscaaataaaggctctgtataaaataccttcgccttggtaactgaatcttctccttatgtaattgtgtatttctatcattttccatgaagaaattttaggacacggaggcacctaaaaaatgcctcgccttgcatttttcatcacaaaattctggctggaacttttcaagcaaactggaattattcttctcaaaattaggccattaacttgctctaagtgaaagtttgctgaagttattcagtagacaaggaagggaactaactgcccaactctgggtgtttacatctttttgttttcttttctcaattggaaaca

SEQ ID NO: 500016 - DNA, 530 bp, Homo sapiens
tgttgatgacagcagtgatagcagccacatcttatgatccctcatctgtaaaatgaagaccagaaggcttccgaggtctcttcctaccctcaccttcccacttcagccatgacggctggccactacttgtagatgaaatgacatggacactgccttcggcatgggggattttgatgagcttgtgtgactcaatacactcaggccagagcgagtccccaaataaaggctctgtataaaataccttcgccttggtaactgaatcttctccttatgtaattgtgtatttctatcattttccatgaagaaattttaggacacggaggcacctaaaaaatgcctcgccttgcatttttcatcacaaaaytctggctggaacttttcaagcaaactggaattattcttctcaaaattaggccattaacttgctctaagtgaaagtttgctgaagttattcagtagacaaggaagggaactaactgcccaactctgggtgtttacatctttttgttttcttttctcaattggaaaca

SEQ ID NO: 500017 - DNA, 622 bp, Homo sapiens
gacattaaatatatacagctttttttttttaacatgccaaccatacttcataaagttgttttaaaaaataagatcaacccaatggtaaacgtggtgaacccaacccccgcctctctaacttgttgagctacaaaagaggaagaagccaggagcacagccgctgttggctccgtgcctaatgacygaagccttctatgagttgggtttgttatcatgtttggctcctggactggattgttttctttcctttttaagacgtttgaagtcctttgatgagctggtgtttatagttcatgttctttcatgccaaacgagcacttcttattatctagaattacaaaagcatttggtgttttccaagcttaggtggccagcttcagaatccaagaaggaattactttataccatacaggggggttggaaaaagtcagatgtaaatcagatttctgacagtttagtaatatttaaaatttattagagaagacactaaaaggaaacttctgatgaattttctttctttgttttcttggtaaaatgaaatcattcacattctgccatgagtataattgcctctattctaggcaatttctgtattgtaaattgggactttgtgttggtgatt

SEQ ID NO: 500018 - DNA, 622 bp, Homo sapiens
gacattaaatatatacagctttttttttttaacatgccaaccatacttcataaagttgttttaaaaaataagatcaacccaatggtaaacgtggtgaacccaacccccgcctctctaacttgttgagctacaaaagaggaagaagccaggagcacagccgctgttggctccgtgcctaatgactgaagccttctatgagttgggtttgttatcatgtttggctcctggactggattgttttctttcctttttaagacgtttgaagtcctttgatgagctggtgtttatagttcatgttctttcatgccaaacgagcacttcttattatctagaattacaaaagcatttggtgttttccaagcttaggtggccagcttcagaatccaagaaggaattactttataccatacaggggrgttggaaaaagtcagatgtaaatcagatttctgacagtttagtaatatttaaaatttattagagaagacactaaaaggaaacttctgatgaattttctttctttgttttcttggtaaaatgaaatcattcacattctgccatgagtataattgcctctattctaggcaatttctgtattgtaaattgggactttgtgttggtgatt

SEQ ID NO: 500019 - DNA, 565 bp, Homo sapiens
agagatatttttgccaactagagaatacagaattgagaggtatctttatattgtcactattcttttagctctttaagwggtcactgaattgtctttgggcttgtgtaatttctaatgagaattctactttgattttctgtatgtaagtatatttttcttccaaacactttcaatatttccttttagcttggtttcaggtgtttgaatctcatatgtttaggtttttaaattttatttattcttgaatttctcttgttgggtctatagcttgatatctgtgattatttttggaaaactctaggctcatgtcttttttattgatatataaaagttagacatatttatggagtacagtgtgatatttagatacatgcatacaatgtgtaatgaccaaatgaaggtaattgggatatccatcactttaaatatttatcatttctttgtgttaggaaaatttcaaatattctctcccagctattttgaaatacaataaattcttgttaattatagttgttataccacgctatcaaacaacagaacttatttcaaggcccttatatcttca

SEQ ID NO: 500020 - DNA, 565 bp, Homo sapiens
agagatatttttgccaactagagaatacagaattgagaggtatctttatattgtcactattcttttagctctttaagtggtcactgaattgtctttgggcttgtgtaatttctaatgagaattctactttgattttctgtatgtaagtatatttttcttccaaacactttcaatatttccttttagcttggtttcaggtgtttgaatctcatatgtttaggtttttaaattttatttattcttgaatttctcttgttgggtctatagcttgatatctgtgattatttttggaaaactctaggctcatgtcttttttattgatatataaaagttagacatatttatggagtacagtgtgatatttagatacatgcatacaatgtgtaatgaccaaatgaaggtaattgggatatccatcactttaaatatttatcatttctttgtgttaggaaaatttcaaatattctctcccagctattttgaaatacaataaattcttgttaattatagttgttataccrcgctatcaaacaacagaacttatttcaaggcccttatatcttca

SEQ ID NO: 500021 - DNA, 624 bp, Homo sapiens
gccctatcaaagaagtggaggagactgaaraactcaaaaacctagacacctaaacagatttatatttgcaaatagaacttcagttatatagaaggactggataaaggcaccatgaagctgaaattaaattttaggccagtggattgctgaagaccctttgggacaagaccctgccagtcctgccaagaacactgtttctttccaaagggaaaatgggaaaaaaaatatatatatatatatgtgtgtgtgtgtgtatatatatatgtgtatgtgtatatgtatatatacacatatatatatgtatatatacatatgaagtttctttcaatggctttggactcagataaaaaggcaagcagcaacaaggctcattataaatagctaatcagtaacaaacctgtgtaatctgagacccagatcaaaggagaactaacataatggggctgagggtccagaaactgatgcccattttgggattgatcctggaaatactccttcatctcccagaatgattaagattcaagtagttttgtatttcacaaaattcacgaataaattttgtggtgattgcctcctgccttcacagtgggggaaaaaaactgattccattgggaaggaatagct

SEQ ID NO: 500022 - DNA, 563 bp, Homo sapiens
atggtccaaagaccacgcccagtatagtattatggctgggttaataagaattcttaaaaataatcttacaaaaaatttatggagatttaacctaatggaagagagcatcaggaaaagagcataagctgagttaaagggtagaacccttatatttcttcagagaactttgaataataatgataagctgtatctagctaaggcatttacttaaccagtcactatgttggtcatttattgaagccatttgaataaatggccaaagtgaagaaagaagaaatcttatttaagaacattaatcgcaagatcacctgaatcaatttractgtaaagatgacacccacctatcaatttgtggaagtgaattggaggtggttgtgtttcttcaggtattattcatttcatattcacattgattctaaaaatgacaggacttgtgaatggggagtgtagtcggctatggtttaagttcgctgctaaagaaagaacaagggaaaatgaaggaggattgacaaaatgtttgactcctgaacgccacctgccttcccttgttctaattatgcaat

SEQ ID NO: 500023 - DNA, 609 bp, Homo sapiens
atgcttaattaatactgagtattccccattcttgtttcaagtgatagtctttgcttatccacatacctaggaggctggggaggctccttcaagtcactgggtatgaggttataaatgcactcagaagagcacgttggatccatggccaccaaatgactccttaaaagctactctccacaacttttttctccctgtcccagtatctccgtcyctttcttcactgcttcccctttctttcttcttcgccttctgaaggaccacaggttctctccttcacatcgtccccctttaaccccctcttagcagtcctctctcgggaagaaaacaccctatttctctccggattgctaagcgtcgttgactgtgcggttgccgtggaaaccgttactaggcaacgaggaagtggcaggcagcaccgcaaactaggtctcccctcttccctctttctgcagcgccttctgctagagaagctcatttggaagccactgtttttacgtgcctttgaaagttaacggggtgaaaatgatgtccccttaaaaactgtgctcttttctatttctgtgtatctggggaaaaaagaaaaatcctagtagagacggcaaagcgcag

SEQ ID NO: 500024 - DNA, 602 bp, Homo sapiens
ctgattttgttcacacatgagagagagaaaaatggcaaaaatgggaaagggggtgggggatggaggtgggggtagggagatggaaataagttccttgtcttctaggaaaacaccaagttgcatgtcaatctgaaggataacccaaattgcaaatccaggatatttcacaagatgagaaaggccttagccattttcatttaaattcctattatatatttttacgaagagaaaatatctatgcacaatttgaaaacagtgttatatataaaatatttagtccttttagtgtatctttaagaatatataaaacctcttacttggagaaaacattaaaagcataaatttaaacatttcataatactgcaatatttttaaaacacttataaaacaccttccagaaaggtttgcatagacaaaaaaaaaaagtttgggaaacgttgcattacattgcattttgcaacagtcttcctgaatattggcagtgcatattggcrtactaaagactcctagaagacctacaacatagaagttggcttaactttgcttacttaattgtttctcaaacctaatgaatcaaaacgccattttcttcaaatataaag

SEQ ID NO: 500025 - DNA, 567 bp, Homo sapiens
aaaagattgtattctttctgaatgggggagcactgcttttctggaagtcttcacagtgtacattattctctttttgaatggaaatatttgctgccaaatacctgcttaggatgtgaaaagccaaatttaacttatttttttcagacagcctggcaattaagcttttactttagagtttggtttattcattctaataatggttatcatcatggaaagttttaattaagtattcggcatctaccagatgatatatatgttaccaaaaagtaatacctattttyagagagctcatacttcatatcagcaagaagtaagtcatttaaaaatgtcctaagttaggcatacacacatgtacaccatgtcaataatcaccaagatgtctatcctgcatttgcttcatattgccaagtgcaaatatgtttatttcatttgtatattcttatatcagtcctctaaacacaaaaatgttaatttggctcctattttacagatgtgaatatgagattccaattacttaaaggacctgcccaaggccatagaggtgggaaaggaaaggtcaatcgtctt

SEQ ID NO: 500026 - DNA, 537 bp, Homo sapiens
aaacaccaggaatgtggaagtctcatagtcggaccttccaccagtaacaataggaacataggaagttttcaataaatatttgttgaatgtcaaatgattaaataatagagataactttaatatagaaagcacatctaagaattaacttggcttaattatcaaagtaagtaactgttaaatgcctttattactttattacagattattaaaattaatatttttctgttaaaatattttaaatataataatttattgaccaaataaacattctattccttacagaaaatataaatctattaaaaatcaatgaagawtttttgggaaaactataaaactaaaatttagatttcctattaaatatggcaaaaatttatttcaactttcttccaaaacacaagtaagatgagagacaatagacttgtgaaaagacaaataatctataaggatgaagagaacaagagaggagaggacaacatatgaaagatttcaacacaattgtgcaggctcaaagacagaaagatgactaaagcaacataa

SEQ ID NO: 500027 - DNA, 672 bp, Homo sapiens
  misc_feature (1)...(672): n = A,T,C or G
agactagaagtattcttcagtgaataacccatgcaaaatgaagattaaaaattattttgttaatgccctacactacataaaatgttgctataaaggaaattgacgtagatcttacagatggcatttttggaaaataaactagccctagactgagmaaattcttatgacactagatcactggggagtgcttttattagaagggagttagggagagatcctccaagagattgatgtttgaaatggaagaatcacaaagcatttcttctcattgttggaagtagataactatttttaaaaaggcattaaaacctgtcatgttcacccacacaaagtctcaagtgaccatgtgtcttattcctgaaaactctcataattttcctgttaataaggcaaaggaaaagggaccatgtgaattgcagtcattggtaatcatttnaggactacagtgttgtctctagcttcatagctctaaagtccactatttgatggattaagtaggatagaagtggatagagtactgacattacaggggttaaaacccctggtctcagtaccagacattgagcaatggagcagggctgctatggatgattcatgctcctggagtttctcagggccagaaatgagtgattatttcctttgtgcatgacttgggccatgcctggcagacag

SEQ ID NO: 500028 - DNA, 633 bp, Homo sapiens
tttgtatttttaatagatatgaagtttcaccatgttggccaggctgatctcgaactcctgacctcaagtgatccgcccacctcggcctcccaaagtgctgggattataggcatgagccactgtgcttggccaggaaaactttttatgtgggacttcttgtctcttctctttaaggtattttttatattaatagcaatctgattttcctctgacctccaattcaaattgactaaatatctcaagcttcttgtataactattccttgggcccaaactttctcacctccattatcaacaccatcatctygaccatatatcaatctaattttttcacactaatctctggtactacaaggtaccagaaagttctgaattcaagagttgtctgatcaacaatatgcaacaacaacatgcttgtgtttcaatgataaatcctggcattggcgaggatgaagaaaaccatgcattctcatactctattgttctcaggagtgtggctttagatgtgaatcctagtctttgtatatcaatttgtttccaccatgagagaagccatccatggatagagctaataacaggaaatgccaagtagagtgataaaaataagtttttgatgacagtgttgattgctgaa

SEQ ID NO: 500029 - DNA, 494 bp, Homo sapiens
cagaaacaatgaaggccagaaggcagttgtaagatatatgctgacttgagcatggaataagagaaggaatatcagtcataaactggaagagacatttttatgaattaaatacatacccaaataacaaaaaatgagagaatttgtttctagcagactcatcttagaagaattattaaatttcttcagggtgaaaacaaggggtacmagacagtactttgaattcatgtgacaaaacactgaaaaagttattttataattttataaaatacacattaatttgcatacttctctttctttctcttagttgttttataagaaaaaaagcaatacctttaaatgatgtaatgaaatgtggagtctgtaatatataggaatgcaatatgtttgaaaataatagcacaaagaaggcaggtgggaacaaagggctactgtcatgaaatgacactaaaaagcatctacagaagaaatgaacaagaatgggtaaataaaaaagt

SEQ ID NO: 500030 - DNA, 260 bp, Homo sapiens
aagtgttttctgttcttactgtataaattctatcatggccaatttcaagctatyaaagagatatcactgtatgtagaattgagaagaaatgtggacaactggctggcatgatcccatagcagctggcttcaccacatcactgttgtgaacagacatatcactcttctaactctattttctctcccataaaaatgaaataataatgtgtttctcacagacagttgagaggattcaataaacaagatactagtatgtttagt

SEQ ID NO: 500031 - DNA, 562 bp, Homo sapiens
taagtccaagcagagtccccactaagtattaattcaaagggcaaaaagatgggagagagatacaaaaaaaagacaaaaatgagagttatctgaccaaagggatgggatttgaaagagaaggaaatgggcagaaaacaaaggggctcactaagacttcggagtggcactcccackttattccaaggtggccctaaattgttaaggatgctaaactggtcaaaaataagtaaggctgtgtcaaaatagaggtagcattaaaggcatgggaggcacaaaacttagatttgaatattattttcaatccactgattattacttatgctatttgagtcaaattggttaacatctttcagggtcttcagttttcttatctggaaaatggtgataatatagcttacctcattgactatgataggattaaataaggcaatgtattatagcgcaaaacacagtggttgggataggttttcggtaaatggttagtgggtgttggtaatattattaatttggtactaataatatcttagaagagcttttacttcctacagatggctatgacaaa

SEQ ID NO: 500032 - DNA, 610 bp, Homo sapiens
taaatgtgtgtagcacatccccctttgctctctctctttctgtctctgccatggtaagacatgctggcttcctcttccccttctgacatgattgtaagtttcctgaggcctccaaatcatactttctgtgcagcctgtggaactgtggatcaattaaatctcttgtcttcataaattacccaggctcaggtagttctttagaggagtgtgagaataarctaatacaaaagtcagtcatgtgttttactatctcttgagatgttaggcaaaagacaccaaaagtgcaaactttaaccaacacagaaagtgtccttgttatgtatctttagtagtgtagcatacatgtggggatgagatttctcatgtaagaacatgttacacttgacaattatttcataatgggctgagataggagtcaatgaaatatgataaatgagtataatttagtattgatagactttatttacaagctaaaataactacagtcaggtgatagtgatctaagcaggacatactgagcaaagaattccccctaaaatttgcgaagaaataatattttcttagtttaatagagaaaaatatcctaatactaagaaataagatcactaca

SEQ ID NO: 500033 - DNA, 610 bp, Homo sapiens
gcaatttaatatttaaaaccatcctataatgtagatgatattattattattattatgtttttacagataaactgagattgaggaaaaatccaagacaaattagaaagtggtgtagctacaatgtaagctgcatgcaatgtccaagttattactcagctcatgatgtccatctgtccatccatccgtccatccacccatttatccatccatccatccatccagccagccagccagccatccacaaaaagatgccctgccctggaagtaatgctatacattctactaaaatgttctgttcrccccttcgtaaaactctctgtatgccctttgcaaatccattatttatgcttttcctgctatcctccatgcaataaaaggccaaacctgccagattatctcaaaggttgtattcttgctagagagtcctgccggatagtcttcttagatttaggcagtaaaaagtactggctgaagatgcaatgagggaggaaagaaaggtccatgtatttcttttcttcttatcttctcctttggtgctttatctttggggtaattgttaattcttccataactactgcttttgcctagtggccccctcctctacagttcc

SEQ ID NO: 500034 - DNA, 610 bp, Homo sapiens
taaatgtgtgtagcacatccccctttgctctctctctttctgtctctgccatggtaagacatgctggcttcctcttccccttctgacatgattgtaagtttcctgaggcctccaaatcatactttctgtgcagcctgtggaactgtggatcaattaaatctcttgtcttcataaattacccaggctcaggtagttctttagaggagtgtgagaataagctaatacaaaagtcagtcatgtgttttactayctcttgagatgttaggcaaaagacaccaaaagtgcaaactttaaccaacacagaaagtgtccttgttatgtatctttagtagtgtagcatacatgtggggatgagatttctcatgtaagaacatgttacacttgacaattatttcataatgggctgagataggagtcaatgaaatatgataaatgagtataatttagtattgatagactttatttacaagctaaaataactacagtcaggtgatagtgatctaagcaggacatactgagcaaagaattccccctaaaatttgcgaagaaataatattttcttagtttaatagagaaaaatatcctaatactaagaaataagatcactaca

SEQ ID NO: 500035 - DNA, 497 bp, Homo sapiens
tttattactttttttcttctacctcatttaaaaataatttcagccacagaaaacaaataaagtgaatcaattattttgtgagggtaaattaattccttgatatataagaattaatatacaacttagcactaataaatctcaaaaggcaactrtgtttcaggctaagaacaatactttaatcaaagaaaagacaaaacaaaaccaatgctgattagcataacagggagaaaagaaaaagcatctacccattttagaagtatttgagaaattctatatccccaaaatagaaaaaaatatataaagtcagctaaccagactgctatagaaatgtcttcatttgttatctcttctttagcctatatgccttcctttccatcagatacactgaatgcttggcctacatatcactcagacacagctgagagaagggctgaagttagctcacgctgtagtttaaacagcataaggaggtcatggaggcacaactatattctcag

SEQ ID NO: 500036 - DNA, 664 bp, Homo sapiens
ctgctgaacaacctgagcagactctctgtagtctacattgagtttaaaaaaatctctcagcctcttttctttggtctcctttcccctcactgttcctacacattctacaatccaaacataccactgtatttattttataccttaagtcattgtacatgttgctccttgatcaatctggtaatttcttgggtctttcaaagattctacttttctaaagccttatctaataaaataaaacaaaattactrctttttacttcatatcaccatctagccttttacagagcttattattgtattaatcataccatattgcaattcacgtcagcttatttatttactaagttatgatcttcttcaagaattttagttgtaaaatcaagaagagagaaatgttaatgaaaaatgcccacaaagaaattgatatctgcttgttaattggtatataataaatatttgatgaattatatatcctcaaatgctttcaaagctcttaagtattccctctatcacagattccctatgacaatctaagattacttgtttaattaccacttgttaagtgtttggagcaacttttgaatattttaaaagaattttctattttaaacttaatttttcccctagtatatagacctctatttgacctttatctgtgaagccat

SEQ ID NO: 500037 - DNA, 687 bp, Homo sapiens
tctctacatttttcattacaggaagagttttccaattttatggctcaaactttttttataattaaaagcaaaagtaattggggtcacctactgtcctttggtaatccaattaatttcctttctatcaaatattttctacctaagaggcttgagagagtaggtataggtgtttttacttcaaatatgccattttgattaaatccaaagaattttcagttgttatataaagtactaacaaactatttgagcacatttttccaggttttgtgtttgtgtgtgtgtgcgtgtattaaagagaagtcttgccgggcscggtggttccccccggtaatcccggccctttgggaggccgaggtggggggatcacttgaggtcaggggttcgagcccagtttcaaggtggagacccccggtttttcttaaaaaaacaaaattacccgggtttggtggtgcccccctgtaatcccagctaatcgggaggctgaggcaggagaatggctttaacccgggaggcggaggttgcggtgagttgagatcgccccattgcactccagcctgggcaacaagagcgaaactccgtttcaacccaaaaaaaaaaaaaaaaaaaaaaaaaaagaaagaaagaaaaagaaaagaaaaagaaaagaaaaagaaaaagaaaaaaaagtagtctcattggtttcaacag

SEQ ID NO: 500038 - DNA, 687 bp, Homo sapiens
tctctacatttttcattacaggaagagttttccaattttatggctcaaactttttttataattaaaagcaaaagtaattggggtcacctactgtcctttggtaatccaattaatttcctttctatcaaatattttctacctaagaggcttgagagagtaggtataggtgtttttacttcaaatatgccattttgattaaatccaaagaattttcagttgttatataaagtactaacaaactatttgagcacatttttccaggttttgtgtttgtgtgtgtgtgcgtgtattaaagagaagtcttgccgggcccggtggttccccccggtaatcccggccctttgggaggccgaggtggggggatcacttgaggtcaggggttcgagcccagtttcaaggtggagacccccggtttttcttaaaaawacaaaattacccgggtttggtggtgcccccctgtaatcccagctaatcgggaggctgaggcaggagaatggctttaacccgggaggcggaggttgcggtgagttgagatcgccccattgcactccagcctgggcaacaagagcgaaactccgtttcaacccaaaaaaaaaaaaaaaaaaaaaaaaaaagaaagaaagaaaaagaaaagaaaaagaaaagaaaaagaaaaagaaaaaaaagtagtctcattggtttcaacag

SEQ ID NO: 500039 - DNA, 597 bp, Homo sapiens
tatttatttatttattttaagttttcttagagcaagtgtaaaacagcctttattctagggctaggtaagtcccactactaaagtgtgccgcctttagggtgtgtaacaagtgccctgggttttcacttgggactcccctgactgtcagaactaaaatggctcctggacctctgcaagttctggaaagtgttcactttaaactgcccagtcatcctttgcctgtccttgtggagattcaccctacgacggcacaccttagtaagcaaagactcaagaagactcctaagtaagtttctggatctctttctttgcatggatttctcctctgcaggttcctgacttgtcatctcaacaakactgcactttgcttgaggacccttctctgatccacaatcatgaaagtacctctgagcagaaaaccagggctactggaggcctcacctcatttgattccattctctgaggagacacaatcttgagctttccgttatcaaatgtcatgtctacttacctagtttttttatgaagggagggcaaatctggagctgatcaccctgttatagacagaagcagaagtctgatttggtccttggaatg

SEQ ID NO: 500040 - DNA, 551 bp, Homo sapiens
tcccagggaggctggtgaatgcaatgctaaattttcactacctctttgatgtttttctttatttgctttatgtcatatataacttgttttactagaacatcttgaacaggaagtggactgtcaggacactattaaaaacgtggtggtattgacaggatataaacagggagatgagaaggaagaaacaagtagccaagaggaaaatattagatgacagttaaaatttawatgataacataaaagaagtcagctcagaattgctctatccctgacacactaaccctagtgcctggcacatagcaggtattcagtagtataatttgaaatttgttaataattctcagagcaaaccatggtggcaagactaagatcaaaaggtagtttgggggacatatattattatatattacattatatattattacatgctgtatataatatataaccttgatcttctgagccactgtttttcatcaataaaaacatgaagacaatatccaccaaaaactttcattatgaagatcagaagaaatagtttatgtgatgcatcc

SEQ ID NO: 500041 - DNA, 511 bp, Homo sapiens
gtgaaaacttttcttgtattttacccaaatttcccctcaatgacatttgggtctatacctgctcatgtgtccaatcaattcagaatctcattattcaagaaaagacctcagttttgtactgtcaaaagaaaagatgtgtttgagataatgttcttcagtttaaaaaaattaaagttgttaataattaatgtgttcaaatcattttatcagatatatgtgtatacgatatgatagcatatagtatatatatgtatatatatgcattatcacttaggatatgtagctgcagtatatttttagctttggaagacagggctacttgtaagaaattgtgagaattaacaaacaaatggctcaaaatatcatacacatatgaaaattcctaaagggagaaaactctccattggcaaaatatgtcttggggaaattatgrtttttttcttcccctgtaaaatctttgaagccatggaaaattccaaacaacaggtgagaaaactaaaaagtagccact

SEQ ID NO: 500042 - DNA, 560 bp, Homo sapiens
agccaatgaagtaaattaagtgactctaactctaggtaatgttcattactacaaaatactttcccactcctactaaataaatgttaagtaattacttaaatgatataaattatgttayattactagcttgcttggagtgctcacatgaaagtcttaattactcatactttctcaccaccacaaaagaaagaaagaaataagttgcgggggtgtgggggttaagaaaggaggaagaaagaaaaggacggagggagacagggaagaaaataattgatttctgccattttggaaaacagagtggtagtttcttaaaaagttaaacacgtatcagccgggagcagtggctcacgcctgtaatcccagcactttgggaggccaagacgggcagatcacctgaggtcaagagtctgagaccagcctggccaacacggcaaaactacgtctctattaaaaatacaaaaattatccgggcttggtggcaggcgcctataataccagctactcaggaggccgaggcaggaagaatcccttgaacctgggggaggtggaggttgcagtga

SEQ ID NO: 500043 - DNA, 560 bp, Homo sapiens
agccaatgaagtaaattaagtgactctaactctaggtaatgttcattactacaaaatactttcccactcctactaaataaatgttaagtaattacttaaatgatataaattatgttacattactagcttgcttggagtgctcacatgaaagtcttaattactcatactttctcaccaccacaaaagaaagaaagaaataagttgcgggggtgtrggggttaagaaaggaggaagaaagaaaaggacggagggagacagggaagaaaataattgatttctgccattttggaaaacagagtggtagtttcttaaaaagttaaacacgtatcagccgggagcagtggctcacgcctgtaatcccagcactttgggaggccaagacgggcagatcacctgaggtcaagagtctgagaccagcctggccaacacggcaaaactacgtctctattaaaaatacaaaaattatccgggcttggtggcaggcgcctataataccagctactcaggaggccgaggcaggaagaatcccttgaacctgggggaggtggaggttgcagtga

SEQ ID NO: 500044 - DNA, 413 bp, Homo sapiens
aaaacatgcaaccaaaaccctcctctgggatgctgcttggccaggacattcttgggcatgagccagcagcaccagartcatccagagagcgatggaggaaagctttttcccttttgggctctgagaacaagcaagtggatgggaggtagaggggagggagggtggagagagagaatcagcatgatgtcttcccatgccacgcctggcacagccacactccttagccctgtccggggaagggagccactcctcgaaactacctcccaagacatgtaatgcatacagttctaccaggagaggttgattctcttggattgaacagtgtctctccaggtaggataaatgtgatattttagtgtgaagtggcccaatttaaatgcttttagctagaagccatttctccctcctctgaa

SEQ ID NO: 500045 - DNA, 413 bp, Homo sapiens
aaaacatgcaaccaaaaccctcctctgggatgctgcttggccaggacattcttgggcatgagccagcagcaccagagtcatccagagagcgatggaggaaagctttttcccttttgggctctgagaacaagcaagtggatgggaggtagaggggagggagggtggagagagagaatcagcatgatgtcttcccatgccacgcctggcacagccacactccttagccctgtccggggaagggagccactcctcgaaactacctcccaagacatgtaatgcatacagttctaccaggagaggttgattctcttggattgaacagtgtctctccaggtaggataaatgtgatattttagtgtgaagtggcccaatttaawtgcttttagctagaagccatttctccctcctctgaa

SEQ ID NO: 500046 - DNA, 552 bp, Homo sapiens
tccaaaactacctcttcccactccttctcrttggtatgtcaaagttagcctggtggcaaaatgcgcttccttgaaatacctgcctgtcagattcagaatatgaatgatggcctagaagcaggatctgtactgagggagggaccatcgttccatctcatctgaatccatcaggggcaccttcagcctgagaacccagctctcaaaatcatattaaggttgatagttcagggcactgtactttgaaaccgttccttttaaagaaccatgtaacactaagaactagttaatgctaattaggagcatcctcaaataatttttttcttgttttatttctttgtttcttgttttgtttttggggcagggtcttcctctgtctcccatgctggagtgcagtggtgcaatcgtgactcactgcagcctctggcaatcctcccatctcagcctcctggttagctgggaccacaggcacatgacaccaagcccagctcatttttgtagagacagggttttgccatgttgcccagactggtctcaaactcctgggctgatggg

SEQ ID NO: 500047 - DNA, 584 bp, Homo sapiens
gcctatatttgcactatttttaatttttgtctttttaatttttatttttccaaatattttttatctgtggttggttgagtccatggatgcagaggagcccatggatgcagggggccaactatactatttcaggtagtttacaagtgaaataggcttttggaggttgacatagaaatctataacattattcctgtggggaagtatatttccaatttcaaacaagtaatttgttaagtaaactttcagaactaaagtttgtcrtggctatttttagaattttgctactggaagggtgctttgtccattataacctgtaaatgaattgaatctactctaagccggtatgtaggcccccttccagctcagaaggtctatgaattcagtgcacattcctcacttttatagggtaggaaattgagatgagagtgtgtgaagttatttctataaagccgcaggtaaagtgttgccgggactctggcttcctcttccaccctcttgtatgtcagaacctaagagtggcgttttcataacccaaggaatttgggcaccagcacctgtttgtgggtagctggtgaatattgatg

SEQ ID NO: 500048 - DNA, 584 bp, Homo sapiens
gcctatatttgcactatttttaatttttgtctttttaatttttatttttccaaatattttttatctgtggttggttgagtccatggatgcagaggagcccatggatgcagggggccaactatactatttcaggtagtttacaagtgaaataggcttttggaggttgacatagaaatctataacattattcctgtggggaagtatatttccaatttcaaacaagtaatttgttaagtaaactttcagaactaaagtttgtcgtggctatttttagaattttgctactggaagggtgctttgtccattataacctgtaaatgaattgaatctactctaagccggtatgtaggcccccttccagctcagaaggtctatgaattcagtgcacattcctcacttttatagggtaggaaattgagatgagagtgtgtgaagttatttctataaagccgcaggtaaagtgttgccgggactckggcttcctcttccaccctcttgtatgtcagaacctaagagtggcgttttcataacccaaggaatttgggcaccagcacctgtttgtgggtagctggtgaatattgatg

SEQ ID NO: 500049 - DNA, 603 bp, Homo sapiens
acttttctttaacaggaagagaatctggtctgtatcaaggcgatatcctaccacacttgggaaatgaggtacaggagagcgaccctctactttatagtgttgccaaggctgtccaacttactggttcagataaattacagcccaaaatcagagcaatttcacccatggtggtcactgttccacagtggggacggtgctctgctggtgactatcaactcggtgatctcagtcattttccattcagggctttagtttcttcaactgcaaaactataagctggaatgagattatctccatgttccccactatctttataattgaatracagaaataattgaaagacccgggaacaacaatttcacagtcagagtaccctaatgctgaattacaacctgatgccaactaccatggcagttaaaagagactccgtgcccctggcactaggtcagacgttgtgggtagaatcacaggggaaagggagtgacaccctgactcggagtgggaggagggagattaacccatcacagagctactaaggaatgcttacagagcctcacatagcagcactgacctcagcatgattctcttgggaaggccataaat

SEQ ID NO: 500050 - DNA, 590 bp, Homo sapiens
tgtgtcacagaatgagtactgtgtatcaagggggctacacatttactcttttaaagcgggtgtcaactttgacaggccaaagatagggctaagtgtgacctttacaggagacaaaacagcattgaagtatgtggctgcaaactaaaacacaacctcagaatgaggagtttctactatttcagggctcagggttaccagaaccttggagagccccaacaaagtcaagtgctaggcctgtttgtacccttggccacacttaccatcctggctctgctagttcaggaaagctctctgtgtgtacgaccttagggatatttacccactagagcctcaagcctagactaccggttctcagagtaccagcagccggttcccagagtaccagcarccacagcatctcctgaagctgatttgatgtgcaaattcttggatcctactcagacctactcaattagcaattacagagaggggcccaggatccggtgttttaacaagccctccaggtgattctggcacatgctgaagtttaagagcccctgctacaggcccccttgtatcctggaagaatactcatagcattctctgtagaa

SEQ ID NO: 500051 - DNA, 590 bp, Homo sapiens
tgtgtcacagaatgagtactgtgtatcaagggggctacacatttactcttttaaagcgggtgtcaactttgacaggccaaagatagggctaagtgtgacctttacaggagacaaaacagcattgaagtatgtggctgcaaactaaaacacaacctcagaatgaggagtttctactatttcagggctcagggttaccagaaccttggagagccccaacaaagtcaagtgctaggcctgtttgtacccttggccacacttaccatcctggctctgctagttcaggaaagctctctgtgtgtacgaccttagggatatttacccactagagcctcaagcctagactaccggttctcagagtaccagcagccggttcccagagtaccagcaaccacagcatctcctgaagctgatttgatgtgcaaattcttggatcctactcagacctactcaatyagcaattacagagaggggcccaggatccggtgttttaacaagccctccaggtgattctggcacatgctgaagtttaagagcccctgctacaggcccccttgtatcctggaagaatactcatagcattctctgtagaa

SEQ ID NO: 500052 - DNA, 590 bp, Homo sapiens
tgtgtcacagaatgagtactgtgtatcaagggggctacacatttactcttttaaagcgggtgtcaactttgacaggccaaagatagggctaagtgtgacctttacaggagacaaaacagcattgaagtatgtggctgcaaactaaaacacaacctcagaatgaggagtttctactatttcagggctcagggttaccagaaccttggagagccccaacaaagtcaagtgctaggcctgtttgtacccttggccacacttaccatcctggctctgctagttcaggaaagctctctgtgtgtacgaccttagggatatttacccactagagcctcaagcctagactaccggttctcagagtaccagcagccggttcccagagtaccagcaaccacagcatctcctgaagctgatttgatgtgcaaattcttggatcctactcagacctactcaattagcaattacagagaggggcccaggatccggtgttttaacaagccctccaggtgattctggcayatgctgaagtttaagagcccctgctacaggcccccttgtatcctggaagaatactcatagcattctctgtagaa

SEQ ID NO: 500053 - DNA, 569 bp, Homo sapiens
aggtaccaagcctttgagacagaagcaaacatggtgtatcagaggagcaagttttacagtcttttccctgcacatgtatgctgttggattctcaggatagttttcatttctttatagcttttattctccatcactacacatgccctgcttcatctcctataactccagcgtaagtttctgacatcacatccctgacattggtttgcaactgccagcaggaatttgcctttttcactgtgggcctcatctgagtcatcagctatctcgtcattgactggagtggtctccatagttgtgtacatgtgccaagatgggggcagrggttaaatgatccacggtggtatgggaaaatataagaactttcatctatatttaatttattgaattcaaaagaactaatcaaaagattgatgtcaccaccaagaaatcataagtatgggaggggatggatatgttcattggcttggaatcattccacagtgtatacatacaacatcacattgtgccccataaatatacacaattatttgtcaattaaaagaaattagtatccgcaccctcactaggtt

SEQ ID NO: 500054 - DNA, 569 bp, Homo sapiens
aggtaccaagcctttgagacagaagcaaacatggtgtatcagaggagcaagttttacagtcttttccctgcacatgtatgctgttggattctcaggatagttttcatttctttatagcttttattctccatcactacacatgccctgcttcatctcctataactccagcgtaagtttctgacatcacatccctgacattggtttgcaactgccagcaggaatttgcctttttcactgtgggcctcatctgagtcatcagctatctcgtcattgactggagtggtctccatagttgtgtacatgtgccaagatgggggcaggggttaaatgatccacggtggtatgggaaaatataagaactttcatctrtatttaatttattgaattcaaaagaactaatcaaaagattgatgtcaccaccaagaaatcataagtatgggaggggatggatatgttcattggcttggaatcattccacagtgtatacatacaacatcacattgtgccccataaatatacacaattatttgtcaattaaaagaaattagtatccgcaccctcactaggtt

SEQ ID NO: 500055 - DNA, 535 bp, Homo sapiens
gctggggagcacccaagagtgaacttagaaatagatcctccccgcgactgagcgttaagaacaatgctgccctggctgacattcyggttgaaggcttgtgagagaccctgagcaaggggctctcagctaagctatgcctgtatgtctaagccataaaaattgtgagtcaatataagctgctaaattctggggtaatttggtgaccagaaataggtaaccaacatagggaaaataaggaaataaattgagaatcaaagtcagcgttactatagcattaatatgtaagggaaaacaagacaaacaagatgctgacatccctgaaaactaatttactgacagtgaaaaagtttgcataatcatggcaaattcaaattttaaaataataaaataaacaaggaaattgaagcaattagagaaaagctaataaaaatgaaaggcagataaaaataatctaataggagaacagatccctgaagaagacaacttaagaaatggaacagacaatggattccaagatatgagacaatgtaagaat

SEQ ID NO: 500056 - DNA, 535 bp, Homo sapiens
gctggggagcacccaagagtgaacttagaaatagatcctccccgcgactgagcgttaagaacaatgctgccctggctgacattctggttgaaggcttgtgagagaccctgagcaaggggctctcagctaagctatgcctgtatgtctaagccataaaaattgtgagtcaatataagctgctaaattctggggtaatttggtgaccagaaataggtaaccaacatagggaaaataaggaaataaattgagaatcaaagtcagcgttactatagcattaatatrtaagggaaaacaagacaaacaagatgctgacatccctgaaaactaatttactgacagtgaaaaagtttgcataatcatggcaaattcaaattttaaaataataaaataaacaaggaaattgaagcaattagagaaaagctaataaaaatgaaaggcagataaaaataatctaataggagaacagatccctgaagaagacaacttaagaaatggaacagacaatggattccaagatatgagacaatgtaagaat

SEQ ID NO: 500057 - DNA, 535 bp, Homo sapiens
gctggggagcacccaagagtgaacttagaaatagatcctccccgcgactgagcgttaagaacaatgctgccctggctgacattctggttgaaggcttgtgagagaccctgagcaaggggctctcagctaagctatgcctgtatgtctaagccataaaaattgtgagtcaatataagctgctaaattctggggtaatttggtgaccagaaataggtaaccaacatagggaaaataaggaaataaattgagaatcaaagtcagcgttactatagcattaatatgtaagggaaaacaagacaaacaagatgctgacatccctgaaaactaatttactgacagtgaraaagtttgcataatcatggcaaattcaaattttaaaataataaaataaacaaggaaattgaagcaattagagaaaagctaataaaaatgaaaggcagataaaaataatctaataggagaacagatccctgaagaagacaacttaagaaatggaacagacaatggattccaagatatgagacaatgtaagaat

SEQ ID NO: 500058 - DNA, 502 bp, Homo sapiens
ggtcaaggtgaagctggcaggtgatgagattgttcattgaacaaattcattgtaacttgcacacaaactgagtggtttacccactcaaagaagctaatgtagaaacctgtactatggttttatccaggtaattcccagggtcctgtgtcattgtccctcagggcctgtgatactttcttctaaatacctccaatggattcaaatccttttccattgacagtgggtgggatttgtgaaaacattccactgcctctgagtttcaagtttaaggaagaagatagctgatcacgctrtatatcacttttgatacagcagaatgcatggctttgacaagtcatggagatgctcacacctggattaatcactatgattaactcagcccaccagagaacccaaggctcccctgtggtccaggaagggcatattctgaaaaaaccctcctcaaattgtgtgtctgccctgccccagcagcactgttggggtgcctttgatggcagcccac

SEQ ID NO: 500059 - DNA, 621 bp, Homo sapiens
tgttgtgtgcctccttggtggacatattagtaggagtcagatgttgtgtgaagggggcagccaaaggcacatacaggccccaatgacacamgctaaaaggcgtgaagacagaaatacaagtgactacactcagggtccttcataagaagcctggactagcctgaaggaaggaatgctgggctaatggtgagcagtcagcttcaagaggagagcaggagatggcaggagtttggacttgatttgatccaaggggcagccttaggcttttgattaaagccaggtattttaatggttaaattggaaataatatgcagtatggatgaggatgtgggcagggagggtagtttctgaaagaacgctgtctcaagattccaagcattagattaagactgtgtcaaaggaagaatccacgagaattaacacattatagaatttcaaggtaacaaatccaatgtcaaacctcagaatacaaaaaaaaaaagggaatggctctgtccaaactggaaatacgagaacaaaaatttagtttgaatgacagtttaaccagtgcccatttgaacatctgatgcctgccccttgttggcacatacacaagtcactactcccttactccttccacct

SEQ ID NO: 500060 - DNA, 602 bp, Homo sapiens
tagctcaaatcatgctctggaacaggtctattgagttcacaccactgcagcccccaatgttgtggccagcactgtccacactctgacrctgggacctgggtgctgcccctggctcctttggcatcacagtctctgggaacaagaccttgggatgacggctgacggtgccagaaatgactttttgtggtctgtgtttcgttgtaccattggctcctgatttaatgcttttggcatgtgtatctatctgattgtccaaacctaagtcacatgcctacctaactgtatagaagaaagggaagtctcagggttgtacaccttctacagtaggaattctaccaagcttcaaaaggagaaaaattctctaaacaaaggaatgaagttcagacgctgagcatcccaaagaaggataactggccattataattcctcagcctttgtgacaattctgtgagctgctcagtgtcctttcatggctaacttgcagtgctttgtcacatctttatttgcctagttaaatcttgcccatgttctaacataaacacaagtatgtttgctgcaaagaagtcttccttacaccccaggttgggattaatcttttcctt

SEQ ID NO: 500061 - DNA, 655 bp, Homo sapiens
taatctggagggcctgaagacagaagcaagatttatagtaagcaagacaagagtgagagggaatggtttgggatcaactgggaagatggggtgccctgagaacttgccttggtgggccgtgggggcttgactcagcacctttatcagtgcagcctaggtgaggacaggcggggctaccaggatgaaattctaaagaaccaaagtctgaagggtgatgtctttctctgaggccgtggaagaacttgccgatggagggaccacagagggatctatgggagaacaacggsaactgcaggagaggtaagaagaccttcaaatatcagtgggcaagagttggggctgatagctagaggatagggccagggttcagaactctgaggctgagggaaagaatcaggatctgatgggggagaagaggtggggggtgtgatggggaggtgtgctggaagcctaggtgttgtgctgaacccctattaacctcaatagagaaggcaccaagttcaagaggccaaagaagagacctagagctagcaaatgtgacttgggggttttactgggacttacttacaggggagagggtccagtggtggcgagctggacaccttacctatagaaacaatccagtggtggtgggctggacaatataaccactgta

SEQ ID NO: 500062 - DNA, 609 bp, Homo sapiens
aattcagcatagtttctggcagatgaaactcacactatgtccagttgtggccaccccgtctagggccaggagtgaggcggggcagtgcctgtggagattcaaggcgctctgcgtccctccttagagggtcctcttctactttccctggaggtggaagtgcctttcccttctgttgacactgggtcgtcaccaacgtgagtcacagacattctctgtaagcttgtaaccaggatggcatatggaccaaaatgatacccaatttgaaaggtgtatggaaataaaacaaaaccctcccatgtagattattcccacagcaccgtctagaaagccagtgcccttcccctcattcccttttagccgcttctcaaaatgaccagtagggggcactgcagggtgagattcccaggcctcctgcacctcccattcatgaaaagttattggaacatgaagtatggaatataatacacctattttagctacagtaatacttgctgagaarttgattactcataaatgtaagatctcggttgttcttgagatgtgattagctaaagaaggaagttttagcttgaaggataggggatcagttctaactaggtgtttgtgaag

SEQ ID NO: 500063 - DNA, 311 bp, Homo sapiens
atgttttctgagcatcttctccatccttgctccttttctaccctaaattttaacttcattgatcaaatcaacccagcccagaagtggtctcttccttctctgaattctggtatcatttcctttttacctgtctcaatgcctatatcttcattcattcaacaaatatttactgaactctgtgtgtcaggcattgttcccattagtcaaccaaagaggcaatatacttttgcccycttggattttacattctatcaggtgaagacagataaaaggtgaaaatataataaaggagtaatctatataacatttta

SEQ ID NO: 500064 - DNA, 613 bp, Homo sapiens
gctgttgattactaagtgctagctctgtgtgacatttgccatgcatttccttatttgatctttctagcagacctggtaggtaattgaggcttagagagattaagttgcctgaggttgtacaactaatgttagaatgagattgggacccacctggtgtgactccagaattagagctcttaatcaataacatcctgtaagagacttaaggcaggtgaaatgaccttttaagtttctgtttatccctgtcttcagtggttgctgttatcacactatggccagaaaagaagcaagtgtgtgctgtgtaataaattctttctgttcttccatagaagacatcaggggtgaggtccacaaagttgcgcaaagcaaatgtaaagaaagtagttacttataaagaaatgtttgtaatgacctcaactcatatgcttgttgaactwtgtcttaagatgtagaattagcgcttgtttattttcatgcttgccatttgaaactgctagaggtggagtcaaagatcttaaactctttgctcaatagcaaagtcaagaaataattgattcaagcagatactttatattttcaagctcaataacttaataaaataaatttgatctcc

SEQ ID NO: 500065 - DNA, 573 bp, Homo sapiens
gctgaagcagattcttagcagtttgcctaaggtgatggaaatagccaacagcagaccgagatttgaaccatcagtctggttacagagtaaatatttgatcagcctgctttgtgcacaaatgtagttatcaatacaaactggattatgtatttttttatgatgttgattggtttgatagaaacatcttcagaaagagaagcagagctgcacaatgtttaattcccctttgttgccttcaattacaaaacatctgctgcatcacacctcacaatcattacacccttttctttgaccaacaaagacaacatgcctcaattttattcataattctgtaaataattgccaaatcaaaatgtcctttatacataagaagtgaaagttaagaaaagcagaaaatattaatatttatgttatttatttgtgaatgtcaaatatcttgaasaaatagaaacccaatttgatgtcatagtggtttattcttattgaaagataagcttaaaatgtgccagacagtattccaaatgctttgcatgtgtaaacccatttgattctcataactgccctttgggatgg

SEQ ID NO: 500066 - DNA, 410 bp, Homo sapiens
aaacaggttaaactactggaaggaagatgtttgaagggacagaaaacaatttgcagaagaaaattaaaacacgatttttttggttgtttcatcactgtagatctacattttgaaaagtctttcttttctttgtccttagtaacctgaatgtttattagccaattaatctcttataaatagctttttgttagatgatgatgaatcaatgattttatgctttgcacaagtttttgttcaagttttctcctccacctgaaatgctcttctccccaggatyactcttcagaactggaaaaattttactccttctttcaagtatatctcattcttttcctactataggagtcttcctgagctggtctagttgatgcttttcaatactcccataatacttttttgcaatagaagca

SEQ ID NO: 500067 - DNA, 517 bp, Homo sapiens
ctgcaaatgccacatgggcactttgggctgctcttacctgtgagcccacacgtggtgaaaagactaactgcatgatggactaattgaccctgactgtcatgagaagatggtgctgccacaagtgtgaatgggaggagaagatctggaatgcagggagtcagtggacctctcttgaggcttctgtgtggcaaacaagaaattgcagccattctgagcttcaatgagagtaggtagaaaggggttgctgtgctggatagtgaaaagccaagatgaccatctgaaggtcagtcaaaggcttcttgtcwagaagcttccaggtttcctgatgagatgtagcttgagagtcacttcctttccaatggacaaagtgatggaacaagtgacctattgtagaattagtctgagggtttcacctacatttgccattatcctggcacaccctctccatctcagggctgcgccacctttttgtgtctgtctgatacaggctaattgctctctgtgtacataggcagaa

SEQ ID NO: 500068 - DNA, 534 bp, Homo sapiens
gtccgggcacactttgaaccctggttctgctgttaactagctgtgtggccccgctcatttgttttcactggtaaatgggagtaatattaataacccacccacagaactgttattagggacagttgaaaaaatgcatctaaagcagaatctgatagacaaaaatggatgcaatttttagtgctaggcctttaagaagtggccctgtcctgagaagcacattaatctcgggctgaaaatgatattttaactgaaaattatgtaatcttcatgaattttttaaaaaagactataaagctcctcacaatgacttttccagcattgtgcttcatgtgggattggggaggaaacccaactccagcctcttcgattttcatgtggctttgatgaacccatgtgcttttgcttggctttagtgtgtgctcctgarggcctgcttagctctcccaccttgccaggtggcagtgacggggagccctgggctgaagcagctcacgacaccctcctcccctgagaccagggcactgtccacttcca

SEQ ID NO: 500069 - DNA, 589 bp, Homo sapiens
gctgttaagcagccttcaggccagaggggaaataagataatcacatacaaaaaacgaaataagaacataggtctgtgcattcttaaatgatcaatgaatggggcaggcattaagtagccatcaactggttcattcttttctttttctttcttttttttttttytttttttctttttttctgagatggagtctggctcttgttgcccaggctggagggcaatggcatgatcttggctcactgcaaactctgcctcctgagttcaagcgattctcctgcctcagcctcctgagtagttggaattacaggcacccaccaccatgcctggctaatttttgtatttttagtagagacggggtttcaccatgttggctaggcaggtcttgaactcctgacctcaggtgatccacccacctcagcctcccacttttcttttttcttttttctttttttttgagacaggatctcattctgacacctaggctgaaatgcagtgccactatcgtggctcactgcagcctcaacctcccatgctcaagcaatacttctgcctcagcctcctgagtagctgggactacaggtgcacaccaa

SEQ ID NO: 500070 - DNA, 589 bp, Homo sapiens
gctgttaagcagccttcaggccagaggggaaataagataatcacatacaaaaaacgaaataagaacataggtctgtgcattcttaaatgatcaatgaatggggcaggcattaagtagccatcaactggttcattcttttctttttctttcttttttttttttttttttttctttttttctgagatggagtctggctcttgttgcccaggctggagkgcaatggcatgatcttggctcactgcaaactctgcctcctgagttcaagcgattctcctgcctcagcctcctgagtagttggaattacaggcacccaccaccatgcctggctaatttttgtatttttagtagagacggggtttcaccatgttggctaggcaggtcttgaactcctgacctcaggtgatccacccacctcagcctcccacttttcttttttcttttttctttttttttgagacaggatctcattctgacacctaggctgaaatgcagtgccactatcgtggctcactgcagcctcaacctcccatgctcaagcaatacttctgcctcagcctcctgagtagctgggactacaggtgcacaccaa

SEQ ID NO: 500071 - DNA, 532 bp, Homo sapiens
gttaagcagccttcaggccagaggggaaataagataatcacatacaaaaaacgaaataagaacataggtctgtgcattcttaaatgatcaatgaatggggcaggcattaagtagccatcaactggttcattcttttctttttctttcttttttttttttttttttttctttttttctgagatggagtctggctcttgttgcccaggctggagggcaatggcatgatcttggctcactgcaaactctgcctcctgarttcaagcgattctcctgcctcagcctcctgagtagttggaattacaggcacccaccaccatgcctggctaatttttgtatttttagtagagacggggtttcaccatgttggctaggcaggtcttgaactcctgacctcaggtgatccacccacctcagcctcccacttttcttttttcttttttctttttttttgagacaggatctcattctgacacctaggctgaaatgcagtgccactatcgtggctcactgcagcctcaacctcccatgctca

SEQ ID NO: 500072 - DNA, 465 bp, Homo sapiens
gctgttaagcagccttcaggccagaggggaaataagataatcacatacaaaaaacgaaataagaacataggtctgtgcattcttaaatgatcaatgaatggggcaggcattaagtagccatcaactggttcattcttttctttttctttcttttttttttttttttttttctttttttctgagatggagtctggctcttgttgcccaggctggagggcaatggcatgatcttggctcactgcaaactctgcctcctgagttcaagcgattctcctgcctcagcctcctgagtagttggaattacaggcacccrccaccatgcctggctaatttttgtatttttagtagagacggggtttcaccatgttggctaggcaggtcttgaactcctgacctcaggtgatccacccacctcagcctcccacttttcttttttcttttttctttttttttgagacaggatct

SEQ ID NO: 500073 - DNA, 589 bp, Homo sapiens
gctgttaagcagccttcaggccagaggggaaataagataatcacatacaaaaaacgaaataagaacataggtctgtgcattcttaaatgatcaatgaatggggcaggcattaagtagccatcaactggttcattcttttctttttctttcttttttttttttttttttttctttttttctgagatggagtctggctcttgttgcccaggctggagggcaatggcatgatcttggctcactgcaaactctgcctcctgagttcaagcgattctcctgcctcagcctcctgagtagttggaattacaggcacccaccaccatgcctggctaatttttgtatttttagtagagacggggtttcaccatgttggctaggcwggtcttgaactcctgacctcaggtgatccacccacctcagcctcccacttttcttttttcttttttctttttttttgagacaggatctcattctgacacctaggctgaaatgcagtgccactatcgtggctcactgcagcctcaacctcccatgctcaagcaatacttctgcctcagcctcctgagtagctgggactacaggtgcacaccaa

SEQ ID NO: 500074 - DNA, 617 bp, Homo sapiens
acggttttatcaccatgttttacaaagtgcaaattgagacccggtgaaaaacagtgacttgctaaaggtcaaaggtcactcatggagttgggtggtggcacccttgcaggatgtacccccagccaatggtgtgttaatcattacctctgctaacagcttgtgatggttaatggtaagcgtcaggagttcgagaccagcctggccaacatggtgaaaccccatctctgctaaaaatacaaaacattagccgagtgtggtggcgggtgcctgtaatcccagctacttgggaggctgaggcaagagaatcgcttgaacctaggagacagaggttgcagtgacccgagatcgtgccattgcactccagcctgggtgacagagagaaacttcatctcaaaaaaaaaaaaaaaaaaaamaaaccaaaaaaacagtgtcaacttgattgcatcaaaggatgcaaagtattgtttctgggtgtatctggatgtttctgggcgtggccagaatagattaacacttgagtcagtggactgggacaggaagacccactcacagtgtcgggggcaccatccagtcggctgccagcacagctagaaaaagcaggcagaagaaggtggaaa

SEQ ID NO: 500075 - DNA, 462 bp, Homo sapiens
taacggccgctggtgagggcctgcagaccttccttgcaaatayatctttgttcttgggagcgggagggcagaagaagtttgcatgcttgtggttgacctgggaggagtcaggggcagaatttacaggaatggcctcctgggcatgtggtggcactgccctctgtcaggagtgtgccctgacctctgggcacccctctgccaggggcaattcctcttcccctgcctttggggagctgaaggactactacctcttctacctgaagagcaagtcccccaaggaggagctgctgaagatgtggggggaggagctgaccagtgaagaaagtgtctttgaagtctttgttctttacctctcgggagaaccaaaccggaatggtcacaaagtgagtgatgctggagtggggaccctggttcatcccctgcccctggcctgaccccagctgcaggccaggctgcggggct

SEQ ID NO: 500076 - DNA, 401 bp, Homo sapiens
gcatctttttcacaaagcagcaggaaggaraaatgctgagcaaagggggaagagccccttatataaccatcagatcttgtaacaactcactcactgtcatgagaacagcatggaggaaaccactcccacgattcagtcacctccacctggtctctcccttggcatgtggggattgtgggggtatggggattattaggatataattcaagatgagatctgggtggggacacaaagcctaatcatatcacttgagctgaggaattcaaggctgcagtgagctatgatcgtgtgtgccactgcactccagcctggaggagagagcaagaccctatctctaagaaaataaaataaaaataaataaaatgagggtaataaaaacaactctctccagtggtgttgtt

SEQ ID NO: 500077 - DNA, 557 bp, Homo sapiens
tgctgggtgggaggctcaggcagaggtgggaggaaggggaccctgacggggaacaaaaggggtgcagttttctgtaaaggacaaggcgatcaggataagaggcagggctccagaagaggcttaggagagccctggagagactgttctggggactgagagcttcaagtctaattcctggctggaatggagggkggggcaaagtctctgagaatgaggtaggacagtgatggggggagctcctcagactcagtcccgggccctggttgctgcctacccaccctgccttccctcgtggagccaggctgtgggcctgcgcctaggcttccttactgctctctgctctgcagaaacatccttgataagcaggatggcttctggccacctcaggatacactcttgtgccacctgccctatgctttacctaccgctttttcctggtggccaggggagtccttacgcagcttgaggaagtctactaccactttcactttgaccatctctcctagagggagggggcaaggctgaaagttttgaggaagaggagtggagagaaggga

SEQ ID NO: 500078 - DNA, 526 bp, Homo sapiens
cgagatgatgttcagaaagtataacatgctcaggtcccacgtctccacagtcaggggarggtcccttcattggcagcatcctgccactaagaaaactccgggagccgcctagatgccgcactgctccttggtccctccaaagggactatggggagctatgcagaaagaaaaccacataggcaggaatgtcgaaagactgcgggctctgcctggaggaactgaagtccttgtggcccgaagtttctaagcagaggctgggctgccgtttggcggggatttccccttcctgagcttacatttttttcaaggaccaggaagaaggggaccggagatgagcatggcaaaagcacgtgaggccctgattgcggtcagatagcaccctgtgttccttgctcctccaccgtgagtgtaaggacacaggtccaggcccttcccaacgctgtgctggggcaggagcccgcagggccccagagcctgggtggtccccgctccccgggctctggaagtccgctgttcggggtaaatt

SEQ ID NO: 500079 - DNA, 539 bp, Homo sapiens
cccagcacacaatgggcccacaaatgtgcccagctccctgggtgagagcagaatgatgggagcccaccgcccatgccctgcggagggtgtgcccagcctcggacagccagcaagacagacgcgggctcccctctgcctttcacccagaatcagggctcaaacaatatccgagcaggagggccaaactaaaagccacgtttttgtcagaagatttgccacatcagccctagagcgctttgctcccctctgcaaagcagatcctgggcccgggcagaggatgctgcagggagaagccctgggatggactgggaggaccagagcccgagaggygggatggactgggagggccagagcccgagaggcaggagccctggcctgggtccctgcctgtgcctgtctctcaccagatgcatcactggcacccgggtcccccgtttgacccagtgtcctcacctgaccaacaaggtgaacaactgctctgagtcatggagagaacatgtcaacagtgaaatccctgaggatgggaatagggatggaca

SEQ ID NO: 500080 - DNA, 558 bp, Homo sapiens
gcacccctcatcctaacatctccctgggagccccaggctgtcagcaccctgaccatttacagagaccagatcagtaacctgcctcctaccccmcccagcaaacagaattttaatttatccttttgttccaatcacagagtgaacagctctctagcatttttccactagtcgacaaaaccaaaagccaaatcatgggaactttttttgaagaaaatattaacaagaagcctgaaccattagcatatgggtgttgggatcacaaatcaaggccatcttcacttaggggcctctctgcacatacctcacctcctatcctcaggagtcatctcagggaatgaaggagggggaagctatctaaaaggtttgccctccactttcccccataaggactgttaaaatgacaagattagaataaactttcaattagtttgaatgcttgaaaacatagactatcattttccccactggtcagcagttgagggtcatggagtccagttcagctaacaacaaaatcaaggacttacagcgtgggtttgaatgtgggagcatgctataact

SEQ ID NO: 500081 - DNA, 654 bp, Homo sapiens
cttaatctcttgagatttttatgttggaaggaatcttattccaaagacttcaaaaacaaaattccctccctgcgtgtcactacacctctgtgcattccaaagacatctctggtctttggggataaaatgcacaaacgttgtagagtagaagacaggggcagccacgaggaagaggaaaaatggtgtgtgttgacaaagcacaatacacacggttgaatggggttgactcccttttcrttcactctgattcttccaggtgcatatccaagggtgttgctggcattattcgggaagtttgaaaaacagtgaattagaccctggtgctggggtcaccacaactagaggttctgtcctttcatacagagatttgctttgtttagcaggagggcactgagtgttctggaccctggggggaaacattcgcaggtggtacgtaagacaatccaacaaggagagggtgaaattattaggatttttacttctgatttatttcatacttttaaattcctattttttgcatgcactacatgtattagtccattatacaatttataataaatatatacatattagagatgcgtgctcaatgtatttttactgagatgtttgtataatgaaaaagatttaaagaatgctgctccagatgacactcag

SEQ ID NO: 500082 - DNA, 594 bp, Homo sapiens
acagctcttaccattcaaaagccttccttatacagagtccaatatgcctccttgttctacctccaagtgccacaggaaaaaggtttaattccacccctgctcaactcccatcaggcatctgagaactcttctcctggtagaagccctccaataccccagcctctccccacagtgtgattttacatttacccacactcggttcatgttcctctgaactcatgccaaggccagaatcacttcctgcttaatctcttgagatttttatgttggaaggaatcttattccaaagacttcaaaaacaaaattccctccctgcgtgtcactacacctctgtgcattccaaagacatctctggtctttggggataaaatgcacaaacgttgtagagtagaagacaggggcagccacgaggaagaggaaaaatggtgtgtgttgacaaagcacaatacacacggttgaatggggttgactcccttttcgttcactctgattcttccaggtgcatatccaagrgtgttgctggcattattcgggaagtttgaaaaacagtgaattagaccctggtgctggggtcaccacaactagaggttctgt

SEQ ID NO: 500083 - DNA, 654 bp, Homo sapiens
cttaatctcttgagatttttatgttggaaggaatcttattccaaagacttcaaaaacaaaattccctccctgcgtgtcactacacctctgtgcattccaaagacatctctggtctttggggataaaatgcacaaacgttgtagagtagaagacaggggcagccacgaggaagaggaaaaatggtgtgtgttgacaaagcacaatacacacggttgaatggggttgactcccttttcgttcactctgattcttccaggtgcatatccaagggtgttgctggcattattcgggaagtttgaaaaacagtgaattagaccctggtgctggggtcaccacaactagaggttctgtcctttcatacagagatttgctttgtttagcaggagggcactgagtgttctggaycctggggggaaacattcgcaggtggtacgtaagacaatccaacaaggagagggtgaaattattaggatttttacttctgatttatttcatacttttaaattcctattttttgcatgcactacatgtattagtccattatacaatttataataaatatatacatattagagatgcgtgctcaatgtatttttactgagatgtttgtataatgaaaaagatttaaagaatgctgctccagatgacactcag

SEQ ID NO: 500084 - DNA, 623 bp, Homo sapiens
tggtgaagatttgtatgcttaagtgccaagaagctgcatttacttatccattcactcactcattcatttattcatttactttaaaatatgtattgactgtgatccagacatgagctaggtattgtgaatatgagcaacaatgaacaagttaggcgtggtgtctaccctcttagrttgatgagaaagttagttggacacatacacaaataactgcaatacattggaatcagtggtacaataaagaccctaagagcatgctttgggaattaccaaagagattaaagacattttcacagagaaagtaatacttgaggttctctccgaggttagggactgtgtcttactcatcactgcgtcccccatcgcatagcacagggttttgctcataggaggtgctcatagatgcgtgccaaataagtaatcaagatctcaaagaacgagtaggagtcactacacagaatggagaaaggaggtgcattacaggaaaaggttaccgtgaagaaaggcccagagcatgggcctctggggaaggacaagtatttcagtatgggtgtggcgctgtgaacagcaggagatgaggctggagaaggaagctggctcagtatgccatgcaaagaagttca

SEQ ID NO: 500085 - DNA, 623 bp, Homo sapiens
tggtgaagatttgtatgcttaagtgccaagaagctgcatttacttatccattcactcactcattcatttattcatttactttaaaatatgtattgactgtgatccagacatgagctaggtattgtgaatatgagcaacaatgaacaagttaggcgtggtgtctaccctcttaggttgatgagaaagttagttggacacwtacacaaataactgcaatacattggaatcagtggtacaataaagaccctaagagcatgctttgggaattaccaaagagattaaagacattttcacagagaaagtaatacttgaggttctctccgaggttagggactgtgtcttactcatcactgcgtcccccatcgcatagcacagggttttgctcataggaggtgctcatagatgcgtgccaaataagtaatcaagatctcaaagaacgagtaggagtcactacacagaatggagaaaggaggtgcattacaggaaaaggttaccgtgaagaaaggcccagagcatgggcctctggggaaggacaagtatttcagtatgggtgtggcgctgtgaacagcaggagatgaggctggagaaggaagctggctcagtatgccatgcaaagaagttca

SEQ ID NO: 500086 - DNA, 634 bp, Homo sapiens
tgaacttcagagaagctgggcccttggttgatcacattcctatagtcagagaggctccttctcatggctgccatgataattttctacagaatcatgtaaaatatttagaactctttcgaaacacttgtggtttcattcataaatctggttagacattttgccatttttggaaatataaaaatagccaatataataaaataaagcccttataagagacatggattcatcacagaagacaattcaagatatcctgtatatgaaaaaacccaactctgataagaatacagaatgtagatgataatagagttctgtgatgggtggatgtctcctttcccatcctaaccagctcaaatggagtattcctgtttctgatgtgcctgaagggcyagttcatcaaacaaattgtgaaggatcattatagcagacagaccctagggtgacccccaatccttggtgttcacactctttgatacccttcctgagtgtgaaggggccctgtgactttcttctcaccaatagaataaggcaaaagctatgagatgtcactcccgtgattatattatggtgtaagactctgtctactttgtcaaggccagcagggtcacgcatgcttcctgctgcccttgacaaagcc

SEQ ID NO: 500087 - DNA, 634 bp, Homo sapiens
tgaacttcagagaagctgggcccttggttgatcacattcctatagtcagagaggctccttctcatggctgccatgataattttctacagaatcatgtaaaatatttagaactctttcgaaacacttgtggtttcattcataaatctggttagacattttgccatttttggaaatataaaaatagccaatataataaaataaagcccttataagagacatggattcatcacagaagacaattcaagatatcctgtatatgaaaaaacccaactctgataagaatacagaatgtagatgataatagagttctgtgatgggtggatgtctcctttcccatcctaaccagctcaaatggagtattcctgtttctgatgtgcctgaagggctagttcatcaaacaaattgtgaaggatcattatagcagacagaccctagggtgacccccaatccttggtgttcacactctttgatacccttcctgagtgtgaaggggccctgtgacttkcttctcaccaatagaataaggcaaaagctatgagatgtcactcccgtgattatattatggtgtaagactctgtctactttgtcaaggccagcagggtcacgcatgcttcctgctgcccttgacaaagcc

SEQ ID NO: 500088 - DNA, 645 bp, Homo sapiens
ctcttaagtttaaaaaggagtcatacaaaatattttaaactaaatgataatgaaaacatgacataaatgtgtgggatgcagcatataatattttttctaatactattcttatattagaaaaaaagataaagtgaaaatcagtaatctactcttgcatattaagaagctagagcccctcagtcaggtctcgtcctggatgctgggtctgattggagctcactgagaaaggttatggggacccagccatggaatatgaagagcagtaagccggaggcaggcagggcatttgtgagcacatccaagaggaaaagctataaagamgtatacttggggtggaggaggcagagcaagatggccaaatagaagccttcaccaatcatcctccccacaggaacaccaagccaaacaattatccacacaaaaacaagttcctaagaaccaaaagtcaagtgagtggtcacagtacccggttttaacttcatatcactgaaaaaggaactgatgagggccttgaattgccaacatcacccctcctccatcccccatcaggggccatgtgttgcagagacagaatctttgcacttgtgggagggaaagcacagtgattgctggactttgcattggaacttagtgctgtcctgtcac

SEQ ID NO: 500089 - DNA, 645 bp, Homo sapiens
ctcttaagtttaaaaaggagtcatacaaaatattttaaactaaatgataatgaaaacatgacataaatgtgtgggatgcagcatataatattttttctaatactattcttatattagaaaaaaagataaagtgaaaatcagtaatctactcttgcatattaagaagctagagcccctcagtcaggtctcgtcctggatgctgggtctgattggagctcactgagaaaggttatggggacccagccatggaatatgaagagcagtaagccggaggcaggcagggcatttgtgagcacatccaagaggaaaagctataaagacgtatacttggggtggaggaggcagagcaagatggccaaatagaagccttcaccaatcatcctccccacaggaacaccaagccaaacaattatccacacaaaaacaagttcctaagaaccaaaagtcaagtgagtggtcacagtacccggttttaacttcatatcactgaaaaaggaactgatgaggsccttgaattgccaacatcacccctcctccatcccccatcaggggccatgtgttgcagagacagaatctttgcacttgtgggagggaaagcacagtgattgctggactttgcattggaacttagtgctgtcctgtcac

SEQ ID NO: 500090 - DNA, 560 bp, Homo sapiens
gacataatcttgttatgaaatctgtttggaaacactatgactgagctgctttgcttggtcattctccaatcccacgtttctggctttaggaggctcaggcaccatttatttgtaaaggaagtagtagcacacacctcctgagggcctactttgttcaaaatcaagcctcattctaaatgtgcacaatgtagccagcatccatgcagcagagaccagggactggacacctccaggggtggtagatgagccaggtccccgagtgttgtcatgtgagccaagggcctcccttctcatcacagtgcaccagagctgtgttcgtcatttaaaaaacatccctgaagtcagtgcttgtcatatgctgtgggctctattctgagcacctttagtctttctgyggcattgtgaggtggaaactattataaccatttcacaaggagaaaccgggtggaggctggtgttgggtaggcaagagggtctcatgcacctgctctgggcccaggaggcctgcaggtcccccttagagacccaagtccccagagctggaggccccttctagagga

SEQ ID NO: 500091 - DNA, 603 bp, Homo sapiens
attaggaattatacagacctatggtcgcatcctagctggggatctcttactcacttctctgagttgtcactttccctttcggaaaaatgaggatgataatatctatctgaacacggactctccatatgccaggcttgattctgtgtgcttcatgagtatgtctcatttaatcctcaaaaccaccctatgagtgggtattaacattgactrtattttcagttaagaccccaaaggaagagagaagttaatgtaaggtcacttgataaatgggtagtcaggatttgaactctggctgtttgacttcagagtctgtacttttagccactgcagtagtggttctcaactgaggatgattttgcctcccaggggacatttcacaatgcctggagacaatttttattgtaactgttgggaggaggtgctactggcatttatagagcagaggctagggttgctgctagccatctgacaatgcacaggacaggctcccacaacaagcattcattcggtccaaaacgtcagtagtgtctccattgagaaaccttgcactacgttgtgctccctccataaactcaagtttgctaagagccaggcccagagcag

SEQ ID NO: 500092 - DNA, 656 bp, Homo sapiens
ttttgcctcccaggggacatttcacaatgcctggagacaatttttattgtaactgttgggaggaggtgctactggcatttatagagcagaggctagggttgctgctagccatctgacaatgcacaggacaggctcccacaacaagcattcattcggtccaaaacgtcagtagtgtctccattgagaaaccttgcactacgttgtgctccctccataaactcaagtttgctaagagccaggcccagagcaggcccacaataaatgatgctccsttctcaaagtttgcaggttgtagttcagagaagaagaatcacccagtctccagctttattcagcagctcaagttttattcttaatggttcccagctgcttggcttctctatcttgggagttcctgtttttgtgagacatgctgacagttatcaagagttggggcaaaactctccttgggagaagtccaacttctccaagatctggcaagttcagacgttccacagagaatgcataccttcctggcctctgacctcatggcatacatgattctgtgtggttgggttttgtgcagtttctcctttcatgggaactgacatttctcaccctttgcgtggaagaccttgtggggtgcttgccaccatcaatgaggcgttggtatgaat

SEQ ID NO: 500093 - DNA, 591 bp, Homo sapiens
ttttcaagtgccaacagtgactgttaaagaatagtacccccatataataccaaatattaagaaatgccaattccctgtgaacactccagattgttgcaaaatgtatgaaggtaaattaatcaagtaacagatgaataggattcttaactctaggctgtgtaaatgctgaagggcttttaccaaaacccaggaaatttaccttggaatagttgatcttaggcccttctttctggmtgccattagatgacagcatcagtttgtctactgaggcattcttattttgaaacaaaaaacatgaggtcaccacagtgttactctgtcaagtagggtagagagtatacgttcatcttatccaaatgggattttgcattattatcatgcacgtttataaaaatggtgcatcaggatacctcacttacgccatggaaaatcatctcttccctcaagggactgctactatctctgctgacttccatggtaatattaaggtttagattctatgtgagcattagtctacatgggatatagattttcttcccaaagaaatttatgtctgtggactgaaaatttatgaaaaagtcaataaaagct

SEQ ID NO: 500094 - DNA, 542 bp, Homo sapiens
gtgccaacagtgactgttaaagaatagtacccccatataataccaaatattaagaaatgccaattccctgtgaacactccagattgttgcaaaatgtatgaaggtaaattaatcaagtaacagatgaataggattcttaactctaggctgtgtaaatgctgaagggcttttaccaaaacccaggaaatttaccttggaatagttgatcttaggcccttctttctggatgccattagatgacagcatcagtttgtctactgaggcattctkattttgaaacaaaaaacatgaggtcaccacagtgttactctgtcaagtagggtagagagtatacgttcatcttatccaaatgggattttgcattattatcatgcacgtttataaaaatggtgcatcaggatacctcacttacgccatggaaaatcatctcttccctcaagggactgctactatctctgctgacttccatggtaatattaaggtttagattctatgtgagcattagtctacatgggatatagattttcttcccaaagaaattt

SEQ ID NO: 500095 - DNA, 591 bp, Homo sapiens
ttttcaagtgccaacagtgactgttaaagaatagtacccccatataataccaaatattaagaaatgccaattccctgtgaacactccagattgttgcaaaatgtatgaaggtaaattaatcaagtaacagatgaataggattcttaactctaggctgtgtaaatgctgaagggcttttaccaaaacccaggaaatttaccttggaatagttgatcttaggcccttctttctggatgccattagatgacagcatcagtttgtctactgaggcattcttattttgaaacaaaaaacatgaggtcaccacagtgttactctgtcaagtagggtagagagtatacgttcatcttatccaaatgggattttgcattattatcatgcacgtttataaaaatggtrcatcaggatacctcacttacgccatggaaaatcatctcttccctcaagggactgctactatctctgctgacttccatggtaatattaaggtttagattctatgtgagcattagtctacatgggatatagattttcttcccaaagaaatttatgtctgtggactgaaaatttatgaaaaagtcaataaaagct

SEQ ID NO: 500096 - DNA, 591 bp, Homo sapiens
ttttcaagtgccaacagtgactgttaaagaatagtacccccatataataccaaatattaagaaatgccaattccctgtgaacactccagattgttgcaaaatgtatgaaggtaaattaatcaagtaacagatgaataggattcttaactctaggctgtgtaaatgctgaagggcttttaccaaaacccaggaaatttaccttggaatagttgatcttaggcccttctttctggatgccattagatgacagcatcagtttgtctactgaggcattcttattttgaaacaaaaaacatgaggtcaccacagtgttactctgtcaagtagggtagagagtatacgttcatcttatccaaatgggattttgcattattatcatgcacgtttataaaaatggtgcatcaggatacctcacttacgccatggaaaatcatctcttccytcaagggactgctactatctctgctgacttccatggtaatattaaggtttagattctatgtgagcattagtctacatgggatatagattttcttcccaaagaaatttatgtctgtggactgaaaatttatgaaaaagtcaataaaagct

SEQ ID NO: 500097 - DNA, 591 bp, Homo sapiens
ttttcaagtgccaacagtgactgttaaagaatagtacccccatataataccaaatattaagaaatgccaattccctgtgaacactccagattgttgcaaaatgtatgaaggtaaattaatcaagtaacagatgaataggattcttaactctaggctgtgtaaatgctgaagggcttttaccaaaacccaggaaatttaccttggaatagttgatcttaggcccttctttctggatgccattagatgacagcatcagtttgtctactgaggcattcttattttgaaacaaaaaacatgaggtcaccacagtgttactctgtcaagtagggtagagagtatacgttcatcttatccaaatgggattttgcattattatcatgcacgtttataaaaatggtgcatcaggatacctcacttacgccatggaaaatcatctcttccctcaagggactgctactatctctgctgacttccatggtaatattaaggtttagattctatgtgagcattagyctacatgggatatagattttcttcccaaagaaatttatgtctgtggactgaaaatttatgaaaaagtcaataaaagct

SEQ ID NO: 500098 - DNA, 625 bp, Homo sapiens
gaattaagagaacagttcaatttaacattcagtgaaaactaagaggaaaatgttgctttacccatgtgggagagaagaggaaacaggtttacagaaatgacataatttgtatgaggtcactaagctagaaacattgagagacaatatcatcaatttagggttgaggatttgaactcaggtttttgtttgtttgtttgtttgtttttcgtttttttgtttttttgtttttaagagacagggtctcactctgtcacccaggctggagtgcagtggcatgatgatagctcactgcagacttgaactcctggtctcaagtgattcttccacctcagcctcccaagaagataggactccaggtgtgcaccacacacctggctaattttttaaatttttgtagagatgasttcttgctatactgaccaggctgatctccaactcctaggctcaagtgatcctcccacttcagcctcccagagtgctgggattacaggcatgagccaccacgctaggcctgaacccaagtctttctggctttaaaacccacactgttaaccactgttctaaactgtcttcgtgggtgaactgccactcatcagaaaatccaggaatgatagaaataaccatc

SEQ ID NO: 500099 - DNA, 360 bp, Homo sapiens
cctttggagctaaaattggagacatttttctatgatttctgtaatcaccttgggaaagagaaacaagtgggaagcgatattacttggctggaaatgaaattgagagaaggaaaaactttgaaagatctgaatctggatacacttggggattttgtggttagaattttgcctgttggttaggatctcacctgcttgtttgattctccttaagatgaamaagagtgttgcctccaaagctgagatagagcaagggactgacaagcactgagaatgtgatgtgtcagaggccatgcaaactgcaatagtagacatgcctgaaaaaacacttcacgtctttccacccaggatggtgttaaatta

SEQ ID NO: 500100 - DNA, 454 bp, Homo sapiens
ttaaataataaaatttgaaagttgaaattggtttttgatctatgggctatggaatgaatgttctgtgtctccatactgagacatgaagtatgctctcccatgttgttgaaaaaacaatgttgatagacttgctcaacacagggttgccacaaatcttcaatatgtaaaaaatgcaatatctatgaagtgcaataaagcaaagatcaatataataaggtctgcctgtatatttttctgtttttcaggtatcttttaaaatttggacatttggtatttccctgaaattattgtgattttagctttttatttaagaatttatcttttttattaaaatgtgtttcaagtgagrcttttcagaaaagttagtctataaaattcttaaaaaggggtttatttaactttagtaaacttgataaccattcagtcattagcaaacttgcattcatcacttctg

SEQ ID NO: 500101 - DNA, 535 bp, Homo sapiens
caagataaaaatatagtgtcctttactgttacttatgaggtcatagttgacctttagacagttccaatgtccacgctatttcaggtttgttctaaatctataggatttggagtagaattggccactgcaaaatattagactttctttccctctaaatctctaaatttcaggcatacttttaggaacaaacttgttatgattaaatggtgaaagatggcttaatgtgtaatatcaacagcattaaaactttttattatactgctaaatgtggccttaaagagaaacagcattcttcattttacatattgagcaaactaaacttagaaatcataaaggctgcatgtgaaaactctagacacaacaggactctgtttttatactgtagcrtctccattactccataatcgcccctcataagaatacttaccatggcatagtcaagtataccaattttgggagaggttttgaaagaatcaacatacaacaaataaaagcgaagtactgcagatgaaattggaggacctaattacaatca

SEQ ID NO: 500102 - DNA, 615 bp, Homo sapiens
tttccttcagaaaagttttaaggttatctttatttacacatttatcaagtattttttggtttgtttcctttattattgttgttattgtgataacttggtgtttttgtgtctatgaattgcrttaaatgccagatgttttgttgaatctcactaattactgaacctcctgttgtgtgaagcagtatccatttattttattttacagaaataccatatgtagatgagaattattatttgttaattttaacttgtgtctatatttccttttttattaaaaattctgtaatattaactaatggtagagaggaaaaactgctcttcctctttaaaatttctgaggctatttcaatttgggtctctatcaaacatgatgatagcttttgggtggaaatagtcacattttatctcttagtagcttgtattatctattcttttaacaagagtttatttatttatttatttattttacagacagggtcttactctgtcacacaggctggagtgcagtggtgtgatcttagctcactgcagcttcaaactactaaactcaagagatctccctgcctcagccactctacactagagtagctgggactacaagcacatgccaccaag

SEQ ID NO: 500103 - DNA, 489 bp, Homo sapiens
agttgttctatagtaataattagaaatatatctttatccattcatcctttagtggacatttaggttgattccatatattggctattgtgaatagtgctgcaataaacatgaaagagcaggcatctctttgatatactgatttcatacccatattttaaaattctcattttatgtctctacttcatacctcttatataccacaatgtcaatataaacaaaattaaactgctattttcccccgaagtttgcctgcatgtgatgaaaccttaatcaaactagtttcctttgatagtatttcagatttagaagtcattcttartctctccttctttctcatgaactcaccttctcattttaaaaatatataaagtttattttattttaattttaaatatttctgtaatcctttattaactactgtttatacctatgtttaaaatgctgtcaattttcaaatgaattgctatgccatctgcctaaggagtatcc

SEQ ID NO: 500104 - DNA, 616 bp, Homo sapiens
ctcctatcagtgtgttttgttgttgctacttattgttattatgtttgtttaatggctttcctgcactaaccatttgaagctgttactggccgcgaatccatatgggtctgcagcaatcttagttcttgcctcctcagaagaaagaattcaactgaagggcataaggcagaaaaagagacaggcaagtttcagagcaggagtggtagtttatttaaaaggctttagaacagaaaagaaaggaaaggaaaggaaaggaaagtacgcttagaagagccccaagtgagcactaagatcaagggtggtgtttaaccttgttcttaggactttataggctggcctcttcctcatgattcttcacttagggtgggctgcctgcatgcacagtgccctcttgaccctcgggaagtgggcacatggggtgtgtttaggaagttgtacgcatgcccatctgaggytttcttcccttttctaatggagtgctcccggaagttcgtactccgccgtcttgtctcttaatgtatatccccaggaagttgcttctctctggcatctgcattcagttaaaacagtcgtgcaataggtgtggaccatcaggaaatggcctctccctagtgcc

SEQ ID NO: 500105 - DNA, 428 bp, Homo sapiens
ttgttattttgaaagtctgaagaaaataaagaccctaattcwccaaatgaggaagattaattcctcattcaacaagtgcattcattcaacaaataattatcaagcaccaactatgcacaagaactgtgctgagtgatgggcctgcaacagtgaaaaatacagaccatatttttctcttcattcaacttctattttactaggtgagacataaaataaacaatctaaacaagcaagaaactatatgtgaggtgatgagaaatgttaaggagtaaaagcagagcagcagtgagtgcttgtggatgcaagtttatgtagggtgactaggaaaggtttgctgagtaggtcatatttcagtaaagatctggactgataaaagtgagggagtggcccatgcagctatctggtacaacagggttacaggcagaagg

SEQ ID NO: 500106 - DNA, 504 bp, Homo sapiens
taactgctggagctctgcaggcaggactgcgttttgtttttctctgtatgccagcagtrttgcgcatggtgggagtgtgatgaatatcctatggatggacgacctgcccagcattccccgaggaagtggactgaaggatgcccacagcagctgggtcttagcagcaagagtgtcatctgtaaccataactaccctttgataagaaaacgagagcaggaccatctgtaggccatctgggagacccagctctggtgactgggtcctggcacatgtatttgctttggctgcctcctttttctctagagagcagggactttgtatccccagagtccagcacaagcaggacctcaatcaatgtaggtttgaatggggtttccattgctatccagtgtcttagcttggattctcctcagaacagaccctaggacaagacttgggtgcaggtcgtttgtttaggatgtgatcccaggaagcagaagtagaggaagtgatattgggaagaga

SEQ ID NO: 500107 - DNA, 534 bp, Homo sapiens
cagctggaatttgggttctgaattctgcattgatgaggctgaattcataatgtgggaatttccctcattagagaagcctatttaaatgataagtggccaggcgcsgtggctcacgcctggaatcccagcacttcgggaggtcgaggcgggtggatcacgaggtcaggagttcgagaccagcctgaagaaaatggtgaaaccccgcctgtactaaaaatacaaaaaaacagttagctggacgtggtggcagtcgcctgtaatcccagctactcaggaggctgaggcaggataatcgcttgaacccgggaggcagagattgcagtgagccgagatcgagccactgcactccagcctggacgacagagagagactgcgtctcaaaaaaaaaaaaaaaaaaaaaaaaagataagtgacaacaaggaccggacaaaagtgcttgtaggttattgatagtagagagaacttgttttgaatacatgtaaaggaaacccaatacaaagtaggttaaggaaaagagggaattaatgggctcac

SEQ ID NO: 500108 - DNA, 613 bp, Homo sapiens
tatgtctctaaatggtgaccatattttcaaagctccaaaccaggacacagagcctgatacacagccttacaggacatttgaaatggggggctgccaggacagagtatttggagtggaggtatctggcctcctagctgctgtgcccaatgccttaggagtaacatcatttctaaattacagatgcagtgaggccaatttggatatccagtggggaaacctggggaccatatatgttctaaattgatatctgcctrtctatctaactatctatctatctatctatctatctatctaccatctatctatatttttctatttattgccagaaagtcaagagcagccttcccagaggacaagacaacaacaaaacctacagaaattctctctagggtctcagtacatgcaagatctggctctttgctgcctgtgtggctgcccaatcccagcctcagcaatgtctgaatgaagggtttgtgggcatctgcatgatgcaagccatgagctggggagccgcacagtatgggttctgtcttctggctggctgaaaaggcttctcaggctctgaaagtaccaattcttcaggcatgagtgctggtggaggattatcttttaa

SEQ ID NO: 500109 - DNA, 673 bp, Homo sapiens
tttggtaacaaataatttccttttaagttggaggaaaaaagagaatgtcttacttttgcctatgtctctaaatggtgaccatattttcaaagctccaaaccaggacacagagcctgatacacagccttacaggacatttgaaatggggggctgccaggacagagtatttggagtggaggtatctggcctcctagctgctgtgcccaatgccttaggagtaacatcatttctaaattacagatgcagtgaggccaatttggatatccagtggggaaacctggggaccatatatgttctaaattgatatctgcctatctatctaactatctatctatctatctatctatctatctaccatctatctatatttttctatttattgccagaaagtcaagagcagccttcccagaggacaagacaacaacaaaacctacagaaattctctctagggtctcagtacatgcaagayctggctctttgctgcctgtgtggctgcccaatcccagcctcagcaatgtctgaatgaagggtttgtgggcatctgcatgatgcaagccatgagctggggagccgcacagtatgggttctgtcttctggctggctgaaaaggcttctcaggctctgaaagtaccaattcttcaggcatgagtgctggtggaggattatcttttaa

SEQ ID NO: 500110 - DNA, 673 bp, Homo sapiens
tttggtaacaaataatttccttttaagttggaggaaaaaagagaatgtcttacttttgcctatgtctctaaatggtgaccatattttcaaagctccaaaccaggacacagagcctgatacacagccttacaggacatttgaaatggggggctgccaggacagagtatttggagtggaggtatctggcctcctagctgctgtgcccaatgccttaggagtaacatcatttctaaattacagatgcagtgaggccaatttggatatccagtggggaaacctggggaccatatatgttctaaattgatatctgcctatctatctaactatctatctatctatctatctatctatctaccatctatctatatttttctatttattgccagaaagtcaagagcagccttcccagaggacaagacaacaacaaaacctacagaaattctctctagggtctcagtacatgcaagatctggctctttgctgcctgtgtggctgcccaatcccagcctcagcaatgtctgaatgaagggtttgtgggcatctgcatgatgcaagccatgagctggggagccgcacagtatgggttctgtcttcyggctggctgaaaaggcttctcaggctctgaaagtaccaattcttcaggcatgagtgctggtggaggattatcttttaa

SEQ ID NO: 500111 - DNA, 613 bp, Homo sapiens
tatgtctctaaatggtgaccatattttcaaagctccaaaccaggacacagagcctgatacacagccttacaggacatttgaaatggggggctgccaggacagagtatttggagtggaggtatctggcctcctagctgctgtgcccaatgccttaggagtaacatcatttctaaattacagatgcagtgaggccaatttggatatccagtggggaaacctggggaccatatatgttctaaattgatatctgcctatctatctaactatctatctatctatctatctatctatctaccatctatctatatttttctatttattgccagaaagtcaagagcagccttcccagaggacaagacaacaacaaaacctacagaaattctctctagggtctcagtacatgcaagatctggctctttgctgcctgtgtggctgcccaatcccagcctcagcaatgtctgaatgaagggtttgtgggcatctgcatgatgcaagccatgagctggggagccgcacagtatgggttctgtcttctggctggctgaaaaggcttctcaggctctgaaagtaccaattcttcaggcatgagygctggtggaggattatcttttaa

SEQ ID NO: 500112 - DNA, 486 bp, Homo sapiens
tgggcgagtgtctttcctgtttggagtaatcataatgactcctccaagtcatcgtgtcaaaaaaggaattgagcccacagggaaggaaattagcataattgcttttgtcgaataacacttgcaagggaaagaaaacacagacgggagaaaggagggtgcagccctccctggtgtgagcgygctgtctaccagctccgtgctgggccagcccctgggatcctcttgccttcggggctctcacccacacctcctggctctctccccttctgttttccatatgcaaacaggggcatcttttgtcttagtaaattactagccactggaaatacttcagtattcaaaatatcactgattctaaggagtgactaaataaaaacttcaggctgggctcactgctccctatttgttaggaaagccactctaccaagagctaaacatgcccgagagcacagcaattagcttcatgttgggaggagacatacgtaa

SEQ ID NO: 500113 - DNA, 648 bp, Homo sapiens
agctggtgcatcgaaatacagggtctccaaaatatctcaagcactgacctcaggttttacaacagtgacccctaaaccatactttctaatcttgtagctaattcgttagtcccgcaaaggcagtctagttcccaggsaaaaagagggtttgttttggcaaagggctattattgtctttttttcaaagtcaaactataaactaagttcctctcaaagttagttcggcctatgcccaggaaggaacaaggacaacttggaggctaaagcaaaatggagttggttaggtcatatctcattcactgtcataatttcctcagttacaatttttgcaaaggtgatttcactctggtgccttgcttgatttcagtttacctaactctctaagaagacttaaactcttctgtattttgcaatgagaccggtggataattaaaacctgcatttggcattctttaacatatatactgttagatcattcatcataacacaacctctacctctactttcatttgcctttgtcttgctttcattcattaggaatgtgatttaaaaaagaaatactcccttggactaaagcttcatatacttggtctcagcccaggattgaaatacttgaaatgcttgtgataagttggcttgcttattttt

SEQ ID NO: 500114 - DNA, 514 bp, Homo sapiens
cgggtccacataaatatattcatgtccatcygggctgattgattcaatgaccctccagcgaatttcatacctcggtttctataaatgaccaggacaggtaactggtgaattaccaaagtcccagtgcaccagagcttcactgaagcagcacagtgactggacacagtagagtccaacaacgttcactccacatgtaattgctgagctccttctctgtgccaagcactgaactaggttgctatgcttgttctcattggcttcaaagatctttagttttatgagaaaatatctacctgtttccaaatgacaaccaggacaataagtgagatgatcacaatcaccaacagcaccaggactgcagcagccaccgtgagttcagaacgcagggctacgtgacaagagagagaggcacaatgaaaagtttcctggcagacatgcacaggggcagcaaggtagtgtggctgtgtctgagccaggaatctctcactgctggtggggaagtgtgagggctgcc

SEQ ID NO: 500115 - DNA, 600 bp, Homo sapiens
atctctcaaaccatctacacccaggaaactacatcaactctttccttatacaagaaggggacaaaattcaatcaggagaactcagtattttctccaaagttgctccaacagtaaccttgtggacagaatttgaataggataaatgcaattgacagctactatatgggcagacacctctacttcatatgctttattataaagcttattttgtaagttgcattttgcttatattgcttttggcttcatctatcttttaaggagcaatgagacagaagatccttccccacactccatccacatacacagacattcaaagtagagactgtagctatattattagacaagcaaaatgttgaggggcctctgcaaaaatgcagttttggatctgaatctaaaacaacgtcctaggtagaggttgcagtgagccaatattgtgccattgcactccagcctgggccacagagcaaaactctgtctcaaaaaacaaaacaaaataaaacaaagtcccacatgmctttaagagcattcataactgaatttctgccttgggaccttcatttctatataacccctatctgggattcaaagttccgcctgggg

SEQ ID NO: 500116 - DNA, 579 bp, Homo sapiens
ctacatcaactctttccttatacaagaaggggacaaaattcaatcaggagaactcagtattttctccaaagttgctccaacagtaaccttgtggacagaatttgaataggataaatgcaattgacagctactatatgggcagacacctctacttcatatgctttattataaagcttattttgtaagttgcattttgcttatattgcttttggcttcatctatcttttaaggagcaatgagacagaagatccttccccacactccatccacatacacagacattcaaagtagagactgtagctatattattagacaagcaaaatgttgaggggcctctgcaaaaatgcagttttggatctgaatctaaaacaacgtcctaggtagaggttgcagtgagccaatattgtgccattgcactccagcctgggccacagagcaaaactctgtctcaaaaaacaaaacaaaataaaacaaagtcccacatgactttaagagcattcataactgaatttctgccttgggaccttcatttctatatracccctatctgggattcaaagttccgcctggggcagatgc

SEQ ID NO: 500117 - DNA, 401 bp, Homo sapiens
atatcccacaatatatgctcactaccttggtgatgggatcaataatatcccacattgctcagcatcacacaatatatccatgtaataaacctgcaaatatactccctgaatctaaaaaatttaaggcagagacagagtaagagggcagaatagaagcctacattctcatccaccacacgaaaacaccaaattttcacaactaactacattcaagaagcactgtcaaagggaccaaaaattgggtgagcaatcacagtacctggtattaacttcatatcactgaaacagacattggagaagacaaaaaaataaaagacggtttagaagcatggatgccacctctttttcarccaccactagtggctacatcgtgcagagatagtatgtttgggagagggagc

SEQ ID NO: 500118 - DNA, 615 bp, Homo sapiens
ctgtaatgaaacttttagtcatttccctcaagatcacaatatgttctcttaagttattagtactttggccacttcccaaagaatgcaagatccttacaagtttacttccatgtatttgtgtatctctcacccttgtgccattgttgtaatacacttttttattgcattttatatttctacaagatattattattattgtagttttaaaaagctttcattactatttactcatgtttgccctttctctgcacttcatttattcttgcattcccccctgctgcttttgttttctagtttttgattgccaataagagctacagaaaatcatgaaatatttcttttgtttctatatttaatgtttaattgtttttgtgcttattgttagtaactttttgaaacacctttcattcctttaagtagagaggctcttcagccaaatttttattcattaatatttcctttttcttccagacattttgttgttgatgagagcagaaaagattttcctttttggaaaacattatcragcaaaatattttatgggccaatgcttccataacctgaaacaattgaaagaattctggattgaaatgatagaaattgtattggtttctg

SEQ ID NO: 500119 - DNA, 615 bp, Homo sapiens
ctgtaatgaaacttttagtcatttccctcaagatcacaatatgttctcttaagttattagtactttggccacttcccaaagaatgcaagatccttacaagtttacttccatgtatttgtgtatctctcacccttgtgccattgttgtaatacacttttttattgcattttatatttctacaagatattattattattgtagttttaaaaagctttcattactatttactcatgtttgccctttctctgcacttcatttattcttgcattcccccctgctgcttttgttttctagtttttgattgccaataagagctacagaaaatcatgaaatatttcttttgtttctatatttaatgtttaattgtttttgtgcttattgttagtaactttttgaaacacctttcattcctttaagtagagaggctcttcagccaaatttttattcattaatatttcctttttcttccagacattttgttgttgatgagagcagaaaagattttcctttttggaaaacattatcargcaaaatattttatgggccaatgcttccataacctgaaacaattgaaagaattctggattgaaatgatagaaattgtattggtttctg

SEQ ID NO: 500120 - DNA, 613 bp, Homo sapiens
tgttgcccaggcaggtgtcaaaatcttggcctcaagcaatgctcctgctttggcctgtctaagcattgagattataggcatgggccaccgtgcctggccctgtaatatgtatttagcatatacactgtgataggcacaagaaagtctctgatagttcagtaaaaaactgcaatgatgtttgcaacaggtaattaagtttggccacgattcttttgagtgtcataacactgtcctaagaaaaagtctatatttccactttactgggtgtgtgaaactcaaactcaaggttaaaaagctctgatttttkgttgaaatcataatccaactaaaagccagaaatgtggagccattttttttattttaagtgaatcataagcagtcttgtatttaagacagataaaattattgtacagtattatgttttctgtacttaaaatgagagaaaaccatgagggttgttaatgtttgaaaaaagaaggcatctatgaggaagctttatattggtagaaagtgtgaaaggaaaataaaatctcaggaccccaaactcactatgacaaaggaaaattaagcttggaacgtgagtcatgcaaaaactgccatccttttgttccca

SEQ ID NO: 500121 - DNA, 613 bp, Homo sapiens
tgttgcccaggcaggtgtcaaaatcttggcctcaagcaatgctcctgctttggcctgtctaagcattgagattataggcatgggccaccgtgcctggccctgtaatatgtatttagcatatacactgtgataggcacaagaaagtctctgatagttcagtaaaaaactgcaatgatgtttgcaacaggtaattaagtttggccacgattcttttgagtgtcataacactgtcctaagaaaaagtctatatttccactttactgggtgtgtgaaactcaaactcaaggttaaaaagctctgattttttgttgaaatcataatccaactaaaagccagaaatgtggagccattttttttattttaagtgaatcataagcagtcttgtatttaagacagataaaattattgtacagtattatgttttctgtacttaaaatgagagaaaaccaygagggttgttaatgtttgaaaaaagaaggcatctatgaggaagctttatattggtagaaagtgtgaaaggaaaataaaatctcaggaccccaaactcactatgacaaaggaaaattaagcttggaacgtgagtcatgcaaaaactgccatccttttgttccca

SEQ ID NO: 500122 - DNA, 655 bp, Homo sapiens
tggctaattaaaaaaaaaaaaattagagatggggttgtgctatgttgcccaggcaggtgtcaaaatcttggcctcaagcaatgctcctgctttggcctgtctaagcattgagattataggcatgggccaccgtgcctggccctgtaatatgtatttagcatatacactgtgataggcacaagaaagtctctgatagttcagtaaaaaactgcaatgatgtttgcaacaggtaattaagtttggccacgattcttttgagtgtcataacactgtcctaagaaaaagtctatatttccactttactgggtgtgtgaaactcaaactcaaggttaaaaagctctgattttttgttgaaatcataatccaactaaaagccagaaatgtggagccattttttttattttaagtgaatcataagcagtcttgtatttaagacagataaaattattgtacagtattatgttttctgtacttaaaatgagagaaaaccatgagggttgttaatgtttgaaaaaagaaggcatctatgaggaagctttatattggtagaaagtgtgaaaggaaaataaaatctcaggaccccaaactcactatgacaaaggaaaattaagcttggaacstgagtcatgcaaaaactgccatccttttgttccca

SEQ ID NO: 500123 - DNA, 582 bp, Homo sapiens
aactctttgaatataattatatatcttggaaactgactcatcaaagctattagattacatggcatcatttaagcatcactgggctctgtacttttcattatctgtactyttcattatggagtataataggctttatttggtacagaaattgggtctaagatgaaacaacttgtgatttttgaataaacttttggggattagttactttgatgttgtcaagatagcaccatagtaagtcctctgtctttcctcttgatttatttataatttagaatcagtttatgattttaaaaaatgtgacagacacagtggcatgcaccagtagtaccagccacatgggaaactgaggcagaaggatcacttgatcccagaagatagagaccaccctgggcaacatagtgagagccccatctcaaaaaaaaaaaatcagttcccaataccattccagaacacttttaatataaccagatgaaattgtgatcactactttactgtaatgtttaaaatggtcctcagtccatatttaagtacaatcttagtgtttctgtgcaacctaatatattagaaacaaaaattgtattg

SEQ ID NO: 500124 - DNA, 582 bp, Homo sapiens
aactctttgaatataattatatatcttggaaactgactcatcaaagctattagattacatggcatcatttaagcatcactgggctctgtacttttcattatctgtactcttcattatggagtataataggctttatttggtacagaaattgggtctaagatgaaacaacttgtgatttttgaataaacttttggggattagttactttgatgttgtcaagatagcaccatagtaagtcctctgtctttcctcttgatttatttataatttagaatcagtttatgattttaaaaaatgtgacagacacagtggcatgcaccagtagtaccagccacatgggaaactgaggcagaargatcacttgatcccagaagatagagaccaccctgggcaacatagtgagagccccatctcaaaaaaaaaaaatcagttcccaataccattccagaacacttttaatataaccagatgaaattgtgatcactactttactgtaatgtttaaaatggtcctcagtccatatttaagtacaatcttagtgtttctgtgcaacctaatatattagaaacaaaaattgtattg

SEQ ID NO: 500125 - DNA, 481 bp, Homo sapiens
tgctgacagggtggggctctgttgctgcatgagttcagtcttccaagaattgactggcagggcaaccctgtcacagaatatgctctccatttttggagaagtggctgagacttactgaagttctcaaagtgttcatcgagctcttatgtttatatgtattttgaaatccagtggttgaggtcagtaactcacatatgatgggtctgatgagttttgacattgcattctttttccccccacgagacggtgtcttgctctgtcacccaggctggagtgcagtggcctgatctcagctcactgcaacctctgcctcctgggttcaagtgtttctgctgcctcagcctcctgagtagctgggattataggcgcacgccaccacacccgrctaattttgtattttcagtagagacggggtctaccatgttggccaggatggtctcgaactggctactctcaaactcctgacctcatgatcctccgt

SEQ ID NO: 500126 - DNA, 670 bp, Homo sapiens
acttaaaagtaactttctaatagttgagaagtcacttatgcatacctacrtgaggaagaaagttgaattgactgtcattcattcagcccagtgggacatcaaactctccaaacctttcacagtaggaaaacaaagccaggcctccttaactatgctacatggcaagtcaaaacatgaacataatatctgaaaaagcctgaaaaacaactctggctaactagatctcattgcaggcagtgagagagtggtggcaaatgtgaacatgtctgtgtggggtggtggcaggggaattggaatatacgaatccaaggaaaactgactcttggcaaattacttgttttggtgctcctcttcattttttttattatggtagaagactttgtatacaaatttctcactgtacataaaacaagttcttcagttattgcatttctgcaatatattaaaatacatgagaaaatcacattaaaaagaggcatgattatagaaacaaaatgttattacaatacgatatcaacttataattcataattatatttgtaaatatcaaattataagtaatttatgagaaattagagccaaagcttttcatacttactttagtgtttttctaaaggaaatacatggtgaaagaactgtagagaagacatagcttatgattaatccattt

SEQ ID NO: 500127 - DNA, 670 bp, Homo sapiens
acttaaaagtaactttctaatagttgagaagtcacttatgcatacctacgtgaggaagaaagttgaattgactgtcattcattcagcccagtgggacatcaaactctccaaacctttcacagtaggaaaacaaagccaggcctccttaactatgctacatggcaagtcaaaacatgaacataatatctgaaaaagcctgaaaaacawctctggctaactagatctcattgcaggcagtgagagagtggtggcaaatgtgaacatgtctgtgtggggtggtggcaggggaattggaatatacgaatccaaggaaaactgactcttggcaaattacttgttttggtgctcctcttcattttttttattatggtagaagactttgtatacaaatttctcactgtacataaaacaagttcttcagttattgcatttctgcaatatattaaaatacatgagaaaatcacattaaaaagaggcatgattatagaaacaaaatgttattacaatacgatatcaacttataattcataattatatttgtaaatatcaaattataagtaatttatgagaaattagagccaaagcttttcatacttactttagtgtttttctaaaggaaatacatggtgaaagaactgtagagaagacatagcttatgattaatccattt

SEQ ID NO: 500128 - DNA, 670 bp, Homo sapiens
acttaaaagtaactttctaatagttgagaagtcacttatgcatacctacgtgaggaagaaagttgaattgactgtcattcattcagcccagtgggacatcaaactctccaaacctttcacagtaggaaaacaaagccaggcctccttaactatgctacatggcaagtcaaaacatgaacataatatctgaaaaagcctgaaaaacaactctggctaactagatctcattgcaggcagtgagagagtggtggcaaatgtgaacatgtctgtgtggggtggtggcaggggaattggaatrtacgaatccaaggaaaactgactcttggcaaattacttgttttggtgctcctcttcattttttttattatggtagaagactttgtatacaaatttctcactgtacataaaacaagttcttcagttattgcatttctgcaatatattaaaatacatgagaaaatcacattaaaaagaggcatgattatagaaacaaaatgttattacaatacgatatcaacttataattcataattatatttgtaaatatcaaattataagtaatttatgagaaattagagccaaagcttttcatacttactttagtgtttttctaaaggaaatacatggtgaaagaactgtagagaagacatagcttatgattaatccattt

SEQ ID NO: 500129 - DNA, 610 bp, Homo sapiens
gctcgcggttacattttccacgggccagactgggaatcasgtagggagagtctgtactcttcccagcagtcagccttcccttatgctgctggggacgcgtcgtgctgacccggagctcggagaggagccagacgcgctccacccactcaggtctgagaagcgatccgacatggactactgccatttgcgccgttgtcgggctccacctggcggccgatgttacgtattgcacttgttctctggagctcccgcgagagagagaagtggccgctgtgcaccagcgtcgagttccaggatgtccctagcgttagcaggattgttccgcctgctagcaaagcattcgctccccatctgttcgtgggagcttggacctacagcttaaggtcggaggaggctcttgtcgcgctcttagccctggatgctctgtggtggggcaacatgcgggtcgaccagcaacccccagtgcctgcccctccaacacgagacctatcggggtcaacacgaaccatcttgaaagggtgtttggaggcctccccgcgtgtgtcccgataccagtaccttccatttgaccccattttcctcaagttctgcctcagaggtggggaccggc

SEQ ID NO: 500130 - DNA, 510 bp, Homo sapiens
gtcgtgctgacccggagctcggagaggagccagacgcgctccacccactcaggtctgagaagcgatccgacatggactactgccatttgcgccgttgtcgggctccacctggcggccgatgttacgtattgcacttgttctctggagctcccgcragagagagaagtggccgctgtgcaccagcgtcgagttccaggatgtccctagcgttagcaggattgttccgcctgctagcaaagcattcgctccccatctgttcgtgggagcttggacctacagcttaaggtcggaggaggctcttgtcgcgctcttagccctggatgctctgtggtggggcaacatgcgggtcgaccagcaacccccagtgcctgcccctccaacacgagacctatcggggtcaacacgaaccatcttgaaagggtgtttggaggcctccccgcgtgtgtcccgataccagtaccttccatttgaccccattttcctcaagttctgcctcagaggtggggaccg

SEQ ID NO: 500131 - DNA, 510 bp, Homo sapiens
gtcgtgctgacccggagctcggagaggagccagacgcgctccacccactcaggtctgagaagcgatccgacatggactactgccatttgcgccgttgtcgggctccacctggcggccgatgttacgtattgcacttgttctctggagctcccgcgagagagagaagtggccgctgtgcaccagcgtcgagttccaggatgtccctagcgttagcaggattgttccgcctgctagcaaagcattcgctccccatctgttcgtgggagcttggacctrcagcttaaggtcggaggaggctcttgtcgcgctcttagccctggatgctctgtggtggggcaacatgcgggtcgaccagcaacccccagtgcctgcccctccaacacgagacctatcggggtcaacacgaaccatcttgaaagggtgtttggaggcctccccgcgtgtgtcccgataccagtaccttccatttgaccccattttcctcaagttctgcctcagaggtggggaccg

SEQ ID NO: 500132 - DNA, 510 bp, Homo sapiens
gtcgtgctgacccggagctcggagaggagccagacgcgctccacccactcaggtctgagaagcgatccgacatggactactgccatttgcgccgttgtcgggctccacctggcggccgatgttacgtattgcacttgttctctggagctcccgcgagagagagaagtggccgctgtgcaccagcgtcgagttccaggatgtccctagcgttagcaggattgttccgcctgctagcaaagcattcgctccccatctgttcgtgggagcttggacctacagcttaagstcggaggaggctcttgtcgcgctcttagccctggatgctctgtggtggggcaacatgcgggtcgaccagcaacccccagtgcctgcccctccaacacgagacctatcggggtcaacacgaaccatcttgaaagggtgtttggaggcctccccgcgtgtgtcccgataccagtaccttccatttgaccccattttcctcaagttctgcctcagaggtggggaccg

SEQ ID NO: 500133 - DNA, 510 bp, Homo sapiens
gtcgtgctgacccggagctcggagaggagccagacgcgctccacccactcaggtctgagaagcgatccgacatggactactgccatttgcgccgttgtcgggctccacctggcggccgatgttacgtattgcacttgttctctggagctcccgcgagagagagaagtggccgctgtgcaccagcgtcgagttccaggatgtccctagcgttagcaggattgttccgcctgctagcaaagcattcgctccccatctgttcgtgggagcttggacctacagcttaaggtcggaggaggctcttgycgcgctcttagccctggatgctctgtggtggggcaacatgcgggtcgaccagcaacccccagtgcctgcccctccaacacgagacctatcggggtcaacacgaaccatcttgaaagggtgtttggaggcctccccgcgtgtgtcccgataccagtaccttccatttgaccccattttcctcaagttctgcctcagaggtggggaccg

SEQ ID NO: 500134 - DNA, 586 bp, Homo sapiens
catttcctgcttcttaaaaagcttttctgttctttatgtttattttgtgagactaggtctccctctcttgcccaggctggagtatagtggtgtgatcattgctcactgtaacctcaaactcctgggctcaagcaaccctcttgcytcaacctcctgcaagctaggactacaggcgtgctctgctacaatagctaatttttcttcttctttaaaaaattataacattttgacttttttttttttaatacggagtctgcttctgtcacccaggctggagtgctgtggcgtgatctcagctcacggcaacctccgcctcccaggttcaaatgattctcatgcctcagcctcccgagtagctgggattacaggagcgtgacactgcatctcgctaatttttgtacttttagtggagatggggtttcactgtgttggccaggctggtctcgaacttctaacgtcaggtgatccaccccacctcaggctcccaaagtgctggaattacaggtgtgagccactgcgcccagcctgttttattctctgaagattttacttcaaatttctctgttgataggcaccttaaggtttt

SEQ ID NO: 500135 - DNA, 586 bp, Homo sapiens
catttcctgcttcttaaaaagcttttctgttctttatgtttattttgtgagactaggtctccctctcttgcccaggctggagtatagtggtgtgatcattgctcactgtaacctcaaactcctgggctcaagcaaccctcttgcctcaacctcctgcaagctaggactacaggcgtgctctgctacaatagctaatttttcttcttctttaaaaaattataacattttgacttttttttttttaatacggagtctgcttctgtcacccaggctggagtgcwgtggcgtgatctcagctcacggcaacctccgcctcccaggttcaaatgattctcatgcctcagcctcccgagtagctgggattacaggagcgtgacactgcatctcgctaatttttgtacttttagtggagatggggtttcactgtgttggccaggctggtctcgaacttctaacgtcaggtgatccaccccacctcaggctcccaaagtgctggaattacaggtgtgagccactgcgcccagcctgttttattctctgaagattttacttcaaatttctctgttgataggcaccttaaggtttt

SEQ ID NO: 500136 - DNA, 586 bp, Homo sapiens
catttcctgcttcttaaaaagcttttctgttctttatgtttattttgtgagactaggtctccctctcttgcccaggctggagtatagtggtgtgatcattgctcactgtaacctcaaactcctgggctcaagcaaccctcttgcctcaacctcctgcaagctaggactacaggcgtgctctgctacaatagctaatttttcttcttctttaaaaaattataacattttgacttttttttttttaatacggagtctgcttctgtcacccaggctggagtgctgtggygtgatctcagctcacggcaacctccgcctcccaggttcaaatgattctcatgcctcagcctcccgagtagctgggattacaggagcgtgacactgcatctcgctaatttttgtacttttagtggagatggggtttcactgtgttggccaggctggtctcgaacttctaacgtcaggtgatccaccccacctcaggctcccaaagtgctggaattacaggtgtgagccactgcgcccagcctgttttattctctgaagattttacttcaaatttctctgttgataggcaccttaaggtttt

SEQ ID NO: 500137 - DNA, 586 bp, Homo sapiens
catttcctgcttcttaaaaagcttttctgttctttatgtttattttgtgagactaggtctccctctcttgcccaggctggagtatagtggtgtgatcattgctcactgtaacctcaaactcctgggctcaagcaaccctcttgcctcaacctcctgcaagctaggactacaggcgtgctctgctacaatagctaatttttcttcttctttaaaaaattataacattttgacttttttttttttaatacggagtctgcttctgtcacccaggctggagtgctgtggcgtgatctcagctcacggcaacctccgcctcccaggttcaaatgattctcatgcctcagcctcccgagtagctgggattacaggagcgtgacactgcatctcgctaatttttgtacttttagtggagatggggtttcacygtgttggccaggctggtctcgaacttctaacgtcaggtgatccaccccacctcaggctcccaaagtgctggaattacaggtgtgagccactgcgcccagcctgttttattctctgaagattttacttcaaatttctctgttgataggcaccttaaggtttt

SEQ ID NO: 500138 - DNA, 598 bp, Homo sapiens
cataatttttttaaatggccaaaataagatcctcagaagagataaacaaaagacaatcacattagaaatagagtcattaagaaattacagaaactcaaaaatgatgagatattacattacacctattgtatttgaaaaatcagaaaacatcatcatagctcatgatgtcagagacatgggaacaccttgtgtgctgctgaaaggagggtagaagagtgtgtacaaactatcagtgtttactcaaattgggtatacacttctctatgacccagcaatctcattgttgggtttcaatattccaaagacaaggccgggcgtggcggctcacgcctgtgattccaacattttgggaggtcaaagtgggtggatcacctgaggtcaggagttcgagaccagcctggccaacatggtgaaaccctatctctactaaaagtacaaaaaaatcagccaggtgtggtggtgcgtgcctggagtcccagctgcttgggaggctgaggcaggagaatctcttgaacccaggaggcacagattgcagtgagccragatggggacactgcactccagtctgggtgacagagtgagactccatctcaaaaaa

SEQ ID NO: 500139 - DNA, 612 bp, Homo sapiens
ctaccacatcaatcttgttgatgttggagcaaattaaagcagatgtttcctgtcaactgtgaatctcttcccaaagaacacatcagcatcctcaacctcttcaagccacacaaaagaccaaggacctccatgcaactggatttctccttaaccgcaccattctatttattaggtccattatctctaaacaattaacatgctctggaatactgtgttccagaatgtgtatataaatggaacatagcacatggccctataaaagaaagaaactgttaagaaaatggtccctttagccarttagaggaaatataatttctgacacagggccgctatggccagctggatactgatgcataaagatacctaaccgtttgtagcagagcaggaggtgggacccagagtgtgagccctgagatgatctagaaattcctgtgcagatggatccatcaacgaagggtgatttcatccattaaggaaaaccaagctgcttgtgaagaaaatttgacaactgttcgacagtgcttttccctcatttaggaagtagggaacactgagtaaatgggaatgtaggaaatattagcatgtgatatttatcagaataagaccagaaat

SEQ ID NO: 500140 - DNA, 316 bp, Homo sapiens
ctctccttgggacctaagcatattttccacaggaatttggtgctcaaggccaatmactggtgaatggtttgaggatttacatctctcagaaacctttatccaatcagctccatgtgccagtagccatacacaaagttttgtagcaaatgtttttccagttttaattacagacactttgaactcaaaaatatggtatgttagactttttcctctgaaccacttttaaccaattggaagtatttactggatagcaatgtaatcagagttagaacatttaacagaggaatggtggtcataatgttgattcagtctttac

SEQ ID NO: 500141 - DNA, 546 bp, Homo sapiens
ctcatcgaatttgttttaaaattgtatttgtaagggacttgcttttctgaacttatcttgtagtaccctttgaaattcagccaatgttgagacattttattccctgacttattcaatgaaaaccaaggacttatttagtacattatctgccttgtcagttgcataggagacaattttatgaaatgatccaccatcacattgcattaattgatgatttccaatcttcaaataaagtttcttactcttcagtgcccaccacaagaggctatgctacttttttttttttaataaatgtagaaccccactggtagtaatgatatctttattagtacatttgggctaggaataaactatccccaagtctccaagaaatgtagcttatgtctatttatagcttattttatgtatctaatttggatcaatttctcttttctgtatttcctcattctgcacctaggctatagaactcattacactataaattactaattacaatgtctcatttgtgamctagcacaagttttggcacataaagcgcttttatat

SEQ ID NO: 500142 - DNA, 453 bp, Homo sapiens
aaagaagtgaaagctgtcagcttatttcatgtactaccctccaacacagggcttctctgtgttccagctattgaaaaagtgagaaatttcttcatggtgcatgaaacagatagaaccccactgctccccaaaaaagtccaaatccctggggcctgttagtttgttacttcatatggcaaaacagactttgcaaacgtggttatgagacaagaaacttcagaagagttmttgagagaagaaacttcagaacagttagagagataaaatgtttgacttcaaaaaatggaggaagggggcctctggccaaggaatgtcctctagaagctggaacatacaagtgaatggattatctcgtagaatttctagaaagaaatatagccctatccacaccttgattttagaccactgagacctctgttggacttctacgtaaccgtaaggcaataaaattgt

SEQ ID NO: 500143 - DNA, 599 bp, Homo sapiens
gtatctggaaaatattatgcccttaataaatggtcactgattgagtaatgtattgcaaaaaacaaatggcagactagataattcaattataaagagagccctcattaatgaatttgtgatctttactataactctcagccttccagctttagccacagagtacggattttatttgaatagctactctagtttatcatgtcctccagatattgtaaaatgcagtgtgatttttatcatatgatgatctgagaaaaatgaaataaaatgtcaccaatttygacttcattaaatttgagatttgtgatcatttaccacgcttcggcctaaaggctgctttaataatataataaacaaataagttgcttgcagtatataacaggaggaatgttaaaccctttggaaaaaacacattaattgctatatgccagctgaagctactaattataaataaatttgggttgagtacatctactttgaaacacattctgcttaataatagcaaccaaaaaataaaaaaccatgcatttcttttcaaattagaattttcatgtaatcatagcagatattttatttatttgtaatggtttttatataatcat

SEQ ID NO: 500144 - DNA, 565 bp, Homo sapiens
tttccaagggcataaggttaacttggagtagaacctaaattaaaaatcaggttaacaaaggctgaatkatcactataccatctaagatttttctgaaaagctaagtcattatttaggtcctaagacatttaagatatgaattttaaactaaatgcagacatgcttctaaacaatgtaagattaaagagaagcctatataaatacttcatgaaaattttgtggaaagtatgaaaaatgtcatatagatgtacatacatacagttgataataatgtgtttttctcaaaatgtttcatatgttaaagttgaaaaccatgaacatttgttctcttaagctttattttttgtattcttaaatgatatttttaactgcaaataaatgtatccattagaattataagaatatgttttgttcaaataccatgaatgtaaaaaaagcatttcagaataaatatttaattattaccacattcttccatgaaagtaaacagcacatctactcagcacatttttagaaagtttatgaaatacaatatcattaaaagacatgatttaggtccacagaa

SEQ ID NO: 500145 - DNA, 448 bp, Homo sapiens
cttttcaatatatgtgattttccttccttccaaatattctacttagttgtttaattaaaaaaaaaagtctatgtgtgtgttagtgtgtgtgtgtgtacatttctactgctcctgtgtttcctcaattactcctatttttattgaagttttcacctcattcctctatgagctgtatatcagttttgcatcttgtgactgaacttcctttgttggcctatctatggtaggttgaataatgtcccgcaaagatatccacatcctaatcccagggatctgtgaatgttgccttacatgcaaaagagactttgcatatatgattaagttcaagatcctgtgtcatctgagtatgcctgatgattagtaacrttccttatatgaaggatgcaggaggagttagtcagggatggtgatgtgacaatagaagcatagggagagaaggtggtgtgag

SEQ ID NO: 500146 - DNA, 586 bp, Homo sapiens
atgctgttttcaaatatcctagagagaaggggtcttgtttttagtctgaagcaatatcagatcacatatatagtcagaaatatcataagtttgagtagaaatgtttatccttccttctacctaacttaaatgcctttggatctctatttaatgtgttgagagaccctgactctatttttaaagaaattgaggcaagagtatactaatattagccaaaaatccttcagttggatacattaaataattttaagaaaccaacaaaaaatctaatcagtgcattgtaatagtagttgtattaaggttgaactgttagaggtgatttatttcttattttccaaactataaagtggttatattactttcataaatagacttttaaaaacatgtctccatgtgtatatatatttagagaggagagagcctctgaatgactcattctggaaaaaaaggggggcagttttcaasttttcaaatagctttcttttctcttcttcccatttcttcactgaaaattgccagttactgtatataaaaagtgttccttttcttttaaccatttctgcttcctgccaaggtgtaaatcaga

SEQ ID NO: 500147 - DNA, 592 bp, Homo sapiens
gtcagagaaagccccctgctttattttgtagtaggaacctgggggtcagagtggatgggaatggggagtctcaagggaatttgagaagggcactgatagtatctgctagaaagcttgttattccctaatggactgggtattttacttgattatctgtattgtgtctgtctcctactatcacataagcttcatgaagacagacttttctccgttttcttcactgagtggtattagaagcatgaccactgggttattcattcaatatttaacaattattattttgtgcctactctgagccaggcaagagtactgctctcatactctttgatgttatgatctccagcaggctaggcagatctctgctgtttttgccgctaatttttagcctrtactgagtcaaggaattaaaagagtaagatgataattagacaaatactttgctgtaatgcatatttttggtagctaaataaataaccatgacagcatgacctgctaggccagagaaagatcgatagggtgtgggaaaaatgcaaacaatgtgttagagtggctactctaaccccaacttccatagacagtcttcttgctaact

SEQ ID NO: 500148 - DNA, 609 bp, Homo sapiens
tctcgagaataccctataaataatacttttgacattctgcagaattgaaaatattacaacctgaatgatttctataataaatttaattaactgagagaagtttagggctcaggaggaatttttaaaaatagaacacragataatttgtaatggaaatgccatcccatatcgctgccactagggaaaatgatggatatttccctagaaattatcatgaggaaacagttggtttgttttgatggcatttcaatagctcattcaatgaaaccccaaaagtttcagtccaaaaacagttcactttcattttttttgtttttttttttgacaatcagaaaaggaatcaactcacattttcaaccagccatttttcgtagattatacttggggaaaataccttttaaaaacactttttgagtgaatttgtaagcagaaattagtacacaggcaagcaagacttcttattccacagctcagtctcaactcaagtttaacttttaattatttcctaaaattcgtcgctgctattaagcttttgctttgtgaggtaacccagttttcttccaacactgttcactccactcatttaattcatgtcctaggccaataaca

SEQ ID NO: 500149 - DNA, 608 bp, Homo sapiens
cttgtgtgacaccacattgcaaagttattatttagtaatattttgaatgaaaggtctctcttcataaaacccccaccctttacaaactattagtctcagaaaccctttacattcttaaaagttactgaggacttcaagaagcttttgtttatgttagttatatctaccaatgtttattgtaagatcagtaattgggagtttattaaatataatgaagcatttttttaaactttgattttggttcaggggtgcacgtgcaagtttgttctacagataaattgcatgcttcaggggtttggtgtacatattatttgttcacccagatggtaagcatagtacatgatagatagttgtttgatcctcaccctcctcccatcctccactttccagtaggccctgttgtctgttgttcccttctttgtgtccaggtgtactcaatgtttagctctcacttattaagtgagaatatacagtatttggctgtcttttcctgtgttattttacttgggatgatgacctccagctccatycatgttgctgcaaaagacatggtctcattctttctcatggatgcatagtattccatggtgtatatgtaccacattttt

SEQ ID NO: 500150 - DNA, 661 bp, Homo sapiens
cttacagataaattaggatttttcttttcccaagcagcatgtgaaatttcaagtgatcaaagtacgtgctatagcactttgtactgaaaaagagactacaattcttcagggataaatcatgcactgatcttagaaaatgtgcgtgagcagctaattaatagctgaaatatcttaaggcatatctacctgctttttatracatgtaactatggttaatatctaataatttctaactaatagtgaaaacctgggtactcttaatgtttcaaatagtggaagaatcaatacaataacacctcaatgcaaaaccctttcagtaaaacatttatttatagtgggagtcaaaaaactcattttaatcaagggattacagataattgggagaggattttagatctgaaaggggtaaagtgtccaatttcctcattacataagtgaacaaacaagttctgaatatttgggtaatagcaaagtcagatagcaactttgtgatataagtcagaatacaaatatgccacgtgatctttccaccctaccagactgctttcttcctatttgagaaacctgcaaatcaagcattgtttcatgatattttgctatgatgatacagaagtatttgtatgtgaggatttgttatttggccccttctgccctaagtttg

SEQ ID NO: 500151 - DNA, 661 bp, Homo sapiens
cttacagataaattaggatttttcttttcccaagcagcatgtgaaatttcaagtgatcaaagtacgtgctatagcactttgtactgaaaaagagactacaattcttcagggataaatcatgcactgatcttagaaaatgtgcgtgagcagctaattaatagctgaaatatcttaaggcatatctacctgctttttatgacatgtaactatggttaatatctaataatttctaactaatagtgaaaacctgggtactcttaatgtttcaaatagtggaagaatcaatacaataacacctcaatgcaaaaccctttcagtaaaacatttatttatagtgggagtcaaaaaactcattttaatcaagggattacagataattgggagaggattttagatctgaaaggggtaaagtgtccaatttcctcattacataagtgaacaaacaagttctgaatatttgggtaatagcaaagtcagatagcaactttgtgatataagtcagaatacaaatatgccacgtgatctttycaccctaccagactgctttcttcctatttgagaaacctgcaaatcaagcattgtttcatgatattttgctatgatgatacagaagtatttgtatgtgaggatttgttatttggccccttctgccctaagtttg

SEQ ID NO: 500152 - DNA, 588 bp, Homo sapiens
agcctctaaattctaacctcatagataccaaaggctctcacagatttggaaactctctttctattggtttttgttttagataaccctatwtgttccattttaatcccttttcatcaacatatattctttttccttgtgacctgagacactactaaagatttcagaatttgaaggcatttattctctagttcattttctggccagtcactaaaggtaaaatctttgaacaatggatttgtttaacaacatgtagcaatatgctgccagcctctttaatatctcaagttgctggagacacttttttgtctctataaaaatagcagctttgccaactaaagcacttttgaaatccaacagcatgataatgacagcagcccctaagactgctaagctataacaagttacaatggtaaatcagagctgtctgaatatcttaagctaaatatgaatcctcacatgtgggcttgttatgatctatgtttcccaaccccaacagcgagaaataaggcaactacaatgccaggttctatgacagccaaatggatcataagtcatcacacgctcattctagaaaatacagattgtgag

SEQ ID NO: 500153 - DNA, 507 bp, Homo sapiens
ggcggcacctgacttcttccccgcacttaaggctctcacaaacataaatgcaactgcagaaatttgggggacaaatattgcccccactgggtaaaatctcagcagaaactrcagctttttttttttttgagacagagtttcactcttgttgccaaggctggagtgcaatggtgcgatcttggctcacttccacctctgcctccagggttcaagcgattctctgcctcagcctcctgagtagctgagactacaggtgcttgccaccatgcccagctaattttttgtatttttagtagagatggggtttcaccatgttaggatggtctcgatctcctgacctcgtgatccacctgccttggcctcccgaagtgctggcattacaggagtgagccaccacgcctggccaaaacagtagctttaattcagacttaaaacacctaacagggaaaacaaactctaaatgccactcctcttttttaaaagtataattttcttctgattataaaa

SEQ ID NO: 500154 - DNA, 551 bp, Homo sapiens
ctttttgtttttccttcggtagagatgtggcttccctatgttatgttgtccaagctgatctcttatttcctggcctcaagcagtcatcctgccccagcctcctagagtgctgggattacaggcatgagccactgcacctggcctgtcattcctgtttttgtgtatacggtccatgtggtcttaaaacctttcctgaacgtgtctcagttgaatttcccaagaaccttgtgggctgggtttagtggcggatattactaatattttacagataaggggaactactgaaatgcagaaaggtggcaagcatacagctcattattgtggtgccagaatcaaaatacaagtttcaaactccatcactgggaagttgagctttccagtgtctcatgctatgtttggctcagtgggtagacatccttgttcctaaccaatgctgtagaactatcacctgaraaatgatgcaagtttttactgccagccaagagacagtgttgccattccagttagtaggagaggaaatgccagttcttcagggcattttgacacaaata

SEQ ID NO: 500155 - DNA, 634 bp, Homo sapiens
tccccacacacaactaccatttaccctgacctgccgatcaccataayttacaggttaaaaacctgctacacccactttagaaattagatcagaggctgcaaaccagtggaacccacagagctgctttgtatttcacaatgttttcattttcattgtttgcccagtttatttatttacttatttatttaaatagagacagagtctcactctgtcacccaggctggagtgcagtggtgctatcgtagttaactgcagcctcaaactcctgggctcaagcaatcctcttgccttggcctcctgagtagctgggattataggcataagtacactacacctgactaatttattcttttttttttttgtacagatggggacttgctatgttgcccaggcttgtctcaaactcctagcttcaagacatcctcctgcctcagtttcccaaagtgctggaattacaggcatgagccactgcactgagcccaactgaccacttttaatatcaacattaaaaatattttaaaatatatatattaaatacacattaaaatacatatttctattctgttttgaaatatcagaatatcagacaccctcgaggccatctctgcaaacccaatcagtgggaagtatgtag

SEQ ID NO: 500156 - DNA, 280 bp, Homo sapiens
ctcaaattagaataacttaagaaggacttaataaaagggattgtttacaaacacaaaggtgggaaaccaaaagggatcctatgatgctctagagcttgtaggaccagggttgttgacttccagttaagaattgccagcctgtctaaggtgaccacacaaggaggagccacaatcagtaccctgttccaccacctccttctmttctgctggtactccacattgggcaaactctactgaagtccagacagcaaggaaacccactgacatggtccatacaggt

SEQ ID NO: 500157 - DNA, 649 bp, Homo sapiens
aaacactcaaattagaataacttaagaaggacttaataaaagggattgtttacaaacacaaaggtgggaaaccaaaagggatcctatgatgctctagagcttgtaggaccagggttgttgacttccagttaagaattgccagcctgtctaaggtgaccacacaaggaggagccacaatcagtaccctgttccaccacctccttctattctgctggtactccacattgggcaaactctactgaagtccagacagcaaggaaacccactgacatggtccatacaggttaagttctcaggagagagagcaaaatgtagtctgtataatgttgaccatttgaaacttattgagacttttcttgcagctaatactctatttttgtgagagtgtctcttatttgaaaaaaaatctattttcaatttgctataaatccatgtatttggtataatttacatatatatatcagttgrggctttttaattatatcattcaagtgtgctgtatctttgcttgacatttcagtctctaaaatgaatatattaaaatttccaagtgcaattaataatatatttatttctttatatatttgtcatttgatcccttgttttgagctatcttgttagatacatatatgttcctaattattttact

SEQ ID NO: 500158 - DNA, 607 bp, Homo sapiens
tcatacctgtaatcccagcagtttgggaggtcgaggtgggtggatcacttgaggtcaggagaccagcctggccaacatggtgaaaccagtctctacccaaaacacaaaaaattagccaggcatggtggtgggcgcctgtaatcccagctattcaggaggctgatgcaggagaatcacttaaatccaggaggsggaggttgcagtgagctgagatcgtgccactgcactccaggctggacaacagagcaagactctgtctcaaacaaaaacaaaaacaaaaacaaaaaatgcagtgctccaggtgatcctgtgagtagcgcccccaagtgcctaaggctaaaggaaccatcacctgcaggacagtgaggaggtgggataaggtgggaggcgcacctcaaacaacatgtattaagaatggaaacgcctgggtcttgtgggctcttttatgcggccttttttggcctttgtaatgcttcattacaaaaacatgtgtcatggtgggtttgtgggaaagtagatgcaccaaaggctgacttaaatgtcaaagacgttgcttttgtcacccactgtttcctttgagcacctagcagatgttggtcaagggtgt

SEQ ID NO: 500159 - DNA, 607 bp, Homo sapiens
tcatacctgtaatcccagcagtttgggaggtcgaggtgggtggatcacttgaggtcaggagaccagcctggccaacatggtgaaaccagtctctacccaaaacacaaaaaattagccaggcatggtggtgggcgcctgtaatcccagctattcaggaggctgatgcaggagaatcacttaaatccaggagggggaggttgcagtragctgagatcgtgccactgcactccaggctggacaacagagcaagactctgtctcaaacaaaaacaaaaacaaaaacaaaaaatgcagtgctccaggtgatcctgtgagtagcgcccccaagtgcctaaggctaaaggaaccatcacctgcaggacagtgaggaggtgggataaggtgggaggcgcacctcaaacaacatgtattaagaatggaaacgcctgggtcttgtgggctcttttatgcggccttttttggcctttgtaatgcttcattacaaaaacatgtgtcatggtgggtttgtgggaaagtagatgcaccaaaggctgacttaaatgtcaaagacgttgcttttgtcacccactgtttcctttgagcacctagcagatgttggtcaagggtgt

SEQ ID NO: 500160 - DNA, 607 bp, Homo sapiens
tcatacctgtaatcccagcagtttgggaggtcgaggtgggtggatcacttgaggtcaggagaccagcctggccaacatggtgaaaccagtctctacccaaaacacaaaaaattagccaggcatggtggtgggcgcctgtaatcccagctattcaggaggctgatgcaggagaatcacttaaatccaggagggggaggttgcagtgagctgagatcgtgccactgcactccaggctggacaacagagcaagactctgtctcaaacaaaaacaaaaacaaaaacaaaaaatgcagtgctccaggtgatcctgtgagtagcgcccccaagtgcctaaggctaaaggraccatcacctgcaggacagtgaggaggtgggataaggtgggaggcgcacctcaaacaacatgtattaagaatggaaacgcctgggtcttgtgggctcttttatgcggccttttttggcctttgtaatgcttcattacaaaaacatgtgtcatggtgggtttgtgggaaagtagatgcaccaaaggctgacttaaatgtcaaagacgttgcttttgtcacccactgtttcctttgagcacctagcagatgttggtcaagggtgt

SEQ ID NO: 500161 - DNA, 366 bp, Homo sapiens
ttcactgtgattaggttgactcccaccaagaatttcttgtggaacacatctaccgggcatgcaatatccacgtcaaataaataagartgttcatgaagctcactgttttgaagaagtgggtgccaagtgacctattatttctggagccagatgcccctgcgtcactggattctgccatcttctgccctttacaagcagaaaagtctctcctttccttctcagcaccaccatggcattctctcatccctgtttttctcccccacttccatcttgtttctctatcttcactctttgccttcttttcagcctcctcctcttctccaagcgggcttcacactcttctctctggcagtgtgatgaggcaga

SEQ ID NO: 500162 - DNA, 611 bp, Homo sapiens
agtctggagcacaccaaattcacccctgccccaagagttcagcccctgtttatctcttgccatggggctggtttcttcatattttacatgtcaatgacacaaccacagaaggctttctccgagcatactacctgacatagatcacagcatcattctccagtggagatgctggcaacaatacaactgcttgattactcatttatctgtgcttcaaatggagtgtgagttccacaggacagagaccacatttgtttgtcctctcttgcatccyctaaaaattaatacgatatgtgactaatagaatgtaggcatgaataaatgaagaaatggagcaccttctttttggaaagtgttgtgctgggaaatttatatataggtgtaaaaacctggcttgtgtcttctaggatcttaccttcaaaagaggaataagacatgaataaatgatgacaatatgttacaaaaattcaggagaggaagatatgctagttaaggtaaccaagagctttgcagatgagtgtgtatttgagatgcacgctgatggattaaggatcaaaattgcaatagtccaggtagaattagcaaagacatgaacatataaagtacaaaacaca

SEQ ID NO: 500163 - DNA, 366 bp, Homo sapiens
cttttctgtgtattatttcacattaaaaaaacaataaagactagaggtatgagaagatatttttaatggttatgccaatgtgagatagtattcttttatacccagagagtgagatttacctacccattgttcctaactggcttttttatggttgatgagattttatgtgtggtaggtcaattttggatggtcaattttgtgggaatattgaacagycagaatttttttaacaatgactctatcaggaaagttgctgaggaatatagcaattccactgacctactttcaggaatgcatttcccagtcacaaactggcttcattccatttggcattaacaacattcctataaagtcgtaagaatagaa

SEQ ID NO: 500164 - DNA, 366 bp, Homo sapiens
cttttctgtgtattatttcacattaaaaaaacaataaagactagaggtatgagaagatatttttaatggttatgccaatgtgagatagtattcttttatacccagagagtgagatttacctacccattgttcctaactggcttttttatggttgatgagattttatgtgtggtaggtcaattttggatggtcaattttgtgggaatattgaacagtcagaatttttttaacaatgactctatcaggaaagttgctgaggaatatagcaattccactgacctacyttcaggaatgcatttcccagtcacaaactggcttcattccatttggcattaacaacattcctataaagtcgtaagaatagaa

SEQ ID NO: 500165 - DNA, 506 bp, Homo sapiens
caccataagcaccattatctatgtacctggaccttctgttccaggccacctcataggtgtcactggttgtaagaattggttggcaccaggtcaagggctcactgatgaatttatcagctgtgggtagagtatggtgatgtatccatctrttgtcagcttaaaaacttctattaagtaattgtcttaggctgaagggagctgttggtttgcaggcattctgaggctggacctatgtagtacaccgtctaatataagagaaaatggagatgttaccaagaatagggataaaataagctaggcaactctgagacattccttgccatctgttgccctttaggctggttgatgtgtctggttcagttgtgaccctttcacacttctctagcacatccaatactctggtagtttcaagtttcacaatccacattccaaaaaaattagatgttgcttagactttggattttggtttgaaatatgatgctacattttatcagccacactttaac

SEQ ID NO: 500166 - DNA, 363 bp, Homo sapiens
caatgtactatgcattttctattactcatctatccatattcctactcaactatcttcaatgtcactaaataatttattttgaatcttggctacattttagctcttaattggtttaagtaaaacttaaagacagtagtatcttccagaatctttgatccagggatgggtttcattggatgatggktttcattggatgataggtttcattggatgataaggaaagagtctatttcactcttttaaaaagccatcgctcttaccagtgaaatactatttggatattgtagtcctctaggccatgatgataattatgatgttaaattagttgagtcagtttttcagaggtcccaggccacacaatgc

SEQ ID NO: 500167 - DNA, 524 bp, Homo sapiens
attcataaaaagtggccaaaaagatgaatcagcaattcaaaagagaaacaataaaatggatagaaacgtttatttaaaagctgtcacccacactccaaagtcacaaaactcaggaaaaagcaagttaaaacaacagaaacatattttattattcatatttggaaaattttataaaatacctataatattcagatctagttacatgagaaactttttttaaccacattggtcatgggagaatgtatagctaaaacttattttaaaataatctggcattatctagtataattaaagttccataagccttttatttgactgtactgaaatgacagcactatatataaaaatacacatacaagatttttgtttgtttgcaccattgcttataatgacaagaattgggaacaatctgagagtccattattaatggaatattttttgtctattcatctgaarggctgtccataatacattacaaaatgagaataaaaaattgcaaaaagaaaccatggtagtatattggt

SEQ ID NO: 500168 - DNA, 619 bp, Homo sapiens
tgtattccccacttacacaaagtctaatgtgaatgttctttgccacacgcgtctctttggtggctcctctccaaacgataaactcaaggactcatgcttcttccactgaatacctctattagcataacagttttcagtcatgcataccagaaaagagaragacagagggaaaggtcatcatcaaaatcaattcttcccacatttcactggtaagatctcagtcacatgatcccacacaggtggaaggcaacctgggaaatgtatcttcccatatttcaagaagaaaaataaattgtttgataaacacatcacataatctctgcccactggctgagcttgttgagaaagatcaggttctcagaaaaatatatatggataacatatcctataaagcatttctaatttgattactatgaatatgtttagaaataaaatgtattcccaaatctcaggagaaatgaaagatattttagaagtcaatcatttataaggaaagttagtagatactaaagcataaataaccacactcctcattaaaaaatattaaaacagaaaagcaacttttttttttctagcagaactggaaataatgtggtccagaaacaggttgattaggact

SEQ ID NO: 500169 - DNA, 632 bp, Homo sapiens
tttgttaagacttagcatactacagcataggagaaagactccatgtaaaattcaggagtgaaacctgcccctcagtgttgtcttcttggtttaagtcaggtcagactattttttctaaagtgaaataaaagtcatttcacctatgagcctgttygagtttcagaaaaaatgtttttcaaatttggtaacagtattctgatctttttactgtataaatcataggactgtcagtatttttacaggcttagataagtctttgctctaaacaggtgtgttacttgattattatgacatagttggtcaaataatgcttgtagtgagtgtgtctgactggaatgcattatggagcctatataattacctaattgcactaagagaatacttaggtttcagagcaattctctgttctctgtaattgggaagtattcccctttttagaatcagtttttagcttggtgtattgaactccaaccatgactcatcatctggttcacatataattctgcataatattcttccagaagcagaaataaaatgcttttagttgccagacaacttagagttagccttgaaggagagtagaggtagagagaactcatggacagtgcttcaacctgcacatgttgttttca

SEQ ID NO: 500170 - DNA, 622 bp, Homo sapiens
gctgtttgtgcaagatttactatttttgtgtgtatgttttattgttttgaagaaatataaaaaacaaatgatcataaaagatacatatgtaatccactgtagagaattaataaacatttccatcatatttgtctcaattctctgtaaaaaggaatcaaatcttataatgcccttcacctcacttacttgaggtaatcttacagtgcacttatttggcacaagggacaagtatatgagatctaaatcaatatatggtatattgagtgtttttattctaattgagtatatttcttttcctttatgatttcttcattttatgttttgtaagaaaacttccttgactctgagttggaaaagatattttagtatatttttatattctaaatttgattgctttaagttgtatattttcctatagagaaatgatatgttttggctgtgtycccatccaaatctcaccttgaattgtaataatcctgatgtgtcaagggtggggaaagatggagataactgaatcatgtgggtggttttccccatactgccttcttggtagtgaatatgtctcataagatctaatggttttataagtggaagttcccttgaataagctcccttgcctgct

SEQ ID NO: 500171 - DNA, 452 bp, Homo sapiens
accactgcccctctgcctctcagaacccacttggcttcaggaagattctactgccagcctcctttcccggatacagcctccggggactcagccttgccttcycaagtgctccagcctctcttgggaaggagtgctctcagataccacaccgctggacttccccgggcaccacctgctccttcttcacttctccagctctgcattctcactctgagggtcctctcctgctgggagtgtgtgttgctggcaacagtgaagatttcccccctgggttgccccccatgccctgttcttctgcacttccctggcttcctgcgttggttctgctggtgtctcctgcttttgggtttacgtggcttcccagcttcctaatttctctgaagttgagtttgatgtgtgtgttgatgatgggctttttcctgctcctcctccttctcttcctcctcctcctc

SEQ ID NO: 500172 - DNA, 631 bp, Homo sapiens
atcttcttatgtacaaactgctttgatttgatgacaggcaatttggggctacaggaaactccttaatatccagcagtttctatatgtattagaccttaagttggtgaggaaataaagcgctgagaaaaatcctgctaccctcgtttgaatgcaaatcttactaatctaattccaaactagttcctagaatatattcctttttcattttgtgtacatgcagcaaccctgtttttatttccttaacataaaccttctaccagttaaatattttaaagttctctttggatggatgttagaaaagtgrgccttccacaagcacagtattgtataatgaacttagattcagatgttcttaaatgaactaatgaggccagcaatccacctgtagagtctgggctgtgaatattaactgtgtcacttccacggtggggtggggagagatggtattacaggtaattgcggcaaattattttctctttctagattttcttcttctttctaattttggatgggggagactggtgtggatgacgtgatttctaaagttatatttagaatgaagtttctgtaatttctatatgatttagccttataaaaatttttactttcttaactgtcctttaaaggataa

SEQ ID NO: 500173 - DNA, 631 bp, Homo sapiens
atcttcttatgtacaaactgctttgatttgatgacaggcaatttggggctacaggaaactccttaatatccagcagtttctatatgtattagaccttaagttggtgaggaaataaagcgctgagaaaaatcctgctaccctcgtttgaatgcaaatcttactaatctaattccaaactagttcctagaatatattcctttttcattttgtgtacatgcagcaaccctgtttttatttccttaacataaaccttctaccagttaaatattttaaagttctctttggatggatgttagaaaagtgggccttccacaagcacagtattgtataatgaacttagattcagatgttcttaaatgaactartgaggccagcaatccacctgtagagtctgggctgtgaatattaactgtgtcacttccacggtggggtggggagagatggtattacaggtaattgcggcaaattattttctctttctagattttcttcttctttctaattttggatgggggagactggtgtggatgacgtgatttctaaagttatatttagaatgaagtttctgtaatttctatatgatttagccttataaaaatttttactttcttaactgtcctttaaaggataa

SEQ ID NO: 500174 - DNA, 620 bp, Homo sapiens
  misc_feature (1)...(620): n = A,T,C or G
cagtgctaggtatatatacagacactcttggccacttttcatgcttctgaccttttttttttttcttttctgtctcacttcagctatataaggtctttgtggtccttcttttcttctatgaaaattagatttcaattaaaaaaagaagactcagtaggttttttgaagaagctgaatagtgtctnnattggaaggttttcgaagagacaaactcatttaagataaaagatgtaactcaatttttaaaatacaaaaacaaattctgaattgtaaagcaatatgccaaataaaattaaagacaaattaaagattttatcttgagacttttggactaaaaatggtgttttctccattcttcaatttcattccttttaygtagaataaatatgccttgttttctccaggatagttccgattcatccctgttgtcctgatgtcattattactggtgtgctttttgactctgagaaatgttttagtttgaatgagaaattcatccttccttggtgcttctggaaaaaaaagctgaagccataagttcccctcgctccattctccacaagacgttaacttcattaatatcttgactaatctctgattgggtgaaatacttttctttt

SEQ ID NO: 500175 - DNA, 549 bp, Homo sapiens
gagaacatgagaacatacagtatttgggtttccattcctgagtaacttcatttaaaataatggcctccagctacatccaagttgctgcaaaagattttaaaaagagattattttgttctttcttactgttgattagtattcctatatatatgtatatatgaatacatatatgaatatatattgaatatgtaatgcatatatatgtgtacattatatataatacacatatatwcatgtacattatatatattttttatttaccccccccacacacacacacacaacacatttactttgttgactctcgaggatgtatgtgacctgtactcaagtctcccagtggcaggtaccagcaccagctctgatggggttggcaagggagtgacatagactctgtgagattctttggatataaatagccttagtgtgtggactttatcaaatgccaattttagtagttaagaactggtcatgtggacagactctggacctcctgattagccagcgtgatgcaggcagtgatgatagctgaggtcacacacaaatttt

SEQ ID NO: 500176 - DNA, 642 bp, Homo sapiens
agtgaattgatatttagtacttaccaaaaatctcctcaaacgttgatatttgggttaattcctgaccatttctgatgaaatcataaggaaaatttaagtcttcactgtagaatacttttatgttaaagatgaaacactgggctagaatgagttacaggtttgactcagaatctgaacatatattgtcttcgttagagttcgaatttcagcttaaacaaatgaatacattcaccctttccttgtggtcaacaaaacgtcaaatgagcagtgaaaactaagtcatggttcactgttcagttgaaacaagagaccttcagaagaaccaccgtttttctgaatactatcaatactaacctagaagtcaaagtgaattatttgactgtttgatgctrctggaaaaccattggtggtaaactctgaaacatagaaaataggtataaattatctttttccttttatagttgtcacatacttaaatatttgtgaggaataaaagatcagagccgaatgtacccaacagacaaaagaaatcaattcaagaatgtaatgaagcaaatacaaagaaagcaaaacaattgataggaagcagggaagatttgttttagttcgcgggaccaaagtaatcaaaaagaaaatagctca

SEQ ID NO: 500177 - DNA, 427 bp, Homo sapiens
ccaaaccatctgagtatcaaaggggaagccaggatccccagggaaccctggtctgaacaagccygcccggcatgcaaggctttaaaacaacccaggacacgctggccagtggcctacatgatgggtggtttgcgtcgtgcccggcaggcttgttcagagtgggctgggcaaacagcctttcatgtaggccactggccagcaagccctgggttgttttgaaactttgggttgggggcaatccactgtaagcaccttggggtccatgcagccatagcagggctggggagccacctgggcttctgcccagtcctgtgcgtctcagcaaaacctggatctacagctccaacctgagaggtttattctgaggattaaataaggtgaagtgctcagaacagtgcccagtcaacgcctgtgaggacctcagcag

SEQ ID NO: 500178 - DNA, 225 bp, Homo sapiens
tttccaccgcacccaccacgccctccttggcgatggagaagcccttcttgaagacatccatggtgggtgtgcagggttgkgctgctgcaggcaggacggagctggatctccctgcgagctgcgggcttgagctggctcgagtgctgccgcagcggctgtccccgatgcctcctattgacgccgatgaaatattgatgcggaggccagctggagcccagccagccc

SEQ ID NO: 500179 - DNA, 631 bp, Homo sapiens
gaatccatctccaggaattgtcatcagtcaggaagagctactttactctgggtcactcttttccaatcccattctaatgattggtctatgcaattgtacgaaggtctggctttattcctcagggaataattccattctaagtctatggcaccctgtcagattgactgaggtgattcatcttactgcatctcagttcgactcctctctgtgtccaattatgtttccttcttacaagtgttggtccagcacaaaaatctcctcatagagtctatttccyagagaagccaatataagaacattggtactaggagtgctccaaggtagtagacattaagtaaagactttggacatggatcagccaccagcaggctggtgatgaggacattattattgctgaggcaggaaacatacgggtgggtgcaatgtcttaatttttttgtgaaatataggtgaaatattaatgataaaaactaagatagtgaatggtgttgttggagcaaacaatggatcataaatagatagtgaaaggttgaagataattaatcacgttttaggtaaagtgtgagcatcagaggaattatatttatgaaaaagctacagagtgtggtcaatatggtagaatccaagataa

SEQ ID NO: 500180 - DNA, 388 bp, Homo sapiens
acctagatgcctttttccaaatatgtagaaatatataaccaggaactaggaatgcaaccaaggacactggggagrgtagtatgccatatgatgccaaatattattgatacgtacaggagacagagaaatactgggctgaagaggcaggttccctggcaaaggccccaccttcaggcctggagacccgtggccctaaatgggaacaggcatttctgtttttgtgcccaaaaacttgccttttgtcctgtcatgcctcctatcctatacccatataaaccctgaaccccaggctacaggatcaaatgagcagatgaggagatgaggagacaagcaaatgaatggcagaatggctccacagagaaagagagaagaggcagaatgtttgaac

SEQ ID NO: 500181 - DNA, 555 bp, Homo sapiens
tgaagaaacagcagtgagtttcaaatggaaaataatactagtttattggacttactcccatagtaatgaaaacccagtcttttatagataacttaagcagtgatttagggtaacattaacatatgtgccttttccctttcataagctcaacagcccaacatgcagtttcattgtacgttctgtgtttaatgtgtgtttccccccatctccacatttacacaatagcaaagtaatttaggtgtgagctggtcagtcaggtacataagccgatctggctatcctgagttttcttttcccttcacctcttgttttcctccctttaatttggagagcccatagcatgttgccaagcaggcaattgtattagtttcctagggctgctgtatcaattaccacaaactgggtggcttcaacctccaaaacgtattcactcagttttcgaggctagamgtttaaaaccaaggtgttggcagagctgttgtgtctctgaatactctagaggaggagccttccttgcctcctctggctactggttggtggccaggaatttttggt

SEQ ID NO: 500182 - DNA, 513 bp, Homo sapiens
ggtttgtttatttatgggtttcccaacctgtttcattaatgtatctaggttggtatgatgttttattattaaagtttatatccattagggactgtctcttcttactcttcttttttggcaactggcttctgaaatcaaggctacatgcaaacaattctggagctccaaatttttaaagaattataacgcaaaaaaaaaaaaaagaattataacacagtgggtttttgggacagatcgaaaacattcagatgccagaaagctcactattccattaataagaaaatcataagtaatcatgaacatacaagaagtatgaaattgtgcccaattaattaattggtagtaaggtccttttcccttaagagaactatagtctagttacataaaggagatatacaaccagagaatacaagttaatggtttytgcaactggctttacaaacagcggttgacatgtaatatttgacaaaatattttgcttcaaaataaatatcttcttacttgtaacaaaag

SEQ ID NO: 500183 - DNA, 656 bp, Homo sapiens
acccactctctgagtgttctcctggaccttggcctcaaatttggcaccaagctcctggaagtcagccctggccacggcactgtcctggactctggagatggcctggcggttggcctccacgtcaagagacaggtttcttatggcctgggtaaggctgtgcaggctttggttaaagctcctccagatggggctgaaatgcacttgtaggaaggtgtccacgtggggtagcagcacctgctccaaggatctatcagggaactctgcaacagacatgtggtgtgacacaagccctgcaggagcagacactcctcccaggctgggaccagcggggtcctcccctcctcccctcaatgtgaccaggctcttcctcagcccctagagcctgccactcaccgtgccctgtttgatttgcttccatcactgcasctgtgaggttaccaggcagggctttccacaggcctggcaggctgtctgccacccggtgcacatcattctggagatctcccagcagatgttcctgctgttcctgttgcacctcaacctcattgatcactgcagcaaggtggcctaaatacacagcagacataaatgtcaagggctaactcaccaggcctgggaagatcacaaggttcagagaaggagagttgaaggctgag

SEQ ID NO: 500184 - DNA, 692 bp, Homo sapiens
atacacagcagacataaatgtcaagggctaactcaccaggcctgggaagatcacaaggttcagagaaggagagttgaaggctgagagcagggaagttagctgctgatgtcctctgagcaggagcttagaagccttaaacccctggagggcaaatgcatagcaagtgagccctcaccctgcctcctacacctacagcagacatgactaatcaatcatggtacactcccctcctcagcacatgcacatggcctcacaacttcattcttggcagcccttgtcaataaatacttcaccacataatgaaactcatttactttctcaatcttgggcccagccttaaagggycctgctgcaaatggtgtctcttggtgggtttcctgtgctgactccaagaccaaggacagcatgacttcctggctctggttagggctgtgggaaagggtgagaatgctttttccaggcacaagggcttgtgtggttcagcggggcaaggaaagtgccagatgaaccagtccttcccagaagatggggtgaaggaaaagggtgtgtgtgcttggccagtaggccgctgggggccctgtgagcctggccttcaaggtgggaggtggtacaggccacagagcaggccttgctgattctggaggcaaggtttccctgaaatggcactgctgtatcacaggaaaaagggccag

SEQ ID NO: 500185 - DNA, 572 bp, Homo sapiens
taaaatggtacaaacatctttctggctcttgttatatttttcccacactgctttccaaaaatgttgtgcttttctttccctatcattactacaaagtttaaaaaaaaaaaatagctctcctactacctggcaccaacctgcttttctgttgccatctcctggttctcaggaatgtgtacttttcatttcagttttcaacctgtgttagaactggaatctcctagaggaccttcacttcatagtctttctcttatgcctagtgtatgtatatccctggaagatagatatgattaacatttccatttttacagaggaaagcactgaggctcacagagrtcaggtaacttgcccagggtgccatagctaaggagtagcagagcctatacttttgattgtgtctctactctctccatatctggtatggttctccaacaatttggtatgaacagagttgatttgaacctaaatacctcttgattacttacagagtctctatatgtcatggctttcctaccccatctggtcgcttggcaccagcccatgtctgtgtccttactacctttctgcctgtg

SEQ ID NO: 500186 - DNA, 641 bp, Homo sapiens
actagacccaaatggatggttaaattgtgtggctctgtgcttaccctgagcacaattttgtacttaccttccagctccctccacatctagctgccacctccccacctcccctggaattacgttccccctagatgcagttcaggcagcagcccccttgactgatgcttcccaggtcagatctggtcctgtgcagcatacagtgcctaccacaaccagagccttcatttatacccacaggctcaatcctagtcagcaatcgtagtccctagccacaccagccaccatggaccagtgaagcttacagccactgtcagagagaactgctatatatatcccaattcttactccaaggctgggaaggcaggtgctctgggagcaaaggtagggagtcataagttacaagaagatcatgtcctatttttctygcaaagtcaccataatcagcatttgctgaagtggtaagacttggcacctgcccatgtggtacccagaactgaagagaatgcatccatgatgcaatccctgacttcaatgcataacacctgtgcatagtttgttcttgtgtttgcaaagttccatcaggcacatttccacatttaatccaaagcccgaagaggcaggtaggacagctctagttgtag

SEQ ID NO: 500187 - DNA, 589 bp, Homo sapiens
catgtatattcaaccttgtgtctcctgtgacatttagctcaattcctagcacctgtgttcaataaatgtctgttgatggataaagtaaaggatgaatatctggacagagagtcagayaacagaagaaattgagcaagtttattttctcctacaaaggactgagatcctttttaaaatagaggtggaataaacataaacttaaatcaagtttcatataacatagaaagccagcatctatgaaaaggaaaaataacaagacagtcatcctctgaaataatggaacttaaacctatgaaggagaacatacaaggtgaaactattaaaaactaaatgttggttgaaaaggcagttggattcaagaaaatttaaaatgatgacagggtttttttctccctcccagatgcagataaaaggtattagaatgcctcagccacttggaaacagcaagatagtgcataaagataaactctggagctttacttcaagaaggaaaatgggaatccaccagaatcatgatgggcaccacagatactggggaggagaacgccagcaaacagctcctgtgacatttagctgataaaagtgagtg

SEQ ID NO: 500188 - DNA, 589 bp, Homo sapiens
catgtatattcaaccttgtgtctcctgtgacatttagctcaattcctagcacctgtgttcaataaatgtctgttgatggataaagtaaaggatgaatatctggacagagagtcagataacagaagaaattgagcaastttattttctcctacaaaggactgagatcctttttaaaatagaggtggaataaacataaacttaaatcaagtttcatataacatagaaagccagcatctatgaaaaggaaaaataacaagacagtcatcctctgaaataatggaacttaaacctatgaaggagaacatacaaggtgaaactattaaaaactaaatgttggttgaaaaggcagttggattcaagaaaatttaaaatgatgacagggtttttttctccctcccagatgcagataaaaggtattagaatgcctcagccacttggaaacagcaagatagtgcataaagataaactctggagctttacttcaagaaggaaaatgggaatccaccagaatcatgatgggcaccacagatactggggaggagaacgccagcaaacagctcctgtgacatttagctgataaaagtgagtg

SEQ ID NO: 500189 - DNA, 525 bp, Homo sapiens
aaaaaccagatattgatccctgtctcactgggtctacacgaactggattgcctgaattcatggatttttttaaaggaacaaatgcagtaaattaaagggagtgtatttttttcctactctattccagatagcaagtttgactgcatcttttgcttgttgtctagtttttctggtgatacagaaatctacaatgcaaaatggtatacagggaagccagtataccttctgatggctcatcaagttgactttgccgtatgtataattgtgccccrgccaagtcccaaaatcagggtacacattatacccagagaaggattaaagaggaggaaaaccaacctggtggctgattcacagatcagcaacaaaacatcacagatgttgcctccatggtcagccagtcatagagtctgcaaacatttgttaagcacctcatgatgtaccaggttccaagtaaacaagacatggtacctgtactcaaaaactttctgtctaccgggaaaaatacactttaaattagtcccactt

SEQ ID NO: 500190 - DNA, 590 bp, Homo sapiens
tgtaaggccttgggcaagttactggagttccagtttccttttctgtaaactggaaatgataactattttatagaattgttgggcttaagataactgcacataaaaagtttagcattgtgcctgagagatgtattactcatatacatatttatatttataacaactattatatatacatatatattatacttcagttcagtacaagaagccatcttcatgctcttttaggctagaatgatgaaatgttaagttataaatatcataccactttcaaaggacctaattatttatgacactctgttactagttgaatggaacatttcatttattttttaatttaacttttattttaagttcagggatacgtgtgtaggtttgttacataggtaaatttatgtcatgggggtttgttgtacagattatttcatcacccaggcattaagcctagtactcattagttatttttcctgatcctctccctcctcccaccctccaccctcttctaggccccattgtatgttgtttccttctatgtgttcgastattctcatcatttatctcccacttagaagtaagaacatgtggcattt

SEQ ID NO: 500191 - DNA, 523 bp, Homo sapiens
ccaggctgcggggtgggagtgtgtgaaagaaaagaccatatatcttgcgatttctgctgctcaacacagcaggaatctatgaatgggtcccgccaacacttccacatgtggagagttgctcgcccacatttcagaatctcaggggtccacgtccctgcaagtgtttccccacagaccsagactcacccagcaggctcttggaattgtgacaatggcctcgtggagcatctgaaaagacaagacccatctgtgactgctcagggtgaacgagactcaagttggcgcagcaaggctcagctttcatccacctcaatggccggggctggaaatgggatgaagggaatgaggtagagagagataaagtcagctttggtaaggagagaaagacagacctagagtcagcctgaggccaggaggacaaagaaaattcaccctgaaaactcaccctgtcgactcccaggagtggtctgacagtgcacgtttatcattcaccttaattcaaatcaattctgatttgcgagaa

SEQ ID NO: 500192 - DNA, 562 bp, Homo sapiens
actgtgcccagactaaattattgtaatattacagctattatggattcggtttctaaataacatttgttgtttttccatatcataaaagtaatgaatctccattgtggaacatttggaaaaaacaaaacaagacacacatgtaagaaaaaatgacctattctcctgccacatggagataatcacagttattttgatatgtttcattatakattttttcatgatatgtgtacgtatgtatgggtatacactcttaagtgtgtgcttacacgtgctccaaatgtgtgtgtgtgcacatgtgcacaatccaatctacatcgtggggaatctacaaagttgtggtcacagtgtagagccagccccacaggcctccccagagacaaggccctggactgcccccaagtcctcccgaaagggacatctgtggtggtggtagggccaggatgccatgagcaaccacctggaggccccgagtactcagcgtgaaccaggtagtggaagggaaggggaagggcagagtgagaaccaggaggaatgcttgcttttctttccaagcacaagggac

SEQ ID NO: 500193 - DNA, 617 bp, Homo sapiens
gtgttctcaatcgttaatccttgggaattatttgatgagttccaaagggcactaacagctaacagtcgatctcattaactaaggatctgttaaaacctgccaaggcaagaattttttctgggtttgacaatgacgtctctgaaagccttgaacttgaagagaagcmcagtaaaaatatcttctgttatagccacaagttaccacattttgcaaaacaaaactgaataataaattatataggatagcccccgcccccccctttttaaaaactcattaaaaagtcttttttatctttgtttttccttaaccaaaattatatggctctaatcttcattctacattctcttctagagttatggtcagggtatagatattttttgaaatgatactgaaaggtaacatttcagagagtttgaaggcattatgagtcttgattctgctagacttcagtgaaggaaaaggtaatattggagttcttcttcaatggcacctgtaagtctcatctgcataatcaagaatactgtattcacaccataaagggcactcttgaaatagggttttgagggccattcttttctcatttttatgatgcaggggaagtatttaaacgtttgagg

SEQ ID NO: 500194 - DNA, 617 bp, Homo sapiens
gtgttctcaatcgttaatccttgggaattatttgatgagttccaaagggcactaacagctaacagtcgatctcattaactaaggatctgttaaaacctgccaaggcaagaattttttctgggtttgacaatgacgtctctgaaagccttgaacttgaagagaagcccagtaaaaatatcttctgttatagccacaagttaccacattttgcaaaacaaaactgaataataaattatataggatagcccccgcccccmcctttttaaaaactcattaaaaagtcttttttatctttgtttttccttaaccaaaattatatggctctaatcttcattctacattctcttctagagttatggtcagggtatagatattttttgaaatgatactgaaaggtaacatttcagagagtttgaaggcattatgagtcttgattctgctagacttcagtgaaggaaaaggtaatattggagttcttcttcaatggcacctgtaagtctcatctgcataatcaagaatactgtattcacaccataaagggcactcttgaaatagggttttgagggccattcttttctcatttttatgatgcaggggaagtatttaaacgtttgagg

SEQ ID NO: 500195 - DNA, 597 bp, Homo sapiens
accactgtagtgcaatgcaaaagagtgagtctttccaagaaattatgctgggttcattggatatatctatgggaaaaaaatgaatcttgacctctacctcacaccacatacaaaaattaattttacatgggttacagaycaaaatatgaaggaacaaatgataaagattttgaggaaaacctaagaaaatacctttttcacttggattaggcaaagatttcttgagcagtacaccataattactaatcacagaagaaaacagtaaaaaactggattacagtaaaattaatatttatcaaaagataccattaacatagtgaaaagacaaacaacaaagtgtggcaagatacgtatatctgacaaatggtgcatatctagatataaagaactcttaacagtttatgagaaaaaaacagatgactcaaataaaaaggcaaaaattttgaacagattcttcccaaatgatgatatccaaatggccaatgaacatatacctatacatacatatgcaactctgtgaacaagtatttcaactcctaagaatacatccaataaaatgcacatatatggtgtattgctttgggcttctataggaaa

SEQ ID NO: 500196 - DNA, 597 bp, Homo sapiens
accactgtagtgcaatgcaaaagagtgagtctttccaagaaattatgctgggttcattggatatatctatgggaaaaaaatgaatcttgacctctacctcacaccacatacaaaaattaattttacatgggttacagaccaaaatatgaaggaacaaatgataaagattttgaggaaaacctaagaaaatacctttttcacttggattaggcaaagatttcttgagcagtacaccataattactaatcacagaagaaaacagtaaaaaactggattacagtaaaattaatatttatcaaaagataccattaacatagtgaaaagacaaacmacaaagtgtggcaagatacgtatatctgacaaatggtgcatatctagatataaagaactcttaacagtttatgagaaaaaaacagatgactcaaataaaaaggcaaaaattttgaacagattcttcccaaatgatgatatccaaatggccaatgaacatatacctatacatacatatgcaactctgtgaacaagtatttcaactcctaagaatacatccaataaaatgcacatatatggtgtattgctttgggcttctataggaaa

SEQ ID NO: 500197 - DNA, 541 bp, Homo sapiens
ttttttttttaagagatgagtgttgccatgttgcccaggtgggagtgcagtggctattcacaggtgcaaccatagtagatcatagcacactacagcccagcactcctgggctcaagtgatcctctctgcctccacctcccaagtagctgggactgcaggcatctgccactatgcctggcttctctttttgagtacttaaactttgccctttccctaggggaatcattgcatgctatcttattttattccttgtcttttcctcttaaagattctatttttttaaacagctaagccttgtgatttttttttttttttacctacccgccatgatacctagcagtttcttacaccaccttagccttccaataaatatttatgaaatttcttaaagaattactcataaactatccackggcaaagcaaagattttctttctctgaattcatttaattcagtgaatttaaattaatttcaatgcaattaattgaatttcttgtatatggctagtctgtatgagtagtcttcaactttgtgaggatgg

SEQ ID NO: 500198 - DNA, 626 bp, Homo sapiens
ctggtggtggtgaagaaagcaggggacggtcctgccttctttgtagaccaggctaaggatggtgacctttttcttagagcaatggaaaattattttaagtagggaaatacatgattaagtttgcatttttaaaagttcattctcgatgtagtgcaaaaacagataggagaggggcaaaaataaatttaagaagacaaggtaggagaccagaaacagaagaatagtttcctgtcatgaagagacatttgaaaggagtagtctactcamgacttaattgtgaaatactagctctattatcattataatgagaatcaaagcatggacttgggataacgcttcacagatatgagaggtggaaagcctggagctcaaggtgctatcccaaactgaggaatgcagaacttcaggctgccagaggtgaagtacatgtgttaacgttcttaggtgctgtcgggtaggtgctcaataacggtttccttggttttcccttttctgtctggatacactaagaaaagacctgtattaatcatgcatttttattttctgtattttttatgctctggcatctggggtcttgctgtccctggagacactgctcttttcagacctagttaattcttggtgac

SEQ ID NO: 500199 - DNA, 626 bp, Homo sapiens
ctggtggtggtgaagaaagcaggggacggtcctgccttctttgtagaccaggctaaggatggtgacctttttcttagagcaatggaaaattattttaagtagggaaatacatgattaagtttgcatttttaaaagttcattctcgatgtagtgcaaaaacagataggagaggggcaaaaataaatttaagaagacaaggtaggagaccagaaacagaagaatagtttcctgtcatgaagagacatttgaaaggagtagtctactcacgacttaattgtgaaatactagctctattatcattataatgagaatcaaagcatggacttgggataacgcttcacagatatgagaggtggaaagcctggagctcaaggtgctatcccaaactgaggaatgcagaacttcaggctgccagaggtgaagtacatgtgttaacgttcttaggtgctgtcgggtaggtgctcaataacrgtttccttggttttcccttttctgtctggatacactaagaaaagacctgtattaatcatgcatttttattttctgtattttttatgctctggcatctggggtcttgctgtccctggagacactgctcttttcagacctagttaattcttggtgac

SEQ ID NO: 500200 - DNA, 545 bp, Homo sapiens
tggagatgaaacctatccttgaccttgaaaaacaggtggcttaactcacccaaaactttaaatttttaaggtataaaatgaggtaatcatctatggtggatagagttattctgaaaatcagagccacatataaagctggatcactcaaagtccagtcaagaaataaaacccagtgagtatttcacatagacaggatcaagcacacaacaatgattacacaagtgttggaaaactgatagagcaaagatgaaaatcaatgactacagaaagcygtgactttccttagattgaaggaagaagagagaagaatgcatgttgcctgaaactggaagcaaagtgtggagcgcatttgggggctggtactgagactgctaagaagaaaaagcaaacccagaatgtccttggctccaaatgcttgattctactttccgttctactgattggaggaagacaatgaaaatgtcatcgttgcaattaagacactgctatcaggctgtctggattcaaatccaactcagacactttcttgtcctgtatctttgaac

SEQ ID NO: 500201 - DNA, 151 bp, Homo sapiens
ccacaaactgtagtgacctttcagtgtcccgccgacttccactctcttgcttccagcaggagttagaatctaacatttctttacaatgacctctctaacttcttggactcaaggtargtgaataaaaaaagaaaggagttaacagggaagt

SEQ ID NO: 500202 - DNA, 512 bp, Homo sapiens
aaaaaattgaaagaactacatgttggctataaattgaattacgattcacatggaaacacacacactgtcgcacacattttgttgaactattaaaaataagtatcaaacattatggaactttagcctgaaatagttaaccatacctcttctaaaagcatttttctaagttacctcatttttcttgtaacccctmagaaacataatgaaattcactgatattatttaaaatctaattcatattcaaatatcccagtatcttaaaaatgtcctttatttttaaattaggaatcatatagtatccacatactgcatttggtttaaacattttttttaatccatgaaaggttgtaatacacaaattataaaaattaatctgtaataatattagaaaattatcacaaattgcagctcttgtaagtgacaaatataccccttctcaaactgaaaaatgttaattaaagggaaagaaggaatacctactctgactttttcaaaaagaaccgtggttcata

SEQ ID NO: 500203 - DNA, 569 bp, Homo sapiens
ttccagagattcttctgcctcagcctctaagatagctgggattacaggcatgctccaccacgtccggcaaatttttgtatttttttttttttttttttagtagagacagggtttcaccatgttggccaggctggtctcaaacctaggattacaggcatgagccaccatgcctggccaggagagatttattaaggaatttccttgggatcaacatttgcagagggaggagcataaaacaaaaggtgattaggcagagggagaccttaagctgggatgatgtcctgacacatgcctaaactggtaccatgggaagttctcgaaatgtaatggtccatgagagtggtatcaagttgggacaaggagaycttttttatccccttgttaataagtctttgtatgcaagctcctcctggaaggaagcttgaagctgaatgaagcaatttcattcagctaaggcaactctcaaagagaactgacatctaaaggaatcatccaagagtgagaaataaatccttcactctgaagggtgatctgaatgacacatcatagcatccactgcatgaggtgat

SEQ ID NO: 500204 - DNA, 641 bp, Homo sapiens
tttctgcatctcctttcatttcctcgatgatatatcttagtgatgttttcaggtaagtacacaaaagtatatctcattcttttttaagggctgcattgtattttactgcatgattgtgtcatttatgcaacacattctctactgaagcatttgtagggattttttcctaatcatttactaccactacaaaaagtgatgcactgaataacagcgtgccagccagtgctagggtagttgtacaatcaatatctagaaacagaatccttgagttctaagggtaggggcagaaaatattattaaagataacaacccagtgccctamgttttgtgacaatgtccaaacacaacttttagactctgcaaaatcgtttttatttaccctcttatattttcctaattgaactaattttttctcaagcatggagacacacagcccccatgtctaaccttatgtaaagttagttacgtgtaaaatgtgttagagttccaaacaatcgactcaacaacttttaggatagaatgtacttataagtatgagatttcttgcagtagacattattttgactggtttctaaacaaaaattactcaattcgaaaagtatactgtttagagtatgatttgatcccttttaaggttggaa

SEQ ID NO: 500205 - DNA, 526 bp, Homo sapiens
tatttcttttgttttatttttgttttattattccacgcatgttgctgacttatattattactgtaatagattctggtaaaaattcttcattatatggactatgtcctctttttaacktgttgtttttaagactttttatgtctattacaagtcatcattaatttgattatgatatgtcttgttgtgacttcatttttcttctgcttgggctttgttgaactttgtggatctctgaattcaaattttctattatagtttgaaagtatttagaatttcttttgaaacaatttcccattctgactcattttttcccctggagccccaattatatgtttgtttgaccacttgatattgtcccacaggtgacaaatgctgttctttctttgaccagttcttttctctctgtgttttgttttgaagattttctattgctatgtcttcagtttcactgaatttttgttttagtgtctagttactcttactctcatacaatgtatttttttcttggattctatatttatgatat

SEQ ID NO: 500206 - DNA, 526 bp, Homo sapiens
tatttcttttgttttatttttgttttattattccacgcatgttgctgacttatattattactgtaatagattctggtaaaaattcttcattatatggactatgtcctctttttaacttgttgtttttaagactttttatgtctattacaagtcatcattaatttgattatgatatgtcttgttgtgacttcatttttcttctgcttgggctttgttgaactttgtggatctctgaattcaaattttctattatagttwgaaagtatttagaatttcttttgaaacaatttcccattctgactcattttttcccctggagccccaattatatgtttgtttgaccacttgatattgtcccacaggtgacaaatgctgttctttctttgaccagttcttttctctctgtgttttgttttgaagattttctattgctatgtcttcagtttcactgaatttttgttttagtgtctagttactcttactctcatacaatgtatttttttcttggattctatatttatgatat

SEQ ID NO: 500207 - DNA, 574 bp, Homo sapiens
atataagctatacatttttttcagggctttcaaattacatatatgcactatcatcactcgtgtatttatttttttctctgttaaactttatatatatttaaagtggaaaagctactctatagcaggttaccaaaatgatatctctttaatttcttcaacttccaatttttcagatgtgtgtgtgtatgtgtatgtgtgtgtatacatatcctgtgcataacaaaatccaagaattagatagagttaatctttaccatccaggaatataccaaaaagtgtaactgaaagatacatgaaaaaagctagaggtaattaagtaaattaaaataaaaagcacaataggggggaaaaaaaggaaaatttattgcacatggagaccattttattgattcaaagaattggtcacattttaaattcrcactttttctgcttgtcctattgatactatgaaataaacttgaaacattcattagaatgtatttcaacttttcagccacttgtgttgattttatgtatcctatgcaatttttattcaatcctgaataaaaaaccatgttgttgtttagataactgg

SEQ ID NO: 500208 - DNA, 574 bp, Homo sapiens
atataagctatacatttttttcagggctttcaaattacatatatgcactatcatcactcgtgtatttatttttttctctgttaaactttatatatatttaaagtggaaaagctactctatagcaggttaccaaaatgatatctctttaatttcttcaacttccaatttttcagatgtgtgtgtgtatgtgtatgtgtgtgtatacatatcctgtgcataacaaaatccaagaattagatagagttaatctttaccatccaggaatataccaaaaagtgtaactgaaagatacatgaaaaaagctagaggtaattaagtaaattaaaataaaaagcacaataggggggaaaaaaaggaaaatttattgcacatggagaccattttattgattcaaagaattggtcacattttaaattcgcactttttctgcttgtcctattgatactatgaaataaacttgaaacattcattagaatgtatttcaacttttcagccacttgtgttgattttatgtatcctatgcaatttttattcaatcctgaataaaaarccatgttgttgtttagataactgg

SEQ ID NO: 500209 - DNA, 546 bp, Homo sapiens
tcattgtttccttgctggctgtcacctggaagctatatgtagctttcagatcctttctgtgtaaccttctccatctttagtgctagcaatgggatatctctcttgagctgaatgttctcaggctactccaatctttctgacatgctcctctcctactcttgaaattgkccaggaatccctctgcttttaaaggactcatctggttaggttaagcccactcagatctttcttgaggtcaacttattagtaaacttcattacatctgcaaaattcatttttccacatcatataagagaatcacaagactgacatcaggggacctagataattctgcctaccacagtatggattctggtttccatgatatagttccctcccacatgcaaaatacatttgctccatactaagtgtctcaaccttttttcccagtatgagctccaattcaaaatttcatcatctgcatccaagtgctagtagttcattagctcaagttgaaaaatttcacctagattatcttagctcaaagttcaaaatcttattatgtaa

SEQ ID NO: 500210 - DNA, 363 bp, Homo sapiens
tatgccaagtaaatatgactgtagtaacaagaatagagaaaaagtagaactcaartgagaagtactaaacaatataatggataatgcacatggataaaagttaaaactctctgagaatgtccattaacactggctcttgaacacctcccacccctaagacctaagattatacagctcaatggtttcttgataccagacccactaatagagggtatcctgccccaggggccaataactgtctccattgctgaggccctgcagtaattccacattaacagtagactgaattttttaaaatgtggtatatatacaccttggaatactatgcagtcataaaaagaaggaaatcatatcctttgcagc

SEQ ID NO: 500211 - DNA, 526 bp, Homo sapiens
gctattgcccaagtggcccttgcaaatcttgggatgctgtgcctgtgaaagcattttgtattgtgatggtggcctcagggtgagggaagtgaggatcaaggggaatgggctgtttgcaaaatgtggcttcggggcctggaatgtttaaaaaattttgaaatcccagccttttcttttcattagtgatgaccctttcaaacacccaagcctcttttcttgaaattcttaatctcgtttttcctttaaaaatgtataaaatcccgtgcatgatacatgccgaatgactgtcctttaaaaatcattacaatgtaaagttctttactgaaatttgtttatttgtattttatttactcttaaccatgatcctgaaatttttaggtacaagttctgggctggatcttctctgattgctctttatagacctacttgctacctttctctactgtaccctaggccctggaaggctgacctccatcgattscatcagtgggctcccataccctctggcttcctgtcaggttcagcc

SEQ ID NO: 500212 - DNA, 556 bp, Homo sapiens
tgtgctggtgctgctatagctcatggcagcctcgaactcctggcyttaagagatctctttcctcagcttcctgagtagctgggagtacaggtgcaagctactgagccagccagtgtaggagttttgacctgctgcctttctgacctgggctggttcacccctccttaggcaatctggtggtcctgctcctgggaggtcaccatactgatgttgaacttagtgtggacaccccataggcatacagcactatagctcagaactcctgggctcaattgaccctcctgcctcaacctcctgagtagctgggactatagacacatgccaccgaacatgacaaataggaggttttttttttaaatacagtttgatgttcaatttaagtctgagaaaatattttcacggataggcttaacccctttatttttattataattgctaagatatttaattttatttttatgattttaatttgttttatgagcagaaataatgtccccctgttccttttattctcctttcctgacttctattagatttgtctttaaaaaaaaaccca

SEQ ID NO: 500213 - DNA, 556 bp, Homo sapiens
tgtgctggtgctgctatagctcatggcagcctcgaactcctggctttaagagatctctttcctcagcttcctgagtagctgggagtacaggtgcaagctactgagccagccagtgtaggagttttgacctgctgcctttctgacctgggctggttcacccctccttaggcaatctggtggtcctgctcctgggaggtcaccatactgatgttgaacttagtgtggacaccccataggcatacagcactatagctcagaactcctgggctcaattgaccctcctgcctcaacctcctgagtagctgggactatagacacatgccaccgaacatgacaaataggaggttttttttttaaatacagtttgatgttcaatttaagtctgagaaaatattttcacggataggyttaacccctttatttttattataattgctaagatatttaattttatttttatgattttaatttgttttatgagcagaaataatgtccccctgttccttttattctcctttcctgacttctattagatttgtctttaaaaaaaaaccca

SEQ ID NO: 500214 - DNA, 614 bp, Homo sapiens
tcgacttcatctaaaacgaaattttcttgtggtcctaagatggctacaagcagctctatgggcttcctgttctcctcagaggcaagagaagctccctcccaacatccccagcaggagtcctgaggttttctctaagtagtctgactgaagttatgcgctcactgctgaactaatcactgtggttatggagcaaatgtcatggttgccataatctcggccacatgctctactgccagagctggagtgcagtttaggtccctgaaactacatggttcccctaaactaagtcagagggtttgtcctttactcatgtacttccaggacctgaaggttggtttggaccccacttactgacacatctctagatccatgtctagctggtgctctaagctttctcagccccagccctcccactcaacttgaacactagatrttaacaaagtgccaggtggaaaactccagaattgtgcatggcagcatgtgtgcagagatgaaaagacacagagaagtgaggaggggtgaggactgtttggtcctataatagtgatgcggtgatatcatgactttaaactctccaaacatctgctgggaggctcctactgctaaaagtggaa

SEQ ID NO: 500215 - DNA, 639 bp, Homo sapiens
tacctttctacatacagtctggtaactgttaaaaaataaaccttctgatttttctgataacttttattttttcaccaaattcatctttattctgcctcaaataactgctatatacttctcatttaatttactaaatccttaagtactattaagtaatatttcctgtgacattagtaagaatgctttatcagcaatttctaatgtgctttaaagcttaggactctcttctctgccatattccaaattcacatccttaaaggggaagcgctcttgaatacacaaaaagaatcaatttctaaatattatagtgaacatttttatctgtccagcatcgattccactctcttttgataatagttttccatcctcagtcagataaaaacctactttcaatgatgtcaatccagaggaaggagaaccaagagacagaagaaatccaagacccagagatattttygagatcttgaaaagccatacctggtcttcacagcttctcggactgtgcattcccatttgctaaatataattttgtctgtgttttctgtcactttcaactaaaataattctaactgaaatacacaattactcagtagtattaatataattagggagcatcattttcaaaataagtcatgaatt

SEQ ID NO: 500216 - DNA, 600 bp, Homo sapiens
taaaaggtgataagtacatttttatagaaggtaatagtctatctgggatgccatatttatggaggtagtatttttatagcataaaaccaatgacaaagacgacttttagtaagaatgtttaaattatgatgatattggagatcagtaattatatatgtccctcagaacagaatgcaaatttttcccagtaacaaattgcaatgacaaaattctacagttcaaaatattacatcttatttgttctttatattaatgaataatacgtaactgtgtttttatttcattatttcaatatatatttgtggactcctactatgcctcaggtatggtawatattggaaacttaaagatcaataagtctcttttacttgcgtgagctcggtaaagaaagataaataaatatctgaaatttgatgttatttgctttatagtaaatacatgcaccaggtccaatggtatctcagcagaacatacaacagtatagcactctggcaccatgaagttattcaggatggctccgaagaatatgaggaagaggaggggtgagagtaggacaaaaaagcaaaatgtacctttaggtaagcagaggcaaggctgtaa

SEQ ID NO: 500217 - DNA, 498 bp, Homo sapiens
gtgcagtggcacaatcttggctcactgcaacctccacctcctgggttcaagcgattctcctgcgtcagcctcctgagtagctgggattataggggtgcaccaccacgcccagctaatttttgtatttttagtagagatggggtttcaccatgttggtcaggctggtcgcaaactcctggcctcatgatctgcccgcctcagcctctccaagtgctgggattacaggcatgagccgctgcgcccggctgacaatgtctctttttatggaggcaggggtggggggtgcttacagaggagaggaggccagcgtgtcaggctgtaggaagagcccaggggctgtcttgggatcccaaagccgctgcagaattgaggcttgcgctggggtccgggggcacctggcctgtctgttcttgccagttggcctggacctggtccaccttctcaggccctcggtctctagcctgccacygccacctcctccaccgccctgagaagaag

SEQ ID NO: 500218 - DNA, 477 bp, Homo sapiens
cccaggggaactgtgagggaggggacataggcgggagcagtcacaggytggcaccagtggcctgtcctccccaccactccctagtctccggggaagctctatggagttccctctgcctcccaacgtcctgccctcccaccccatgccggagttgcttctcctctctcggtggggatgggaaggcaaaggaaggagaggctgaccccctcataactcaccccggggcagtggcctcagcatctggcacactgtctgcattaagtggttgctgagtgactggggaaaggaatacaagcaaacgctgtcgggttttaacaccaatttgcttgtgtgcatgagctcaggacccaaagcccatcttcagaggtggtcctgagtcacctcctgctgaccccatagagccggagcgggcacctctgcagctccgtggactaaccctcttccttagaactgtggggtactgggtcagagtccttc

SEQ ID NO: 500219 - DNA, 536 bp, Homo sapiens
atttgggtacaagtacccaacaaagaaatcctgccaatacactgtcttaccytcttccacccccgacacctgctaagttctgtttggtgaccagaactccgggaaaactttgccaccagaaacaaaaaaataccgcactcaataaaggaatggacacaggtagaggacacaggtagaaattcctggtttctgtctcctcctcctcctctcctttccactgagtccctaccttatgccccaagtcacagcaatagctcctcaccttgtagatcctatttccttacccctttagatcctgaaggggacacctaacattaacaactgtaataatgtggctgtatcagagtcccatgttcaataaccaataagggctctggtcagaaatcctcaccactcacatcaaaaatataattatcactaacctgtactttatttggaaactacaatcacaagctttcaaatcagttttttaaaggagctttcaaaaagaaaaagacctttcctcacatcctttctagttatcacagcaagtttac

SEQ ID NO: 500220 - DNA, 648 bp, Homo sapiens
  misc_feature (1)...(648): n = A,T,C or G
gcaagctcctgagcaggttctcgcttctgcacaaaccaaccccaggggccgggcgcggcggctcacgcctgtaatcccagcactttgggaggccgaggagggtggatcacttgaggccaggagttcgagaccagcctggccarcatggtgaaaccccatctctactaaaaatataaacattagccgggcccagtggtgagtgcctgtaattccagctacttgggaggctaaggcaggagaatcacttgaacccgggaggtggaggttgcagtgagccangatcgcgccactgcgctccagcctgggtgacagagccagactccgtctcaaaaaaaaaaaaaaaacccacttagagaaattgttgttttcttcttcaggcttttcgcattttccaagtttgctgcaatgacgttgtattaattttgcaattggaatgaaattaagaaaggaaaaaacccactccacacccctgggcaaagtcacccaggagggagaaggttcacagccaggcagtgggaatgtggaggctgtgggctggtgagaggttttccctgccatttccccccctttctgtcctgtcgctattatgttgctcttataattaaacccgctgtgcagggagccgctgatcttggtcgcctggggtgt

SEQ ID NO: 500221 - DNA, 492 bp, Homo sapiens
aggggacggatctttaagagtacgggtcaataggtgcagcaaaccaccatgacatacatacacctatgtaacaaacytgcacgttctgcacatgtatactggaacttaatgtaaaattgaaaaaaaaaaaaaagaaattacctccaaggtgtgctatgtacctttcttgttagattttctccgatacaaggaaggagagacagaaaaattttccaattcttaatggtttttcacttaagtgacttgtgtcatttacttgtgagagatagtcgtttgatttataatgttcttttttgacaattctcatagaactttatgtaagagataatcaatatttgatctattattagttttatgtccttgaaataatgtttaggacagtttggattactgcagtgttatatattgtaagagactgggaagtagtcgttaaaaatatcatcaagggagctcaaactctgagggaagttatctgaaattgcttcattttat

SEQ ID NO: 500222 - DNA, 498 bp, Homo sapiens
tgtctagggcctggggcctctccccaccacctgaaaggctgggcctgkgctctggtgtcagatgcacctcgatttgaactccctgctgccattttctagttgtggtcctctgggcaagtcacatcacctctctgacctcagtttccccttctgtaaaatgggagtaaaacgatgcacactccactgaatcactgtgaggatgaaatgggagaaaggatacttagcactgcacaggtggtcatttgggaaatgctatttattaaggtgagttttcccacgaaggccaatgccaggaacagagctgaagagaatctgatcgctcacatctacaggaaatgataaaaaatggagcaggacctaaaaccatgcccagggggtaacagtgaatagctggcaaggcttggcctggcagtgggggggatgctggcaggtgggaggggctcagcacatacctgttgactaaaggaatgagaagtcactcaggaggacttgatctct

SEQ ID NO: 500223 - DNA, 498 bp, Homo sapiens
tgtctagggcctggggcctctccccaccacctgaaaggctgggcctgggctctggtgtcagatgcacctcgatttraactccctgctgccattttctagttgtggtcctctgggcaagtcacatcacctctctgacctcagtttccccttctgtaaaatgggagtaaaacgatgcacactccactgaatcactgtgaggatgaaatgggagaaaggatacttagcactgcacaggtggtcatttgggaaatgctatttattaaggtgagttttcccacgaaggccaatgccaggaacagagctgaagagaatctgatcgctcacatctacaggaaatgataaaaaatggagcaggacctaaaaccatgcccagggggtaacagtgaatagctggcaaggcttggcctggcagtgggggggatgctggcaggtgggaggggctcagcacatacctgttgactaaaggaatgagaagtcactcaggaggacttgatctct

SEQ ID NO: 500224 - DNA, 255 bp, Homo sapiens
tctctcattccacagtattcctatgaaatcaggatgcctttgatggacatgccttaaattctctcattccacagtattcctatgaaatcaggatgcctttgatggacatgccttaaattctctcattccacagtattcctatgaaatcaggatgyctttgatggacatgccttaaattctctcattccacagtattcctatgaaatcaggatgtctttgatggacttgccttaaattctctcattccacagtatt

SEQ ID NO: 500225 - DNA, 618 bp, Homo sapiens
cgggtgacagtccaatggtgacaaaatacaattggcaacaggagacgggcaagatcaaaggctggctattgtaatagttttgttccatgaagaattgctcattgtcaggagtttttaagccttttttttctctctccctctttctctctctttttttttttttttttttttggccccagagccatcccgggattctctggttcagaatcagtgtacataaatacttgtaattacatccttctgacaatacatttcagttcgcagaggttgcggctgccttcccgtctctctcaaggttcatggagctgatggttggttggattgtaaaaatcatttctgtgtttttgttaraaaagatctttcgaggcacttggagggcgaattagagctgggatgtgctcatcttcttgaggactattttaggatttgcttcagattaaactgctgcctgcagaggcccttgaggggtgatggggtggagggagcatcagatgactggtcgtggggttctggctcttctttatgactttacctggtttctcctggcctcaatttccccagttataacctggggctcatttactcacaccacaagtatttattgagctctgacctggg

SEQ ID NO: 500226 - DNA, 674 bp, Homo sapiens
gagtgtttcttttttttttttttttttaagttggccatatctgttgtgcttgggaaaagaagcccaraaaggctgtgatgatagagcttggtgaatgtccattgatctaggtttatggtacatatgtgactttcataacccaaaaagtgtagggccagaaaggtatctttaattgcagcaattacagggaaatatctacttgaaggtattaaccattagtggcacaaggtcagttatctcattacttatgaatctatttgtgttcctttttagcaactgaatagatatgtagatcaacgtattcttagcctgtagtttccaattccttataaaaattattgaactaacattggagtggtgacttattttaaaatggaaaatggtatctcattgatgtggtcactaaataatgatattcctgatttacatctattttagaaaattaaaagaagagatgagaattcaaactgccacagaacacaaaagtgttttgcaagattaagtttggtaatgactccagggtttctcactaaggttggagttattactgctatgccttccttgacttgtattcagctatgggtttgtggaagacacattcattgtatatatatatatatatatctgtttctcatgctttcctgtgaactccttaggggcagaaacagaatttt

SEQ ID NO: 500227 - DNA, 674 bp, Homo sapiens
gagtgtttcttttttttttttttttttaagttggccatatctgttgtgcttgggaaaagaagcccaaaaaggctgtgatgatagagcttggtgaatgtccattgatctaggtttatggtacatatgtgactttcataacccaraaagtgtagggccagaaaggtatctttaattgcagcaattacagggaaatatctacttgaaggtattaaccattagtggcacaaggtcagttatctcattacttatgaatctatttgtgttcctttttagcaactgaatagatatgtagatcaacgtattcttagcctgtagtttccaattccttataaaaattattgaactaacattggagtggtgacttattttaaaatggaaaatggtatctcattgatgtggtcactaaataatgatattcctgatttacatctattttagaaaattaaaagaagagatgagaattcaaactgccacagaacacaaaagtgttttgcaagattaagtttggtaatgactccagggtttctcactaaggttggagttattactgctatgccttccttgacttgtattcagctatgggtttgtggaagacacattcattgtatatatatatatatatatctgtttctcatgctttcctgtgaactccttaggggcagaaacagaatttt

SEQ ID NO: 500228 - DNA, 431 bp, Homo sapiens
aaaaaaatgataaaagggatggtctgtatggagcagggaggggaagggatggttctgaggctaaaaaacaaaaaaacaaaaaaccctttacttctgtccttgtgcatttttttaaatagaaaaaagccactctgcattccctggcctcaagccactaggtcactatgtaaaacataaacagggtctgtgttttgctgcatttgagaaagatgtaaaggtgtaaatatgatggaaggggttttatttcctttcccctctcaggaatgrtctgacagccccaggctcgagaatgtgtctctcccaagtactctgtcaccctggtaaccatggagaccatgacgatcgattagatgccatctgatctcaaccttataaaaaaaaaggcagcagatggcaaccaggccactagacctgtctcaagagagacgaag

SEQ ID NO: 500229 - DNA, 593 bp, Homo sapiens
tcctttaatcttaaattgtttgatttgacttaagcccaacttatctgtgacaaagattttcacaaatatttcatatgagttcttgaactttaatgttttccttttcattaacatttctcctttaattttaaggataccttaaaaggtgcccttaaagctcccaaggaagggtttaaaagaggaaaaaaagagttatgagaacctgcttcagtgagactcaggattattacacctcagggtcagatgcgccaatcagacagatgracctgaaacaccaaggtgtatcctttgagccctagccagctgctctgtgggagaccaggaagtctcaaacttcctacaaacaatggctgtttagggcagaggggtatctagagttctatcacaatcatacccacctccctacttctctggcacctttcaagagaatatatattctttctttaggaatatgtatgatatgttccccaagaaaattttaaaatacatgcatacagagaaccaaaagtacaaagttacatgaaacaaaatactttacagataagaagctatggggctggttattgcattggttggaggggagtcttatgaaa

SEQ ID NO: 500230 - DNA, 497 bp, Homo sapiens
ctgaaaaaaaaaaaaaaaaacaaacaaccctgtgtattctcaatcccagacctctcatctaagcttcagatccctgccytcaatcccaactgcttcctcagtctctctttttggatatctcacacatactatgttcaaaagtgacctcatgattccagcccatgcactacatctgctcctcttccaaggttcctgtctcattaaaaggcatcatcctgttccccataaaaaaaaaaggtggggtggggggggactcattcctgaaacttcatctctgatatatatgaatcatcaaagataatcatttttccttctaaatatctcttgaatctgttcccgagatccagtaagaaactattggtcctgcacaccagctgggttctagagaagaagaggtatacttggcatgttgatgtagcagggctgagacagcctcagatgttatccacagccagattgttttagaagaagtaggacattttctaagcagttagaga

SEQ ID NO: 500231 - DNA, 528 bp, Homo sapiens
ctgcttgttgatccataaaacttacatagtccaccatcatctctcacttggagtattgcaacacccattatctgacctctttacctccacttscctttttccaatctgttccctgcatagcagttgaaatgatcttgtaaacaaaaccaaatcatgtcactttcaagctcacataccttcagtgacttccaactaaactcagaattaaatccaaactctgaatagtacctgccatggtgtccaccacccagcatcacctggcctgtcctcttgtcactcatttacagtatctcttttcttctcacacaccatgttctagccaggctgatttcctttcagtccctcataagcactaaggtccttccttcctccgggccatgcatttacagtcttctctccggggtcactcttgctccaactctgcctggcagactcccttcatccttcagggcttatcctaaatacaacttctgaaagaggccttctatggccactcaatctaaattaacccctccttccatcacacac

SEQ ID NO: 500232 - DNA, 643 bp, Homo sapiens
ttcagagaaggctgtgttgggactagtgaactatgtgggtccctgaaaaagtctgccttttagaagggatacagcagccagctgaggggctaggtactactgtctaaactgccacagcccctgcctggcttgcaggttccttgatatactgtgaatcatccatggcacatttcttatccctgcatgattgtatatccttctctcagtggggatatttgtggaccagctaaagtgctttcaggggctaaagataaaatcaagtattctagctgtcagattggctataggaagaaggaaaccccctcaaattctaaatctgtctacactccttttcaagagaatggcattcggtggctccaaggaaatggtgaccaattaggtagttccctgtatgcccrtaaacccacaacctgatgcttgaagtcatgacctggagatattgtgtgtgaagatgcctataagacgatggcacttgctcttcttacataaataattcagcaaataattaattagtgctgacagacactgtaagtttagcatgggggatacaaatatgcccttaagaatctcacagcatcataggggagagacaaatggacacacttcaccatgcatcattgtaaagcaaaaatagggtgatgtg

SEQ ID NO: 500233 - DNA, 521 bp, Homo sapiens
caagacctttatcaatccagtcttacaagactaggagggaaggagagaagttagatgtactttgagccatgatgactggttgtggaagcatcagaagggagtgatctgaaaagtggagagagcaactgaagattctttattgcaagttctcgaggaggaggagcccttcacacacctgtcagcactgattctagcgaaggggaccaggaagaggaaggatgagtggtctcttggttctctgaggttattctgtgacatgggttcacttttattcttataaccaaatatcatctttaacacatcactagacaagacttgagatagtggtgttttaaccagagaatggttgctttctctttaagttcctaagtttccctaaagtagaagatactaaaggagtttcttttgtcataaatatacgtgatataaaatttaccaktttattcacatttaagtgtgtagtttcagatgcattgcatacattcaaattgctgtgtaaccattgccactattcatctcca

SEQ ID NO: 500234 - DNA, 521 bp, Homo sapiens
caagacctttatcaatccagtcttacaagactaggagggaaggagagaagttagatgtactttgagccatgatgactggttgtggaagcatcagaagggagtgatctgaaaagtggagagagcaactgaagattctttattgcaagttctcgaggaggaggagcccttcacacacctgtcagcactgattctagcgaaggggaccaggaagaggaaggatgagtggtctcttggttctctgaggttattctgtgacatgggttcacttttattcttataaccaaatatcatctttaacacatcactagacaagacttgagatagtggtgttttaaccagagaatggttgctttctctttaagttcctaagtttccctaaagtagaagatactaaaggagtttcttttgtcataaatatacgtgatataaaatttaccagtttattcacatttaagtgtgtagtttcagatgcattgcatacattcaaattgctgtgtwaccattgccactattcatctcca

SEQ ID NO: 500235 - DNA, 555 bp, Homo sapiens
tttccaggcaacccacagaatcatgagaaatagtaaattattgttattagtctctaagttttggagctttttgtcatacagtcataaataattaaaacgcatgccttatttattttttatccatgtattaatatatttgtttattcatttatttatttggcaattatttaaatatcacaggcactgggatatataatgcctgtaataatgctaagcactgggagatataatgatagacaagacagagactgtgctgtgaagaagcatccaataaggagtatgaacaaaaaaagatatgactatataccatgaagtacaggctatgagaagagtaaacacagggagctatgaaagaatctaatagtgacatcttactcaatttggggagagggtgtcataagaaaatgcctgatgtggayattctgtgcatacttattttctgttgtaatagaggaaagagaaattcagcaatttgttcaatgtcactcggttattggaccgatataatttctcctgaatctcatttgatggctctgtacttaaaggttgtttctt

SEQ ID NO: 500236 - DNA, 555 bp, Homo sapiens
tttccaggcaacccacagaatcatgagaaatagtaaattattgttattagtctctaagttttggagctttttgtcatacagtcataaataattaaaacgcatgccttatttattttttatccatgtattaatatatttgtttattcatttatttatttggcaattatttaaatatcacaggcactgggatatataatgcctgtaataatgctaagcactgggagatataatgatagacaagacagagactgtgctgtgaagaagcatccaataaggagtatgaacaaaaaaagatatgactatataccatgaagtacaggctatgagaagagtaaacacagggagctatgaaagaatctaatagtgacatcttactcaatttggggagagggtgtcataagaaaatgcctgatgtggatattctgtgcatacttattttctgttgtaatagaggaaagagaaattcagcaatttgttcaatgtcactcggttattggaccgatataatttctcctgaatctcatttgatgrctctgtacttaaaggttgtttctt

SEQ ID NO: 500237 - DNA, 596 bp, Homo sapiens
tgctcccagcatacagagctgggactttccactcttatacaaatcagcccatccttctcatctgcttttcaaaattgtacctcctgggctctcccaggaataagaaaccagctttttatggagtcatgcaattcttcaagactttttcctcagcaatacaaagaccaggcagccaaagcttggaaatgaccaagtcactgtttgtatgaactcagttacatttttaaatactttaattgatgcatagcgattgtatatattcatggagtacatagtgaggtttccatacctataatgtatagtgatcagatcagggtaattagcatatccataatctcaaacatttacttctttgttttggaaacattcaatatcctagctattygagactatagaatatattactgttaactacagtcactctacattggcatagaactctagaacttattcctctcatctagttgtaattttgtatcttttaacaaatctctccctatctctctcagttacatttttaaggcaaacccttcattctgagtatgtgtctgagaatggcagtagagtagttctcttttcctctgttatgtttagat

SEQ ID NO: 500238 - DNA, 634 bp, Homo sapiens
gcagctcctttagggttggcctcagttgcagagagctgacctggttgaggtcacatcctttctgtggcatcttgcatcttatggctgagcaagacagtggtgtacaggcccacacattctggcccaagacagagaaatgctgagccagagtaccctgccaggttggccaaggatctgtcaggtctgcttcccagtttgacatctccctctgcttaagcttgctttctccctgctatagcttgaatgacaccaaaactcacattgaaatttaattgccrttgtaagagtatttagaggtaggacttttaagaggtgattacttcctgggggtgaagccctaaggaattgattaatgccgttattatgggagtagcttagttattatgggagtgggctcctgataaaaggataagtttggccccatttcactttctgtcttgagtgctcacttacttgcttttctgccatgttttgacacagcaagaagtccctcaccagtgctgaccagatgctatgctcttgagcttcccagcccccagactgtgcctcaaataaactttttttctttataaattacataacttgtggtattctgttacagcagcaaaaaatagaccaagacactcccctttcc

SEQ ID NO: 500239 - DNA, 634 bp, Homo sapiens
gcagctcctttagggttggcctcagttgcagagagctgacctggttgaggtcacatcctttctgtggcatcttgcatcttatggctgagcaagacagtggtgtacaggcccacacattctggcccaagacagagaaatgctgagccagagtaccctgccaggttggccaaggatctgtcaggtctgcttcccagtttgacatctccctctgcttaagcttgctttctccctgctatagcttgaatgacaccaaaactcacattgaaatttaattgccgttgtragagtatttagaggtaggacttttaagaggtgattacttcctgggggtgaagccctaaggaattgattaatgccgttattatgggagtagcttagttattatgggagtgggctcctgataaaaggataagtttggccccatttcactttctgtcttgagtgctcacttacttgcttttctgccatgttttgacacagcaagaagtccctcaccagtgctgaccagatgctatgctcttgagcttcccagcccccagactgtgcctcaaataaactttttttctttataaattacataacttgtggtattctgttacagcagcaaaaaatagaccaagacactcccctttcc

SEQ ID NO: 500240 - DNA, 634 bp, Homo sapiens
gcagctcctttagggttggcctcagttgcagagagctgacctggttgaggtcacatcctttctgtggcatcttgcatcttatggctgagcaagacagtggtgtacaggcccacacattctggcccaagacagagaaatgctgagccagagtaccctgccaggttggccaaggatctgtcaggtctgcttcccagtttgacatctccctctgcttaagcttgctttctccctgctatagcttgaatgacaccaaaactcacattgaaatttaattgccgttgtaagagtatttagaggtaggacttttaagaggtgattacttcctgggggtgaagccctaaggaattgattaatgccgttattatgggagtagcttagttattatgggagtgggctcctgataaaaggataagtttggccccatttcactttctgtcttgagtgctcacttacttgcttttctgccatgttttgacacagcaagaagtccctcaccagtgctgaccagatgctatgctcttgarcttcccagcccccagactgtgcctcaaataaactttttttctttataaattacataacttgtggtattctgttacagcagcaaaaaatagaccaagacactcccctttcc

SEQ ID NO: 500241 - DNA, 631 bp, Homo sapiens
tggttgtccttgggcaaatgagttcaccaacaactctgagccttcattactgcacatgtgagatgggagataacattacataaaagcttaaagaagaaaatgtatgggaaagtgtctggcataattaaataaatatatctggctagactaagtggaacactacaattgataacgaatggttttgtaataatcatggatagtgacagagtaaactctccataaataatagtgtttatttttacagtaagaatatgtataaatgtccatacagggttgcttttcctcaaccagccatagaagcaaaagtattgtactgtttcttatatgatgtgggtagtaaccgagcattgtctcacagacatgacaacttgccattttttagtactaattaccatgatatcctctctgtgaaactgtactatcgcttctgtctaaatgattaattttatgaatcctcctactccccaataacctggaattagtgttacattgtcccccgatctccaaagtcacgtaagaaaatactgaccatgtgaaattaaataaacaagtrgtattacctacttcacagtctttcctgctcttcctttaagaaaatctctgttctgtttgacaatgactcctctagaag

SEQ ID NO: 500242 - DNA, 485 bp, Homo sapiens
ccacctaccaatcctatttgatgcctgaatccctgacccagaaaattgtgaattgtagtaaacgagtttatgttttaagtaattaagtctggggatgatattatgcagcaatgtatagttaaaacaaaagccaataaaggaacatgatcgaaaagaaaaaagaaatgctgctgatgtggtagattaattctcaagacgacagagcttamattgtgaattccttgcaatgttaatgttttattcaatttgcaataacacagcaccattatttcatatatatatatatatttgtgctattcccacacactacttctagagtaaaaaacaaattctaacagaaacatccagaaataaactgcaatattctgcccttgaaataattaggtgtttctaggtagcttcaatcttaacacagagtaagaggtcatgttttgactcagcctggaactgggcttgggagattagctgtcacaatctccttcttt

SEQ ID NO: 500243 - DNA, 485 bp, Homo sapiens
ccacctaccaatcctatttgatgcctgaatccctgacccagaaaattgtgaattgtagtaaacgagtttatgttttaagtaattaagtctggggatgatattatgcagcaatgtatagttaaaacaaaagccaataaaggaacatgatcgaaaagaaaaaagaaatgctgctgatgtggtagattaattctcaagacgacagagcttaaawtgtgaattccttgcaatgttaatgttttattcaatttgcaataacacagcaccattatttcatatatatatatatatttgtgctattcccacacactacttctagagtaaaaaacaaattctaacagaaacatccagaaataaactgcaatattctgcccttgaaataattaggtgtttctaggtagcttcaatcttaacacagagtaagaggtcatgttttgactcagcctggaactgggcttgggagattagctgtcacaatctccttcttt

SEQ ID NO: 500244 - DNA, 485 bp, Homo sapiens
ccacctaccaatcctatttgatgcctgaatccctgacccagaaaattgtgaattgtagtaaacgagtttatgttttaagtaattaagtctggggatgatattatgcagcaatgtatagttaaaacaaaagccaataaaggaacatgatcgaaaagaaaaaagaaatgctgctgatgtggtagattaattctcaagacgacagagcttaaattgtgaattccttgcaatgttaatgttttattcaatttgcaataacrcagcaccattatttcatatatatatatatatttgtgctattcccacacactacttctagagtaaaaaacaaattctaacagaaacatccagaaataaactgcaatattctgcccttgaaataattaggtgtttctaggtagcttcaatcttaacacagagtaagaggtcatgttttgactcagcctggaactgggcttgggagattagctgtcacaatctccttcttt

SEQ ID NO: 500245 - DNA, 614 bp, Homo sapiens
ttctctgaaattggagaaacagagagagaagttccttgcagttaagaaatagaaatcaaaagaacatacttctatataaaattcttaaatatttttcacaaccaaaatagtattgtgtccaagattataaaatcatacatttgttttcacacaaagcaactgttttaactttttttgaaactatttcaaacataaattataagaatagtacaaagagattttacctagayttacccattgttaacattttgccacacttgcctgatcattcttgctttaactgtatatatgcatactgatttttctgaaccatttgagaataaattgccaatatcattccctattaccccttaatcatcattatttatttcttaacagtattattttcacttaagcacgatgtagttattgtatttaaaaaatttaacattgatacaatatagatattagataatatagatattagctattagataatatctaatctatagtaaatatctcagtttcactaactgtcccaatatgtctttataggaaacttttctggttcaatatccagtctaaaaccacacactgcgtttagttgtcctattttttagggcgcctgtaatctg

SEQ ID NO: 500246 - DNA, 634 bp, Homo sapiens
gcagctcctttagggttggcctcagttgcagagagctgacctggttgaggtcacatcctttctgtggcatcttgcatcttatggctgagcaagacagtggtgtacaggcccacacattctggcccaagacagagaaatgctgagccagagtaccctgccaggttggccaaggatctgtcaggtctgcttcccagtttgacatytccctctgcttaagcttgctttctccctgctatagcttgaatgacaccaaaactcacattgaaatttaattgccgttgtaagagtatttagaggtaggacttttaagaggtgattacttcctgggggtgaagccctaaggaattgattaatgccgttattatgggagtagcttagttattatgggagtgggctcctgataaaaggataagtttggccccatttcactttctgtcttgagtgctcacttacttgcttttctgccatgttttgacacagcaagaagtccctcaccagtgctgaccagatgctatgctcttgagcttcccagcccccagactgtgcctcaaataaactttttttctttataaattacataacttgtggtattctgttacagcagcaaaaaatagaccaagacactcccctttcc

SEQ ID NO: 500247 - DNA, 478 bp, Homo sapiens
cagttagtcaaaagcctctggaagaaatttctcccagcacaatgtaattgctagaatatccccagataactggcaaaggctttgtgttaaatagcatgttttccaaactgggatgtactgacagcaagagaaagcattgctatttattacaccagacaaacaggcatagactgggatgaagggtcagagtggtatgaacaaaagaatcttcaagaaaggaaaatggtcatagtggcatgaacaaaaggaacattatgattacaaacctgtgaatatctctcataatatgtgaacactgatttttaatccaaacaaaattacagcataatcatagtgaaaaaataagtaaatatatggaaggagtggataggtgtggtgaagatgggrgaagaaagaaaacaaaatcctcatcttctacagtgagaaactgatagacaacgcataaaactgaaaaataaagtagtcctataagcatgtt

SEQ ID NO: 500248 - DNA, 670 bp, Homo sapiens
ctgttgccccagtcctgaactgccatctgccacttctcctcgtggaagaggagtccatctttatcgcttaagctactgttacgctttatagcttaagatactgttgaaagcattcctaattgatacaacttccaagaaacttctagatgcaatggaaaatataaggcatatgggaccaaacacaactgggttcaaaggtaagaggcagcccctaattaggtgcatggaccaggatgcattacttcacctctctgagtcgaaatgtctcagctaccaaaataaaaaacaaacaaaaacaaaaacccacaaacaaacaaaaatctccaggaaatgctgtgaggctagaaagacatacttatatgattatrtctattcaattattcattcaacaagtatttgctgagcactgttgtgtactgttcattcaatgaacattttaatgagcacctagtatgctctaagtactgttttaacattgcaggtatcacaacgaaatagaccaaatcttctctctcataagcttacattctgaagttccctttgagtttcaattacatgccagtagcattgctcatcagatatgattatttccattttcatagttgagaaaaccagggctcacagaagctgtgactcgcccacatggctgcccagcttccatgtggtggag

SEQ ID NO: 500249 - DNA, 508 bp, Homo sapiens
ctaagtgccaagcctcaggcaagggcttccacctctgctatctcgaagagtcttacagtccttgggtgaggtgggaaagcctctccccattctacagaggggcagatgaaggcctggagaaaggtaaggtgacttgttcaaagtcacaccactagttccttgcattcaattatttaccaattaattaattaattcaacaagtatttcatgagtgtctgctatacggcaagctccatgcgagttcctggggaagcatcatgaaaaaaagaaagggtagagttggtaacagggatwgggagtgcatttgggagagagggctgcagatgcaagtcaggtggtcagagtgggcttctccaggagggaacacttaagccagtatggaaggggagaagggtgggaacttgcggtctaggaaagcttcctccacagctctggggctcaggtctacagcctgcggggcatagatactcctgagttttccggtatagaaacctgcaccgccttcagc

SEQ ID NO: 500250 - DNA, 621 bp, Homo sapiens
gcattcacccaggtcagagctcaataaatacttgtggtgtgagtaaatgagccccaggttataactggggaaattgaggccaggagaaaccaggtaaagtcataaagaagagccagaaccccacgaccagtcatttgatgctccctccaccccatcacccctcaagggcctttgcaggcagcagtttaatytgaagcaaatcctaaaatagtcctcaagaagatgagcacatcccagctttaattcgccctccaagtgcctcgaaagatcttttttaacaaaaacacagaaatgatttttacaatccaaccaaccatcagctccatgaaccttgagagagacgggaaggcagccgcaacctctgcgaactgaaatgtattgtcagaaggatgtaattacaagtatttatgtacactgattctgaaccagagaatcccgggatggctctggggccaaaaaaaaaaaaaaaaaaaaagagagagaaagagggagagagaaaaaaaaggcttaaaaactcctgacaatgagcaattcttcatggaacaaaactattacaatagccagcctttgatcttgcccgtctcctgttgccaattgtattttgtcaccattggactgtca

SEQ ID NO: 500251 - DNA, 621 bp, Homo sapiens
gcattcacccaggtcagagctcaataaatacttgtggtgtgagtaaatgagccccaggttataactggggaaattgaggccaggagaaaccaggtaaagtcataaagaagagccagaaccccacgaccagtcatttgatgctccctccaccccatcacccctcaagggcctttgcaggcagcagtttaatttgaagcaaatcctaaaatagtcctcaagaagatgagcacatcccagctytaattcgccctccaagtgcctcgaaagatcttttttaacaaaaacacagaaatgatttttacaatccaaccaaccatcagctccatgaaccttgagagagacgggaaggcagccgcaacctctgcgaactgaaatgtattgtcagaaggatgtaattacaagtatttatgtacactgattctgaaccagagaatcccgggatggctctggggccaaaaaaaaaaaaaaaaaaaaagagagagaaagagggagagagaaaaaaaaggcttaaaaactcctgacaatgagcaattcttcatggaacaaaactattacaatagccagcctttgatcttgcccgtctcctgttgccaattgtattttgtcaccattggactgtca

SEQ ID NO: 500252 - DNA, 510 bp, Homo sapiens
gtcaggatttgaatccaacgaaggctttctgtgaaaactccagagttctttccactaccttgtgctggggttacttgctccaaggtatctaagcaaccccatgtattaatccccaaattcacaggaatggcaggaggggacgggtgtgtcctagatctttccatgtgttttaaaaaaattaacctgatgattttttggcagcgagaaaaaagaatgacaggaacaaccacaaaaacaaaacttcaagagctgctaatgggtttgtactttgtcttcttagcaaatagacctttttaaaaaatcaggcttctkggggagagattaggtcccagattctagcagctctatagtgccaagttgttccctgggcctcccagccaagggtctgggtccctctgtcagtccttggcttcagttttgggcgtcattctaacgggttgctgggttgtagccctggctctggcactcaccaagagagtgaccttggtcaagttgcctagctgcttagtt

SEQ ID NO: 500253 - DNA, 526 bp, Homo sapiens
ctttgtcttcttagcaaatagacctttttaaaaaatcaggcttctgggggagagattaggtcccagattctagcagctctatagtgccaagttgttccctgggcctcccagccaagggtctgggtccctctgtcagtccttggcttcagttttgggcgtcattctaaygggttgctgggttgtagccctggctctggcactcaccaagagagtgaccttggtcaagttgcctagctgcttagtttgctcatctgttaaatggagttgaaaatccccataccttttctcgcagggcaggatctgtatggggaaaaagtatctgccaaaactaaacatgcttcgtgcttgggcggcaccatgttgatgaggaaaggacccagggtctgggtcagaggtcctgagtgtgtagtctgaaggactcacattccctctctgggcccctgcttgtttgttgcaaaatgggatgacagtctatggcagtggcaatggcagcgacatgttcattcgctcctttatccattcatca

SEQ ID NO: 500254 - DNA, 198 bp, Homo sapiens
cttcattgctgatggggtgggggcttctgttgggtttgcggaggaaaaagactccagcagggagctaagttggcaaacttcggagtcrgtgaggtgtcactactttttaatgaaactgtttgacctaggggtgtatcgaatggaacaccaactcctgggcttttctctctgtcctttagatcttcgaaagactaccca

SEQ ID NO: 500255 - DNA, 568 bp, Homo sapiens
tattaagatcaggatggagggcccaggcaggagggaggaacaagtttggggaggagctgtttggttttggatgtgttggagaggtgatgtccgtgatttccagaggaaatgtcaaggaagtggttgaggatatgaatctgcagctcaagagagggggatgaactggagatatagatgggcaggagaatgtagagagaagagagatgaaaagakggtcacctgggtgggcccctagggcaccttaacatgtgcagacctggctaacaggacagccaagttcaggccctgagcactgaccaagaagactgaaggatcaggaagccccttgctgggccaggcatctacccttttgttttgggattatgaggaagcccagggattcctgtgcaagggtgcctagaaagtgggaggcccatagggggctgaggaaacaatttaccaactagtatgtaagtattctaacagttaagcaggataattgtactagtgtccactgaataacaccccatgtcaagacctcttggcaggggtggccccagctcccccaggttccttgcatccccaatcc

SEQ ID NO: 500256 - DNA, 551 bp, Homo sapiens
accaagcatgttgcctgacctttctgggcctcagcttccttttcagtggaggaaggggtagctagacccatcttcaagtgcaaaggagatttaggccaggctcaggggctcccacctgtaatcccagcacttagggaggccaaggtgggagaatcgcttragcccaggagtctgcgaccagcctgggcaacatagtgagacccaggctctaccgaatacttttaaaaattagccaggtatggtggttcgagcctgtggttccagctactcaggaggctgaggtgtgagggtcgcttgagtccaagaggttgaggatgcagtgagctgagattgtgccactgcactccagcctggccaacagagtgagaccctgtctggaaaaaaaaaaaaaaaaaggaaatttaaacacaggagaataagctaccgaagaggggtgacttcagctttctttttaaaatgtcattcaagaaacctgggaccaacactccaatggattgtccccaaccctaacccccaggctctgccctcaggccttacccaccacccgggtg

SEQ ID NO: 500257 - DNA, 618 bp, Homo sapiens
tgggcaggggcaggctgccttgtggggacagccactgggcttggaggtcacacagatcattctgtgtgacaccaagcatgttgcctgacctttctgggcctcagcttccttttcagtggaggaaggggtagctagacccatcttcaagtgcaaaggagatttaggccaggctcaggggctcccacctgtaatcccagcacttagggaggccaaggtgggagaatcgcttaagcccaggagtctgcgaccagcctggrcaacatagtgagacccaggctctaccgaatacttttaaaaattagccaggtatggtggttcgagcctgtggttccagctactcaggaggctgaggtgtgagggtcgcttgagtccaagaggttgaggatgcagtgagctgagattgtgccactgcactccagcctggccaacagagtgagaccctgtctggaaaaaaaaaaaaaaaaaggaaatttaaacacaggagaataagctaccgaagaggggtgacttcagctttctttttaaaatgtcattcaagaaacctgggaccaacactccaatggattgtccccaaccctaacccccaggctctgccctcaggccttacccaccacccgg

SEQ ID NO: 500258 - DNA, 501 bp, Homo sapiens
tattaacaagtaatagtctttcccatcctggtattcrgctccttgattttccagactcctcggactcagatcctcctcacccaacttcaaggaggaagacagaatggggcttagcaggtccattacacggatgcagcaactgggatctggggatggtcactagctgaggtcagaggtggaggctggcacccccaccccctcccgcagagcccagtggggtgaggtggagggtagggcttctcagggaatcactgtcctgccccttctgcgtgcccaggggacctgcgaacactctagacctggggggcccaagaagttcaaacctccctgaccttcgcggtacagggaaaaccaaagtctgagacgtttgcaggccccagggccaacccacctcatgcagaggctagaaggcctacaaccagagcccccctccagcccgtggtatacgggaaaccacgcaatggcacctatgggttccagtcctggtggtccctatgcaca

SEQ ID NO: 500259 - DNA, 611 bp, Homo sapiens
atcttcctgttggcctatgaggtccaatacatcatctaaccactccccaccccacaccctccctagtaccgggtatcatcccccacttcctggcctctgtgctcagagaccacggagcctctgccctgaaggagaaggaacagactgacagtgaacacagccactccagtgccaggcgagcagggcgggtgctgcagacataggcaccagccaagagctctggacacacctgggaaagggactacttccagataggaaagagcagaattaaggagggcttcccagagcagagtggattccacataatatttgcctccactgcagcacactgcrttctaggtccagcctcctccccgtcccactaacctggatagtctagcttgagtgcccagtcttaaccagttctctcaaggcccccaggcacagaaaggagggagggagaaatgaaaggagggtaggctgaggtgggtggagcatctgagttcagaagttcaagaccagcctggccaatatggtgaaaccctgtctctactgaaaatacaaaaattagccaggcgtagtggtgggcgcctgtcctgtaatcccacctactcaggaggctgaggcatgag

SEQ ID NO: 500260 - DNA, 605 bp, Homo sapiens
agccttgctccaacttccacatcaactattttccttgggcgaaacagagtattgcattgcattaagtgtatttacaaccaactgtctgtgtaaatataagagatgctaacatactagtaacagaacgaaattagccttgctgattttgccctgccttcccagttgcttagcaactgattcaaagtgaaaattaaattaagcaattcaaatgtaatgttagaataaccttccaaaattttgcaatttgcaggttccatattgccctttgctatttggatggcacagcagagcaaaattaaacttgcactgggccctaacactctgctaagtatagaaatgtacaaatacaggaaaaccagaagaatatatttaatatttatttgggggaaggagaacacatgtgtgtacatatgtgtgcgtatgcatgcatgcacacacacatacactgttgtttgaactcaccccaaagaaatgccacaaagaatgtcttaygtgacaagtattattttaggcctttgaggaataaactaagctagctttcaaaaaattatggtggaatattccaaagttagagcatatgccacattgagttagcaaaggagaat

SEQ ID NO: 500261 - DNA, 148 bp, Homo sapiens
gcagcaacagtttccaacttgggggaatgccacatcagaccagaatggggagcccccaaagccacgcactagagtagaggatatttgttttttaagcttcaaatgagctccccccaaaacaaytgcccgcagtaaaggaacccccaaa

SEQ ID NO: 500262 - DNA, 612 bp, Homo sapiens
aagaataagtttccctataaacaacatcagaggaggtactgaagataataataaactgtgagcttcattaaaacttaggatgtgcaaatttaacgtgagcaaaattatgtgtttcttataagggataggaaaaagcccccaaagagatagaaagaatgcagaaatgaaaaggataattggggaaaaggcaatctaaataccaagaccctgggaaaagcgagaaagccatgcccattccaggcccttggacraagcaaaaaagccagcatcttttgtgagtacctagtttcaaagggaagtttacattgaactatgtatctgatgtgtaaacatctcattagtgaggggtacatcaccaccagccatgggtggtgagaattcttcagggtacccccatcctgcaactgccccagttcaaatcagataccccagagctgcaaccaagctcaagttcccagcgcagaactagatggaagtgggaaatagtccttgaaactggtgaaacagccctttccaggaataacgaaccccgcagctttaccaaataaggcaagtgaaagctaaaagccaaggaggaacaggctcaagctgtatctttcctaaaactagcca

SEQ ID NO: 500263 - DNA, 612 bp, Homo sapiens
aagaataagtttccctataaacaacatcagaggaggtactgaagataataataaactgtgagcttcattaaaacttaggatgtgcaaatttaacgtgagcaaaattatgtgtttcttataagggataggaaaaagcccccaaagagatagaaagaatgcagaaatgaaaaggataattggggaaaaggcaatctaaataccaagaccctgggaaaagcgagaaagccatgcccattccaggcccttggacgaagcaaaaaagccagcatcttttgtgagtacctagtttcaaagggaagtttacattgaactatgtatctgatgtgtaaacatctcattagtgaggggtacatcaccaccagccatgggtggtgagaattcttcagggtacccccatcctgcaactgccccagttcaaatcagataccccagagctgcaaccaagytcaagttcccagcgcagaactagatggaagtgggaaatagtccttgaaactggtgaaacagccctttccaggaataacgaaccccgcagctttaccaaataaggcaagtgaaagctaaaagccaaggaggaacaggctcaagctgtatctttcctaaaactagcca

SEQ ID NO: 500264 - DNA, 394 bp, Homo sapiens
atttttttttttttttaaagaagacatcaactttttttagccattactttctcactgctcttacacaaacacaccctaccctcctccaacacagggtcactgccagctyttaataatattaaatatttcacaataacaaaacacattgatgagaaatacacagtcttgtgtttcagctcttagtcattcatcaatctagttatccatgccaacagtgagacaggtctggagagacaatcatcaacaaactccctgagggtgatgatatttaataaattttctgctttttaaggcaatattttatcttccaagcatattttaacttccaagcatgctaccacagaatcaggattgaacccatttactctggtttcctcatataaatccttattct

SEQ ID NO: 500265 - DNA, 640 bp, Homo sapiens
tgtcttctgtaaaaggcacggttctgctcacagaaatctagagagattaataatcaggagtggaagggccaatggtgtctcctgaccctggaaccacagtgccctttcttgcttgacatccccttatctacataccactgactaaatgtgtgtttactggggatgagacccctggggacacaacacagacagcaccaggggctaaatgattctttattgatcctgattagattaaagacggccataactcaaaygacactgttgcttctgaatttccttatggttcctgcagggagtgataactaggtaatataagggaacctctttcttgacagctatttctcataaaactactcaccaaaggatagaattcataagggaagagggaagacacttcatgaggcttcatttatctcatttaatttatcacaacacgcctgagaggaaggtatcactatctccattctatagatgaagaagctgaggttcagagaaaatttggtaacttgctcaaagtctctctgcaagtaaataatggagctaggaattcaaatcctgggatgctaaaataaaactcagtgtctaaagtatgagatatacaacctcttcaaatgctatgttgtgaagcccagcaccagcc

SEQ ID NO: 500266 - DNA, 543 bp, Homo sapiens
ccctgcccaaattctgaaccagtgagttatggaatactacctctggtggagcagaagagaccagcataggtgacaaaccccaagaggaaggagaaattcaccaaatagctaatttcataccctcccgtgagcggcaagatgtcaaacctagtggaattcaatcgtcattgcagaaaatattaaagagtggcatctaagcttctttatccccacttacagataccaagatttaatcaataaattcacaggtgcctttaaggagatggttttgctaaataaaaggacattttgtaagccagggaaatctgtttgttagtccacatggcaggcccagcctcacacaaagacaccagactcatggggctttctcatgtctttgaccacatgtcccaagttaatgctgggctctgaacacaagagctagtggaatcacaccaccatttcataatattagtattattatttkcattctacaagtgaaaaactgaattgcagaaaaatgaattaacattcagtttctgagtggtggatcctctcctatct

SEQ ID NO: 500267 - DNA, 667 bp, Homo sapiens
ctgccagccactttgccttgctgctgcctcagcactacctactgttttaggaaagaggaaataaacagaggcacaaagggagttcattgttgggcaggggtagagaacatgttcttggagatgtaaaatcaggatgtctccggagagactggggaaagttgaagtccatggcaatgagccctgaagaacaccagcaaccaagaaaacagatgattcttatcaggcacggtttccttgtcatgagattggcaaggaagccaatgaaaatcatgctgtctgcctgagggcctacatttcgaaaagttggatatggggccacactggcctgactgcagttggagaaacttctatactgcctcaggagaccattcttgagtacactagatatgcctcttggagtcagaaagaccaacttgtcttgtgggcagagttggcttgtcaggtgataaaaggggagtgagtggcagtgtaacgtagtggttaccagcagaaggttacctgagctcaaatcccagctccaaaatctactgctgcaccaaaccaggcaaagtgcttaaactctgcatgtcttagcctccttaatttgcaaaatgggataaaaataaccatcgtataaggttaccgtaaaatttaaatgagtacattsatttaaagaatttaaaacacc

SEQ ID NO: 500268 - DNA, 609 bp, Homo sapiens
ttcccaataattcttcccagattaatcaatcattaaatgacgtccacttcccaggaatagaatgagtaaaggggcagagagaggtcagaagtatgcttagggaaaattcctcttaatggaaacccagtaggaaagaagcattcctgctccagtaagcacaatggatccggttctccaggcccagaagaactaaatgcagcctcataggggaggtcccattaasagctagaatgttctagtgctgtccagctccagtgctgtccaacaaaactttctgtggagatgaaaatgatctaaaagtctgtgctgtccaggagagtcactggccacatgtggttactgagcactctatatgtggctactgcgacagaggaaattagttgttttagatttaattttgatttatttaaacttaaacagccatatgtggctaatagctactgtacgggacagcacagagactagggaatgtgtaggcactgactttacaggtaaacacccttagaccccaatcacaccttcccatggagctaatgagagcacaggcactttcacctaaatccactgaaacaggcttttgagtcattcaggccccacatcactgctcac

SEQ ID NO: 500269 - DNA, 609 bp, Homo sapiens
ttcccaataattcttcccagattaatcaatcattaaatgacgtccacttcccaggaatagaatgagtaaaggggcagagagaggtcagaagtatgcttagggaaaattcctcttaatggaaacccagtaggaaagaagcattcctgctccagtaagcacaatggatccggttctccaggcccagaagaactaaatgcagcctcataggggaggtcccattaacagctagaatgttctagtgctgtccagctccagtgctgtccaacaaaactttctgtggagatgaaaatgatctaaaagtctgtgctgtccaggagagtcactggccacatgtggttactgagcactctatatgtggctactgcgacagaggaaattagttgttttagatttaattttgatttatttaaacttaaacagccatatgtggctaatagctactgtacgggacagcacagagactagkgaatgtgtaggcactgactttacaggtaaacacccttagaccccaatcacaccttcccatggagctaatgagagcacaggcactttcacctaaatccactgaaacaggcttttgagtcattcaggccccacatcactgctcac

SEQ ID NO: 500270 - DNA, 609 bp, Homo sapiens
ttcccaataattcttcccagattaatcaatcattaaatgacgtccacttcccaggaatagaatgagtaaaggggcagagagaggtcagaagtatgcttagggaaaattcctcttaatggaaacccagtaggaaagaagcattcctgctccagtaagcacaatggatccggttctccaggcccagaagaactaaatgcagcctcataggggaggtcccattaacagctagaatgttctagtgctgtccagctccagtgctgtccaacaaaactttctgtggagatgaaaatgatctaaaagtctgtgctgtccaggagagtcactggccacatgtggttactgagcactctatatgtggctactgcgacagaggaaattagttgttttagatttaattttgatttatttaaacttaaacagccatatgtggctaatagctactgtacgggacagcacagagactagggaatgtgtaggcactgactttacaggtaaacacccttagaccccaatcacaccttcccatggagctaatgagagcacaggcactttcacstaaatccactgaaacaggcttttgagtcattcaggccccacatcactgctcac

SEQ ID NO: 500271 - DNA, 462 bp, Homo sapiens
aggataaattatgacttcaaagcagaaatgtctccattcacaaaatgggtcgctgacaagagctctagggtgcaaagaaactataacgagcaaggaaatatggcaacaagaaaaatgaatttgtaccctcggttctgcctcctcttacctgtttcacaatgtgttatagcgagcctcattctgcctctcatcacagtgggaggagtatgagaaggggagctactcagttaaactggatgggccygggcttcagagaattacactggaaatggcagaggaaccttcagcttcttctgaaggcctgccagcttttgcagtgagagctgccatgctgaggccctgtcatggcagttgaccaagacttgaagtccttgctcggggctggaagtctgggcccaggacgacatggaaatgccctaacatggcttcctgtgaactccccctgaaacaggagattccagg

SEQ ID NO: 500272 - DNA, 622 bp, Homo sapiens
gctggtgtgatgggaaaaccccctctcttataaaaggaagcaaagaatttctcacccgtagttaaaatttctcttcccaccaccccacctccctctacttttgtggtaaaatagagaacggaacaaagtcagcactccaactcttcctgctatcttgattcagccaggaaagcatagtaaacagacccagacctcccaggaacagagtattgacgagaagagtggacagagttagctgggaacccagtgrgaaaaagatttggatgcatcaagagaaattaaaaatcaaaacaaaagtgagttcttttgttgttgctaatagaaacagtatcaagatacagatggaagacaccatatgggaaaaaaataaataagaaaagcaaagaaagagggaaaattttagcaactacatctctttctctagtgaaatgacaacccactgggtatcaggagagctgaggggctggcctctgctgtgcttctaacaggctatgtgacactggccaagacactgcccatttctggccctcagttccaggttttgttctggccacaatcaaaagaaacccattcaaccaattaatcaacccagtggcactcgcctattgtaaattgttcctac

SEQ ID NO: 500273 - DNA, 608 bp, Homo sapiens
acaaggaaaatctatgactctaaactcaagacccttaacctttaacctgttcccaaatacagatatgatcagccagtgtcatgtttaatgcacaaagtcaataattgaactttgctaataaatcattagagaatcaaatagaataacactgctcacaagggtaaaatatgcaayggaaacagtattcctaaaaataaaagctttgttacagagagctgtaagaaatatttattcaaccctgaaaagcaaattctaagaacaggaaggaaggaaggaaggaaggaagttagggaaggagggaggaagggagggaagtgagggttggtgctcatttatttaaaaggtttacatacaagagaacctatattctcaattacgagagatctgtatctcacctctttctttaatagctaatttaagtcccaatagatacatggaaatcatcattgactttcctcattaaaaacagaaaatagctattccaaagagccaacacaatatttctttagggtagtaattaagtgatccttaatgctctctatttttccccaatgttttaattcctgccatgtcctaaatgttgatgttcgggctcagagaggggcatc

SEQ ID NO: 500274 - DNA, 608 bp, Homo sapiens
acaaggaaaatctatgactctaaactcaagacccttaacctttaacctgttcccaaatacagatatgatcagccagtgtcatgtttaatgcacaaagtcaataattgaactttgctaataaatcattagagaatcaaatagaataacactgctcacaagggtaaaatatgcaacggaaacagtattcctaaaaataaaagctttgttacagagagctgtaagaaatatttattcaaccctgaaaagcaaattctaagaamaggaaggaaggaaggaaggaaggaagttagggaaggagggaggaagggagggaagtgagggttggtgctcatttatttaaaaggtttacatacaagagaacctatattctcaattacgagagatctgtatctcacctctttctttaatagctaatttaagtcccaatagatacatggaaatcatcattgactttcctcattaaaaacagaaaatagctattccaaagagccaacacaatatttctttagggtagtaattaagtgatccttaatgctctctatttttccccaatgttttaattcctgccatgtcctaaatgttgatgttcgggctcagagaggggcatc

SEQ ID NO: 500275 - DNA, 518 bp, Homo sapiens
agccagtgtcatgtttaatgcacaaagtcaataattgaactttgctaataaatcattagagaatcaaatagaataacactgctcacaagggtaaaatatgcaacggaaacagtattcctaaaaataaaagctttgttacagagagctgtaagaaatatttattcaaccctgaaaagcaaattctaagaacaggaaggaaggaaggaaggaaggaagttagggaaggagggaggaagggagggaagtgagggttggtgctcatttatttaaaaggtttacatacaagagaacctatattctcaattacgagagatctgtatctcacctctttctttaatagctaatttaagtcccaatrgatacatggaaatcatcattgactttcctcattaaaaacagaaaatagctattccaaagagccaacacaatatttctttagggtagtaattaagtgatccttaatgctctctatttttccccaatgttttaattcctgccatgtcctaaatgttgatgtt

SEQ ID NO: 500276 - DNA, 608 bp, Homo sapiens
acaaggaaaatctatgactctaaactcaagacccttaacctttaacctgttcccaaatacagatatgatcagccagtgtcatgtttaatgcacaaagtcaataattgaactttgctaataaatcattagagaatcaaatagaataacactgctcacaagggtaaaatatgcaacggaaacagtattcctaaaaataaaagctttgttacagagagctgtaagaaatatttattcaaccctgaaaagcaaattctaagaacaggaaggaaggaaggaaggaaggaagttagggaaggagggaggaagggagggaagtgagggttggtgctcatttatttaaaaggtttacatacaagagaacctatattctcaattacgagagatctgtatctcacctctttctttaatagctaatttaagtcccaatagatacatggaaatcatcattgactttcctcattaaaaacagaaaatagctattccaaagagccaacacaatatttctttagggtagtaattaagtgatccttaatgctctctatttttccccaatgttttaattcctgccatgtcctaaatgytgatgttcgggctcagagaggggcatc

SEQ ID NO: 500277 - DNA, 586 bp, Homo sapiens
tctacacttgctgagatgtacctaccttcatatgactcaatggtaagagatgagtatttgctttttccacaagcaacaaggtaacgggcttttgtaaaactttatctcttccagacattaagatccaatatctttagagtcctgaaatatttacgataatatagcctttaaaatataaatgatattattaatacttacatttgattaaacatttttgataaaggrtgccttcaacagcatctgaccactggcagggtttgtgtggtgtatttggtaacagacaaggttgatgtggctggatccctgaaagaaggataatagtagtttcagataagtgagagggaataggtgatttgaggagggagagacaggaagactaattgattatgaaagacctttaaatcaagtcaagaatgtatgtttattatgtttgtctcaagagcaatgctaagatagtcaagtagttaattacattacaatcagaaattcttaattgaggaaaatcttttgcatctatataatatttcaagactattagctggtcaaaaattaaaagttccatatctttccgaatctctggatactc

SEQ ID NO: 500278 - DNA, 616 bp, Homo sapiens
tactcagcttatgccttattgtgccatagaatccagcagtgggaagaatagtttaaattggtctattcccctttcttactttgcatactcttttactcactagcttggttttctggctctttccagtcaggaaaggaaggaggctgggaattaaaggcaaaatggtaatgggaccttatgtgattggatgtccaaatataggctcgttttctcagggtgtttcccctcctgcagttccctggagctggtgttgcctcctagagggctttttaataccgtacccttgatccctggcttcaggcagtgaccacttgaatcgctttttagggtcaaaattcatctctccaggaggttctccagggttgttcccttttcgtacagtttagctggatactttttgtgggtccccccagttgatgggctagggaaagtttcaagtttactccactaaattgctgtgtcctcactctgagcccagaggtcactgggagtggaggaaaaagaaaacttcaggactctaaaaattgtcatgragcaggtatctttcaatctttgctgccaacttcctgatctcatttctcaagaggatcttgaatttacagttgaaggagtttgt

SEQ ID NO: 500279 - DNA, 560 bp, Homo sapiens
aaactcatcatttgccccccaaaagctgctgctgtctcagcactccctgtcttggtaaagggcaccaccatccaccaaagagctcaaaccaaaaaaaatatagaagtcatctttggcttcatcctcatatcccaactgatctgcaaatcctgcaataaacatcctcatgcaaaattaaaaaaagaaaaacctttcaattcctgagacatatgttcgtttagaaggtaacatggwgattctttttctttttcttttttattttcttttgagacagagtctcgctctgttgcctaggctggagtgcagtgaaaggatcttagctcattgcaaactccccctcccagggtccagcgattttcatgcctcagcctcctgagtagctgggattacaggcatgtgctaccatgcctggctaattttttgtatttttagtatagacggggtttcactatgttggccaggttggtcttgaactcctggcctgacgtgatctgcctgccttggcctcccaaagtgctaggattatagccatgagccactgtgcccggaccatggagatt

SEQ ID NO: 500280 - DNA, 522 bp, Homo sapiens
agaagttcttctctgttacccatgttttctcagggtttagatttctgaaatcacttgccttcatatacatacgagggatatgaaaagaatgtgaaaatgaaaaactgacttaatgtgcaaagaaagacgagcatcaaggccccagatgaaagccttgattatataaataatcaaaattatattttatatattattaatctaaaatttattatatacttatgctgtgtttatttgcatacaataatgaactgttcctgagagagtatctgactttttcacatggtaaattagttttaattgtggttctgtatacgatttactgttgccacagtcgaaatatttcagttcagtctgtagaatttyaatatcacgttgctgtgtaagagcacctgcccacagttcccaccacaatttggattttcatccaaatactcaggattttaatggcaaggattgatccccctgtaagttttacttttacagaacatgtcttactttgggctcctaagaactatttaagtg

SEQ ID NO: 500281 - DNA, 628 bp, Homo sapiens
tgggatgtgcaggtacgcagcaagcagggtcacggccaacagccccacctggaccccccactacctcatcctgatttgggtaagacctgggctacaggaccccatgtttgggagaaacaggttgtgcaataattccattttaaaaattgtttcctatcaagtgttttcttagttttgtcttatgcgctttatttgtgtctgacctaattcatactcttcttgtaacaaaaacaggtgatacgactcttttcttattttatagtgaatagaactgatgtgtagaaccataagtggtttggcaagatgacaggcaataagtagctaagctgcgattcacaatcagatatttaagctataacacctcttttctgaaaattatgataaagattttacttattcaagaaattaatgacccttttagttgtataattcttctatattcaaggtgttaagaatactrtcttaaagctgtgagagttcatataacttctgacaactgactcatatatttgcaggacgttttagatggagaaaatctggctcagagttgcatagaaaatccgaaataaattttgctttgcatttcatacactttgacaattataattggtagaaataataatgaggc

SEQ ID NO: 500282 - DNA, 628 bp, Homo sapiens
tgggatgtgcaggtacgcagcaagcagggtcacggccaacagccccacctggaccccccactacctcatcctgatttgggtaagacctgggctacaggaccccatgtttgggagaaacaggttgtgcaataattccattttaaaaattgtttcctatcaagtgttttcttagttttgtcttatgcgctttatttgtgtctgacctaattcatactcttcttgtaacaaaaacaggtgatacgactcttttcttattttatagtgaatagaactgatgtgtagaaccataagtggtttggcaagatgacaggcaataagtagctaagctgcgattcacaatcagatatttaagctataacacctcttttctgaaaattatgataaagattttacttattcaagaaattaatgacccttttagttgtataattcttctatattcaaggtgttaagaatactgtcttaaagctgtgagagttcrtataacttctgacaactgactcatatatttgcaggacgttttagatggagaaaatctggctcagagttgcatagaaaatccgaaataaattttgctttgcatttcatacactttgacaattataattggtagaaataataatgaggc

SEQ ID NO: 500283 - DNA, 525 bp, Homo sapiens
ccactatggcaggtgtatacctatcaaacaaacctccacgttctgtacrtgcatcccagaaattaaagtataataataataaaaaagaatttaataaatggccaggctaatttttttatttgctgcagaatggtattctatattgatgtcatgcccaccaatatgcctttcacagtcatttagcattgatatatatcaaatataagtcaattttaaaaggtgttagtggccatacatatctgttttcagtataattacttttcaaaagaaaaaaattatcagcagccaaaacatttcaaaaaaatgtagctcagtaatgcaaagaagcttttactagattaaccaaccatgtgaaaatagcatctttgaactacagatatttttgcttaatatgacagctaactaagctttctttaagtataatatttctacaaaaactgaaaatcttttccaactcatttgtaggttggacgtttttatatattcaagaggacatgatgctttcttccttacctcttcaatttt

SEQ ID NO: 500284 - DNA, 570 bp, Homo sapiens
tctagtcctaccttaaccaccaacttactgtgtgaccctaggaagtcggagattctcctgtcctcttccggccccagtacttgtgccattgcagggaagcctggcccctgagcrtgccaggctgcttcccgaggctcctcctccttgctctctcactgtcctcaaagagcctaacttacgctgggggccagggagcagccaagagtcttagctcccccagtgccttctgctcctggatcctacccttttatccaacatccctgcaaaaggcactggggtgggcttggaaccccgtctcctggaaggctgcaaagcccaggggctgacagctggctttagagctggagactcagggctggctctacccctcaacggccatggctcctgggaccatgatgtaatctccctggacttgagtttctgcccaatgaaggggtctccctcccagggttgctatgagaacaggcaagaatcaagtgccttgcacatagtaagtgttctatgaactgtggttgtgatgattaatttaattacttcctggggtggtggtctttgaggtcaccatttatg

SEQ ID NO: 500285 - DNA, 386 bp, Homo sapiens
agcctctagaaaatatctcttggcctgcctgtccttcagccagagttcagagtcctccccaccgaggacttccgggtccctccctgcagggggtgtgggctctcctcttgcaggtgagaagaccaaagcttagagaagccggacaacttcctcaaggccatagtgagtgggtgagaccaggactggggaccagaaaacccaggccttgctctgaggctcaagacaaatgcccacttaccaccccttcctggagtagtggatgcaggagtagaaggcagagcccagagggcctgatcagcacatggggttaatggggtggaggctgaggtcctggcagtgggggtcaccaggctgtgactgaayggtgggaacgaagaggaatcctg

SEQ ID NO: 500286 - DNA, 590 bp, Homo sapiens
tttaataagcacctactatgygctatgcgcttgctaggactatagccctaaccagacgtttggagccagtgggaacagtcagtgaacaaagatcctgcccagggcatgataagggagacagaaaaccttgaaaagtgggtgtcctcaacctcagtccaggaatgaattctcctcctacccctgaccccccatccccacccctgtcttgcaccagtggatggcagcgtccagccagatgtccctgaggctccgtgagccctaccccaaagatgggtccagttataccttcaaggcctccaggactcagccctgccgtctcctccctcagaccttccgggacccagcctgtctccccaaacctacatgactcctgaagcagacaggaatgctggggacggtgtctgtggttgtgtgtctgatgctttgagacagagggtggagagtcagatggtctcaaccaggggccgttgatgctcccgaaatagttggcggttgattcattgataatccgatagcaagagtccagtctggagagaaggagacattccacattttgttgtccggggaggggaatgtctgtcctgagtccg

SEQ ID NO: 500287 - DNA, 629 bp, Homo sapiens
ggaaagcataatttaggtttggccaaacttttattaatattcacagaaagactatagtccataattagacttcagtttttaaagtagttcatatttgaaaagtggagaagcacgtacgtagcaatttatctttacagcttcattaatctgaatgtcaaaccctcttggactgtaaagtgtatagtgttgtaaatcwtcactttttaatttgttgtatctgctacatcaaatagccaaagtaatttggtcagctgtgttttcattggttttaatgtctcccttctacctcctctccaccccaaactatgacttaattacactaaggttatcttcttaaaccaaggcaagaaaatatcctggaatactagttctttctgcaaaaactatagccctcaaaacagagggtatacttcacaagccacatgtctatcacaagtatcttagaattcagggtaactagtttactggttaaatcagagccaaagataatagcaatttcaaattgcaagatttctagaaaatatgtggaggtccttttgaacattaaaagaaaaataatcttgcaaggattttttaaaattattctgttctgctttgccctgaacattaaattttattactagatttaa

SEQ ID NO: 500288 - DNA, 653 bp, Homo sapiens
ggagagaatattggacagggtgtttggtaaaatattctgtgccctccatctttgatatatgctctgggataatgacacattttcctgcaaggaggcaggtctgtcaaggttctaatctatagaggtgtgatctgaggaatgctagacagctcacagcataaaagctgagtaccaagttacaaagatttagtgagaaagataatttattcaggaatacagaattaaaatggagatccaaatgtcacctccagtttgtttggcatctgtgtcaccaactgctattattttctgttctttctctttggttctgaaatttgtctttctgaaacagtgacctgagttgcacacaacctgtaatttagaaatgttctasgttgtaaattgtactttgctttcagtaaaagcctttatgtgtcaagtagcaaaacaaaagtgtcatgaaagaagttgaagttccccattacagaaagaataattgggtagaaacctgttagtgtgtaatgcagaaaataaaagaaatgctgatatgaacatgcccatcaacttacatttataatatgatgattttcaaatgatagaggaacatttgtgagcctgtgttgtcacagtgcaacagtgccagaggatgctgttttcagcaggtcagagtccca

SEQ ID NO: 500289 - DNA, 640 bp, Homo sapiens
aggcaccatcagatgggagatgtgtgctcattggcattttagaaaaattcatcttgtagcagtgagggagaagaattggaaaagggaaaaactggatgtagctaggccacggcagggcaatggtgatggagaggaagagggaagataaggagacaaatgaagaaacaacagacttggaacccatgagtgactggccgtggaggaagcrcaggtgcagtaaaacagcaccctgatgtcatgcgtctgagagaaaagctgtcatgtgaaataaagattaagctcatttgacagagctctagaggatgtaaccaagaccaacttatcttctgggaggcagatttgggctcagtgtgaggaactcacagctaatgctgtccaagaatggaattggctgccctggtaccagcaagttcccagggttgaggatgccaggaagctgcaggtgtgggaggatggacttgagggcccgtgacttcaagacagggacagagagggcgctgcagacagacaccgcctgggagcaggatgagagatgggagggtggtgaagaaggagtgggtggggaacagatgtctgcgttaggaggagggagcagacgggtgcggggaagaaagcctgggtgggatgaggctgtctgcag

SEQ ID NO: 500290 - DNA, 478 bp, Homo sapiens
agaaaactaagggattaaaatccgtctccatcaaagggaacagtacatttagaggaagcaataatgtccggaatgagggatggaagattaagtaaactatgattgggttaaaaggtagaaagaagtgaggcagaacatccaaagaaggaaggtaacttccactgctggatttccatcaggaaaccttaaataacctctaaaggtagtgatgagaatggggatataaccagagggtcacagactctcagaggtggaaggtgcacagtcctactttatactttaaacatttgtataccccagacattgttaacctgggcctcaaggatgagtttcacagtcaaatgcaaaattatgcattactttgtgtgtgtgtgtgtgtgtgtgtgtgcctgcgtgtgcacstgcatacatgcatgaatatatgtgcatggatctgaccatttttctgggaagacaacatatccatggggcccattca

SEQ ID NO: 500291 - DNA, 544 bp, Homo sapiens
ggtaagatagcattctaatcaataggaatggcacagccaaagtataggagtggaaaagtrcagtaggagtgaggaatgtttttgtgaagcattagacacagcagagaacgtctattaataggttgaaaagagccctgagtgctcatttaaggatttgggactttattcaacaagcagtggagagtctgatgtttctgaggagaaaggagccatggctatcaaacccaaatttcctatcagttcctgattcatccaccagccaaggttactgtaccatccttgaggttgaatgggttgggccaactttgaggattagtgaaatcatttgttattaatgaagtggttaacaatagttaaggtaccatagcaattatgaacaatcttctgctttaatttttcctataggatcttttgctagtcaggtcttctctgagtagatgagagagataactttgaatgtctcagggaaaagtgtaagagtaagttttgttaatacaatacaagtgagattggaaatgcagttggctctccatatatgtagttt

SEQ ID NO: 500292 - DNA, 591 bp, Homo sapiens
gtgagccaagatcgcgccactgcactccatccagcctgggagacagagcaagactctgtctcaaaaaaaaaaaaaaaaaaaaaccaaccaaaaaaaaccacctagccaggtgttggggggcatgtcttgtgcctgtaatcccagctactcaggagactgaggcaggagaattgattgaacctggtaggyggatgttgcagtgagctgagatcatgaaactgcactccagcctggccaacagaatgagactatgtctcaaaaaaaaaaaaaaaaagaatcccgataaccaggcacccacatcctagagttagccccatagccagctcacttggtgggagatgctcaagagagcaagatgttcctgtgctgcatccgcacatctcaaggctcctgcttcaggaatggcaggagtgagaacctttcttttctgacgatgcccttgtaggctcatccctcaccccagatgcctctggccatttagcagaaggcccccccaggtaccacaggacaggagtcaccaggtagacatcaggccccagatggagctaccaggccaggcctcacagtgatcccaccagggccacatctgca

SEQ ID NO: 500293 - DNA, 447 bp, Homo sapiens
ttttccatccctcataattccatggctggagcagttggagaatttgagtgatttaactcacaaagttaagcatacacagtgttgttatttttaacrtacacgttgaaaacatggtttatatacattataggaggtgcctaatgagagaactcgttcccctatcaaaaataccgtgagttatttcagtagacaaaaagttctcagataagagagcttacttgaaaaatatttactatattttatatatatatatatgtattttcagatgaaaagtatgttttcattttatagggaattcattatattctttttttttttgagtcggagtctcgcttctttgcccaggctggtgtccaatggcacaatcttggctcactgcaacctctgcctgccgggttcaagcaattctcctacctcagcctcccaagtagcttggattataggcag

SEQ ID NO: 500294 - DNA, 637 bp, Homo sapiens
tcttagaataatgtctgatagtaagcactattttaatggcagctgtattatgttatcattatttgtatttctaactcctgttttttacagaaatatttgtatttgagtttttattgtcatacctcaaacttctttaaaagttaccytagagagaggggcttaaagatggctgactagaggaatacaacacttgcctcctccaagaagaacctaaatagtaagtggataatcccacttcaaatagatcttctaagagagagcactgaaattcaacagagaagtgacagaaaacacctaaggcacagaagaggaggaaagcaaagcaaagattggatgggaacctggggaggttccctaatgtggggaaagagtaagtgaaagaccacgagtggttcacatttccactgtggactcttacaatcttacccatgggagcagcttttgcaggccctaggaatggcatagtgacctgcctagaaactgtgcaatggcattgctccagagagagaattcatcctgggtcccaaatacctcctgagtaccaagcagatgcagcatggtgccattttgagagctcagcccccaccagactgcatcctgccctgggccacaacagcccctgcatctccacatccct

SEQ ID NO: 500295 - DNA, 377 bp, Homo sapiens
ggagctgcctgcagccatagtgcactgaacaggggactctggtctagagatgctggaggtcacatgctgtcttcctggggcttgattcttctgcacctcttttgaatctttgagcctcctcgaaaccttccaatgtatcctttttaatttaattttttttttgtagagacaagctcttgctatattgactatgctgatcttgaactgctggccttgaacgctcctccagcctcagcctcccaaagtgttggtatgagaggcataagctatgcatcccatttttgcttaagctcattcaagtttggttyctgtgccttgaaaccaaaaaactcccaagtaataacagccctcaacaagtgcctgctttatcatcacca

SEQ ID NO: 500296 - DNA, 559 bp, Homo sapiens
tactttcccagcaccccttaaatgtcaggcatgataccatcgctgtttttacggataagaaaaccgaggctccgagtagggtgaacggccgcccaagtgaagggactgagtctgagccagagccccarcggccagagaagttccaacagggctgggaacaaatcacagacgcgctttgtctcagcccagcacacgctcttgtgcacagacacaactcaggctgctcagccggaagcctcccgacgttctttccaaagcagaatggcaagaaaatggagtgggagggacgacatttgggagaaaggaagggccaacaggcacagaatcccttctctgaaccagccatattttgagggactggggacacaaaggtgaatgtgaggaggcctctgcccttaagaaattcgtaattcaattggaaaaagagagagagaaagagcaacccagtggcaaaggagacaaagggtatgaacggacaacttagaataacagaaatttgcctcttcaaatagaaaggcgttcaacctcaccaatgaaatcaatcaagaaatgcaactta

SEQ ID NO: 500297 - DNA, 559 bp, Homo sapiens
tactttcccagcaccccttaaatgtcaggcatgataccatcgctgtttttacggataagaaaaccgaggctccgagtagggtgaacggccgcccaagtgaagggactgagtctgagccagagccccagcggccagagaagtyccaacagggctgggaacaaatcacagacgcgctttgtctcagcccagcacacgctcttgtgcacagacacaactcaggctgctcagccggaagcctcccgacgttctttccaaagcagaatggcaagaaaatggagtgggagggacgacatttgggagaaaggaagggccaacaggcacagaatcccttctctgaaccagccatattttgagggactggggacacaaaggtgaatgtgaggaggcctctgcccttaagaaattcgtaattcaattggaaaaagagagagagaaagagcaacccagtggcaaaggagacaaagggtatgaacggacaacttagaataacagaaatttgcctcttcaaatagaaaggcgttcaacctcaccaatgaaatcaatcaagaaatgcaactta

SEQ ID NO: 500298 - DNA, 557 bp, Homo sapiens
gatgtggaaactgagacttaaggatagaatctgcccagaggtcacccagcttgactggactggagcygacagacacttttcatttcctgctggggagatcaccatttctctctcctcttcttcagtcacaacttagtagcacctgcccgggacagggctctgggccccatgcatccccagagacagaaggcaggaactcacggtcaaggccatagccactgagcgtctgggcccaaatgtcatatggctggaagacagcaccctgctgcatggacttcagcagctcctctccagtcctggccactcctgtttgcccccactcctccctcccatcctgctgggggaatctgacaaacagcccagaagctggccatggggaatgcagtcattcagaggatggcttctttgttgtcccgaggagggaactatatttagaaagctcagaagctggcgggagcgagggctgaccgggaacacagcatagatttggcaggaatgtcaggctggaagcagccccggtgctttgacactatcatgaaatagtggaaaatggcaaa

SEQ ID NO: 500299 - DNA, 557 bp, Homo sapiens
gatgtggaaactgagacttaaggatagaatctgcccagaggtcacccagcttgactggactggagccgacagacacttttcatttcctgctggggagatcaccakttctctctcctcttcttcagtcacaacttagtagcacctgcccgggacagggctctgggccccatgcatccccagagacagaaggcaggaactcacggtcaaggccatagccactgagcgtctgggcccaaatgtcatatggctggaagacagcaccctgctgcatggacttcagcagctcctctccagtcctggccactcctgtttgcccccactcctccctcccatcctgctgggggaatctgacaaacagcccagaagctggccatggggaatgcagtcattcagaggatggcttctttgttgtcccgaggagggaactatatttagaaagctcagaagctggcgggagcgagggctgaccgggaacacagcatagatttggcaggaatgtcaggctggaagcagccccggtgctttgacactatcatgaaatagtggaaaatggcaaa

SEQ ID NO: 500300 - DNA, 639 bp, Homo sapiens
tagcaatggtcccaacaggggctgggatgaagcccctgctataagagcaatagagctacagacctgtggcaccttggataatcaaatcaaatttaaaacattgggtcaaaccattggtttgatctaaatcatccatactctcagacttcaaaacaaaccagggctgggcgcggtggctcacacctgtaatctcagcactttaggaggccgaggtgggctgatcatgaggtcaagagttcgagactatcctggccaacatggtgaaaccctgtctctactaaaaatacaaaaaaattagctgggcgtggtggygcgtgcctgtagtcccagtacttgcgaggctgaggcaggagaatggcgtgaacccggaagatggaggttgcagtgagctgagatctcgccactgcactccagcctggtgacagagcgagactccatctcaaataaataaacaaacaaaaaaaaaacaaaaaaaaaaaaagcaaatccgtatgcccatatgcctgttagctagacttcttctccaactggatataaaattgaatggaagcattactcaccttcatagatattttggctgggaaggcagctcattaagttccccaaggaaaaattaaactatctgggggaatacaaagc

SEQ ID NO: 500301 - DNA, 639 bp, Homo sapiens
tagcaatggtcccaacaggggctgggatgaagcccctgctataagagcaatagagctacagacctgtggcaccttggataatcaaatcaaatttaaaacattgggtcaaaccattggtttgatctaaatcatccatactctcagacttcaaaacaaaccagggctgggcgcggtggctcacacctgtaatctcagcactttaggaggccgaggtgggctgatcatgaggtcaagagttcgagactatcctggccaacatggtgaaaccctgtctctactaaaaatacaaaaaaattagctgggcgtggtggtgcgtgcctgtagtcccagtacttgcgaggctgaggcaggagaatggcgtgaacccggaagatggaggttgcagtgagctgagatctcgccactgcactccagcctggtgacagagcgagactccatctcaaataaataaacaaacaaaaaaaaaacaaaaaaaaaaaaagcaaatccrtatgcccatatgcctgttagctagacttcttctccaactggatataaaattgaatggaagcattactcaccttcatagatattttggctgggaaggcagctcattaagttccccaaggaaaaattaaactatctgggggaatacaaagc

SEQ ID NO: 500302 - DNA, 639 bp, Homo sapiens
tagcaatggtcccaacaggggctgggatgaagcccctgctataagagcaatagagctacagacctgtggcaccttggataatcaaatcaaatttaaaacattgggtcaaaccattggtttgatctaaatcatccatactctcagacttcaaaacaaaccagggctgggcgcggtggctcacacctgtaatctcagcactttaggaggccgaggtgggctgatcatgaggtcaagagttcgagactatcctggccaacatggtgaaaccctgtctctactaaaaatacaaaaaaattagctgggcgtggtggtgcgtgcctgtagtcccagtacttgcgaggctgaggcaggagaatggcgtgaacccggaagatggaggttgcagtgagctgagatctcgccactgcactccagcctggtgacagagcgagactccatctcaaataaataaacaaacaaaaaaaaaacaaaaaaaaaaaaagcaaatccgtatgcccatatgyctgttagctagacttcttctccaactggatataaaattgaatggaagcattactcaccttcatagatattttggctgggaaggcagctcattaagttccccaaggaaaaattaaactatctgggggaatacaaagc

SEQ ID NO: 500303 - DNA, 591 bp, Homo sapiens
atataatcttatatattatatataattatatattatatatgatttatatatgtgaaacatgttatatattctatatattatatatgatttatatatgtgatatatgttaatttctgatataagttatatattcttatataacatattttcttgaaatatatatatgttatatattctttgcaaaatcacaaaatgtctggtgttataaaattaaatattttgacaatatgacattgtcaacatgtactttagcacttggaagatatggtttataagtgaactaataatcctttaatccttttagctcagtgtgttatatttgccatctttacatgaatgttgaaaccctgaaaaggaaattgggttgggcatayaggcagaactggtaaaaggaacctggttacttacagcaagtggcccagctacttgctctttgaacctatagcccaagccctttctcctccacccagagacacgtggcaggcagggagaaccagagaaggaacacatcaacagtaagtattctggtccaaaaatcctctttgaccccatgggcctaaatcctctttctctgtctagagaaattagagc

SEQ ID NO: 500304 - DNA, 595 bp, Homo sapiens
tggacattaaggatatttttcctttaaaaatgctcatatgcacaatattttgcttaagatttaagagtgaycatagaatctcctaaagtgtaattgtacagtcaaagtcaagaatttttgaattataattccttctttgtgcattagaacccctttcattagcttgttcctctcttttacagttttcaggcatgtcatctagaatagtcctgttacgggtgtgctcactgaagtggatttgggatgttatatgtttattcatgttgttttagctcataacatttcatagaatcctctgagatcaattttaaagatgatgtaagttaaaaagtcttccacacattcttcttagaatgccctccatgccaaataaaattaaaaaaaacaacaacaacaagataaatcattgtaacaaacatgttctggaaaattctttggaacatcttaccacaaggactttaatatccaaaacagaccattgatttgtccattcagcccaacagaaaaacaatagataaagtcccaaagagcaggaggagcctggcacagttaaggaacagaaagaataactagcatggcttaaacataagaggca

SEQ ID NO: 500305 - DNA, 464 bp, Homo sapiens
  misc_feature (1)...(464): n = A,T,C or G
nnnnnnnnnnnnnnnnnnnnnnnnnnnnnnnnnnnnngtccaagtttgtatggtatgtagttctgcttttcagaagcattagagatcaaaatacttctattttataatatgtcatccctttcttatgaggtctacaasagatgaccaccacatctggcaatgaacatgcaggaaggagaaagggtaaaggtgaaagagaagttatatccgtctactttaaggcataacaaactggttaagtatatcactttttctcacatctcattgtcccagaaaagtgagtgtgcttgaccagattttggaggtgcataataattgttagtaacaaaatattttatgaaaaaaaactatcattttcaggaaaacatcttaatgaggagcattagttagaaggaagcttgcttgtgagaacagagtagcaggagaaatgactccaaaaaaacaattacattgatgggcattac

SEQ ID NO: 500306 - DNA, 485 bp, Homo sapiens
ctgcctcaaacacaaactcaagcattcaatatcactctatcttccacaacaacacttcatttctgttttagaggtaacaagcaggtagaagttccaactgaaatgcttctttatatattcatacaacgtatcgtgtgcttatctacctatgtcatytcatataatttacacttacactgatatctttttttttcagttagggttccattagataaacacaatcactaggaaatagacacatgcgtatctggattttctacagggattcaaggttcacagttgtggggattgtttaggcttgataagtagtcactctatgactggtgtctttgcctctgattctgccccatgaagttgaccaagagggttttaatgttttcttcagtttgactaatctttagacaggcttcttactgactctaggccccaaactttctttttccccctttattgaggtataattgacaaatacgaattaagtatat

SEQ ID NO: 500307 - DNA, 634 bp, Homo sapiens
ttaaatatacgtggtgattcattctttcagaaaargtacataagtggtaaactctttggattttagtacctagaaacacttttattttatgattgatttactccttatagctttattgagtatgagatttcagttgaataatttttcaccatcatgaagatgtaattccattacctactgacgtcatttgtttataatgatgactttgctaccagtataatattcatacattgttagattatttatcacatatctctgcaaaatcttaagatgtctgacatcctgcagtttaactaactttctatgtatacaagatagtaagctttactacgtcaacccagataagctggaactacattttccagaacccccttacctttgtcgtaacaagtgagattagttacaagacaaatttccatgggatttggaaagcagtaaggaaagaatcttttcttttcttttttctttttccttcaatttttttgtattaaagttatgttagggcactaggctctgtgtagttacatatctgccagttcacctgtttggcctgagcagcacccaggccatgagtagctcctgaatctccccatggtttgggtcaaatgttcatgtatgtgaagttccatgggaa

SEQ ID NO: 500308 - DNA, 524 bp, Homo sapiens
tggtttaaaataacctaagattggcttcctttgactgttctagccaaaatgctcgggggtcggggctgaaggtgccagtttgcccagaggtccgtcctgagacagatggattcatcaacagtgcttggctttgagagaagggcactggagaagactccgaggacacccctgttccctcagtgttgcagtgaggtgagtgtagctccgccaccgagcgagagccagcctaccggcccctcccaggctgcagccgtgatctctgggtgaccagagctcatcccatcttagcctgggcacctcmaaaacacagcctgaaaccaaagcttgcatgcaagttgttaggaatgagatttcagcgagcaagagagacagatggggagtaaaacgggagaagcgaaccctgatggaagagtgtcttaggggttggcggctgctcaaggtaactggagtgcattcctctgtggccttcagaggagcctcatgaaatgtctaaaaagagtccgccgagtctaaaaagaaaaaaa

SEQ ID NO: 500309 - DNA, 560 bp, Homo sapiens
tctttcacttgggtgaatcaaagcagcatcatgttgaatgaaaagaagcaaatcacagaagactgcatatacaacatgatacactttttaaaaaatttgaaaactaagcaaaattaaaacaaaactaagcaaaactgaaaaatatacaacttaggwacacacattcctgttaaaaaaaaaaaaccttttaaaagaggcaaggaaatgctaagcataatattcaagaaatatttatctctagggagaagatggaaagtagaaaacacacagggagctataagttattgaatattctgttcttggtttggacagtgggttctaagtgtttattatgttatttagtgtatatacataaagtaaaagaaaagatggctttcaatggatcagtggagataatgtgccatgaatgggtgtaaacgggcgataatgtgccctgaatagttcattttgattaatctaattctgtgaaccaaagagccagtcagtcaataaataagaaatcccggatccctcacatgctaattttatgaaattttcttgactatggggaaataaaaacc

SEQ ID NO: 500310 - DNA, 587 bp, Homo sapiens
gggcaacgggaaaggagagagggaagagagaagagaagggacaagctctcagattaatcctgtgagttcatcacaccggaaaggtggatccagaaaagccacgtttggcaggtaacgggctctgcctgtgtgactcagcagcctccagcatggcatccaagctgagctggttgaagtaagcctcgttccccaaggcctgatgagtgagcttgtaaagggctcgctgaaatgccttgcagaaccactcactgttccagcaagatgctttaaaaccaggctcagaactaatccaaaaagaaggagtcttgatccaagttcacaatgcatgtgaataagtcacccagcatctgccagcagggtttagttccacgtaaactgggaatcaacaacattctgttgggtgtgcagcccattagtaaagggccactagttctcaaagactctgggattgagatcctcagcctccacaacagggccgcttcacgcgcctcttgcttttctcaccaaagcatctcagagtgttttcccaggayggacgatttatcccattcggtagatgaggcccagagaagctaagttctgcctgc

SEQ ID NO: 500311 - DNA, 536 bp, Homo sapiens
tgcctgtggatgtatactccatgaacagcacctcaatgtcaaccaaaccaaagctgagcccccatctgcttcttctcctgagtttcccatcactgtgaatactctgtgcatccagggaagctgggagacatcttggactcgtcgtttttcctatccccatgctccctatgcccacagcctcggtcctagtttagggccctcatcacctctcctggaacattgccatagtctcctgcccacagattgatcccattcaactcatcagccactctgttggcagaatgctcttcctaaattgcaaatttggccatgtcctttcctgatagtctccatcttatctaacaacagttctcaaagtataatgtggaaccccaaagacactttcagagggtacctgaggtcaaaactattttcataataataataagagattatttagccttttcactgtgttgatatttccatgatggtggaaaagcaatagtgggcaartcagtagatgcctcagcacaatttaaggcatagaacaaaactat

SEQ ID NO: 500312 - DNA, 624 bp, Homo sapiens
ttccctagggctaaagtctcctatgggagccagttgagcctaaggggatggccatccctggccatgctccactacagatgctcctgcaccaaaccctctgggctgcccctgccacttctctaagcagctctccctgccaactcaagtgtttgtggtgattgaggggtctccccctgtcaggatttcagaggcccgtggtgagagtgggttgctccttgtcagttcaactcacttgttcccctgaagttgtgggggctaggaatgagtcctggtgcatggtagccccatgcagagttcccagcttcttcctccttcagctcagcttctgtgtcttccctctgtccactctcagtgcctttcttctgaaaatctgctgggagtgtgccaatcatctcagccccttggtggcaggtgtgttccacctggctgcatctcattggtcatcttgcmtgatccttatttctattcttatagtcttttttcataaatcaattctttcttcaattcttaaaaattctcagccatagtctcctcaattatttctttctctgtgttttatgttctggtatgcctctccagaatgttaggtaggccctagtccaatgttgctcctgttcattctat

SEQ ID NO: 500313 - DNA, 551 bp, Homo sapiens
tctaacacaatccatcaccccccacccttctstctacctccatctagtcactattttaggaacagagaaatcaagagccttgaaactagaagatcctttttgaagtctttttgtctatactcttgcacaataaagacaggaaaggctttgctgtcctggtctccatcctctggaagttgggggaagggagaagaaatgggatgacaggaaaagaatataagagcaatttgagaccaattagaaattggggagttattagaagttattctttattctctacccaagttacagcactaccagcagttgctcaagccaggcacttgggaggacatcaccaatctctctccctcaactcatctatgtttacagcccgtgatctaggccatcatgatctctttctaggatattggaatgttcttaactgatctcctgctgtaatatattattgctcttcgatccaaatcacaactagaatttcctttctaatgcacaacctaattatgtttctcccctgcttcactggcttattattgctttcagaataaattcca

SEQ ID NO: 500314 - DNA, 551 bp, Homo sapiens
tctaacacaatccatcaccccccacccttctctctacctccatctagtcactattttaggaacagagaaatcaagagcctygaaactagaagatcctttttgaagtctttttgtctatactcttgcacaataaagacaggaaaggctttgctgtcctggtctccatcctctggaagttgggggaagggagaagaaatgggatgacaggaaaagaatataagagcaatttgagaccaattagaaattggggagttattagaagttattctttattctctacccaagttacagcactaccagcagttgctcaagccaggcacttgggaggacatcaccaatctctctccctcaactcatctatgtttacagcccgtgatctaggccatcatgatctctttctaggatattggaatgttcttaactgatctcctgctgtaatatattattgctcttcgatccaaatcacaactagaatttcctttctaatgcacaacctaattatgtttctcccctgcttcactggcttattattgctttcagaataaattcca

SEQ ID NO: 500315 - DNA, 456 bp, Homo sapiens
acacagaggacaatgaggtggaccttcagagagaagttgaaatgagagatctacaccctagaaatagtagacagtgatcttgactcctgatagctttctagttctgggttccaggccatcctcaggcccgatttcgttcctgcctttgaatcctggcttcgaaatgtttcttgccttgagtggcttctgttacatacaacaaaagaactttcaccaagccattctcatagccaatccatcacctgtcacaatcctgatgattctacctcagaaatctcaaatctcatccctatggccttttcaatagagttctcaccatggccttccctaagtggactctctgcctcggtcctcttttctcccatccaggstccataaaaaacatatttgatccacttgttcccaaacttaaagtcctttactggttccttgttgcctgttaaaagtaacaaaata

SEQ ID NO: 500316 - DNA, 568 bp, Homo sapiens
taactacagtgtacacattacattagtttgtgtctctaatgcctttttaaatttagaacagtacccccttttyatgccattaatttattgaaaaatcccttttgtaaatagatatatgaaaatttcaaagagttcagagaatttcaaagaatagcaattgacaaggttttatcggtgagaaatctcaaaaaatgccaaaacagaccccagatttctcagggtgctcagggagctaatgttgtcatggcccagggaagagtttctacctctttcagactgacaaaatgagcagagaactggagactgggttgaaagatgaaaggtttaaagttctgaaaaacaaagattcaagccgtcaagaaaatgcaaatcaaaaacacaatgagataccacatcacacccattaggataactataatcagaaaaagataataaacaagtgttattgaggctgtgaagaaattggaaccccccatacgttgctactgggaacatattttgaaaaacaggctgacggttcctcagaaattaaacagggtgaacaatgaccctgaaattccactcctag

SEQ ID NO: 500317 - DNA, 621 bp, Homo sapiens
gcaactgtacccatgaccatgaatgtcaaatgtttacacttcttaaaatactcacattgttcagagtgactggctttataacaatgtgtgcctataaagtacatatctaccaataagataacttttcatctgtttcttctattggttttgaatataacatttatttgaaaaacaagttacatttccaaatgtttgtgatctctgacgtggatgacggtgaccagggccagctcctacgcgggcgtgggcgagtgctgtggccagatgtgtgcgtttgaggcaggccaccctggctgctgttggaaagggaactggagccagccagcctccactctgggcagacaactggaaggtgctgggagtcaggctagagataaagatttggcatcrcaagcctggtgggaggtggttgacgtcttgggtgctgaggctggagcccagggcgagtgtgaagtaagaggagggggtcaagatgaaagcctgagaagccatcttcagccgctctttccacaggcatcagcatcaaccttttgactacgggacacccctggaggagtgagactttggaatcaacattcttgaacaccccatgagacctaaaaaaaacccctgcatatagca

SEQ ID NO: 500318 - DNA, 621 bp, Homo sapiens
gcaactgtacccatgaccatgaatgtcaaatgtttacacttcttaaaatactcacattgttcagagtgactggctttataacaatgtgtgcctataaagtacatatctaccaataagataacttttcatctgtttcttctattggttttgaatataacatttatttgaaaaacaagttacatttccaaatgtttgtgatctctgacgtggatgacggtgaccagggccagctcctacgcgggcgtgggcgagtgctgtggccagatgtgtgcgtttgaggcaggccaccctggctgctgttggaaagggaactggagccagccagcctccactctgggcagacaactggaaggtgctgggagtcaggctagagataaagatttggcatcacaagcctggtgggaggtggttgacgtcttgggtgctgaggctggagcccagggcgagtgtgaagtaagaggagggggtcaagatgaaagcctgagaagccatcttcagccgctctttccacaggcatcagcatcaacctyttgactacgggacacccctggaggagtgagactttggaatcaacattcttgaacaccccatgagacctaaaaaaaacccctgcatatagca

SEQ ID NO: 500319 - DNA, 576 bp, Homo sapiens
caaaaggctaacccttctctgagtagaaggaaattctttctgcctaattgcctttgaactggaacatcagcttttttcctgcctttggtcttgaactgaaacatcagctcttccttggtctcaagcctgttggctttcagatatgaacaaacaccatcagctttcctgcttctcaggcctttggacacagactggaactaaaccatagtctttcctggttctctagcttgcagactcaccgtgcagatcttgggacttgcccatctccatmattgcatgagccagtttcatcccattccttcaagttctctggagaacactaacacatttccaacgtctttttccactccccataatttactctgtactctagttgggctggacccagaatgctgcttggcctgccatgctcttatgtgtcttcctgcctttgcacaaacatttcctctgcccccaaagccctcctctaccctaatcttcagggtcaactcctgctcacctgttagaactcaatttttgtgtcacttaactcaggatcttatccttttgagtttgggccttctcccatgttagcca

SEQ ID NO: 500320 - DNA, 518 bp, Homo sapiens
gtttctaaatgatagctgtccttgatctcctttggtgcttgcctcaaattggaatctttgcccctgcgtctttacctaaaactgtctgatgtatccatcagccaggccctgagaagccccacttgttccagattcttcagatcctcctggcagcagcaggccagtccaaatgaacattccactctgtactttccaagaaagtggaagctccttgaggcaggatctccttctgtcatgtgcaccactgtatccccatcccctagagtagtgtccaatatatagtagggactcagaaaatatttgtggactgactatccattaaaaagaaagagagagagagagaaagagagagagagagaaagtaacgagcaaaacaatcttgcatgcaatctagcatgcaaaaaagtcataggtcaacaaggctcgctcttctaataggaagaaggaagcaatctttatatgtgtgtctcttatagaggcccatmtaaaaacaccttcatgagccaccctatgtgcag

SEQ ID NO: 500321 - DNA, 467 bp, Homo sapiens
ctgaggaattgagaggcctggtgaaggtggcaggttaatgaacagaagctgtgggaaggtgtagaagtgtgttcctctgactcctcttcccactaacattccctcgcctaagagagagggctccttcttctcccaccagggagttgtggtgcagtagaaaaagcagaatagacaaamctgttcttctgattattagtggtttgactctgaacaagctgcaaagtcagtttttgagcctcagtttcctcatctgtaaaatgagcatattctcccctacagagcactgctgtctgaacattaaacgaagtaggattcattaagctgctaacagaagttcaacaattcatctacatacaaactgagaacatttgtgagtgtttgttatttacatggtaatttgctaagaaccgtacaagcctggagggtctatcagtcttcctaacacttctgcaaagtagattgtagca

SEQ ID NO: 500322 - DNA, 528 bp, Homo sapiens
tgggaggctgaggcaggagaatcacttggacctgggaggtggaggttgcagtgagccaagatcgcaccattgcactccaggctgggtgacagagggagactcctctagaaaaaaaatggctgatctagagcagggaggacttgaggggtcagaggacagggctgggaattccctgtggagaaggaagccatctcaggcggtggaggggggcagcggaggggaggggcagggcaagggcagctttctccttgggctgggagaagagagacagaagcccccggccctgtggcctggctgagccccagcgaaggagagacgctggcctataagaagcaagacatacacccgtgatgtgactcccagccagacacaccgccagctccaccttcagacacacccacaaacacaggcacccatgttcttggaaaccacaatcacacgcacagaraagagccttctggctgacgacaacccggactgtgaggatcaggctgagggtgacctcggtggcagcaactctcctgccct

SEQ ID NO: 500323 - DNA, 570 bp, Homo sapiens
tgccgccaacatctcccatgcctgtcacaatgcctgcaaactcctgggctctgtgtggacccatcaggctccccttgtaatccatatgcaatcacattttgtcaaaatacctayatttggatgcatgaagtaatgatcaggaaggatctatgcctattaaagacattaccttgaaaatataagatttcatattttatgttgtttgaacttttaaaatctatccttccctgtcctcccactccagataagcaaccatggtaacgcgttgatgtctccttttgtttcttttttcttttttttatttgagacagagtcttgctctgtcacccaggctggagtacagtgacacaatctcagctcactacaacctccacctccagggtgcaagcaattctcctgcctcagcctcctcagtagctgggattacaggcatgcgccaccacgcccggctaagttttgtatttttagtagagacggggtttcaccatgttggtcaggcttgtcttgaactcctgacctcgtgatcctcctgccgcagcctcccaaagtgctgggatgacaggtatgagc

SEQ ID NO: 500324 - DNA, 506 bp, Homo sapiens
ggtcaatctagcatgagcatgtctgggaagctcgacgttgctcttgytgtctcttctgctggaagcagcagtctggcctgggcttgttctcatggtgatagcaggagtgagtgagcagaaatgaattcacactttccaagtttttggtcatacagattaatattccagtggccaaagctagacacatgactaaacccaacattagggactggagaaatatactccgattcttcagtgggaggaactgcagagacaaatggcagaatcttggatacagggaggacacggatccattaatgtgccttaatcaatcgcaaccctctaaccaccaatacaattaaataagtatttgttgaatgcacttgtgcctgaatgcttctggctgcagcccaggcaatgggggcctgactggggagggaccatagcagggactcgatgtcctgcaggtctgcatgtaattgtgcacggccgactcctcattggtcatggctgacttgctttatcct

SEQ ID NO: 500325 - DNA, 618 bp, Homo sapiens
ggtcaatctagcatgagcatgtctgggaagctcgacgttgctcttgctgtctcttctgctggaagcagcagtctggcctgggcttgttctcatggtgatagcaggagtgagtgagcagaaatgaattcacactttccaagtttttggtcatacagattaatattccagtggccaaagctagacacatgactaaacccaacattagggactggagaaatatactccgattcttcagtgggaggaactgcagagacaaatggcagaatcttggatacagggaggacacggatccattaatgtrccttaatcaatcgcaaccctctaaccaccaatacaattaaataagtatttgttgaatgcacttgtgcctgaatgcttctggctgcagcccaggcaatgggggcctgactggggagggaccatagcagggactcgatgtcctgcaggtctgcatgtaattgtgcacggccgactcctcattggtcatggctgacttgctttatcctgcgtccccaaggggcaacgattggctgattatatttctgaacaattttgacaaagttgttttcaggagcccaggaagcaaatcagttgtagatttgaatttttcaggggatc

SEQ ID NO: 500326 - DNA, 605 bp, Homo sapiens
taatagctagagagagcatgtcccgtctcctctttttaatgctcatttgagtaatacataatgctatagagagaacttttctctaatatgtgcttcacctcaggctaagcgtgttttgggcaactgtgcttcatgaaaaaaaggtaaaggatctaatttgggagccactcacaaaagtgctaccacttgatgtttttttatactctgagatttcttattcccagtgcctaccaggaatggactttctggagaagctcagattaatcactccttatgagaggtaacagcgtgttggcagccctcacagccctcgttcactctcggcacctcctctgcctgggctcccactttgrcagcacttgaggagcccttcagcccacggctgcatggtgggagcccctttctgggctggccgaggtcagagctggctccctcagcttgcagggaggcatggagggagaggcatgagctggaactggggctacgtgtgctgcttgcctgccggctggagttctggatgggcgtgggcttggtggccctgcactaggagctgccggctggccttgccggccggggctgtgaggtgcttagcacctgggccagca

SEQ ID NO: 500327 - DNA, 605 bp, Homo sapiens
taatagctagagagagcatgtcccgtctcctctttttaatgctcatttgagtaatacataatgctatagagagaacttttctctaatatgtgcttcacctcaggctaagcgtgttttgggcaactgtgcttcatgaaaaaaaggtaaaggatctaatttgggagccactcacaaaagtgctaccacttgatgtttttttatactctgagatttcttattcccagtgcctaccaggaatggactttctggagaagctcagattaatcactccttatgagaggtaacagcgtgttggcagccctcacagccctcgttcactctcggcacctcctctgcctgggctcccactttggcagcacttgaggagcccttcagcccacggctgcatggtgggagcccctttctgggctggccgaggtcagagctggctccctcagcttgcagggaggcatggagggagaggcatgagctggaactggggctacgtgtgctgcttgcctgccggctggagttctggatgggcgtgggcttggtggccctgcactaggagctgccggctggccttgccggccggggctgtkaggtgcttagcacctgggccagca

SEQ ID NO: 500328 - DNA, 605 bp, Homo sapiens
taatagctagagagagcatgtcccgtctcctctttttaatgctcatttgagtaatacataatgctatagagagaacttttctctaatatgtgcttcacctcaggctaagcgtgttttgggcaactgtgcttcatgaaaaaaaggtaaaggatctaatttgggagccactcacaaaagtgctaccacttgatgtttttttatactctgagatttcttattcccagtgcctaccaggaatggactttctggagaagctcagattaatcactccttatgagaggtaacagcgtgttggcagccctcacagccctcgttcactctcggcacctcctctgcctgggctcccactttggcagcacttgaggagcccttcagcccacggctgcatggtgggagcccctttctgggctggccgaggtcagagctggctccctcagcttgcagggaggcatggagggagaggcatgagctggaactggggctacgtgtgctgcttgcctgccggctggagttctggatgggcgtgggcttggtggccctgcactaggagctgccggctggccttgccggccggggctgtgaggkgcttagcacctgggccagca

SEQ ID NO: 500329 - DNA, 646 bp, Homo sapiens
gctgacactctggttgcagtattgtgacccggaatagaagacccagttaaaccctgcccagagccttggctcatggaaacagataataactggatggtgttttaagctgctcagtttgcactggtaaatccaccaacaggaaaataatatagaagttaaatgggccaggcatggtggctcatgcctgcaatcccaacactttgggaggctaaggtgggtggatcacaaggtcaggaggtcgagaccatcctggccaacatggtaaaaccccgtctctactaaaaatacaaaaattagccagrcgtggtggcatgcacctgtagtcccagctactcaggaggctgacgcaagggaatcacttgaacccaggaggtggaggttgcagtgacccgggaccatgccactgcactccaacctgggcaacagagagagactccatctcaaaaaaaaaaaaagttaaatgaatacttttgaccattgatggaagttgctttcattccctcttacttaatcatctttatcttagccctgaaagagggatgttttaatcccatttgtaacaagtgagtctgaggcccaggaaagtgatagaatttagcaaagtccaccttgctacctggtggccccagctagaactctgccccag

SEQ ID NO: 500330 - DNA, 646 bp, Homo sapiens
gctgacactctggttgcagtattgtgacccggaatagaagacccagttaaaccctgcccagagccttggctcatggaaacagataataactggatggtgttttaagctgctcagtttgcactggtaaatccaccaacaggaaaataatatagaagttaaatgggccaggcatggtggctcatgcctgcaatcccaacactttgggaggctaaggtgggtggatcacaaggtcaggaggtcgagaccatcctggccaacatggtaaaaccccgtctctactaaaaatacaaaaattagccaggcgtggtggcatgcacctgtagtcccagctactcaggaggctgasgcaagggaatcacttgaacccaggaggtggaggttgcagtgacccgggaccatgccactgcactccaacctgggcaacagagagagactccatctcaaaaaaaaaaaaagttaaatgaatacttttgaccattgatggaagttgctttcattccctcttacttaatcatctttatcttagccctgaaagagggatgttttaatcccatttgtaacaagtgagtctgaggcccaggaaagtgatagaatttagcaaagtccaccttgctacctggtggccccagctagaactctgccccag

SEQ ID NO: 500331 - DNA, 500 bp, Homo sapiens
cctcaaaatgcactgggatccctcgtaaccaggtagctccccatctctaactctgacctgctaagacagaatcttgtgcgtgtggcccaggactgtacatattgaaacagkcaatgacctgggaactatttctgaacacccctaggtttcccatgtttgccctttcctttcacatttggacccctttgtgtgctgaccactgggctgtttcacatggacataacataaaaaagacaggccaggtgcattggctcatgcctgtaatcccagcactttgggaggccgaggtaggcgaatcgcttgaggccaggagttcaagatctgcctggccaacatgagtaaaccccgtctctaccaaaaatatgaaattagctgggtgcggtgatgcacacctttgatcccagctactcaggaggctgaggctggagaatcccttgagcccaggaggcagagactgcagtgagccgagatcgcaccactacaccccagcctgggtgaga

SEQ ID NO: 500332 - DNA, 501 bp, Homo sapiens
gcctcaaaatgcactgggatccctcgtaaccaggtagctccccatctctaactctgacctgctaagacagaatcttgtgcgtgtggcccaggactgtacatattgaaacagtcaatgacctgggaactrtttctgaacacccctaggtttcccatgtttgccctttcctttcacatttggacccctttgtgtgctgaccactgggctgtttcacatggacataacataaaaaagacaggccaggtgcattggctcatgcctgtaatcccagcactttgggaggccgaggtaggcgaatcgcttgaggccaggagttcaagatctgcctggccaacatgagtaaaccccgtctctaccaaaaatatgaaattagctgggtgcggtgatgcacacctttgatcccagctactcaggaggctgaggctggagaatcccttgagcccaggaggcagagactgcagtgagccgagatcgcaccactacaccccagcctgggtgaga

SEQ ID NO: 500333 - DNA, 500 bp, Homo sapiens
cctcaaaatgcactgggatccctcgtaaccaggtagctccccatctctaactctgacctgctaagacagaatcttgtgcgtgtggcccaggactgtacatattgaaacagtcaatgacctgggaactatttctgaacacccctaggtttcccrtgtttgccctttcctttcacatttggacccctttgtgtgctgaccactgggctgtttcacatggacataacataaaaaagacaggccaggtgcattggctcatgcctgtaatcccagcactttgggaggccgaggtaggcgaatcgcttgaggccaggagttcaagatctgcctggccaacatgagtaaaccccgtctctaccaaaaatatgaaattagctgggtgcggtgatgcacacctttgatcccagctactcaggaggctgaggctggagaatcccttgagcccaggaggcagagactgcagtgagccgagatcgcaccactacaccccagcctgggtgaga

SEQ ID NO: 500334 - DNA, 500 bp, Homo sapiens
cctcaaaatgcactgggatccctcgtaaccaggtagctccccatctctaactctgacctgctaagacagaatcttgtgcgtgtggcccaggactgtacatattgaaacagtcaatgacctgggaactatttctgaacacccctaggtttcccatgtttgccctttcctttcacatttggacccctttgtgtgctgaccactgggctgtttcacatggacataacataaaaaagacmggccaggtgcattggctcatgcctgtaatcccagcactttgggaggccgaggtaggcgaatcgcttgaggccaggagttcaagatctgcctggccaacatgagtaaaccccgtctctaccaaaaatatgaaattagctgggtgcggtgatgcacacctttgatcccagctactcaggaggctgaggctggagaatcccttgagcccaggaggcagagactgcagtgagccgagatcgcaccactacaccccagcctgggtgaga

SEQ ID NO: 500335 - DNA, 500 bp, Homo sapiens
cctcaaaatgcactgggatccctcgtaaccaggtagctccccatctctaactctgacctgctaagacagaatcttgtgcgtgtggcccaggactgtacatattgaaacagtcaatgacctgggaactatttctgaacacccctaggtttcccatgtttgccctttcctttcacatttggacccctttgtgtgctgaccactgggctgtttcacatggacataacataaaaaagacaggccaggtgcattggctcatgcctgtaatcmcagcactttgggaggccgaggtaggcgaatcgcttgaggccaggagttcaagatctgcctggccaacatgagtaaaccccgtctctaccaaaaatatgaaattagctgggtgcggtgatgcacacctttgatcccagctactcaggaggctgaggctggagaatcccttgagcccaggaggcagagactgcagtgagccgagatcgcaccactacaccccagcctgggtgaga

SEQ ID NO: 500336 - DNA, 414 bp, Homo sapiens
aaaaaaaaaaaaaaaaaaaaaaacaaagagacagagatgatccttcctttatggagctctcagtaaaacaagaaagctcatgatgtcctgtcatttgtcagaaatatatttggtatatgtagctggggtcacatgcttgacatgcctattgaaagcttctgggtaggaagagaacaatcatcacagcatcacagcctggcataactgtctcccaggacaggtctccctggggagactgaaaccacaactctgaaatcagagcttaaatccaggttctacatttcactcagtaatgtacatgatgtargacagttttcatattagttatctattgctgtgcaacaatattactgcaaactttgtggcttgagacagcacacagttatcactatgtggtttctgtgggtcaggaat

SEQ ID NO: 500337 - DNA, 351 bp, Homo sapiens
ctgctgtcttttatgataactgcatctaccttgcctttggggattgagtgctctgatcacttggccccagcccctgtagtgtgcstatgtcacttaccctctttatacctcagtctcctcctctataaaatgggcatcctcattgcacccacccccagggctgctgtgagtatagatgcattagcatatggaaagtaatagaagagggtctcaaagtccatgtgtcgttatcagaattatttcatgatggggagagctggaggagagaggaaggtgctgagcagacccacgtgctctcccaccagtgtttcctgagcacctactatgtgctgcccactgtgagagctgtta

SEQ ID NO: 500338 - DNA, 351 bp, Homo sapiens
ctgctgtcttttatgataactgcatctaccttgcctttggggattgagtgctctgatcacttggccccagcccctgtagtgtgcgtatgtcacttaccctctttatacctcagtytcctcctctataaaatgggcatcctcattgcacccacccccagggctgctgtgagtatagatgcattagcatatggaaagtaatagaagagggtctcaaagtccatgtgtcgttatcagaattatttcatgatggggagagctggaggagagaggaaggtgctgagcagacccacgtgctctcccaccagtgtttcctgagcacctactatgtgctgcccactgtgagagctgtta

SEQ ID NO: 500339 - DNA, 351 bp, Homo sapiens
ctgctgtcttttatgataactgcatctaccttgcctttggggattgagtgctctgatcacttggccccagcccctgtagtgtgcgtatgtcacttaccctctttatacctcagtctcctcctctataaaatgggcatcctcattgcacccacccccagggctgctgtgagtatagatgcattagcatatggaaagtaatagaagagggtctcawagtccatgtgtcgttatcagaattatttcatgatggggagagctggaggagagaggaaggtgctgagcagacccacgtgctctcccaccagtgtttcctgagcacctactatgtgctgcccactgtgagagctgtta

SEQ ID NO: 500340 - DNA, 442 bp, Homo sapiens
accaggcccagctttggaagaaagccctttctccccctttagcaaattcggtgtcatttttttttcttttttgagacggagtttcacttttgttgcgcaggctggagtgcaatggtgcaatctcagttcactgcagtctctgcctccttggttcaaacgattctcctgcctcagcctcctgagtagctgggactacaggcacccacaaccacacccagctaaatttttttttgtatttttagtagagagggagtttcaccatgttggtcaggttggtcttgaactcctgacctcaggtgatccacctcggcctcccaaagtgctgggattacaggcatgagccaccaygcctggctggaattctgtgtcattctgcatacttatcatgacttcaagcatccaggactctgtcctgggtatcctgagcctgagggtgtatgtg

SEQ ID NO: 500341 - DNA, 614 bp, Homo sapiens
ttaagcagaatatcgtgactcctaagtgatgtcaagtgggttgaggataaggcaggatgtccaaagaatgtttaagtcatccaaacattaacaatcagcaagtattaatggagcacttaccttgtttcaggtgctgtggtaggcagagtgtactgagaggtccagaaggcatggatcctcactacaaaaattcagaataagagacaaaggaacataggcaaatgagaaatttgtagggagctgtgtgtagcaaaaatatttgcacagtttactccaaagagtaagtaagaaactatgtctcaatgatgcagtgggtagttagttggtgcacaggcttgggaagaacctagatatcctgatgcctgaactaattttgcaaagatacagatattttcaaggtggacatgtgtagaacatcattctatgcagatggaactgtggtggacatgtttgargtggctatagcttcaattaaaagaaataagcactttggagaaacaaaccaggaatggattgtgagtcttgactttgataatggatcctcttgctacatcattagctgacctccagacctggttcattgtgcctccatttaagagaacgtggttaaatag

SEQ ID NO: 500342 - DNA, 480 bp, Homo sapiens
tgctaaggtctttactaaaggtgagtcagaaaaactgggtattttatgcaatasagtaagaaggcccataggcaagtatgttcctgacaccaccttctaggataagccctgagattctggttactcctgtcctaaacttgtctctcactcctgctgttggagagctaccatgagagaagaaccatagtgaagtggttaagagtgtgcacccagcgactggccagatgaccacaaaccatcactatctaatactgagcaagttacataatgtttccgagcctcaactttctcatctgtaaaatgggtatgttgtcattcattaatcaaattctaggtgagcatatactaaacaccagagacacaaatgagaatcagaacaggcacgtccctggcccttatggtgaccacagtcttgaaggggaaggatgacacacagagaaataggaagccgtagctgagctagtttctaccacagagagg

SEQ ID NO: 500343 - DNA, 244 bp, Homo sapiens
gatcagcgaggacagggtccamgcgcggcctcttactggttgtgtggaccggcattggcccgcttgcaacctgaaagagaggaaacaacacaggttagaagttcctcagcatggagccaacgtgaaaatcaagcacatccaaagacaaggtgcacacgccatgaaattcttagtacagtatcgacaggcggtccttggaagtagggacagaccctccacctgagtgctgatcaggacaagacac

SEQ ID NO: 500344 - DNA, 483 bp, Homo sapiens
ccctctagattttttttttkttgaccattgcttatttggtttgactttcattttcttccccattgtggtagtcattttctgaatgcctgttagtttgtccatctctctcctctgtagtccctagagtcagatgaactcctctgcaggtgcaatggtgtaacactctctagtgctgaattttgagcaggagaaagagagcaagagtgaccagtacctttggaaactctggcctcctgagaatttggtgtctcctctgcaaaggttgcatacctgttaacccacaggcaggagagacagacaagccagaatcatgatctgttgagcttgagtttaatatctgatgcacagagatcactgagttttttgataagaattagagggggaagaaatggccacagagaacaatttctatctccaggtgaggattcaggagataattctgtgaacagaacttcctgagaactgagatgggggaaatcgctg

SEQ ID NO: 500345 - DNA, 483 bp, Homo sapiens
ccctctagatttttttttttttgaccattgcttatttggtttgactttcattttcttccccattgtggtagtcattttctgaatgcctgttagtttgtccatctctctcctctgtagtccctagagtcagatgaactcctctgcaggtgcaatggtgtaacactctctagtgctgaattytgagcaggagaaagagagcaagagtgaccagtacctttggaaactctggcctcctgagaatttggtgtctcctctgcaaaggttgcatacctgttaacccacaggcaggagagacagacaagccagaatcatgatctgttgagcttgagtttaatatctgatgcacagagatcactgagttttttgataagaattagagggggaagaaatggccacagagaacaatttctatctccaggtgaggattcaggagataattctgtgaacagaacttcctgagaactgagatgggggaaatcgctg

SEQ ID NO: 500346 - DNA, 483 bp, Homo sapiens
ccctctagatttttttttttttgaccattgcttatttggtttgactttcattttcttccccattgtggtagtcattttctgaatgcctgttagtttgtccatctctctcctctgtagtccctagagtcagatgaactcctctgcaggtgcaatggtgtaacactctctagtgctgaattttgagcaggagaaagagagcaagagtgaccagtacctttggaaactctggcctcctgagaatttggtgtctcctctgcaaaggttgcatacctgttaacccacaggcaggagagasagacaagccagaatcatgatctgttgagcttgagtttaatatctgatgcacagagatcactgagttttttgataagaattagagggggaagaaatggccacagagaacaatttctatctccaggtgaggattcaggagataattctgtgaacagaacttcctgagaactgagatgggggaaatcgctg

SEQ ID NO: 500347 - DNA, 634 bp, Homo sapiens
tcagtagcctcagttgacttccaagtatctattgtaagaaatccaaatttgtggcagggcgtggtggctcatgcctgtaatcccagcactttgggaggccgaggcgggcagatcatgaggtcaggagatcaggaccatcctggctaatatggtgaaaccctgtctctactaaaaatacaaaaaattagccaggtgtggtggcatgtgcctatattcccatctactcgggaggctgaggaaggagaatcacttgagcccaggaggggagrttgcagtgagcccaggtcgtgccactgcactccagtctgggcaacaagagtgaaactccatcaaaaaaaaaaaagaatgaaagaaagaaagaaaaagaaggaaagaaagaaagaaagaaagaaagaaagaaagaaagaaagaaagaaagaaagaaagaaagaaagaaaaaagaaagaaatccaaatttgtaaatcctttcccatttgctatttcttttggttccccattagagttcctataaaagttactgatgaagcactaaaacctccctgactttccattatcttccaataaggcttaaactttttgataacagtcctacaattattaatgagttttcagcctacagaagtacaatttagca

SEQ ID NO: 500348 - DNA, 634 bp, Homo sapiens
tcagtagcctcagttgacttccaagtatctattgtaagaaatccaaatttgtggcagggcgtggtggctcatgcctgtaatcccagcactttgggaggccgaggcgggcagatcatgaggtcaggagatcaggaccatcctggctaatatggtgaaaccctgtctctactaaaaatacaaaaaattagccaggtgtggtggcatgtgcctatattcccatctactcgggaggctgaggaaggagaatcacttgagcccaggaggggaggttgcagtgagcccaggtcgtgccactgcactccagtctgggcaacaagagtgaaactccatcaaaaaaaaaaaagaatgaaagaaagaaagaaaaagaaggaaagaaagaaagaaagaaagaaagaaagaaagaaagaaagraagaaagaaagaaagaaagaaagaaaaaagaaagaaatccaaatttgtaaatcctttcccatttgctatttcttttggttccccattagagttcctataaaagttactgatgaagcactaaaacctccctgactttccattatcttccaataaggcttaaactttttgataacagtcctacaattattaatgagttttcagcctacagaagtacaatttagca

SEQ ID NO: 500349 - DNA, 523 bp, Homo sapiens
tttgggcacagtgtcaggacacccaggttcggggccaagctctgcctctcactaactgtgacttgggacaagttgctcagacccatcttttcttctaggtgttttgcctttatctctccattaagccaagacactaaaaagcagtctcttttttatctccccttgaagaattytttggcctgaaatcccagggtcctctgtgggtgcggccagccagcacccacctggccggctgtagaacgctcatgagggcctggctgccgcctggctgcacccaccttgtgtccccttctgagcactgagatcctcttcagtcaccttttcttgaccttgcaactggtgtgactttagctcaaaacaaagataaactttggaaaatgtcacaactcctttttcattttccctcttagtacaatcagagctgaacctacagccccgtcttaaaaatcacgtcagatctgacagcacttgcttgcttccctgctggcttctggtcctgttgcaattctgcacatttgttctc

SEQ ID NO: 500350 - DNA, 523 bp, Homo sapiens
tttgggcacagtgtcaggacacccaggttcggggccaagctctgcctctcactaactgtgacttgggacaagttgctcagacccatcttttcttctaggtgttttgcctttatctctccattaagccaagacactaaaaagcagtctcttttttatctccccttgaagaattctttggcctgaaatcccagggtcctctgtgggtgcggccagccwgcacccacctggccggctgtagaacgctcatgagggcctggctgccgcctggctgcacccaccttgtgtccccttctgagcactgagatcctcttcagtcaccttttcttgaccttgcaactggtgtgactttagctcaaaacaaagataaactttggaaaatgtcacaactcctttttcattttccctcttagtacaatcagagctgaacctacagccccgtcttaaaaatcacgtcagatctgacagcacttgcttgcttccctgctggcttctggtcctgttgcaattctgcacatttgttctc

SEQ ID NO: 500351 - DNA, 523 bp, Homo sapiens
tttgggcacagtgtcaggacacccaggttcggggccaagctctgcctctcactaactgtgacttgggacaagttgctcagacccatcttttcttctaggtgttttgcctttatctctccattaagccaagacactaaaaagcagtctcttttttatctccccttgaagaattctttggcctgaaatcccagggtcctctgtgggtgcggccagccagcacccacctggccggctgtagaacgctcatgagggcctggctgccgcctggctgcacccaccttgtgtccccttctgagcactgagatcctcttcagtcaccttttcttgaccttgcaactggtgtgactttagctcaaaacaaagataaactttggaaaatgtcacaactcctttttcattttccctcttagtacaatcagagctgaacctacagccccgtcttaaaaatcacgtyagatctgacagcacttgcttgcttccctgctggcttctggtcctgttgcaattctgcacatttgttctc

SEQ ID NO: 500352 - DNA, 455 bp, Homo sapiens
ctgtagcactagagcattcctaaaacgaatgcttcagagaccatgacaaaatgcacattccctctacaggagtgacatatggaatgattatcaacttggatgtttgaggattggcrgcattagctccaccactgcagagttctgaagggtaggacacagggcaagaaagtgctggctgggaggaaggaagtgaaagtgatggagaatatggcaaacaccttcaagtctatggacctattcctgatggctctcctgttccacagggagcactgtcatgcctgatgcagggggaccacgctggttggagacgctgaaatggaaggggagggggaaaagaagatcgtgcccacgtcaaaccctccaggtgaaaaaacaaagcaaatctgaaacgcattttgcttttggagtaacaaaaaagtaaatggagatggtgttcctatttttgtctttatttt

SEQ ID NO: 500353 - DNA, 455 bp, Homo sapiens
ctgtagcactagagcattcctaaaacgaatgcttcagagaccatgacaaaatgcacattccctctacaggagtgacatatggaatgattatcaacttggatgtttgaggattggcagcattagctccaccactgcagagttctgaagggtargacacagggcaagaaagtgctggctgggaggaaggaagtgaaagtgatggagaatatggcaaacaccttcaagtctatggacctattcctgatggctctcctgttccacagggagcactgtcatgcctgatgcagggggaccacgctggttggagacgctgaaatggaaggggagggggaaaagaagatcgtgcccacgtcaaaccctccaggtgaaaaaacaaagcaaatctgaaacgcattttgcttttggagtaacaaaaaagtaaatggagatggtgttcctatttttgtctttatttt

SEQ ID NO: 500354 - DNA, 530 bp, Homo sapiens
gtggggtttgcaagcagagggatgcctgtctcccagctctggctgtgttgctctagccmaacagatgcttggaacaaataaacaggccagcaagtcttggagaggttgtcaggctgagttgagacatgctgtcccttttgaaagctgttgatgtacttagaaggatcagcatctggggccagatcatctctgactctacattaaagccagagttctcatcttcttcataatgatggtatgtactagtgtttaatgctgcattcttttcaaagtcccaagatcaccagccaacaattagttaactggggccctgcagtcagggtcttggactccaagtcctgagtgcttttcctggccaatgcagattcacaacttcgggggttagtctcgagagcattagaagtccctcagaaattgtgagctgtgaggggactgactgtgatttcactggggttacatgtcccttgcttcttttaggagaacaagcttgggacactattggacacacttctgagggtttggatcagagg

SEQ ID NO: 500355 - DNA, 585 bp, Homo sapiens
acctggtggccccagcagtccgggagctgaggatgccactgcctgcctgtgggacaggtgcagagtgaggccaatggaaggagacagagccggaggcaggggcaaaaagagcaaatcattggacttagtgtcagaaaatggacttttgagggcactggtggtgacctgaagtctttccatgccatgtatacaccaacatcatcctggggatttgctggagctaccactagcttagtgcctcgggyggcattcagcttggcttctttgtgtttccaacgacacactcactcactttcacaatgagtttcaccacaggctgtacccagtaacctgctgatcttaaacaagctggcccatctacccctctgcttctcaggggctccagctatactccctgattagaaatgcagcttcacagtctctctaaagtattccttcatgagtctgtttagtttgcagccaaaaacacagagggtccccttgggcaaataagatgttcattcatctgcaaagaccccacttacacacaacattttctgtacgtacctgtcgtctagagtagtggtttccatgctgtgtcccgaa

SEQ ID NO: 500356 - DNA, 612 bp, Homo sapiens
tgccgcagcatttctagagctgcagcaccttgtccttctcttccccatggctggctgcagagtggagctccgtctttctcctctgccatgtcactttcaaagacagtcacataggcccttcaagtttgtcagagtttttggtttttgtttttgggaggtttgtttgtttgttgctttgcatcatgaaaaaaaatgggcataactgaaataacaaacaaggaacaaaatctagtttctgatcatcatagccctcatgctacaatgctgatgcattactgagatggtatctagttccagtctctactttcattcttcaagttgttgtttcccaaatatcccatcattttctgacctcctcattagagaaaggaatgcagagtctttcctattcaaagtttttttattctgtgtatgttggcaaggaaagaaactaggacaaaacaaatgtgccctttgtctttagtgattgatttgcctctctgtgaatgtcaatgctagacattagagaggctttacctaattcccaatctccccaccaatatatgctctctaaatactacatattttccctttacagcagrgtttctcaaccttgacactgttgacattttg

SEQ ID NO: 500357 - DNA, 610 bp, Homo sapiens
ctgatttttgtatttttagtacagaggggatttcaccatgttggccaggctggtcttgaactcctgacctcaagtgatccgcctgccttagcctcccaaagtgctgggattacaggtgtgagccaccacatccagacaaatttcattattaaaactgacatttgtgggcactgagaaccttgttctcctcctrcgcttgtgctctcctcctatttgtcagatggacaaatgcagtgctttttaaagcttccacatgtgggggacctatatctgcattctaggctgttggatccaaatcctacaagttgttctggagagcaaataatcattaagtttttgtagattcactatagaaatatatgcttccaagaatgtgtgtaggagaaataaacataaaggacataaggaaaaagaaaaaataaaaaagtcgttgttcaggttccagaggttgttgcttggctttgagcaaagcactgaattcctcctgtctgcaaggcagcctctgcccaccctggccctgtgctgtgaagtgacaggtaagcccctgacagctagagaaattaacacagaagcaaggctctatgtttcctcccctttctgagcagtggag

SEQ ID NO: 500358 - DNA, 568 bp, Homo sapiens
ctgatttttgtatttttagtacagaggggatttcaccatgttggccaggctggtcttgaactcctgacctcaagtgatccgcctgccttagcctcccaaagtgctgggattacaggtgtgagccaccacatccagacaaatttcattattaaaactgacatttgtgggcactgagaaccttgttctcctcctacgcttgtgctctcctcctatttgtcagatggacaaatgcagtgctttttaaagcttccacatgtgggggacctatatctgcattctaggctgttggatccaaatcctacaagttgttctggagagcaaataatcattaagtttttgtagattcactatagaaatatatgcttccaagaatgtgtgtaggagaaataaacataaaggacataaggaaaaagaaaaaataaaaaagtcrttgttcaggttccagaggttgttgcttggctttgagcaaagcactgaattcctcctgtctgcaaggcagcctctgcccaccctggccctgtgctgtgaagtgacaggtaagcccctgacagctagagaaattaacaca

SEQ ID NO: 500359 - DNA, 614 bp, Homo sapiens
actaattttgtccaggaagactctcagagaagcctccatgtggaaggtttggctgacccagggtttggaggagtattgcatttcattacatacgggagccaaaattcaagactagctagcaggagaagctagcaagtgtgcacacacttcattttccccaccatggccacaaggatgtcctgcccactgctgctgccctttgtgatgacttccttgaacgcttgtccggagatttcaggcagtggcaggatgggcagagactggagaggagggatcagccctgctgttggcgtatatctcctgtaaggcacctcactgatgaggaacagagcagccactattcactgtctttttgaccactcagaacccacatggatgtgcaaaaattgggaacagaattggaagagaccttacaggtcatctcttccagtctctcacctgacagagaggtctgttctccagcacagaacatcarccagcctccgcttgcaccgtctagagacaggcaggcacctttctgggcagcgtgttccctgtggtgtggccttgttaaaaagcacttgcttattctgagtaagatgacataggtctgccctctgaacagcactgtaatc

SEQ ID NO: 500360 - DNA, 614 bp, Homo sapiens
actaattttgtccaggaagactctcagagaagcctccatgtggaaggtttggctgacccagggtttggaggagtattgcatttcattacatacgggagccaaaattcaagactagctagcaggagaagctagcaagtgtgcacacacttcattttccccaccatggccacaaggatgtcctgcccactgctgctgccctttgtgatgacttccttgaacgcttgtccggagatttcaggcagtggcaggatgggcagagactggagaggagggatcagccctgctgttggcgtatatctcctgtaaggcacctcactgatgaggaacagagcagccactattcactgtctttttgaccactcagaacccacatggatgtgcaaaaattgggaacagaattggaagagaccttacaggtcatctcttccagtctctcacctgacagagaggtctgttctccagcacagaacatcaaccagcctccgcttgcaccgtcyagagacaggcaggcacctttctgggcagcgtgttccctgtggtgtggccttgttaaaaagcacttgcttattctgagtaagatgacataggtctgccctctgaacagcactgtaatc

SEQ ID NO: 500361 - DNA, 633 bp, Homo sapiens
gagggcttcggagataaatctttgttttataagattcttccataccgtacagataggaggtaagtgatgaaataagcgaagaattgaaaaggatgaccaaaaatagcccaccagtgtatatcagtacaacctgaatgaaggccagtttgacaacatctagcaaatgatttttaaaataacatacccatcaaaagattggaagacaacctaaatgcccattagcagcagactagttaactcagtgtggtatatccatataatggctgttaaaaaggatgaagtatctctatacatactgatatggaaatatctccaaatatattgttacactggaaagatgcagaattacatgtacagtctgctacagtatgtggggaaaatcacatgtgtgtatattaacgtaaagagtagttttggaaggacacttaagaaactagatacaatgactgcctctgggaaggaaaacttattttcactgtatttcattttgtaacttttcaaattttatactatacgcatgtattacctattgaaaagcaaagtatttttaaaatagtctttcattttgaaaatacaattcactgtagcttgagagttaaaaaaaaaaarttaaacagctattttttcagttaa

SEQ ID NO: 500362 - DNA, 540 bp, Homo sapiens
ctgaataaattccaagacagaagcctgcgtatccgttctttgatcagccccttgtatgttttatttttaatcatcagagaagtctgagcttgctgctctggaggactgcctatcggtatatttaacaataggaagccaccgttagactcacagaaaacatgccatagatcaatcatggactgtctacccttagattaagtatcctgtttcagttcaatctgctgtagccagttaggatagggttacatggtatagaatatgaccatccataccatttttctcctgggaaaaaaatggcagttctggaattataacaacaaaaagcaaagatgtaacctaattcctaagtaaaggcttgagtggttttcaatttattgcaagaaaaattggcaattctaatatgaataaaacaagaygacaggatgtgaaataaggggagtataagatgaaaacttatactacaaatacatgttacattctgggtttttagcggttgtctttgtgttcacctttacttgagctatcttgagtggatctttg

SEQ ID NO: 500363 - DNA, 619 bp, Homo sapiens
ctatccatggttttggatatccacgggggggaggttggaacgtaagcctggtggataagggggactactgtacatatattaagtatctaatacrtaagtgttgagtatatggttttcctaattcgtcctttccattcaatgaataaattcagaaggttaattaatccaaatatttatagaatgcctgcaatgtgtcaggcattttttttttttacctgtgggataaatccatacacaaaaaagaaaaaaattctgtgcttatgaagcttactttctagtgagtaatgtaagctcatgtattgaaattcagatgctccagccccatgctttagacaaggttcctgcagtcttccctatcgctttattatccagaccccagttttcaaggctaggactattcttggcatccttacagatcttcctcttgattgtcaaggcttggggagtagaggagggagtgaaatgacttgagaggcatctcagttctctcagaattgttctctcataagccatcctgtgccctgaacttctttctgcccagttacacgtttgttagctgttttggagccaacttctggagacagtatttgcaagtctgcatgcaggccgagaaaacgga

SEQ ID NO: 500364 - DNA, 641 bp, Homo sapiens
gtatgtttccttggagccagctttttttttgtatccccttttagtgtaaagagcattttctttctaggtttccactaggataaatagtcctaaacgtgatttttaaaatgctctgtggttgtttcaaagtcaattgaaggatgcaggtcaattttcttcaggtttatttttcttttcctcatttgaagtgtatgctgagtccacttgccaagatttactgtggggtcaacccaataaaatttgccaggactgaactggactgtaggatccaattcaagagaggaaattagaatcaagagagtattgataatttaataaaaaatgataattgagaagatttcaatgaatggaatcaatatttctctaagaatatttgatattatttaatttcctactgttattataccagaggagtttattctcattgcatttaaataatgaacagattaatttatgtgttgggaagataawacagtgattatttttcataataagagggcatttttcttctaacaggctatttttattatccatttcaatcatgggaaatttactaattatatatatattatataacatttgatgaacacaggatagatattgataacctgtttatatgtttgaaactataataataaaat

SEQ ID NO: 500365 - DNA, 556 bp, Homo sapiens
tcttaaagtttgagtgggcatgggacctaagatggctcactcacatggctgagagttgagactgttaactgaaagttcaaccaaggctgtcaaccagattccacacatggcttctcatgttcatcaatgtgtggtggttgggttttaaagtaagtaactcaagggtgaatgtcccaaaagacccatgtgacagcagtaagaaattttctgaccttgcctccaccacatcctgttggtcaagagtgagttacagtgccaaccagatttgaggggaagataccacaaaaggatagatacatacacagaggagatggcattttttagattggatgccacatgttttatactcattagkggggaaataatgccaagaagaagcagaacatgcgaaatatttattttcctggtgtatgttgcttcaagagcatagacatatgctctagattcagccaaacacatatagctgccctaatcataaaagaagttgctaaggaagtcatttctggcaggaccttcaaccgtggcagtatcacttcatttccaaaggcagtagtgc

SEQ ID NO: 500366 - DNA, 556 bp, Homo sapiens
tcttaaagtttgagtgggcatgggacctaagatggctcactcacatggctgagagttgagactgttaactgaaagttcaaccaaggctgtcaaccagattccacacatggcttctcatgttcatcaatgtgtggtggttgggttttaaagtaagtaactcaagggtgaatgtcccaaaagacccatgtgacagcagtaagaaattttctgaccttgcctccaccacatcctgttggtcaagagtgagttacagtgccaaccagatttgaggggaagataccacaaaaggatagatacatacacagaggagatggcattttttagattggatgccacatgttttatactcattaggggggaaataatgccaagaagaagcagaacatgcsaaatatttattttcctggtgtatgttgcttcaagagcatagacatatgctctagattcagccaaacacatatagctgccctaatcataaaagaagttgctaaggaagtcatttctggcaggaccttcaaccgtggcagtatcacttcatttccaaaggcagtagtgc

SEQ ID NO: 500367 - DNA, 384 bp, Homo sapiens
atcaccagtgagtctcatgtggttggtgctgagcctgcatctgagcgagtgagccgaggcctggtggaattgccctgcggtctcggtccatcgcgtcctcctccagtgagagcccctgcccaagcacaccccacckgccacctgcctttacctttcctctgtggtccctgactctgaactcttcatgtaatgtggagttagtcagcactttatcgcttctagggaagcagaggtgagaatttaggggtggaccaagaaagctagatcctatctgtggagatccaggttgtgggaggaggtttcgtgacatttcttagctgttcctaaaacacgtgaagcttcacatggttgggcttggtaagaccatccaagaggctggggctg

SEQ ID NO: 500368 - DNA, 530 bp, Homo sapiens
gctggcctcggccacccagccgtctcctgtgaaggccatatttgataaacaggaacttgaggtacagccatgcagccttgacagtttttaatccacagcactaaattgtgaacactttttttctagatgtatattttcttaaggatctattctgaatgttaaatgatagtacgcaaataattctaatgattcattggggtttaaccatgtttgtgcatagtctgcagaacattataatactaaagactgagagggttgaagtttaaccttattttgggtttgtgtaaattgtgaaaaaatattaactagatgcagcatgggttaaacgctcacatcttcatgaagggatctttttccaggaagtagaattattcaaagaggctcgtcaggactctggcagccrtttgtctgtttcattcactcaggagcctcttgggggtgctctggtgccgccagcctctccgctctctccatgctgtggagcaggtgagggcagcagcgaggcacagggtcagggctacgggacgttc

SEQ ID NO: 500369 - DNA, 272 bp, Homo sapiens
tccacagaagttaaaaaaaaaaaaagatgggcaaacatctgtctcttttaattaaaaatggcttttgttttgccagacaagggagcttctgtcrcatacgcagttttcagaatggatgccttcccccagtgtctgaaatgctcccttttcctgttctgggaagccttttctgactcacaaatgttgacaagcaaaggcatttttgattttgatgctcacagttattataattattataaatttggccaggagtccctatcatctttgaacag

SEQ ID NO: 500370 - DNA, 272 bp, Homo sapiens
tccacagaagttaaaaaaaaaaaaagatgggcaaacatctgtctcttttaattaaaaatggcttttgttttgccagacaagggagcttctgtcacatacgcagttttcagaatggatgccttcccccagtgtctgaaatgctcccttttcctgttctgggaagccttttctgactcacaaatgttgacaagcaaaggcrtttttgattttgatgctcacagttattataattattataaatttggccaggagtccctatcatctttgaacag

SEQ ID NO: 500371 - DNA, 272 bp, Homo sapiens
tccacagaagttaaaaaaaaaaaaagatgggcaaacatctgtctcttttaattaaaaatggcttttgttttgccagacaagggagcttctgtcacatacgcagttttcagaatggatgccttcccccagtgtctgaaatgctcccttttcctgttctgggaagccttttctgactcacaaatgttgacaagcaaaggcatttttgattttgatgctcacagttattataattattataaatttggycaggagtccctatcatctttgaacag

SEQ ID NO: 500372 - DNA, 618 bp, Homo sapiens
tacttttaatagaaaaaaacattttttgatctccaactattgaaagacattatgctaagtcttttgcggagaagtccttttctatgatcattgctctctagggtttggatgaggagaggaagtgaatgcagatggctctctttgttctctggggccagggggcggtgaggcatgtgagtggttccacaggcgtctggagccagtggcagctgagcactggacgggcagcctttgaaggctgtggcagacagatgccagcagacaagcactctgctggtggtggaggcaggaggagaggagtgaacgtggtgagtctttggaagcacgttgagcagctctcctcttcttggagctcagggtttttcratgagtggtggggctgaagctagatgggcagctgacatcctgttacagagtacctgggagaccagggtgaaacttgaggcccacttggaaagctgtggtaggggccacatggtaagcattgaccttcgggtgatacacctgctaggaaggtataggagtatctgaaacaggagatgacagagatggagaattgctcctgcgtcaggtgatgagggggaaggcatgaaaagggaaagaaggttctggtggaag

SEQ ID NO: 500373 - DNA, 494 bp, Homo sapiens
caccccaaaagggacatggaggccaatggaccactcagaacacgatgaccaagcaatgctctaagaggaaacgcaacaatcggaaatgaatctccaaatgcagctcttggtctgtcgcacaggagtcaccagcttgtgtgatggagctgccttatattattacctatcatccctctaactgcccagtggaaaagcattcatgggtgtctagctcacacactatcagcttccaattctcccacccatttcactagccccatctcacttggccatacctaaaaragtaaaaacattttaaaaaatcttttcactctcaaaatgattaatgcacattaatggatggcagtgaggctctccatccacttgaagtggtataatagcaactctaactagacaatgaattgttagacacatataacacacacaatacctttcatagtgagagaacaagtaatcggcaaaaatctaggagaactgtagaacaccttcaataa

SEQ ID NO: 500374 - DNA, 492 bp, Homo sapiens
aggactggtttttgtttatcccttatggaaraaagtctaatggcagttagcaaggaaggaggtataatggggcatgtctgatctgtcatcccaagacatggtcgaaagctcagttttcaaggttactgtggagtccccttggccaagagggcatcttttcagtctgttgggggtcttggggttttatttttatttcttgtcaccaaccatcagaatcccagctttaaacaccgttctttataaacgtttcacttccaatgccaaaagtgacctctttactttctaaatcttacattatttcattggtttctttgatacaggagctagaaagaaattatttaggcagatagtgagggtaagagagtcctccataagttttccttttaataaaaagcaaccccaaaatgatttcttttctaacagaaagcagcctgagaagtcaagctgtaagcatagataagcaagctaaaagctttcataggtaaatgctgg

SEQ ID NO: 500375 - DNA, 492 bp, Homo sapiens
aggactggtttttgtttatcccttatggaaaaaagtctaatggcagttagcaaggaaggaggtataatggggcatgtctgatctgtcatcccaagacatggtcgaaagctcagttttcaaggttactgtggagtccccttggccaagagggcatcttttcagtctgttgggggtcttggggttttatttttatttcttgtcaccaaccatcagaatcccagctttaaacaccgttctttataaacgtttcacttccaawgccaaaagtgacctctttactttctaaatcttacattatttcattggtttctttgatacaggagctagaaagaaattatttaggcagatagtgagggtaagagagtcctccataagttttccttttaataaaaagcaaccccaaaatgatttcttttctaacagaaagcagcctgagaagtcaagctgtaagcatagataagcaagctaaaagctttcataggtaaatgctgg

SEQ ID NO: 500376 - DNA, 581 bp, Homo sapiens
ccacataactaagggcaagttagttttatcacttttgggtaaagtgttccctatgaggggatttactcctttcataagaaaatcaatctcttcttccaacaaaagctactgaaccacttatgctgttacataaatgtgttaatggggaaatccattcaaacatctgcactaagcactctgtatttatacatatgaatgagattgagagacactgccattcctactgttttagcttccactatagtggaaaagggaaaatatatacaatatactctgatccaaggagaaagaagaaaacttcacwaaatacaaacttgttaaaaaataaagacaaaaagaccaagtttccctggggctgaagctgggttatgggcacagacaaacatagggcctctaagagagtcctgcatgctaggcaatatttagagttcttcctcaccagtagctcaggatgcattcagatgtaagctcgaggagtcacgcagcatctcttggcattattggttgtttgcacatccatgtctgtagctggactgcaaaccattctcaaggtggtaaatattcttccctggggctttgtg

SEQ ID NO: 500377 - DNA, 480 bp, Homo sapiens
tcaacatgaatatatatattcatgtaacactttgagaatatatgtaacactgcgaaagtgtcttcttttactattattgctatagaattcacttttccagactaagcatactcaattttcttcctattttcaaaatggaaataatttccttactcatcccttgaattctcttaaatcatctgtcattctcaaracaaaatgcaagcatggtcccattagcattaatttttcaagctgggcattgtcacgcaaagtcatattcatttttgatgggggttgttctgtgaattcactttcattcatttattcaacaaatactgaatacctaatatgtgccaggtattcttttaggtgctggagacatagcagtacaaaatgcagataaagctcattgcccccatgaagcttatattctaattaaatcttttggtttcaatggtataatgattatactattgctactatcaatgaacttatcca

SEQ ID NO: 500378 - DNA, 480 bp, Homo sapiens
tcaacatgaatatatatattcatgtaacactttgagaatatatgtaacactgcgaaagtgtcttcttttactattattgctatagaattcacttttccagactaagcatactcaattttcttcctattttcaaaatggaaataatttccttactcatcccttgaattctcttaaatcatctgtcattctcaagacaaaatgcaagcatggtcccattagcattaatttttcaagctgggcattgtcacgcaaagtcatattcatttttgatgggggttgttctgtgaattcactttcattcatttattcaacaaatactgaatacctaatatgtgccaggtattcttttaggtgctggagacatagcagtacaaaatgcrgataaagctcattgcccccatgaagcttatattctaattaaatcttttggtttcaatggtataatgattatactattgctactatcaatgaacttatcca

SEQ ID NO: 500379 - DNA, 550 bp, Homo sapiens
aactcatgggcaatgtgaataagttattgttggttataacatttttttaagtaagtttatttccttgtcaattcctagctttagttcctaaaccaggattgttagcaatggagaaaaaaaaaagtccatagctgaaaagttttcaaatgactaggattctgtgaaaaactaggtcttagcaaacaaaacatagatgttgttataagagtttatttctttctctgtatattacaccttttctgcaacgattgtgtaatatttttatwatcagaaaaaaaaaggtaaccatcaaaataaatttaaaatgtaaaccaacttctggtgaaattttttgggggaaagatctagccatatatccgaccagggtgcttttaactggaaacggacatttaactaggctttaaaacaactaattaaaaacagaaaatgcacagaactctctctggcagcctctgtgctaggacttcctgttgcaccccccgatatcacagcaatctctccatggagatgacccgcatgcagggcacccatttgctcccagtgcagaagc

SEQ ID NO: 500380 - DNA, 550 bp, Homo sapiens
aactcatgggcaatgtgaataagttattgttggttataacatttttttaagtaagtttatttccttgtcaattcctagctttagttcctaaaccaggattgttagcaatggagaaaaaaaaaagtccatagctgaaaagttttcaaatgactaggattctgtgaaaaactaggtcttagcaaacaaaacatagatgttgttataagagtttatttctttctctgtatattacaccttttctgcaacgattgtgtaatatttttataatcagaaaaaaaaaggtaaccatcaaaataaatttaaaatgtaaaccaacttctggtgaaattwtttgggggaaagatctagccatatatccgaccagggtgcttttaactggaaacggacatttaactaggctttaaaacaactaattaaaaacagaaaatgcacagaactctctctggcagcctctgtgctaggacttcctgttgcaccccccgatatcacagcaatctctccatggagatgacccgcatgcagggcacccatttgctcccagtgcagaagc

SEQ ID NO: 500381 - DNA, 521 bp, Homo sapiens
tcccatggccactgtcctgctccagcgtccaggctcctcctggagcccatggtctcctgcctccccgtgtcctagtgcgctgcagacaggcagcaagggtttccactctgaatctgagcctgccactacctgcttaaaaccatcagtgactccccaaatcgagttggaaatctcttcttgtctccacgaactggccccgggcctcttacactccctcagggcttggttggtccttgctttccggcaggaacacttaccccctggtcgtgcccttgccaccttctacacatccttcagaccctgggccttcccccagcccccagaccaggtcagtacccgctctcctgctctgttgtacaccctcacaacaccagcagcttycctgtgcacctgcaaactgaacccactgggagtggagtctgtttcctgtctgtgtgcccactggccatgactctgagggggcaggactaggtctgtcttgctcatccctggagccctgtgcccagcacagtgtctgccca

SEQ ID NO: 500382 - DNA, 521 bp, Homo sapiens
tcccatggccactgtcctgctccagcgtccaggctcctcctggagcccatggtctcctgcctccccgtgtcctagtgcgctgcagacaggcagcaagggtttccactctgaatctgagcctgccactacctgcttaaaaccatcagtgactccccaaatcgagttggaaatctcttcttgtctccacgaactggccccgggcctcttacactccctcagggcttggttggtccttgctttccggcaggaacacttaccccctggtcgtgcccttgccaccttctacacatccttcagaccctgggccttcccccagcccccagaccaggtcagtacccgctctcctgctctgttgtacaccctcacaacaccagcagctttcctgtgcacctgcaaactgaacccactgggagtggagtctgtttcctgtctgtgtscccactggccatgactctgagggggcaggactaggtctgtcttgctcatccctggagccctgtgcccagcacagtgtctgccca

SEQ ID NO: 500383 - DNA, 628 bp, Homo sapiens
aaagtactttatgaacaagtgttgtccctagtttgtactgatggggaaactgaggcatggggtgataaggtgactggcccaaggttacaaaatgagttattgacaactccggaaatagaagattttttaaattcccatactagatacatgtgggcattgacattcaaagcttccctcatgctatttcctttagtcctgtcctttggggattgcctctgagggtgagagggtagttcaggtttccrggcttgttcagcctttagtctctgtagaggcttccagcaagctgacaagttactgccaaaagtgagacagatggtattttttatgatgttgtccttagttggagactgctagtgattctcctcctcaggctactctttgaaaagctgtaaggtggtatcagctttatcgtggttggctgaggaaggatttgtacaagtaaatgttctctgccttattgtcattcctagggccgtctggtcttatagtaccctgaaggtgagggattagattatgctctgaatttgtatgcccatagtttgaggaaatgttttacttgagttttctgtgtgttgagatgaaagtctcccaggctaaagatttctgaactgcacgcaatgtctga

SEQ ID NO: 500384 - DNA, 644 bp, Homo sapiens
gcaaccagtattttctgaagacacctggcaaacagagcctgtttgcaatgagacttttctgccctttggtttgtcaatagaacatccaattcccaagagtggtcccaggagaarcaaaacttttcccaacaggttgcacatttaggggctgggatttcacccaagcccaggtacatgcccagttgtgggtgggggaattcaaatacaaccccaacaacaatactggactatttcatcatccaaggttgtacccctattctcagcagcccagcccaagcctggaaccaacactggactcacccctgactttcttgcctaacccagccccatcctgggttctccaccccagctacagctccatctcaggcctgtctaatccctacctcctccctgcctgaggtcaaggaccacgtctcatgcatttgaaccccatcccaagccctgtgtatagccaacagtgcctggacttattgaccccatgatcccagctagtctgaccctcaccaaccacacccagctctaggaccatgactccagcccagaggcccggcccagcccaccttgctactctccttgcccaagtcaactcatctagacctaggctgaggctcccagagctgcccgaagagccctgacaaactgat

SEQ ID NO: 500385 - DNA, 644 bp, Homo sapiens
gcaaccagtattttctgaagacacctggcaaacagagcctgtttgcaatgagacttttctgccctttggtttgtcaatagaacatccaattcccaagagtggtcccaggagaaacaaaacttttcccaacaggttgcacatttaggggctgggatttcacccaagcccaggtacatgcccagttgtgggtgggggaattcaaatacaaccccaacaacaatactggactatttcatcatccaaggttgtacccctattctcagcagcccagcccaagcctggaaccaacactggactcacccctgactttcttgcctaacccagccccatcctgggttctccaccccagctacagctccatctcaggcctgtctaatccctacctcctccctgcctgaggtcaaggaccacgtctcatgcatttgaaccccatcccaagccctgtgtatagccaacagtgcctggacttaytgaccccatgatcccagctagtctgaccctcaccaaccacacccagctctaggaccatgactccagcccagaggcccggcccagcccaccttgctactctccttgcccaagtcaactcatctagacctaggctgaggctcccagagctgcccgaagagccctgacaaactgat

SEQ ID NO: 500386 - DNA, 570 bp, Homo sapiens
caaaataattatacatttctatagcttatcctaacatttctgcactcttagattatcacgaattagtttccagatattttgttaagccactgtcatgtggctccttttaataatggacactacctgtatagtcaatttttaaatgagatataatgtacattctataaaattcactcttttaaagtataatgagcaaagtttcaaccagagttttataaaaatctccaattttttttttcttttgcgatacagtcttgctctttcacccaggctggagtgcagtggcatgatyttggtttactgcaacctttgcctcccgggttcaagagattctcctgtctcagcctcctgagtagctgagactacaggcgtgtgccaccacgcccagtgaatttttgcaccatgttggccagattggtttccaactcctgacttcaggcgatccacccacctcggccccctaaaattctgggattacaagcatgagccatcatgcccagccaaaaatctccagacttttaaattaacgtgtcttctattatttgattcccttccatctcctagaaaaaa

SEQ ID NO: 500387 - DNA, 570 bp, Homo sapiens
caaaataattatacatttctatagcttatcctaacatttctgcactcttagattatcacgaattagtttccagatattttgttaagccactgtcatgtggctccttttaataatggacactacctgtatagtcaatttttaaatgagatataatgtacattctataaaattcactcttttaaagtataatgagcaaagtttcaaccagagttttataaaaatctccaattttttttttcttttgcgatacagtcttgctctttcacccaggctggagtgcagtggcatgatcttggtttactgcaaccttygcctcccgggttcaagagattctcctgtctcagcctcctgagtagctgagactacaggcgtgtgccaccacgcccagtgaatttttgcaccatgttggccagattggtttccaactcctgacttcaggcgatccacccacctcggccccctaaaattctgggattacaagcatgagccatcatgcccagccaaaaatctccagacttttaaattaacgtgtcttctattatttgattcccttccatctcctagaaaaaa

SEQ ID NO: 500388 - DNA, 424 bp, Homo sapiens
gtgtggtggctcacacctgtaatcccagcactttgggaggccgaggtaggcggatcgcttcaggccaggagttcaagaccagcctgaccaacatggtgaaaccccgtctctaccaaaaaatacaaaaactagctgggtgtggtggtgtgcgcctgtagtcctagctactcgggaggctgaagcacaagaatggcttgaacccaggaggtggaggcttcagtgagctgtgatagtgctactgcactctagcctgggtgacagagcaagactctgyctcaaaaaaaaaaaaaaaattttttttcccagacaccagacccagtatgctgggcagctcacaactcttagcagccttgttcctcaaagacttcagccttctggaaggtaattttcatcaactggctggtatctactgccttttgagcat

SEQ ID NO: 500389 - DNA, 592 bp, Homo sapiens
ctgcatactgcaaatatattwaacatatcatattttttctcattaaatgtctattaaatgttttagaaattttacattcagacttagataaattagtgactattagaatggcagtggcaaagtgaccttataaagaattgttttcaatgttcaagcatactatttatttgtctgttaaattactgagtgatatggtttagctgtgtccccacccaaatctcatcttgaattgtaactcccacaattcccacgtgacatgggaggaacctggtgggaggagactgagttatgggggcagatctttcctgtgttgttctcgtgatagtgaatgagtctcacaagatctgagggttttaaaaacaggagttccctgcacaagctctctctttgcctgccaccatccatataagacgtgacttgctcctccttccaccatgactgtgaagcctacccagccaataaacctcttccttttgtaaattgcccagtctcaagtaggtctttatcagcagcatgaaaatggactaacacactgagcaacggaatacaactggatttagtctcatgagagtaacttgaattagacgaaaaa

SEQ ID NO: 500390 - DNA, 571 bp, Homo sapiens
cttgaatattgcattggaagttcttcagattcttgtcaaaatcacatttaagccaggtatacaaatataacttagaaataatagactatattcaatttccaaacccatcctaaaattccagcctctgtrttttttacattttcttccctcttcaacaaaacttggactaacatctctgaaggtcttcattaggtattccttcttccatgggcacattatttcctaataaagtggaattaaccaatctgtacgttgctattagattaattgtataacttttacctgtaaatccttagagtatgtgcttgtgatctgagacaccaaaatagatgcccctatatcaactaaggcagaccctaagcttaaggatgcagttacctacatgtcaagggttcaggacctggctgggaaggcaattgcctaaattcctacaattacaagaaaaaccacacttggtaaactccctaacaataagagctaccagatgtctcctaactctgatttacaacctagactactacaattctggttgaacacaggaccggcctcacaaacattctcttttgataaa

SEQ ID NO: 500391 - DNA, 626 bp, Homo sapiens
actagaaagataatttgataacttaaaagaaacctaccagaaacctacagcaaacattgagcttaatgttrgcacattaaaggaaaccctcagaccagcatgttcaatgttgctggggcaattcagtaatgaactgatgattccagtcagtgcaataagatcaagtcaaacagtagactataaatctgaagagaagaagaaataaaatataatttaattagttaatcagagtatctccctagagacacaaaagggatggcaaaaactgtagggtacctagggataattataacaagagtctcaagttctctactaagttgatttaaaattttagtctatatctttgttttttaaagactgaggaatgttttatcatcttcaacaatggaaatacttaacacttcaatataacgattatctacaaattgatatttgaattcaatttaattcctttcaaaaaaatttttaagtctttatatagaacattggccaacaaactatggcctgtgggccaaatctgacccattgcctgatttcttaaattaagtttattggaacaaagccctggctgtttgttcaaatattgcttatggctgttttttggtacaatggcaaagttgagtagt

SEQ ID NO: 500392 - DNA, 626 bp, Homo sapiens
actagaaagataatttgataacttaaaagaaacctaccagaaacctacagcaaacattgagcttaatgttggcacattaaaggaaaccctcagaccagcatgttcaatgttgctggggcaattcagtaatgaactgatgattccagtcagtgcaataagatcaagtcaaayagtagactataaatctgaagagaagaagaaataaaatataatttaattagttaatcagagtatctccctagagacacaaaagggatggcaaaaactgtagggtacctagggataattataacaagagtctcaagttctctactaagttgatttaaaattttagtctatatctttgttttttaaagactgaggaatgttttatcatcttcaacaatggaaatacttaacacttcaatataacgattatctacaaattgatatttgaattcaatttaattcctttcaaaaaaatttttaagtctttatatagaacattggccaacaaactatggcctgtgggccaaatctgacccattgcctgatttcttaaattaagtttattggaacaaagccctggctgtttgttcaaatattgcttatggctgttttttggtacaatggcaaagttgagtagt

SEQ ID NO: 500393 - DNA, 617 bp, Homo sapiens
agtcaggagaattttatagcagaaactatataaatcttgttccttctgcaactaaatatttacgctatttttcaacattcttaatctatttctttcatcacatctgacttagccattacataaacccatagcctctgggtgttattttcacactgatgaaaaagagcaaaatttgtacaaactgtatcacagtacattcccaaaactgtctcatttgcatgaaaaaggatgacctaaaattcaatgcttttgctttcagaaaagacagtctcctgtaatttaggaagaattcaggaatatgttttcttagcaagcacagacacacacacatacatgcacacaggtctagttgctgcccacaaatacatttggaaggcaatggtaatctatggttcagctcctttaattggtaagcctcaaatgaagaataggatgtttacctaagccagatgtaaaatacaatatgtggatagcaatgatctgtaatatttcacggctggctgcatccattacatcccaaatgcctycccaaagccagcatacaggtttcctctggctttgctgactgcctggggatcaccagaagccgaggggcaggtgtggtatttgtcaccttc

SEQ ID NO: 500394 - DNA, 392 bp, Homo sapiens
agcctgaataaagtggacactgtgttcttgtctcaactttcatactataaacaagcatctatgccaggcgcaagcggctcacacctgtaatcccaacactttgggaggtcaaggcgggcagatcacttgaggtcaggagtttgaaaccagccttgccaacatggtgaaaccctgtttctacaaaaagaaatgcaaaaatattagctgggcatggtggcgggcacctgtaatcccagctacttgggaggctgaggcaggagaattgcttgaatccaggaggtgaatgatgcagtgagccaaractgggccactgcacttcagcctgggtgacagagggagactccatttcaaaaataaaaaataaataagaataataaacaaacccaacaaat

SEQ ID NO: 500395 - DNA, 402 bp, Homo sapiens
tctcaacaccctttgggaatggttcctcccgtgcagcccattctccatttgctcccctctcccacctgtttctcaccctttcttgccctctgtgtgccctggaaaactgttcctggtagggtgcatygcctgagctcctttgccacctgcatgggcttctagttggggttgacagttgggaggtattggtaatggctcagaaggcaggaggaaagattggggtatgaatccttccccagccctcgcccctctgtagctctagtagtgccttaggccctccatgattacagatcctgccagggctccctacagagcactgtcttcttttgtgcttcttcagcctagaagtgataacgatttcctagtactgctcactgcctcagtcccccttattggtttcct

SEQ ID NO: 500396 - DNA, 311 bp, Homo sapiens
agcgaggggcaccccggggtcatcactttcatccagtcccagcatgggggccaaataaagcaagtcagggtagctgagctgggacagccgcacagcattagtgttgcagagggtgactgcygggaaggccagctccgtggtggccacttcgtttagaagggtcacgtgtgggtagctgaggtaataagcaacgcggtcccctacctggcacaggaaggcacccagtgccaggacaaaggccaccgcccacagcacctgccttggccctggacccccctccacaaaaatgtggttggtgccatggagggtgc

SEQ ID NO: 500397 - DNA, 311 bp, Homo sapiens
agcgaggggcaccccggggtcatcactttcatccagtcccagcatgggggccaaataaagcaagtcagggtagctgagctgggacagccgcacagcattagtgttgcagagggtgactgccgggaaggccagctccgtggtggccacttcgtttagaagggtcacgtgtgggtagctgaggtaataagcaacgcggtcccctacctggcacaggaaggcacccagtgccaggacaaaggccaccgmccacagcacctgccttggccctggacccccctccacaaaaatgtggttggtgccatggagggtgc

SEQ ID NO: 500398 - DNA, 524 bp, Homo sapiens
ccccgccccccgaacagtttagtttgttcgaggaattctctggtgggtggaagaaattgagatcagtgctgggggtggggcagggggacctgggtcaggtagagagtattgggaaccaacttggggttcccaccaaaaccctcagccttgcagactcccggcctcagtctctgaggctcccctaccgctaatttaccattccctgcccccaggcccctggcccctctgtgtgttctgattactcagggccactggttgaggaacttgagccatcagccaagtctccagggccaagaaggtgacccgaggggaggaggggaagcgggggagggaggtatagcagattaaygctttctctgcagggccagaggaggagcagtggggctagaccggggctaggtgggtctgcttgggcctccccattccttaagcatcccctagccccaggccatgttccccttcctcctcctctcttctccctccctgctcccaccatcttcccttctccatttgcagagacccta

SEQ ID NO: 500399 - DNA, 593 bp, Homo sapiens
ggcagtgacaaagtcccaagacttagaggtgctcctccccagccctccacttccaggcttggcccccagaggcacttagttactgaattccctattgctttagccaacagcccccaggtcaattagcttagagtagttcttagctgatagctgtctgagagagggatggagtcagaaatggctggggtctggggagaaggggaagaggtgagagaggaaattgggctacctgaaggatgtttgtgtgtatctgtgtctgagagagaggcaaaaggagacatctgagaccccaacccagggaccacccactggattcctgcaactgcaatgggctctgctcccrtctcctctctccacccacctgtgttcagtttaggcacttcctaggagagagggacagatgagaaggataaggcaggaggtggtagccatgaacccctagggcaggaacccttcccccaaagttcatgaaccccatgaacccctcctctaaagttactgtctccaggtcggcctcttctatccctctgcaatctgtgcatgttcccccttcccacccatgaagaccaccaggcctctgggtggggctgccc

SEQ ID NO: 500400 - DNA, 505 bp, Homo sapiens
gtgaaaacttttcttgtattttacccaaatttcccctcaatgacatttgggtctatacctgctcatgtgtccaatcaattcagaatctcattattcaagaaaagacctcagttttgtactgtcaaaagaaaagatgtgtttgagataatgttcttcagtttaaaaaaattaaagttgttaataattaatgtgttcaaatcattttatcagatatatgtgtatacgatatgatagcatatagtatatatatgtatatatatgcattatcacttaggatatgtagctgcagtatatttttagctttggaagacaggrctacttgtaagaaattgtgagaattaacaaacaaatggctcaaaatatcatacacatatgaaaattcctaaagggagaaaactctccattggcaaaatatgtcttggggaaattatggtttttttcttcccctgtaaaatctttgaagccatggaaaattccaaacaacaggtgagaaaactaaaaagta

SEQ ID NO: 500401 - DNA, 615 bp, Homo sapiens
tgtaggcccacagctaaagaagtttaaacmatgagcaatattctaggagctttcctagagtgtgtctggagggtgtttctgcatgagctggttgccacaccatccgcactgacctggcatggcagtaatctcagtaatctggtatcctttgtaaaaccccttgttagtaaatctccatcatgtttatatatggtaatgtcctacttgaccagaggtcaggctcccagcaccctctgttccctggaatgcaaactcagaaataagcagaaaaggccgtgtggtactcaaaatagctcctgtgtccccagactaaagccatggactttccttcttacaggcttatatgctctcacttagaaattgtttatttttatttaacagaggtcataataattgtgggtttcttggtttcccagctcaaagtagattaaaagtaacacattaggaagtcagagaaaatgttagaagcaagcaaactggcagctatgaagtaacagttcatagataaggaaggaggaagcagaaaattaaaaaacagattcagaactgcatgtatttcatataataatgcagtgctagtgattcataatgatagtgtagttatcaaaaagacca

SEQ ID NO: 500402 - DNA, 615 bp, Homo sapiens
tgtaggcccacagctaaagaagtttaaaccatgagcaatattctaggagctttcctagagtgtgtctggagggtgtttctgcatgagctggttgccacaccatccgcactgacctggcatggcagtaatctcagtaatctggtatcctttgtaaaaccccttgttagtaaatctccatcatgtttatatatggtaatgtcctacttgaccagaggtcaggctcccagcaccctctgttccctggaatgcaaactcagaaataagcagaaaaggccgtgtggtactcaaaatagctcctgtgtccccagactaaagccatggactttccttcttacaggcttatatgctctcacttagaaattgtttatttttatttaacagaggtcataataattgtgggtttcttggtttcccagctcaaagtagattaaaagtaacacattaggaagtcagagaaaatgttagaagcaagcaaactggcagctatgaagtaacagttcatagataaggaaggargaagcagaaaattaaaaaacagattcagaactgcatgtatttcatataataatgcagtgctagtgattcataatgatagtgtagttatcaaaaagacca

SEQ ID NO: 500403 - DNA, 596 bp, Homo sapiens
tcggtggctcatgcctgtaatcccagcactttgggaggccgaggccggcagatcacaaggtcaggagatcgagaccatcctggctaacayggtgaaacctcgtctctactaaaaatacaaaaattagctgggtgtggtggtgggccatgtaatcccagctactcggaaggctgaggcaggagaatgacctgaacccggaaggtggagcctgcagtgagccaagattgctccactgcactccagcctgggtgacagagcaagactccatctcaaaaaaaaaaaaaaaaaaaaaaaaaagaaaagagtctgaatcccaaatgccaaagtcactgggctaaggtgaatgagaaggaggctagctggacattgtgggagaatgtattcctcatatgaagggagaaatcactgcctttttcagcctattgtggacatatctatcatttttttcaagatcaggaacaggacttcctcttgtgttaatgaaagactatgtaatttggacgaatactcccaatgagaacaacaagaaaagctgggcaaaatatttacaaatctacttgaagatgtaggagagctaacaaaagagcaaagaatag

SEQ ID NO: 500404 - DNA, 596 bp, Homo sapiens
tcggtggctcatgcctgtaatcccagcactttgggaggccgaggccggcagatcacaaggtcaggagatcgagaccatcctggctaacatggtgaaacctcgtctctactaaaaatacaaaaattagctgggtgtggtggtgggccmtgtaatcccagctactcggaaggctgaggcaggagaatgacctgaacccggaaggtggagcctgcagtgagccaagattgctccactgcactccagcctgggtgacagagcaagactccatctcaaaaaaaaaaaaaaaaaaaaaaaaaagaaaagagtctgaatcccaaatgccaaagtcactgggctaaggtgaatgagaaggaggctagctggacattgtgggagaatgtattcctcatatgaagggagaaatcactgcctttttcagcctattgtggacatatctatcatttttttcaagatcaggaacaggacttcctcttgtgttaatgaaagactatgtaatttggacgaatactcccaatgagaacaacaagaaaagctgggcaaaatatttacaaatctacttgaagatgtaggagagctaacaaaagagcaaagaatag

SEQ ID NO: 500405 - DNA, 596 bp, Homo sapiens
tcggtggctcatgcctgtaatcccagcactttgggaggccgaggccggcagatcacaaggtcaggagatcgagaccatcctggctaacatggtgaaacctcgtctctactaaaaatacaaaaattagctgggtgtggtggtgggccatgtaatcccagctactcggaaggctgaggcaggagaatgacctgaacccggaaggtggagcytgcagtgagccaagattgctccactgcactccagcctgggtgacagagcaagactccatctcaaaaaaaaaaaaaaaaaaaaaaaaaagaaaagagtctgaatcccaaatgccaaagtcactgggctaaggtgaatgagaaggaggctagctggacattgtgggagaatgtattcctcatatgaagggagaaatcactgcctttttcagcctattgtggacatatctatcatttttttcaagatcaggaacaggacttcctcttgtgttaatgaaagactatgtaatttggacgaatactcccaatgagaacaacaagaaaagctgggcaaaatatttacaaatctacttgaagatgtaggagagctaacaaaagagcaaagaatag

SEQ ID NO: 500406 - DNA, 596 bp, Homo sapiens
tcggtggctcatgcctgtaatcccagcactttgggaggccgaggccggcagatcacaaggtcaggagatcgagaccatcctggctaacatggtgaaacctcgtctctactaaaaatacaaaaattagctgggtgtggtggtgggccatgtaatcccagctactcggaaggctgaggcaggagaatgacctgaacccggaaggtggagcctgcagtgagccaagattgctccactgcactccagcctgggtgacagagcaagactccatctcaaaaaaaaaaaaaaaaaaaaaaaaaagaaaagagtctgaatcccaaatgccaaagtcactgggctaaggtgaatgagaaggaggctagctggacattgtgggagaatgtattcctcatatgaagggagaaatcactgcctttttcagcctattgtggacatatctatcatttttttcaagatcaggaacaggacttcctcttgtgttaatgaaagactatgtaatttggacsaatactcccaatgagaacaacaagaaaagctgggcaaaatatttacaaatctacttgaagatgtaggagagctaacaaaagagcaaagaatag

SEQ ID NO: 500407 - DNA, 542 bp, Homo sapiens
tcatttggccatctctaccttcaaccttaccaagcacctggcctcagcacagattttcagagaaaactttgaacaaagcaacccaacactgtatttgtagaattggaagggacttggagccttccgaatgtgacctgactgctcaaatggagaaatgagagtggttagctgagcgcaagcttacactgtaagttgctgctgaaacggagacctcttgattcctattcacagttcagttctactcttcagtttatcatacaggctttaaggtgatggtttgaatcttataatatcccatggtcaactggacaaatgataaaaacaggaaaaatttccagaaattctttttcagaatatcttggatggagcttagaaattaacatttttcaacaagtatacctacacagaaaattcaggtgcagcttgcccgtgagcaacattgagaaacttgggtttaaaggaattctgtatttcaactmaccaacctcattctacatatgtacaaattgaggtacaagaaggtgagctagccatatagcaat

SEQ ID NO: 500408 - DNA, 561 bp, Homo sapiens
taaacctacaagtctatgatcaactgattttctacaaaggtgccaagagcacacaaggggaaaaggatagtctcttcaataaatggtgccggaaaagctggctattcacatgcagaagaattgaattggaccgttttctcatcccttacacaagaatcaactcaaaatgaattaaatacttaaatrtaagtcctgaaattgtaaaacgactggagaaaaacataggggaaaaaccatgtgacattggtctggataatgatttcttgcatataaccccaaaagcatagacaacaaaagacaatcttgtaaaaaacgcatcacaacatgatgggttatgggcaataatggttgcagaaaggcacagttttactcccttgagagtgtgatgcttgccacctacacagccaggaaagcattccttgggttcagaagattttcatttgggtcatcaagggtgtctagaagttttttaggccagcatagccaaggcttagaggtgtgttgcagcagggtgtttgggggagactgcaaaatggtgttgaaccaaaatagaggtaatag

SEQ ID NO: 500409 - DNA, 633 bp, Homo sapiens
ctgccttcttccatgaggccctggtctttgcgttgcaagtgagtcttagtggaataaggaagggggaaaatacctgccaggagaagtggttatgtaacaatctattacaacattcctccagtgcagcaggagcagtgtcaaaaacatattaaggttgaaacattataaatgataaaacattgatgtatacctattgtttttatggtacaaatttcctaaaataatgtgcctcaaatttctcttcgttggtaggaatgcgcgaaaaatgaaatggaatttgctccctgtatgtagtgacactcaatggtggacatccttcaaagttaggtatatcagaatctagtatgggacagcagagtgtgaggcttttatgawcatccaaagagatcattattggttcttttttaaaaagttgcaaaacgctgctgtagtgagacctcaaaatctaaagtctataaaaaaggtgtttactctatttcatatcctcctgtgacatgtacattatgataaattccaggctgctgtatgctaagaaaatgcctacatcactgagaatcagaggttccaagctgcatgtcctggtagcaaaaggaacccatgtgttctcaaatggagagcctccttctgagctga

SEQ ID NO: 500410 - DNA, 563 bp, Homo sapiens
cctcaacctggacctcccatggccctgggctcccctgtgctttctggacagcaggctgggacacaccaaagtcgtaagatgcatacaaggctcatacatcaatggcaaacccagggcttgaatcagaaattctttatttagaagatggaacctyataccttatttaggacccctcatgacaatagtccagcgggagctaaaatgagctttcaattggacttacacctgattttcacccccataactttggagctacacagtaataaccatccataggtatttacagcacagcctgttggaactctcaaaactcataatatcaaaagcattaccctaagcagcaatgattcaggcttattcttgtcactgccatctattctttcattcatctagcaccactgaacactatactgtggtggagactgtgatgggaagctaaagtaaacaaggtcattgacctcacattgcttagtccagttgggcaggtaagacacgtgttcaagtgacaaggtgagtaaaacctggggataagcgtgaccattgctagggagatggtaaaaaca

SEQ ID NO: 500411 - DNA, 633 bp, Homo sapiens
ctgccttcttccatgaggccctggtctttgcgttgcaagtgagtcttagtggaataaggaagggggaaaatacctgccaggagaagtggttatgtaacaatctattacaacattcctccagtgcagcaggagcagtgtcaaaaacatattaaggttgaaacattataaatgataaaacattgatgtatacctattgtttttatggtacaaatttcctaaaataatgtgcctcaaatttctcttcgttggtaggaatgcgcgaaaaatgaaatggaatttgctccctgtatgtagtgacactcaatggtggacatccttcaaagttaggtatatcagaatctagtatgggacagcagagtgtgaggcttttatgaacatccaaagagatcattattggttcttttttaaaaagttgcaaaacgctgctgtagtgagacctcaaaatctaaagtctakaaaaaaggtgtttactctatttcatatcctcctgtgacatgtacattatgataaattccaggctgctgtatgctaagaaaatgcctacatcactgagaatcagaggttccaagctgcatgtcctggtagcaaaaggaacccatgtgttctcaaatggagagcctccttctgagctga

SEQ ID NO: 500412 - DNA, 633 bp, Homo sapiens
ctgccttcttccatgaggccctggtctttgcgttgcaagtgagtcttagtggaataaggaagggggaaaatacctgccaggagaagtggttatgtaacaatctattacaacattcctccagtgcagcaggagcagtgtcaaaaacatattaaggttgaaacattataaatgataaaacattgatgtatacctattgtttttatggtacaaatttcctaaaataatgtgcctcaaatttctcttcgttggtaggaatgcgcgaaaaatgaaatggaatttgctccctgtatgtagtgacactcaatggtggacatccttcaaagttaggtatatcagaatctagtatgggacagcagagtgtgaggcttttatgaacatccaaagagatcattattggttcttttttaaaaagttgcaaaacgctgctgtagtgagacctcaaaatctaaagtctataaaaaaggtgtttactctatttcatatcctcctgtgacatgtacattatgataaattccaggctgctgtatgctaagaaaatgcctacatcactgmgaatcagaggttccaagctgcatgtcctggtagcaaaaggaacccatgtgttctcaaatggagagcctccttctgagctga

SEQ ID NO: 500413 - DNA, 617 bp, Homo sapiens
tagcctagatcaggggtgtctcaaagcctagacattgagacaggctagatcaggggtgtccaatcttttggcttctctgggctgcattgaaagaagaagcattgtcttggaccacacatcacatacactaacactaacaatagctgatgagctaaaaaaaaaatcacacaaaaagtctcawaatgttttaagaaactttacaaatttgtattgggcctcattcaaagccgtgttgggctgcatgcggcctgaggcccacgggttaagcttggcctaggtggttatgagatttttgatattaaaaagaaaaaataattccaaataatgttcacatactgatgcatttattcaaatatttatcagacacaactaagtgctagggataacatggtgaaaaaattaaaaaacagagaaggacattgctttcatggagattacattctggtctgtctctacttacacattttggtgatttagctctctgcccttcaactacaataaaatcttggtttcaaaggatccttataaggcactggtccaagtgctggttcttcacattaacatacccactaatgaaagaatgctgcagttgtgcaataggacaatgtgttggttag

SEQ ID NO: 500414 - DNA, 617 bp, Homo sapiens
tagcctagatcaggggtgtctcaaagcctagacattgagacaggctagatcaggggtgtccaatcttttggcttctctgggctgcattgaaagaagaagcattgtcttggaccacacatcacatacactaacactaacaatagctgatgagctaaaaaaaaaatcacacaaaaagtctcataatgttttaagaaactttacaaatttgtattgggcctcattcaaagccgtgttgggctgcatgcggcctgaggcccacgggttaagcttggcctaggtggttatgagatttttgatattaaaaagaaaaaataattccaaataatgttcacatactgatgcatttattcaaatatttatcagacacaactaagtgctagggataacatrgtgaaaaaattaaaaaacagagaaggacattgctttcatggagattacattctggtctgtctctacttacacattttggtgatttagctctctgcccttcaactacaataaaatcttggtttcaaaggatccttataaggcactggtccaagtgctggttcttcacattaacatacccactaatgaaagaatgctgcagttgtgcaataggacaatgtgttggttag

SEQ ID NO: 500415 - DNA, 617 bp, Homo sapiens
tagcctagatcaggggtgtctcaaagcctagacattgagacaggctagatcaggggtgtccaatcttttggcttctctgggctgcattgaaagaagaagcattgtcttggaccacacatcacatacactaacactaacaatagctgatgagctaaaaaaaaaatcacacaaaaagtctcataatgttttaagaaactttacaaatttgtattgggcctcattcaaagccgtgttgggctgcatgcggcctgaggcccacgggttaagcttggcctaggtggttatgagatttttgatattaaaaagaaaaaataattccaaataatgttcacatactgatgcatttattcaaatatttatcagacacaactaagtgctagggataacatggtgaaaaaattaaaaaacagagaaggacattgctttcatggagattacattctggtctgtctctacttacacattttggtgatttagctctctgcccttcaacyacaataaaatcttggtttcaaaggatccttataaggcactggtccaagtgctggttcttcacattaacatacccactaatgaaagaatgctgcagttgtgcaataggacaatgtgttggttag

SEQ ID NO: 500416 - DNA, 596 bp, Homo sapiens
atacatttgtattccttctcaaccagcaaacctaacatcaggactttaacctaagaggcctatttgattatgttttgggtcacacccaccatgtttgctaacattgacattcactagcccaacctttgctctaacatcagcccttcagagacttagatgaggtactcktttggattactggggccccacgattttccttaaagtacccaggaccaaagtaggtctctccaaggataatcacttatggcagtggttctcacacttaagtgtgcagggcatcagaatcctcttaagggtttgttaaaacacagcctgctgggctccacctccaggatttctgattcagtaggtctgggatggggctcgagaattttcatttctaacatattcccagaagatgctcacgctgctggtgcttgaccattccttgagaaccactgatcataaaataaaggtgataaaagaggagaactcttggctagagaagaagccacatgttctgtttagcagctcctagaatggtgatgatctccatttgaatcctgtaaggtgtatttgcaaccaattctcattaaagtcaagaaaatttatgcata

SEQ ID NO: 500417 - DNA, 596 bp, Homo sapiens
atacatttgtattccttctcaaccagcaaacctaacatcaggactttaacctaagaggcctatttgattatgttttgggtcacacccaccatgtttgctaacattgacattcactagcccaacctttgctctaacatcagcccttcagagacttagatgaggtactcgtttggattactggggccccacgattttccttaaagtacccaggaccaaagtaggtctctccaaggatamtcacttatggcagtggttctcacacttaagtgtgcagggcatcagaatcctcttaagggtttgttaaaacacagcctgctgggctccacctccaggatttctgattcagtaggtctgggatggggctcgagaattttcatttctaacatattcccagaagatgctcacgctgctggtgcttgaccattccttgagaaccactgatcataaaataaaggtgataaaagaggagaactcttggctagagaagaagccacatgttctgtttagcagctcctagaatggtgatgatctccatttgaatcctgtaaggtgtatttgcaaccaattctcattaaagtcaagaaaatttatgcata

SEQ ID NO: 500418 - DNA, 596 bp, Homo sapiens
atacatttgtattccttctcaaccagcaaacctaacatcaggactttaacctaagaggcctatttgattatgttttgggtcacacccaccatgtttgctaacattgacattcactagcccaacctttgctctaacatcagcccttcagagacttagatgaggtactcgtttggattactggggccccacgattttccttaaagtacccaggaccaaagtaggtctctccaaggataatcacttatggcagtggttctcacacttaagtgtgcagggcatcagaatcctcttaagggtttgttaaaacacagcctgctgggctccacctccaggatttctgattyagtaggtctgggatggggctcgagaattttcatttctaacatattcccagaagatgctcacgctgctggtgcttgaccattccttgagaaccactgatcataaaataaaggtgataaaagaggagaactcttggctagagaagaagccacatgttctgtttagcagctcctagaatggtgatgatctccatttgaatcctgtaaggtgtatttgcaaccaattctcattaaagtcaagaaaatttatgcata

SEQ ID NO: 500419 - DNA, 596 bp, Homo sapiens
atacatttgtattccttctcaaccagcaaacctaacatcaggactttaacctaagaggcctatttgattatgttttgggtcacacccaccatgtttgctaacattgacattcactagcccaacctttgctctaacatcagcccttcagagacttagatgaggtactcgtttggattactggggccccacgattttccttaaagtacccaggaccaaagtaggtctctccaaggataatcacttatggcagtggttctcacacttaagtgtgcagggcatcagaatcctcttaagggtttgttaaaacacagcctgctgggctccacctccaggatttctgattcagtaggtctgggatggggctcgagaattttcatttctaacatattcccagaagatgctcacgctgctggtgcttgaccattccttgagaaccactgatcataaaataaaggtgataaaagaggagaactcttggctagagaagaagccacatgttctgwttagcagctcctagaatggtgatgatctccatttgaatcctgtaaggtgtatttgcaaccaattctcattaaagtcaagaaaatttatgcata

SEQ ID NO: 500420 - DNA, 538 bp, Homo sapiens
aaatttggtgagaagtggccagattagagatttttttttaaggtaaaaccaacaagacatatgttagattagatgtcaaatagaaagctaatggaagaattaagagtaattattcactttgcctcagttcttaaattggaaaacagaagaaataccctagattactgtagaaaatttaataaggactggtatggaactcatttacaagtagatctaatcacagtttaggaaaaaatttttaactcaaattgtccagtattggagtgaattacctcatgggaaaataagtatctgtcagtcaagttgagcaagatgggggatgggatgwaatccaattgtattcattgttaataagtatggttgaaagaaatctctccagaggtaatactcacgataacatacaggatgatttcactattataagctattgacatcaatactttagggaccattttcaatggataaatatcaatgcaattgaacagcagaagatcaaaattttaatttgtatataacaggaaaatatttccattaaaac

SEQ ID NO: 500421 - DNA, 517 bp, Homo sapiens
tttgacacatttcatcactacatgctttctgttttctttacttggcatcaaagatgtcatttttttttcttctttctcaataaatgctagttttagtctactttttttacttttcctcatttttaaaacttccaaataatgcagtggcccagcatcgaatcctaaattagaatccctgtctacatactacatgtagaattcaagcactttccattagctctgttgctaaggtcccagttaagccaccatcatctctcatctgacttactatttctctctgtattggtttcactacatatccaatggcctccttcagttcagcacttcaaagcatttgttctctgtgcctaaaatattcttacctgggtgtttggatgtcacttctttcaaaagccaccctgttagagatatcttcatttaacatacttcagcacacgtataaaayacattttcatatttaggttcttgctaaatatagttattctcataatatattgccctaattgcctttacttaa

SEQ ID NO: 500422 - DNA, 740 bp, Homo sapiens
tgcataaactaaaaaagacattttatatgagtctgaaaatttctattggaaatcagaattttttttcatttattcactaaaagaaaatgtcttccacataaaaataaaagaaaaaaaatgagaaaatcaagtyaaaaatcagaaaatattatgtaacacacaagattgaatctactagttattagtatacaggaatcagttaaaattacctatgaaaagacaaggatttccagatttgattgcaaaacaaaattaactatatgtcatttattaaagacaaagcagaataaaaattgtttaaaaattaacttcaaacaaagcctacttaaaatgctatatgtaactgtagtattaatatttaatattgaataaagatgactttaaaaataaagtgtctcatattactaataaagaatatatatgtatataaaatgaattataagccattagagcacagcagataatattaaaaataaaaagagaatttaacaaaagtataagtatagtggaagactccagtgcataacttattagtccttaagacatcaacaaagaatacagactatcttaattacacaattaaaaaagccagtttaaccgttgtactaaatttggcatggaacacaccaagaataaacatattttccaaaaactaatgcaccaagtcaaatatagaaataagatatctcagtttctgacattgtgataaaactggataatacaagttttaacaaacaaaa

SEQ ID NO: 500423 - DNA, 740 bp, Homo sapiens
tgcataaactaaaaaagacattttatatgagtctgaaaatttctattggaaatcagaattttttttcatttattcactaaaagaaaatgtcttccacataaaaataaaagaaaaaaaatgagaaaatcaagttaaaaatcagaaaatattatrtaacacacaagattgaatctactagttattagtatacaggaatcagttaaaattacctatgaaaagacaaggatttccagatttgattgcaaaacaaaattaactatatgtcatttattaaagacaaagcagaataaaaattgtttaaaaattaacttcaaacaaagcctacttaaaatgctatatgtaactgtagtattaatatttaatattgaataaagatgactttaaaaataaagtgtctcatattactaataaagaatatatatgtatataaaatgaattataagccattagagcacagcagataatattaaaaataaaaagagaatttaacaaaagtataagtatagtggaagactccagtgcataacttattagtccttaagacatcaacaaagaatacagactatcttaattacacaattaaaaaagccagtttaaccgttgtactaaatttggcatggaacacaccaagaataaacatattttccaaaaactaatgcaccaagtcaaatatagaaataagatatctcagtttctgacattgtgataaaactggataatacaagttttaacaaacaaaa

SEQ ID NO: 500424 - DNA, 596 bp, Homo sapiens
gccacacctcctctaccacatattgtaagtgcaccaatttcaagaacataaataatttgtttttaggccaggtgcagtggctcacgcctgtaatcccagcactttgggaggccaaggtaggcggatcacctgaggtcgggagttctagaacagcctgaccaacatggagaaaccccatctctactaaaaatacaaaattagccgggcgtggyggcaggtgcctgtaatcccagctactcaggaggctgaggcaggataatgactcgaacccaggaggcggaggttgcggtgagccgagattgcgccattgcactccagcctgggtgacaagagtgagactctgtccccctgccaaaaaaaaaaaagaaagaatttgtttttaatatcctttatactaaattttaaaggtcatcaagtggattcacattaaaaaatgccagctaattattcctgcctaaagcatagagtactacagctggttacactgaattacttaaattactagagcattgggatagctgagttcatggaggttcctggagtatggtgcacctggaaagggcatggaaactgaagccccttcccacatgccttgc

SEQ ID NO: 500425 - DNA, 616 bp, Homo sapiens
tcatggggcaagctgcacggagcttccacgtgagaagcagtttgattgcaaacctggatctgcaattcccaggggctgccctcatggaattttaattgggggctatttgaaattccctttggctttctcacagcctatcactgcctataagtcatgttacctactgtcagttccttaggcttcttgtgtttctcggttgctactgttgtggtacaacttcttggtatcttttaaaagcactcatcagaagaccttagggacagttttgtgcaacccatatacattttacattaagccatactatttcaggtgtatccttcaaatacagttaaattcagttttgaagttttagctgcactgaaagccactgtcactttgagggcctacctgggacccctaaatgcatttacattttaagtcagaacttccaaaactctccttatttgctgaaaatctgtttaactgttttcacatgatgtgttaataaatgtcattgtattcacagagattattccaagaagattaaaggtcatgctagcccatttgcrtcttataaatctcaagtgccctcaaactcaggaaaattcctgcaaaagtggaatgtttctcaaatggc

SEQ ID NO: 500426 - DNA, 656 bp, Homo sapiens
tccacatgaggggacctctctaggctcccagccaattctagcctagcaggctgcctcacttwcctctccctccttgccttaagggtttcctgtaaacttcttgttggattccagtgttctgtcttaggtgatctatttgaagtgtcaagagattcatattttaaccaagtctttggggcaagcaatctcttactgcaaagaagatcaccaatatgtgggaaatttaatcacagtatgccccccctcccccagccattgtggtcagaattaatcacctgggctttgcacctgccacactaggtcatccttttgtccagtcaggtaggtgtctgtgtctgtcttgtctccagcatgtgagctccctgagggcagcacttatcctggagcttacagtagtggagctcaagggaagtcagcttgaactcactcacccaaaaaatctttaccaaattccaattacaagcaagacacggctaattctgggggcacaaagggaatcttaaaccagccagttcagtgtgtgtacaatggttctgcttcctgcttttgaagggtttacatctaatgggagagaagaggggggtctaggcataaataagcccacagcaaagcagacacgtgtaaataacaatgcttcccacattatagcaataggt

SEQ ID NO: 500427 - DNA, 534 bp, Homo sapiens
agaatcacatcaggtaatgttaaaattttgcttcaaggctattctatttacccacatgtttatactttacattgttgtttcttcattcttaattttcccttcttttatctcctttatgtttgaaaaactttttttaaatttagggtagttctactgggaacaaaaatctcttagttttccttcacctgggaatgtcttttgatttcctacttattttcctgaaggatattttcacttgaaagaagattctgggttaagagttcttttcttttaacgcttgaacaatgtgtatcatttctttctggcctttgtggtttctgacaagaaacgtactgtcatttgaatccttgctcctctgcaagtagtgcttcatttctctccagctactttcacggtgtttttttgtttggttggttggtggtggtggttgttgttgtttggtcttcagttgtctaaagtgtgattaaaatgtgtctaggcatgaactttttgagakttaccacatttaaggctcacttaccttattaaatttca

SEQ ID NO: 500428 - DNA, 587 bp, Homo sapiens
ctgaacggctaataatcactccttccagacttcgagatgtgtgtgtttcctctaatgatgaggagttaaaaataacactcctgattcttcctcctgatgggcaggtcccttgccaccaggcattccacaagagggagggttgcagggatctccaaaagagccccacaataaaacaaatgtgcatgttcatcacattattcaaatgaaacattaattatttcagaacttgctccaaatgttcccaagcctggctcatgataatgagctcctgggcttttgtcttacagctcactgttaatgtcatgctaaatggactgmaactggacatgctgcttggatgaatatttatgtgctggaatgttgtttgatctggggtttcagggcctgatgacatagctcatttcccttctcccctccccagctcggcagctcctttctcatccatttttgtggggtaaaatacatggtgctggcataagcttctggtgctacaacgaacaccaaggggtttcttagctcaaggggctgatgttagggtttcctctactttacacatatggaacgactctaatacttaagccagccac

SEQ ID NO: 500429 - DNA, 526 bp, Homo sapiens
tttattcacttatgcaatcacttttaccatcagcccactcagccagaaaaactcataaaacacagtttgatttttcttttttcaaatggtgcaggcggccaagcttcatgtccttagttaccttattttatactcttgcactccagcatgagatgctgagcagagcccttcttcgccggccaggaaccctggactttctaccctccccagcccctacctgtgcctggcatatgaatgtgtttctacttyatgcctttgttcttctgattccgactaaatcctgtaatagatctgaagtgtgtgccccatttgtctgggtacaattatgaattgatttccattcccagagtgagggtcccttcccctctgggtgcatatgtgagtctcacaatgcccagaccgcttcactcaataaagtggtaaattcacatctggccttgcagttgccagaagagaccatgaattggctcaattggaaagaaaatgtggtggacccactggaagattgccctcttctcatcccatg

SEQ ID NO: 500430 - DNA, 555 bp, Homo sapiens
gttcagtctacactgaattaaaaacaggtgagagagtcaaggatcatttagatgctctttcccacccaacccccctgaackgttttcactcacaacacttcgacaccaaatgtgtgcgggatttttcccataccagcaaattctccaactctccagacatcaactgggtgttctaggatacaattcaattctgacactaactacccagcattagttcagaccccagagtaacgctcagtcccacaagactgccctcatttcagacaccagtcaaaagtctccagttgccattgacgcttctgataggctataaaatcgaggttcccataatcccctcctcatgtttaataacttgctagaacagctcacaggactcaggaaagtgttttgcttactaatactggtttattatagagtgtaactcaggaacagcccggtggacaagatgcataggttcaggtatagggaagggatgaggaccttccacgccttctcccggatcccagcaccttgatttgttcaccaacccagaagccatctgaaccttgttgttta

SEQ ID NO: 500431 - DNA, 555 bp, Homo sapiens
gttcagtctacactgaattaaaaacaggtgagagagtcaaggatcatttagatgctctttcccacccaacccccctgaacggttttcactcacaacacttcgacaccaaatgtgtgcgggatttttcccataccagcaaattctccaactctccagacatcaactgggtgttctaggatacaattcaattctgacactaactaccmagcattagttcagaccccagagtaacgctcagtcccacaagactgccctcatttcagacaccagtcaaaagtctccagttgccattgacgcttctgataggctataaaatcgaggttcccataatcccctcctcatgtttaataacttgctagaacagctcacaggactcaggaaagtgttttgcttactaatactggtttattatagagtgtaactcaggaacagcccggtggacaagatgcataggttcaggtatagggaagggatgaggaccttccacgccttctcccggatcccagcaccttgatttgttcaccaacccagaagccatctgaaccttgttgttta

SEQ ID NO: 500432 - DNA, 674 bp, Homo sapiens
taggtgcagcaagccaccatggtacaagtttacctatgtaaacttgtatcccagaacttaaaataaaatttttttaaaaaatgaaygagctataatgtgtggctctttttctgtgctactattccattggtctacatttttatttttatgacaataatcactatcctgcttcctgtagctttatattcttaaattcagatcatataagtcgtctactttgctttttattattccaaattgtattggcttttctagaccctctgcatttctatataaatttgagaatcagcttgatgctatcagaatttggaagggtactctccttcttcctactctctttactcctccagcaagttggagaatgcatattccctggctatgtcaaaatattaaaagtgaacttgactaaagcagaaaaatgctgcctggagatgtgaagcattaccattaggctccaggctcctaaacctgaagtccaccctagaatatacttcagtaccctggtcatctataactgtgttacccttgctgactcatcaataatcagaaaactgattataaagattgcaaggctcttgtatcggttcgaaccctgagagtgcaccaacgaacaactcaaggccgtgtggagcaacacgctatttttagtgagcacctgggtgcaggcgggctga

SEQ ID NO: 500433 - DNA, 570 bp, Homo sapiens
gccttgccttccaatgaggggggccgagcaaggcccggccaggtattccagggagtggatttggcgcccaaggaagttgccgtgacatcaaaagggacaactggggccaaagagcagaagggaaaatgtacatcttagctgatgacaatttgaacaggtaaggactgagaaccagtctacccttgctcatggcttgatgtgtgactgtaggaagcgggttcagggctgtagcgaaattgctgttgctagctagcatctgttttatgccttttccattctaacagaacctgatttttggtcaagtgttaccctcctcctcccccagcttccaggagcccgtgtgcttcagttccagggtaggtcgacatggaataaagataatcctatctggacctaacttggtgtagaaacgggtacggaacccagtttggaccaataasaattgaggagatacttactggggaactctgagaaagttcttacccctctggaagaactttgataagttgttttcttctcttcctttgaagagaaggctgcagcctgtggattaaacttacatatggagca

SEQ ID NO: 500434 - DNA, 568 bp, Homo sapiens
ttgaggtatagcatgcctgactgtgctctagaagcagcaggatgccagccacggctggaggcagtggttgagggtggaattgaaggagatgaggttgagaagctggccaaaaggagcacgaccttgaaggcttttgtgcaacattaacaaattttttttctttttcaaaagcttggcatggtctgctttacaatctaaatgcaacagtcttgcatttggaaagccatctaaacagggtaccacaagctyagctaactttctgatttccttctcttggttttcagaaaaattacaaacagatccttcaaaatgttttatttggtaagatgctcaaattttactcttggcattggtatgaccatctttgatttcttgattaaacaatacattttgaaacatttatttatttttattcagccacaaatgtaaattacatatgctattgtctttattctaaagagacattttgttttctgtagaaatactttacataaatcattgtctacattctttgaagaccagcttatgatgctgtacatataattattctccttgtttgaaatgcagt

SEQ ID NO: 500435 - DNA, 574 bp, Homo sapiens
aaaagccaaatatgtgagttgaatggtgtgaaatgctagtgggatcaatcagtgatggcccaatatcccacctccaggagggaaacgtatgtaasaggcaatagaacaaggagccaagggcatgctctttcatttcagacaaacttggctgaagccccggctctgccactgactagctgtaaggtagcagttatatcatttaaccttgctgaggcatggccaacccaagtgtaatgtggggatgataataatcacctgaggttttgccaggattgaatgatgttatgacataaagtacttagcacaattaatagatttcataacagtaatgctatgtcagtatgccagcctatgggtgggaatgctcctacccttgctaatgggctgagctggtgatacccacacagtccttattcttcagtcttccttcttgtctctgacttacttctcctatccttcttgttccaagagtagtcctccagatgtaactagtaacaataattagggaaccactttttatcacattccatctggattcgattagatttccagtccttgtcattcttcctatgat

SEQ ID NO: 500436 - DNA, 449 bp, Homo sapiens
tcatgagtcctacatccccaattatttctttgctagtaggcagggagtcatatcatcccagactctgagcttagacaagtggggtatgtgtgatcttcccatgcaccatcactatctccctaaataatgcataatggttatttgcttaatattttacagtttacaaagcaataaagctccatggttaagactctggaatcagagagcctgagattgaaccttacctcttactggttgtgtgacatggggcaaggtaattcatccattcagcaaatacttatgaccataatgcaccaggcactacaaacataacaatgaaccaaacaaatgtccttctttgtatcatgtatctcatatgccagtggaagaggtagaccgtgaacaaataagtagacacatgcatactagaccgcaataggkgctaaggagaaaaaatataaagcagagaa

SEQ ID NO: 500437 - DNA, 605 bp, Homo sapiens
atagctagtaagtagagctgaaaaacaaacgtggagaattggactccagagcctttattcctctgaattgcctcctgtatgattttctgtctttacgatctagtaagtggggttactgaaattttttaaccccagtttaactccagtcccactaattgtggtgacaaaataatgatgtttccccacatatgccatagagtatgatgtctgtgaagtcactaggatctgctttggaaaagcgaaagagtaatttgaacaagcaaagtacaactctcaagcaatgcttaggtttgggagagaggtttttgcatgctctgcctatgctaacttccctttgaatttcatagttcctttccgctcagagtcaggatgatgaaatgtattcagatttagacgattagaatctcaaagtcccaactcttctctctgttccctgccccaccagcagctttcttagccctcttagaagatagaggagctgattcagtstattctttcatcaaatactgattgcttgcagacttaacgccctataccatcctctggagacttctgcatgtctttagaaggtatacctttctctgcctctaatttggagggctaca

SEQ ID NO: 500438 - DNA, 526 bp, Homo sapiens
ggcggggctacccaatgggcgtaacagtggttttcggaccctcttgtagaagggtaggttgagttagttctttcggaagaccgagtatttggttttcgagttaccagttcccccccagatttagtatgaggacgctgtgttatttaaacgtcagcacctatttccaatattggacctagaggtgcagacggggaaaaaatagtgaccgccaccttccctcgcattgcttcttgggagttgcagttccctggagaagtcctccattttgctatggataggcgcggactgtacagaaattcttgttttactggtttgccttcttttctttctttctttctttctttctttctttctttctttctttctytctttctttcttttctttctttctttctttctttttttcttttttgagacaggatctcactgtgtcacccaggctggagtgcagtgacgcgatctcggctcaccgcaatttccgcctcctgaatacaagcgattctcccgcctcagcttcccgagcagc

SEQ ID NO: 500439 - DNA, 534 bp, Homo sapiens
catgcagactgcttggcatacccacgcaagcactcctgagcacacggcccacaaggcaggtctagggtggcagggcagaggctttgtttcaggcccttgcctgagccgaggtctccattccggcctttaccaaggtcttgccttaggggctggaaggtgcctgcctgcaaggacagaggtggaactttctttcccttgccttccaatccttgtctgtccttgtgctcaggaggggaggaggggagagtggatagagcccctgggacccatgataaacatcaaggtccttaaatatcaaagatacaagcttacgaatatcgcaagycatttcaaattcatttctagaagaacaagtgtataattcaaaaaacatttttgaatgatacaaaggataaacattaaagcttgaaaaattcagattaaaaaagcttatattacagaggaagcataagcatttctaagtgcaacatctcactaaatgctgcctgcagctcaaggcctgagctctgctctgggctgggagaaaaaggtaga

SEQ ID NO: 500440 - DNA, 647 bp, Homo sapiens
gctgctctgcttatgtgttttggggaagaatgacaagccaagccccaatctatgtcagagctggtaaacgaatgagcccctttaccccaaaacctttgttcctcactcagatttattgtcactccactaggcaaattccctggctagagtatgaccttaaaaatccctgggggaagcagcacccaccatcagagggggcctctcacggccttgtaatcagtagtttggaggggaaaagatggagcatttatttatttatttattgagatggagtttcactcttgttgcccaggctggagtgtagtggcgcgatcttggctcactgcaacctccgcctcccaggttcaagygattctcccgcctcagcctcctgagtagctgggattacaggcgcccgccaccacacctggctaagttttttgtatttttagttgagtcagggttttagcatgttggccaggctggtcttgaactcctgacctcaggtgaatcacctgcctaggcctcccaaagtactgggattacaggcgtgagccaccacatctggccaagatggagcttttaaatggtcaaaggcacctgggagttatcatctgctttcgtcaacaccttaatggcaaagcctttgctgtccttcagtattaacc

SEQ ID NO: 500441 - DNA, 637 bp, Homo sapiens
tggattatttctcagatgtctttatagtcagatatgactatctgactgagcactggctgatattatacaagtagaagtaatgtatgccacttctaggcctggtccacaaaacttctgatgtgcaacccaccgtgctctgctcttttctttctgcagctttagatgctaacattgaagatgcacaaccatgaggatgtaggagactggatccctgaatcactgcttggatgatagcagcaagcttctttggygttaaacaacttagatattctgataaagcatctactgttgccttaattaaggagagatggataatattttcttggatgaaagtgatagaggtgaggatgaagagaagtggtcagattctacatacaattatcagagaaacaggagttcctgagaatatggatatgatgagaaggtaagagaagagcaccagatgatctgaacgctttcgccttgcacatttggaggaaggagctgccatttattgtgctggaaagattggaggaggaatagttccacaagcagaaaacacatagtataattttggatatgctactattaagatgcctggtgttatgttatcttcataattttatataaatattattaccttaatttttaagctgag

SEQ ID NO: 500442 - DNA, 611 bp, Homo sapiens
gaggatgactcttaccatttagactgagctgtgaggtttagtgcccttaggaaaaagaacatcatgccttagagaaagtccatcccagagatttgaataaggggaaagcctgctcttccaaagctagtaacatataaaagaaaaatgaaaattgttcaggcacgatggctcatgcctgcagtcccagcactttgggaggctgaggtgggtggactgcttgagctcaggagttcaagaccagcctgggcaacatggcgaaaccccatctctacaaaaaatacaaaaattagccaggcaaagtggtacrcgcttgtggacccagctacttgggaggctgaggtgggaggattgcttaagcccaggaggtaaaggctgcagtgagctgagattgcaccactgcactccagcctgggcaacagagcaagttcctgtctcaaaaacaaaacaaaaccaaaaaaaaaaaaaaagaaagaaaatgaaaatagagagacagtaaaggattctctatctaaatctacattctggcatcaatttcttcctcttaggctaaaattttgactaggggagaacatgataaattcattttgatgtgtaagttctttcttaaggca

SEQ ID NO: 500443 - DNA, 628 bp, Homo sapiens
gctgtttgatttgggacaaaagatgttacctctctgagccttggttgttttcctcaagtataaatggggaaaaaatgccttcttgtaacagtgtcgagaagacttgcttgtacctagcatatggtaggcaatggataaatgaaagccgttggtattaatcatgtaattgatcaattcattcaccagatgctgagatcctactctctctctctggtactgtgccatcatggaaccctgaatatactctgatttaatgcaatggtatatatttcagctcatatttttttctattkttcaatttaatttatacatatctatcatccatatgtagattttatatatatgtagaatatatatatataatatattatatatagttaattagtttgtttgtttttgagacaaagtttcactccatcatccaggctggagtgcagtggcaccatctcagatcactgcaacctccacctcccaggttcaaacaattctcctgccttagcctcctgagtacctgggattacaggtgtgcaccacacctaggtaatttttgtgtttttagtaaagacggggtttcaccatgttggtcaggctgatctcgaactcctgacctcaagtgatctgcccacct

SEQ ID NO: 500444 - DNA, 628 bp, Homo sapiens
gctgtttgatttgggacaaaagatgttacctctctgagccttggttgttttcctcaagtataaatggggaaaaaatgccttcttgtaacagtgtcgagaagacttgcttgtacctagcatatggtaggcaatggataaatgaaagccgttggtattaatcatgtaattgatcaattcattcaccagatgctgagatcctactctctctctctggtactgtgccatcatggaaccctgaatatactctgatttaatgcaatggtatatatttcagctcatatttttttctattgttcaatttaatttatacatatctatcatccatatgtagattttatatatatgtagaatatatatatataatatattatatatagttaattagtttgtttgtttttgagacaaagtttcactccatcatccaggctggagtgcagtggcaccatctcagatcactgcaacctccacctcccaggttcaaacaattctcctgccttagcctcctgagtacctgggattacaggtgtgcaccacacctrggtaatttttgtgtttttagtaaagacggggtttcaccatgttggtcaggctgatctcgaactcctgacctcaagtgatctgcccacct

SEQ ID NO: 500445 - DNA, 680 bp, Homo sapiens
aatgggggtggaggatcatggcaaacagcaggattctggagttagaacctttatatttctttaggaaccatagggacacatgagcggggtggctgacccctttgaacttagtttgaccacatatgtgcttttgaatgcctactttgtgaacagcatttgttttttgtttgtttgttttttgttctttttgagatggagtcttgctctgtcgcccaggcttgaatgcagtggctccatctcggcttactgcaacctccacctsctgggttcaagcgattatcctgcttcagcctcctgagtagctggaattacaggcacctgccaccataaccagctaatttttgtatattttagtaaagacagggtttcaccatgttggtcaggctggtctcaaactcctgacctcaggtgatccacctgcctcggcctcaaagtgctgggattacaggcgtaagccatttcacctggcctgtgaaaagcatttgaatgtgataaatggtgcttcagtttttttggttcctaagaaaaaaatatcctgtgggttcagtatttcccctgaggccctgaactaggcccagccactcctcacagaggtgtgggtgctggttctgtcattatccctctccaatacatgtggctgcattccatgtcagtaggacatgaaactgctttttggaacc

SEQ ID NO: 500446 - DNA, 585 bp, Homo sapiens
tcaagcaatccgtcaacctcagcttcccgaagtgctgggattataggtgttagcctccaggcctggccctactttctgtttctataaatttacctgttccatagatctgtcacacaatatgtggtcttttgtgastggcttttttcacttagcataatattttcaggattcatccatgttttagcatatattagcactttattttttattgctgaatcatatttcattgtatggatatattacattttgtttatccattcgtttgatagacatttgggttgtttctactttttggcaattatgaataatgctgctctgaatatttacgtacaagtttttatgtggacatgtgttttcagttctcttgagtatatacctaggagtgaaattgctatatcatatggtaactcttctttttaggaactgccagacagctccaaatatccctggttctgtaatgaatatacttttgttttatttggtgacattttgtagactaggaggaaatttgtctcaaaatgggcacaaagaaacatagctatgttttcctgtgggatgtccaagtctcaaagtctcttgtcccta

SEQ ID NO: 500447 - DNA, 526 bp, Homo sapiens
gtagtttgttttatctttattatcatcattgttacatagctaaaaagatttaagaggttttgctcatctattcttctctacctcttcaaaaagaggcccaaggcaacactgctacctcccccttgggttctgtcttactccattaaactctacaattataaatttgaagggatacataccagggtgccaaatttagtatatggccttatggaagcctagtcaagcccaagcccaactcatccatggtctggtggacctcagctccasctcaggtttcttaccattaccaggcccagagccattaactgggctctgatggtgagaagatttatgtttctgttttgtcatgggcaaaaggataggagtcagtaagggttcctttgtctgggtgatattgaacacttgtgtgtgtgtggtatttgtagctagaatgaatgaatatttgctaagcaaatagagcttggcacataataaatgccacaaacgtgtttaaaaataaaataaaaagtataatttacagtcaaaa

SEQ ID NO: 500448 - DNA, 526 bp, Homo sapiens
gtagtttgttttatctttattatcatcattgttacatagctaaaaagatttaagaggttttgctcatctattcttctctacctcttcaaaaagaggcccaaggcaacactgctacctcccccttgggttctgtcttactccattaaactctacaattataaatttgaagggatacataccagggtgccaaatttagtatatggccttatggaagcctagtcaagcccaagcccaactcatccatggtctggtggacctcagctccacctcaggtttcttaccattaccaggcccagagccattaactgggctctgatggtgagaagatttatgtttctgttttgtcatgggcaaaaggataggagtcagtaagggttcctttgtctgggtgatattgaacacttgtgtgtgtgtggtatttgtagctagaatgaatgaatatttgctaagcaaatagagcttggcacataataaatgccacaaacstgtttaaaaataaaataaaaagtataatttacagtcaaaa

SEQ ID NO: 500449 - DNA, 614 bp, Homo sapiens
tttttcacatagtggatgaaggccttaaaagtcagaacaagatgttggataagtgtaaagtaactacagaatttctagattaagagtaacacaatgaaaactgctggaaagttgattcaagcaactacctgtggatgaataggaaatgaaaaagaagacaggcagtcatctgstaaaagaattctgagatgaatcagcaatgaggtagcgcgtttggaccagggtggtgggtgtagcactgaagctgtgaataaagaccaggcatgacttggtgttggactatgtgtgggattcaaagaaaacagtagtttaaaatgactataaatcttaaactcagttaatcagagaaggttactgatgttatctggagaaaggaagctctgatctaaggaaggaagataaactgaatttttgtgaaaacagataccatgttgcctgggttatatatgcaaacattgtttatgtttaaaggagaatctctgagggtattacaaataaatctgtaataatgtaacacttattttattccatgttttaataaatttacttttaacctcaacagccttggtcactatatttcatggaacattttcatatgtgaaagcaaactgcct

SEQ ID NO: 500450 - DNA, 528 bp, Homo sapiens
ttatgaaataaaatagggactataagaagtattcttacacataattaaccaaatcaatggaaatttaaaagaattctaatttgcaagatgaaaaatgcttctgacgctcactgctatacaagtgagtaaaactcctgaaaacagtattatataaaacttaaactgcatactatattccaagtgctatcaggtcagggatattgtatatttcatccatcaatatataccgagtattgagaacagatagaaagaccacagatgctcaacttaatggtttctaattgtctggaaatctkcaaattataatttatatgtataatctccctaattgtcattgcacccatatgaattagtcactgtaattatttattattcctattttatacatgagaaattagtttcagaaaggatacatactctgcaggaggttccacaataagtatcttaagagttttgatttaaatacagacacgtctctcaactccaagcctttcgcttcttctcacaaagaaagtgccattttaattc

SEQ ID NO: 500451 - DNA, 494 bp, Homo sapiens
cgccctgctcaccgtcacccctgagatgatgggcgccttgccctcgatgagcctgtgcacctcgcgaacggcctcctcgctgctcttgtctttgaatcgcttcttggcgagctcctccagcgcctcctggaactgctcaaaggtgatggtccggcaagacttccctctacaggggcacaggcgacttagggctgggcgcgggccggcccagggctgccctccccacgcgtgggtctgagcagagctggacrgccatggcccagcagcccacaggcttcacccacaggcggccgccctggtagcactgcaaatccaaactgtcttggaagaaagcttggcggaagcaggtcctctataaagctggatgctcacacggccctgcaggccgctctgacacagggtgtgtgcgggtctgcactctgctggggcagtgccggaggccattaggcagcggagcccacctcctcctcccggggccaccacagccccgccca

SEQ ID NO: 500452 - DNA, 508 bp, Homo sapiens
gactcacagccaatgatgtgatccacgccaagtgtcccgttataagatgtttcctggggagccttagaaaatcactacaaatgggttgaacaacagggctttcctcttacggcttaggaggccagaagtccgagatcaaggcctgtgcsctccggaggttcccacctcttccagcttctgtggctccaggcggtcctgggtggtggccgcatggctccacctctgcccctgtcctcacggggcctcctcccccgagttagtgtgtctgtctcttcctttgcttatcggacacctgtcactggatttaagggccgccaggagaagctgggataatctcaagatctttaatcgaattacatctacaaagatcctattttaacgtaaggtcttactctgaggttccgggtcaatgtgactttcttgggtgggggtcactaccaccccagcaccaatgcttttcccagctccacctgtgttaccgtgtcagtgaccaggagcgttccccggg

SEQ ID NO: 500453 - DNA, 594 bp, Homo sapiens
ccgtgcggtgtgaggacccgcggaccccaacccgccyttccctccgtcctgacccggcgccaggctcagctccagggcgaggtcctctggagtcatgttcgttctgcgtggcttggccgtgactgtggggactgggctgcccacggacagaaaggagaaacgcagcctgtgaccaggagacgcagcccagggtggagccgcgctggggccagggaggccgaggagggcaggagtccgagggtgtaagggtgccagggccttccgggtctcaggcttcgggacctggggagccaccctgtttggtgaccactcgtcctcggccttttcaacacaagggctttggagttgtgatgggctgttatcgggtgattccggtggccactcgtctgtgatcgggtgattccgatgactgctcgtctgtgatcgggcgattctggtgaccgctcgtctgtgatcgggtgagtccgatgactgctcgtctgtgatcgggtgattccgatgactgctcgtctgtgatcgggcgagtctggtgaccgctcgtctgtgatcgggtgagtccgatgactgctcgtctgtgatcgggtgattccgatg

SEQ ID NO: 500454 - DNA, 602 bp, Homo sapiens
tcctccgccttgtcagaatgctggctgtgttatctatgatagacataagcaaaacaaaatacacttagtcaagccgccattcaagattcacatttcctttaatggataaaatggggatgtgtatctttcttgtttcagtttatgaaatggacaagggaacacgaaggggcaattattaaagagaagctaatattggttctccaactgagaaacctatttagaaaaattaatacagccacactaaagatgaaagaaaatagtgggaagacaaagcaggaggaagcaatgaacattttggacatggacctaatagctataagatttaaagggatgcggacggcctgaagtcatacacttagggtcctatactttgaagtgagccaatgagattttctccaaacctagaggctctgaatataggtaataggagcacaaatctgtatttttagcaaactactgaggtgaagttgatgcataaaacaggtataagaataactggtttakataatatttctatggagacagtagatcaagcaacaaactttttagacttggctgtgatttgaagctgtattgtttgaccatggggaagttaatgatga

SEQ ID NO: 500455 - DNA, 585 bp, Homo sapiens
ggtttcacaggcgccccaaagctagaaaggcagtttttcataaggggaacccttacctgtccccaactccgccaccagcgccacccccacrgagctttgctgaaagtccccgcgtccacctgccttctgtgcacacctggctgctgctgatgctgccaactccttatcttgatggcctccaccgagtcgtacttgtccagtttgttggtgtggttggttatgctggtgttgaggggggtaggcgagacggagtggacgacagtcgcattgtgggattgctgttggtgctgctactgtaggtatagaccagcaggctgagccccacgtgatcatgtggaacacactgaaccctggggggacaggagcaaagtggtactggctcccttccccatcccttacttcccttcctgaacaattcagcctttgggtgcagaacaaggcaggcatgtgagaagggctgccctagctcaggggcctcagcttgagtagcagggtgagaagcctatccacagacaggagcagcccagggagagacgtgaaatgcttgctgggcatcactgcaatggcaggcaagtccacctggct

SEQ ID NO: 500456 - DNA, 585 bp, Homo sapiens
ggtttcacaggcgccccaaagctagaaaggcagtttttcataaggggaacccttacctgtccccaactccgccaccagcgccacccccacggagctttgctgaaagtccccgcgtccacctgccttctgtgcacacctggctgctgctgatgctgccaactccttatcttgatggcctccaccgagtcgtacttgtccagtttgttggtgtggttggttatgctggtgttgaggggggtaggcgagacggagtggacgacagtcgcattgtgggattgctgttggtgctgctactgtaggtatagaccagcaggctgagccccacgtgatcatgtggaacacactgaaccctggggggacaggagcaaagtggtactggctcccttccccatcccttacttcccttcctgaacaattcagcctttgggtgcagaacaaggcaggcatgtgagaagggctgccctagctcmggggcctcagcttgagtagcagggtgagaagcctatccacagacaggagcagcccagggagagacgtgaaatgcttgctgggcatcactgcaatggcaggcaagtccacctggct

SEQ ID NO: 500457 - DNA, 585 bp, Homo sapiens
ggtttcacaggcgccccaaagctagaaaggcagtttttcataaggggaacccttacctgtccccaactccgccaccagcgccacccccacggagctttgctgaaagtccccgcgtccacctgccttctgtgcacacctggctgctgctgatgctgccaactccttatcttgatggcctccaccgagtcgtacttgtccagtttgttggtgtggttggttatgctggtgttgaggggggtaggcgagacggagtggacgacagtcgcattgtgggattgctgttggtgctgctactgtaggtatagaccagcaggctgagccccacgtgatcatgtggaacacactgaaccctggggggacaggagcaaagtggtactggctcccttccccatcccttacttcccttcctgaacaattcagcctttgggtgcagaacaaggcaggcatgtgagaagggctgccctagctcaggggcctcagcttgagtagcagggtgagaagcctatccacagacaggagcagcccagkgagagacgtgaaatgcttgctgggcatcactgcaatggcaggcaagtccacctggct

SEQ ID NO: 500458 - DNA, 585 bp, Homo sapiens
ggtttcacaggcgccccaaagctagaaaggcagtttttcataaggggaacccttacctgtccccaactccgccaccagcgccacccccacggagctttgctgaaagtccccgcgtccacctgccttctgtgcacacctggctgctgctgatgctgccaactccttatcttgatggcctccaccgagtcgtacttgtccagtttgttggtgtggttggttatgctggtgttgaggggggtaggcgagacggagtggacgacagtcgcattgtgggattgctgttggtgctgctactgtaggtatagaccagcaggctgagccccacgtgatcatgtggaacacactgaaccctggggggacaggagcaaagtggtactggctcccttccccatcccttacttcccttcctgaacaattcagcctttgggtgcagaacaaggcaggcatgtgagaagggctgccctagctcaggggcctcagcttgagtagcagggtgagaagcctatccacagacaggagcagcccagggagagacrtgaaatgcttgctgggcatcactgcaatggcaggcaagtccacctggct

SEQ ID NO: 500459 - DNA, 580 bp, Homo sapiens
tctactgcaaataggaaccctccccaagtccatcacatctgataaccactgtcaggctagacagtggactcatggtgctctcagggcgacctcacaggggcttggccgtggcactgaggggagagcctgattggctggctgtttcattgccagatctctgaaggccaatcaggatttgtagctcagccacctgctttctgaggagcactgagcaagatggccacctcctggtggtaagtctcgctcctggagttcccatcttgaccctacagcgggacattttgccgccacctctttgtgtgttgggaagatgacgtcctttctgctcgtcctgcttctctgattggtgagtttgggatggagaaatggacacgttcagttcaaccccttccattctcactttccaagaagcaaggtttctctgtctctggaagttttctgggactggactttgtcttggcaaagggasaggctgcaatttggttgggaaatgttaagtagggctgtgtgagaaatcttaggtgcagactggggctcttcatctagctttatcagcaatagagcagacattcttggcccc

SEQ ID NO: 500460 - DNA, 524 bp, Homo sapiens
gctgctcttaggtgtccccattctcatgtggtcaatgccacttggctgcctgtgatgagagaatggtttttggttgtggaaatagcctgtttgatgatcagatctaagatattcgttgtataaaccaggtaagggaagaatctaggctttagaactgggcagactgggttcagatccccactctaccacttattagctatgtgactgcttaacctctctatacctcaattttctcagtagtaaaactgagccaggaacttctatctcagtccycatcaggagactgagaggtttgtctatagcatgtccagcccagggcctggcacatagtgagtactcagcaggggaccaccctgactcaggtcttccaccttccagagggcagggagaattctaccagctctgccctgggtcatgaactcatgggggatggtgatggggaggctcaattgtccctgtgtccccagactgagcacatggccaagctcacagaaggagctcagtctcttcttgttgagtaaata

SEQ ID NO: 500461 - DNA, 447 bp, Homo sapiens
tattgctgtcttatatcctcttcttgcaataaaccgtagacttgtaagcactgtcattttggtcctgtgtgtcttgtttagccattgagcyctgtctaactgccaccgcaggtcacttttgctggggaaggggggtcttggagggaccatttcctgacatgctgcagaacttctcccagcagccccgcctgaagccgtctcaattgcctgccgagtaggacacagtgtacacctgggcttacaggcaactcccaagccctctggttaggatacccaacttttcccaaagggcccagcttcagagctgtcaagacaatgaggtgtttttgaataccaacgcctggcgtccctgcaggaggactcggaactgcactctcccaaatcagaagcaatggcagtgtgactgtcatcacatttgttattctctgcctgcatttacataacatt

SEQ ID NO: 500462 - DNA, 447 bp, Homo sapiens
tattgctgtcttatatcctcttcttgcaataaaccgtagacttgtaagcactgtcattttggtcctgtgtgtcttgtttagccattgagccctgtctaactgccaccgcaggtcacttttgctggggaaggggggtcttggagggaccatttcctgacatgctgcagaacttctcccagcagccccgcctgaagccrtctcaattgcctgccgagtaggacacagtgtacacctgggcttacaggcaactcccaagccctctggttaggatacccaacttttcccaaagggcccagcttcagagctgtcaagacaatgaggtgtttttgaataccaacgcctggcgtccctgcaggaggactcggaactgcactctcccaaatcagaagcaatggcagtgtgactgtcatcacatttgttattctctgcctgcatttacataacatt

SEQ ID NO: 500463 - DNA, 638 bp, Homo sapiens
ggcccatttgcagagattatgtgaggccgtggcctctgggggaaggtggaaggcctctgggctttcctctgtgccctgtgagcgcagcctgcacctgctccaagctcagggcctgccatctcggtcttccagatgctttcccctcagcacagtgggcttctcgccagctcttgactgtgaggcagtctggcgctcctgtggctggtgcccaacctcctgtggctgggtcttgcctcccacagagcagggtctctagtccatctgcctggctggaccccactaggccctttctgcaggttggagtcacatggagccctgcgcaggcaggctccccactgtggacgtggctgctcagagctacgactcaggggctggatagtcattttgtctgacaagatttagctctcgagccccaggcctgcgggctcgatctcggcagtctgcccctgtggcttggaagagggaagagtacagaggyccaggggcttctacagcctcagccagggtcttctggtcccgccctcttctccacttccttctaagcatgtcagctaacatttagtaagtgcttgttgtgtgcaaagcaccttctgtgcagcacctcatttaatcctcaccaatatgcttccccctttgtg

SEQ ID NO: 500464 - DNA, 552 bp, Homo sapiens
tccaccaggaccgcccacctcccattgccatgagatgtgcatgggcctgggaggcccaacctggagccaaagtgtctctacccatgggaaggttctggccaggacagagcccacaagggcgtctgttccttttctgtgtggctgatgtctgaccctcgccaggtccctgatcctcaactatcactctgtgaaggaaacgtgacttaaagtgctgggcctgcagccagctgagctgggaaaggagaccaggagctactggtcacagtcccttgcagtgcctggggtctatcagggcaaatacttgctgctgagatggaaaatccttgccatcttcgtagctgagctcaataacactataaagtatctttccttttcacacccagtctagtaagagtgaccctggtcaggcagctctcctccaggcagtgatttggggacccaggcccccttctgtgtcatgacccctctgactttagtgayccccccatcactaaggggtcatctccattccagccagagtggaaagcagcagggtgaatctcccgtggaagg

SEQ ID NO: 500465 - DNA, 581 bp, Homo sapiens
tagagtctatttgctccaaaagctgcaactccatcccatctttctcctgcttattgaaatgcagatttgatattaactccacattgaaaggatcatgtgaaatctgatcgaagtaaacgaaccaaacataagacagtcatgtttcaggacacagagacacacaggaatgttgacatccactttgttatgactcaaaaaaaatgaaattcacacaggcaggaggctaaatgcagttgttatgcctgggatatgcaccatccaaggwaaaaatgattttgaggttttaaggaagacgggagctcatcccggcaatggcttcatctccctgctcctgaggctgaaaactcatcctagacaggctgcatcaggtagagcccccacctacctgaaaggcgactcttgagcttgattttattgctgccctgtttgggactttccaagttccccttggattcctcagcaccgcacacatcttggggttcatctgtcccaggcatctgaaatgcagaaagcacagagctgatgggagagcccagccctgcgatgacttatgctgtccccctccacaatgttatctcaag

SEQ ID NO: 500466 - DNA, 559 bp, Homo sapiens
tcttcccccacataaagaactgcttggggatcttaagcaccttgtgttgctctttccttgacctcattccacagattctacatctggaatggagtcaggaagcagaaacaagaggcctcagtgatacaggatgaccacctgtggtcgggctttcccttggtagtcacccctgcctccatcccaagttcaccatcatggttagaaagtatcttgccattttaagcctaaytcactcgatcaaaaactcagcaagcccttgtttcttataaaacccaaaccacaaacccagacaactgttattccacataaaacatcccgctgagagacggcagcagcttcagttctcatctctcacatttggaaaataaagtattttcccataatgagccacactttcccttcctgacacgcagcagctccaatctcaccccttttttgtgtccatcacccataatatacacgcgtgtaagcaggctgcgctccttagaacataaagagatcaatgactctatcaccaaagcacttctataatcttgctccttgctattcttcttagaat

SEQ ID NO: 500467 - DNA, 582 bp, Homo sapiens
ctggctagcccccacccacaggcaaagtgacacggtctgtgaagaagggagggtggtctgaagcatcaggatggatgacaccagtggaacttcccaggtgttttacaggcaagggggcgtagaaagaaaaaaatgtgatggtttaagtaaatgccacacatcttaatacctctatctgaatcttcaactccccatacaaatacataaagctgaacttgcttctataattgagatgggttacacagaaacttactattcccaatgactggataaattatcttggcacaaagaggatctgaagaaagtatcaagtccaagaatatcttactgaagccctttctggtagtaaactggccattgtgggctctgtataatacttaggcatcagaaaacggccacaaccctattacgggtcaagtaataattccttccaattartaatactacagatgcggttttaattgcatagtcttttagaatcatgaaaaataatgagagccacctcttttcccgaaggcccaggtttattctaacggagtgccgggctaaggacccagccagcatgagctgtagcgtgacaca

SEQ ID NO: 500468 - DNA, 644 bp, Homo sapiens
  misc_feature (1)...(644): n = A,T,C or G
atggtcatggttgcacaagttcatgaaagtactaaaaatcactcaattgtacagtttaaaagagtaaatgttatgncaattgtttctcaagaaacctgttatttcacaaataaaacataaaaacaaataaactgtcaaaaagcaaagaaacggaaacattgtgtatttgaagatattaaagaattattgggccaggcatggtagctcacacctgtaatcccagcatttcgggaggctgaggcatggagattgcttgagcccaggagttcaagaccagcctgggcaacatagtgagatcctgtctccacaaataaaataaaatgaaataatttaaaaatgtaaaaayatgaaaagaattgttgccttttcacatatgatattcatatgagttttgttttcttttgttttgttttgttttttgtctatgtgtttttttttacagatatgataccctgaacttgctccaaagcaaattggttggggaaaatgggtaagattggccatgaattatgtaagtgctgaaactggctgacgggtgcccacttcttctccctattcaataagtctccctatttttgtaaatatttggaattttccatgagaaatggtttttaaatgtaggtgagatgaggggacaccagcag

SEQ ID NO: 500469 - DNA, 645 bp, Homo sapiens
tccatgttgccgcaaaggacgtgattccattcttttttatagctgtatagtatcccatggtgtatatgtaccacattttcctgatccaatccatcactgatgggcacctgggttgattccatgtctttgctattgtgaatagtgctgtgatatacatgtaactgcaaatcacctattataaatatttgtttggttatyggttcccaccaccaaacctccctgtgccccacaagaacgcaaactgcactcttccctgctgtccccactggccctgccaagtacccagtacatgctcaatatttcctgaaagaatgaaacggattactccatgtgttataccaaccacaccaagtacagtattgcttgtaaattgtgctttaatttctgcaatcagatatgatgcagtgagatacaagtataaactttcattgtgcatccagaaaataaaaagcacaagtatacaggtttagctcaacagcttattcccttataaagaaaaaaaaagttttgaattaaagctagtttatcttcagtgtaaaaacttggaggtataaacaaactcaagatattatatacagtaaattaatttacatttccaaacttgcacagtacagcattttaaacaaagtaaatggtctcatttca

SEQ ID NO: 500470 - DNA, 574 bp, Homo sapiens
tctgctaagtggaccacagatgaatggaacttggcacttattgcttctttttggacaagaatactgcattttgtgctgcttattaacacttattttcctcttcagacttaaatccactgggcactggtggctgagtgggtaaggkgtactcatcttgagtgggctcagtttctgtcccgcttacaaataatccatgagaagcaaagtgctgcagctcatggatcagtggactgacagccagggaaccttcgttctggcctaactacttatgtggccttgaaaagtcttgtcacctctttgggcctcagcttcttcacttgcaaagtgggaagggttaagataaatgttacagacattggaagtggaaagtaatttgtcaatgggcagaaatctaaaatatgaccaagccaggacttttgccataccatgtcaacattttatgactcaataaatgttttaaaaatatttcataatgttggaagttattttggctcatagattgattttttaaaattactttatagtctttacataactgaaggatcagtttttcatcttttacagctttataaat

SEQ ID NO: 500471 - DNA, 631 bp, Homo sapiens
tgtcagatgctcatgacaaaacccatagcaggcaagaggagagagactgctgtgagtgacttagaccagagatgtatgcctgagctaggtcaagtcagctgtgctgaaggacactaaaacaaattagagttccctttacaaggagagagggaaatagctactgggcttgcaattaacagctaactaactgtgaatccttgacctccttctagtcacaaagtcatgtgcataggtctgacgacatcatttcctttgtagagtataaaagcttacactttagacagaagatcaagtctagrgagccctttagcagctcttgacataaaactcattctggttaaaaggtgtaaaaaatttctgaaaacataatcataaaatacatttttaacaatatccagtgttgatagaagggaaagtttagagattaaactaaattcgccactttcaaagaaaccattatatctttgagggtgggggactacatttattctcatttggtgttagtaacagatggagtggaatttgtccttatgggagcctaacatttaaagagaaatcctgagctgtgtaatcagttaacttggttgccttatatctcatctcctctctgtttcacctctccccttctacc

SEQ ID NO: 500472 - DNA, 574 bp, Homo sapiens
aaaaaatgttttttctgggctcacatagggacatatataagggatgggcaagctacacatgttaaaccctccacatattccatctctccaaacrtgggcaagctacgcatgttaaaccctccacatattccatctctgcaagcaagaaatgggtctctaggctaaatgtctggtaaatgtctcttacatacccatggatccacctcattttcttgaactgccgcatagtattccattgatttgataacccatggtttatttattctcttccatcaacagacattatagtttctctgtttgttgctacttcaaacaatacttcaatgaatagttttatatgtctctgaacacatgtgaaggtttctgtagaatttctaccaaaaggaggctttaagtttgtttacattttgcctctgtgtttagagaggccaagtccctttatcccttcccacttaaagagaagacgcagtaactatagttatgaactatgaggagcagagatagaaggcttttaaggaaaaatcagtaaatggtaaatggaacacttccaaataaacaaatgaacaaacacata

SEQ ID NO: 500473 - DNA, 516 bp, Homo sapiens
gtgccttcctctgcatctctgcattgtaactgccatcacttcattccctgtggaagtgcaatccttacttagcatccatcccaagtccctctaccattgtacacctctggccaaccacctcagccctcagcattccctccattcttggaactcacgtggtctttgttctcagtatgtgatcactggctctttccttttctccaaactccttgagtactgagacggtatgtcttagctttctgtctctgcagtgccttaaacattgtagctactcagttttgataaatatgatgttgccaactatcattttataggtatgtaagaatcttgaaagtacaatgggaaatgaacttaaatataataactcattttagctgagtaagaattttagaattaggttaaattgaacagcagtagttcttatagtgatgagttttataggaagatgctactgtattgtayacatacaccctgtttgtcaacgaggatgtatattggaacataggattgctaact

SEQ ID NO: 500474 - DNA, 643 bp, Homo sapiens
ggacctggactgtgaccccagtttgcagtccatcttgggagcccatccctttgacttgtgcacaaatattaattctctgctttgagctctgacataggaactgctgccactaaggcagtaaatgttgtcagtaaataattaaaaaataaaatcatatgaatggacattgcaattaaagcagatcagtgagccattatgattcttcaaagagtttagaatctttaggtttgaaaaccactgcaatcctgaaaaacaaatatccacagacgtagaaatatgatagttctatttttaattttaatttttaactttttgaggatgctacgtactgtttttcataatgactgtaccaaccacattcaacatcaacagtatgcagtggttccctttacactacattctcatccatacttgttatttttttccttttctattaaaamcattctaacaggtgtgaggtcatatctcattgtagctttaatttgctatttcctgatgatcagtgatgctgatcattttttatatgcctgctggctatttgtatgtccacttttgagaagtgtctattcagatcctttgctcatttttaaatagggttatttgttttcttgctgtttgagttttttatacattttttatattt

SEQ ID NO: 500475 - DNA, 568 bp, Homo sapiens
ggcacctggctccatgctggtgccctgtgtctcctctgaccacacaccaatctggtgctcaggaaggcagggcatgcactgccaaagccacggcagagggagacctgccccagggcgcccgcgtgccaacacgcacagtggtctctgtttcattgtgaccacggacacccccaatttattagcttagctgtgaggcttcctgacacaaaacatagcaggtttctccttgccacatccagttaggtgcctacggggtgttaaatatcacatgaaagcaacctttcctctgacttttgctcctgctaacttcacgcaggtggattattggatattttctttcaacctcttgcttccccatgccaggggaacctcacccgtttgagccagccgcctctgcctgctgcagcwgccctggctgggtcctgggagcctcacgccaggggctgcagccgtgcttgctcccggaggcctgagccggcccaggcccccttccaagtctgcccattccttagacgcctttcctttgctctagggtctccttaaggctccctccagccctgtcactgga

SEQ ID NO: 500476 - DNA, 614 bp, Homo sapiens
taaagggtgtggtggttccctccctgggcctggctgctcttcacagtgtgaccctgggtaaaggtccgtttggtggctccgatgggaaaaaattcccaggcgggcatcacctccatggaggtgacagtatgaaagggatgtgactgcccccagagcaagggtttccctagagggaccccaaaaagctggcaagaaggtggcaagggtgaggaggtggtggggagcccctgcctcagtcacaccaggtggaggggttcaaggcagctcccagcttctcctctgttgttaactgttttcccacccccccccccgctttgccccctccgtcccatctgtccctatgctggaggcctgggagcaaggcctgaacccagtgagagaccactgtgggggtgcmtaggtcatggagaaactgtgggccagccagatgtctatggggtggggggtgaggctcaatttcctttaatccgccattcttctgatggggcaggctgcccatctaccaggaaacctgcagggtccttgcaccgggaggggatggatcaggggagacctggctgcttctctgccttctgctattccctttatggggggtggggggagagacagaggga

SEQ ID NO: 500477 - DNA, 421 bp, Homo sapiens
cgtccctgtatggaaatcatttctcagtttccaagaatatccacattggtttttctacaaatggtgggattttatttaatyatattttattgttcaatcctttttttatttgtaagttttctgaaatgactatgtattacattggtaaatcaaaatattaactaatccaatgtagtccaaacagtaaaaatacgacctaaaattatctcaaggtataaatgcttagcaaagagtgatgtagggcctagctctcttctgagctatttgatgagctctttctagaagatgttcttacaatgaacttgggtaacagaagaaaggattcataatcataatgaaggcctggggctgggagggcatctggtcaataagaaattggcccctaaacctcgaaggtccaggcccgaggttggtcagttac

SEQ ID NO: 500478 - DNA, 421 bp, Homo sapiens
cgtccctgtatggaaatcatttctcagtttccaagaatatccacattggtttttctacaaatggtgggattttatttaatcatattttattgttcaatcctttttttatttgtaagttttctgaaatgactatgtattacattggtaaatcaaaatattaactaatcyaatgtagtccaaacagtaaaaatacgacctaaaattatctcaaggtataaatgcttagcaaagagtgatgtagggcctagctctcttctgagctatttgatgagctctttctagaagatgttcttacaatgaacttgggtaacagaagaaaggattcataatcataatgaaggcctggggctgggagggcatctggtcaataagaaattggcccctaaacctcgaaggtccaggcccgaggttggtcagttac

SEQ ID NO: 500479 - DNA, 646 bp, Homo sapiens
acagctgctggtgtcccctcatctcacctacatttaaaaaccatttctcatggaaaattccaaatatttacaaaaatagggagacttattgaatagggagaagaagtgggcacccgtcagccagtttcagcacttacataattcatggccaatcttacccattttccccaaccaatttgctttggagcaagttcagggtatcatatctgtaaaaaaaaacacatagacaaaaaacaaaacaaaacaaaagaaaacaaaactcatatgaatatcatatgtgaaaaggcaacaattcttttcatgttttacatttttaaattatttcattttattttatttgtggagacaggatctcactatgttgcccaggctggtcttgaactcctgggctcaagcaatctccatgcctcagcctcccgaaatgctgggattacaggtgtgagctaccatgcctggcccaataattctttaatatcttcaaayacacaatgtttccgtttctttgctttttgacagtttatttgtttttatgttttatttttaaataacaggtttcttgagaaacaatttgcataacatttactcttttaaactgtacaattgagtgatttttagtactttcatgaacttgtgcaaccatgaccat

SEQ ID NO: 500480 - DNA, 554 bp, Homo sapiens
tgttttttatagttttcaccaaataaattagtgtgtgttttttacagggacttacactgacaagctgaaaatggcacatgagtttttcttcccttagtgggtctgttagctctatgcattgtaagggaagatcagttcaggtgcctgtgagtgaccactggagaaagaatgttgaaattagaatccttctgcctaaatcagcctattttttttttttacctgactccttctctatcactcatgtcaatgagctcctgaattcgtaattagatcaggcatgcctccatgattcctgaatttgcttcctgaaggatgctgtgaagtgtccttcacagccaccttattcattctttttcccactttggttagcctggtgttcttcttgttaacaccgtagctatccctaaatcatgtattttcccttctccttcaatcttggttacgttatccattcccagtgtgtagtttttgtacgtctattccagagctacagggcattcyagaaaagctcacatgatcatgaattgactataaattcacattctcaaaattca

SEQ ID NO: 500481 - DNA, 558 bp, Homo sapiens
gtgtgggtctgggcgaggctcctggtggaaggtctcttaacagatgccttcccttgggcaggctctgggctttgacagtcgtcctttttgctgctagaaactgtcaaatagaagttcaagtttgcctggttcagcaaaacaaaagcagccttcatgttccatttactttttggtattctctcttgtccttagattttggcctggtaggccaggcatggtggctcatgcctgtaatccagcactttgggaggctgaggcggacggatcmctggaggtcaggagtttgagaccagcttggccaacatggtgaaaccctgtctccacaaaaattcaaagattagtcaggagtggtggcacatgcctgtaatcccagccactcaggaggctgaggcgggagaattgcttgaacccagaaggcagaagttgcagtgagcagagatcacaccactccagccttggcagcagagtgagggagactctgtctcaaaaaaaaaaaaaaaaaaatttttggcctggtagttaccttactatttttgtcaggcgttcagtgcttttagg

SEQ ID NO: 500482 - DNA, 352 bp, Homo sapiens
ggtttctcgggcgtttgcttttccacaaatccccctcccctcgacctccccacagccctacaccctatccccctgtgctcccagtctggaggcagcgcaattgaagattaatagattttctggatcttgttttaacttgtagtgctactcaggaaatgacctgaactggcttgatatttcagtctgaaatgagtggcttaaaaaagaaacaacctctcaccaagccgcgaggcgttttactcacgacagtctgcatcccttgttccttcccacccgcttccactaatttatatacaccmttttatttccctgatcggtaaaatacacggacattcccgatgagtttaagccg

SEQ ID NO: 500483 - DNA, 596 bp, Homo sapiens
gggtaaggcccacccacataataagagtaacctcctttccttcaagtccattgattgtagatgttaaccagtcttcaaaataccttctgactccatatacactagtgtttgattaaataactctttactatagcccaaccaggttgacacaaaatttaaacatttaattatcgcaaacccctaacacagaacccagctaccctgggatttccaataggccgatatacattagcccatcacgattgacaaggatgggtacaatatccaggttctcaggtgtgtgctgcagtgcaagtccatggccagaagrgatgtgggaaagcatttgaagcaaatggccattttgttcatagagtgaaaaaaaggaattaaaagttttccatgagtgtgtaaagaggggagcgtttgggcctacacctaatctacaatttctgtgtgttgatgaaaatctccaaaattcagtaagttctactgttgttagccgtaattctagagacatcgggggtttcatcctgatttgtggattcatacaactatattggtaattagtattctctaataatctttccatctctcaccatgacctcgcatctctg

SEQ ID NO: 500484 - DNA, 503 bp, Homo sapiens
ctgcagagcacaagctcttaccacaacatcatgatggcccttggcattgacctggtgagcctctctcagtgctggggcaggggagcccagccagtctgataggcttgatgtcccctgcttggaggagcacacaaccaaccactgtcctcctgaacaccacctttcagggtcactggtctacagcagtggctcattgtctcctatcccttccattgtgctcacatggccttttccctgggagcaagtctttgctcaaataaatccccttttatgaggacacattcttgttggattcaggcctcctctactccactgtggtcccatcgtcactgattacatcttcaaggcccttatttccaggtaagatcacatcttcaggtactgggggttaggacttcaccamatgaattttggatttcatcccataccgggagcctcctcctaggactgctgagaggatgaaagtgcctcatctctacagagcacccagttaacccagcacc

SEQ ID NO: 500485 - DNA, 453 bp, Homo sapiens
ttctttggaaattacctagtctaaggtatttttttacagcagcccaaagagattaaaacagatccccaatccattgactttaagttcatcaaactgtattcacctaggtggacctggcagcttctgttagtyctttaaaagcaggtttagaagaaaggaatttaaagcagcagagactctctcctttgctggctttgaagagtcaagctggcatgaattctgcaataaaaagaaaatgaatcctgccagtaacctgtgggccttggaagtgggtcctacccccattaagtctccagataaggacacagtccagccagcacttggatgtcagtgttgtgagaccttagcagacaacctggcaaagccatccccagacctgcagaaacagtgagatagtgaagtttatgatgacttgttacatttacaggcaactaataaagatacattattttg

SEQ ID NO: 500486 - DNA, 627 bp, Homo sapiens
  misc_feature (1)...(627): n = A,T,C or G
ctttgtcatattcatttagatgtatgaaatgaatcatatctctnaaaataacttgtcacttcgaaaacctataataatctgttttcattttgcaatgtttgaccataagctcttgatggttcaggaaatacatcagaaaagattcaagcaagtcctgagaaattagaatttatacaacaatgaatatgtagagtagaaaaggtaatgtttgaaagctataaaatctctgcatagaataaaaatccagagaatgttgtaattttagaaatatgtaaagtataagtttatccctataaagagggacaaatgtatgatctggaccatggaagggatgccatttcacttttccatttctctagggttctgtaaaggtcacaggctttactttcatagrtacaagattgggacaaaacagaaaagacagatcctaggttatattttacaacacttcaaggaccagagaggcagaatctacacacaagatctctggtaaacaccagaaggcatgtgtccttgttcagggttgcaactatctccttgggcatccagaggtgaggctctgctttcattgggtagtcttgagtgatgacaaaggaaaaatgaccagagggcttgtctagtgttaaa

SEQ ID NO: 500487 - DNA, 627 bp, Homo sapiens
  misc_feature (1)...(627): n = A,T,C or G
ctttgtcatattcatttagatgtatgaaatgaatcatatctctnaaaataacttgtcacttcgaaaacctataataatctgttttcattttgcaatgtttgaccataagctcttgatggttcaggaaatacatcagaaaagattcaagcaagtcctgagaaattagaatttatacaacaatgaatatgtagagtagaaaaggtaatgtttgaaagctataaaatctctgcatagaataaaaatccagagaatgttgtaattttagaaatatgtaaagtataagtttatccctataaagagggacaaatgtatgatctggaccatggaagggatgccatttcacttttccatttctctagggttctgtaaaggtcacaggctttactttcatagatacaagattgggacaaaacagaaaagacagatcctaggttatattttacaacacttcaaggaccagagaggcagaatctacacacargatctctggtaaacaccagaaggcatgtgtccttgttcagggttgcaactatctccttgggcatccagaggtgaggctctgctttcattgggtagtcttgagtgatgacaaaggaaaaatgaccagagggcttgtctagtgttaaa

SEQ ID NO: 500488 - DNA, 538 bp, Homo sapiens
acttgccagcagccacccccattactttcactggcagaccctgtctaacagtcagagagcttctgcagggaggctcccaccagcttgcacaarcctgcaacccactcactgttgcttcaccaccactcgtttgcctgtagcctccctcgtgctttgctggagtgcatgtgcatactgaccccaccaccaccatactaccagcatgcacaggcacatgacacccactgctgccatgctgaaaccctgccaaagtacatttgctggcacccctcattggagtgttattgttagcagactggaaacacattggcccctccagtgtagcaggtgcttaaccttgaagggccagagaaaaaagctacaggcttagaaccagcaccccagggttacaacattcagcctaggagtgctgaactgaactgagcgttggcctcctgaaatcattcagaaatgaagccaattgactaaattcaacttataccacagtcaaatcctcaagaacattgaaaaatataaaagtaaaaagtctcatttaagg

SEQ ID NO: 500489 - DNA, 598 bp, Homo sapiens
ccatctgccaggcagcacaggccagcagaagcacagtggggcacgtttcagaagctgttccccaggtctgcccatgtggctgttctagcctaggctgcagtcccagggaggttcttgtgtcatctcaggagctgccaggccctcacaagattttaatttcaaaaagcctatgtgaatcttgtctgcaaatgtgccactgaacagcagacaagctgcagtgggaaggagacactccaatcatctaaatgtgaaacagatgacccatataatgtgaatggggaaaagtgccagagaggggacatggctaccctagaaagaatgggagacctaactctgagttttcagtgaaaattttgtttatctcacatcctctctccttttctacctgtgagattttaaagagttggtttccgaaaggacagaaggcttagaggaggaggtctcacctgtctttctttccatgaactgcaaattccactagttattgccaaaggcagaatgtcctggatactgggcaggggtgggcttccttgagatrcattctaaatctgcctcagaaaaaggggacagaagatcaggtttcattaaaaatgaggcc

SEQ ID NO: 500490 - DNA, 646 bp, Homo sapiens
tggccgttgaccagtggaactacatggagtttgtcctggacgattagaggggagcccggccactgagtagcccgactccaggggaaaactacggtcccactccatttcctttctggttcccccatccgctgagagctacttccactcaataaaaccttgcactcattctccaagcccccgtgtgatccgattcttccggtacaccaaggcaagaaacccccggatacagaaagccctctgtccttgtgataaggcagggggctgtaatagagctgactaacacaagcggcctacggatggcaaaactaaaagagcacatggtaacacacacccactggggcttcagaagctgtaagcattcacccctagatgcagtcctaargttgaagccccacaatctgcccttctgcatgctccccgtagaggttggatttaaacagaacaaagcaaattaaaagcagaacgagagaagaaaacatatcttaaatgttcatcatcattagagtgaatttttgaggtcgaccaggaagaagaaaaataatgtttttaacactttgtataagtcttagaggtgtagtagtactcttttgaggatgggcatgagcacaggctttataagacatatgcagattgtggtgagtgttac

SEQ ID NO: 500491 - DNA, 462 bp, Homo sapiens
tgttcatgtccatttccagcagcaagccatgtctgcagaaatgtgataaatccaaccaaagaacaggacagacttggtgatgtatgcaaataaaatattaacccacatctgtaagcgttaatgtagcaaattctattatagatattatgtatataacttaatttcatttatgcttgacattgaatggcctcttcaaactgaaaaatattgaatctgcctttcaagtaatataggttcatttaaacatgcctaatattattatgccattggcaaatttacttctgtcatttagatcaaaggcatatattttctgcatttctatgcctgcttctcagaaataccactgttctttcttcccattaatgacttaatgccttgtaattcttcagaatatagaaaattgcataactaaattgcataagtgatytcatttttccaaaaaacaatctttgtctccttgtg

SEQ ID NO: 500492 - DNA, 678 bp, Homo sapiens
ggtgtattttctaaatacaggccttccctacccttatgttagtcagtgtaagtaacaatcgctgctatagcaaccatcctgacaccccattatctttaatacaatgaaagcttattcctcattcacattgcaattcaatatgggttaggcagttctcttccaaatgatgactcagggacacagggttcttccatcttgtaataccattatctgtaacaaatggcccctaaggtggctgcaaaatggaagagagaatggaggatcatgcataggagaattttacgggctgggctggaagtgggatacaacactcttactgacattccattggccagagcccactaaactgggctcaacctaacagcaagagggctttaaaatagaggcagccatatgccctggaaggagagaagaaacacasatcagggggtaccggcattctccacatagttcgccttcctggtctccaaatacctgtttgctccgttgttttcacacataaaacacattcacccctcaccatggagggaactcaaagtcccatctggtcattgcactgagctcaaagtccaggttctctgtgtgatctttattcatcaggtcagcctgtagctcccatataaaatgggaggaatatggatctgataatcacaatcaaaatgcccatttagaaaatgg

SEQ ID NO: 500493 - DNA, 678 bp, Homo sapiens
ggtgtattttctaaatacaggccttccctacccttatgttagtcagtgtaagtaacaatcgctgctatagcaaccatcctgacaccccattatctttaatacaatgaaagcttattcctcattcacattgcaattcaatatgggttaggcagttctcttccaaatgatgactcagggacacagggttcttccatcttgtaataccattatctgtaacaaatggcccctaaggtggctgcaaaatggaagagagaatggaggatcatgcataggagaattttacgggctgggctggaagtgggatacaacactcttactgacattccattggccagagcccactaaactgggctcaacctaacagcaagagggctttaaaatagaggcagccatatgccctggaaggagagaagaaacacacatcagggggtaccggcattctccacatagttcgccttcctggtctccaaatacctgtttgctccgttgttttcacacataaaacacattcacccctcaccatggagggaactcaaagtcccatctggtcattgcactgagctcaaagtccaggttctctgtgtgatcyttattcatcaggtcagcctgtagctcccatataaaatgggaggaatatggatctgataatcacaatcaaaatgcccatttagaaaatgg

SEQ ID NO: 500494 - DNA, 470 bp, Homo sapiens
agtcatggtggtaatgaactctgattgctaattagtgaggattgggctccagcaatcgatttcaccgagctctgtgccccgggtccatggaatgcgcttgtgctttggagtcagacagatgtgccttctcatctcagttccaccactgatgtttgtgtgaccttgggcaagtgatttcaagtcccagacctcagtcccctccctgtaaagtggagagaccattcccacagcccagggctgccatggggatctcatgacatagtacccttgtccatatggcaggcaccaaacagacagtacgtctcttcctctcccttccagctcttagtctttgcctaggtcctcacacctcccagggtgagaataagtggagaatttgaartccatctagcaaagtcaagaccctatgggagtacgccctctttggttggtgactttgtgcaactacacaaagcaatcctggcttccca

SEQ ID NO: 500495 - DNA, 586 bp, Homo sapiens
ctggggagggcagcagcagcaggacaagaggtcaggaggaagcattcattcctggagacctgctggagtggatgccactgggccggatgccggaaacgggagacacagaggatgtggtgcccagtccctgccgatgccagggcctgccttaaagaactggacatcagcaaacagaaaaccattcagaccctgcagcaggcggggttcccatggcaaccaacaattccccagcacctccacatccccttcttttcccctcataaacttgccatttgtatctaacctacactttggataatgtccaggttggataagaggtgctgggagtgggggtagatactggagagagtgtcaaggaataggaagaagatacctggttttcacatgaagtcggagaattaaaagctgttggatccataggcaaattttaatcaggctgtgttttttttgarcccaactttccttccagttctggcatttgcccaaggctcttttatagccaaaggccactggtcactacttcctcttggccctccctagtcatcattcttgcctgctggaagggatgctctgctgcccgatactg

SEQ ID NO: 500496 - DNA, 598 bp, Homo sapiens
gctagtgtttaagtgagaaggcaaactcaggctccagctattttcccattgcccttatcctaagggcaatgggaagcctttggaggattttaaccaaggtagtgacatttggatccgagttttgggagagagacctgggttgtaggtaaagtcacatagatttgggagtggtatcattaacgggaggttaactgcaacaagtagaccttcaacatttccttttagcaagattactgtggtgccatatggagaatggattataaaactgtgagactagatgtgtagaaaccacttaggatgctatttcagtagtccagatgaagatggtaatggtgacatttgaaatggaaagaagtggatgggttcaaaagaatactagacagaattagcaggccttggcaattgacyagatgagaggttggcaaaatttatctgcaaaggactagataagaaatgcttagcctttgccagccatatggttcctgtcaccactactcaactctgctgtttagtgagaaagtggacatagacaatatataaatgaatgagcatgcctgtgtccccataaaaacctatttacaaaaaaacaggccatagg

SEQ ID NO: 500497 - DNA, 227 bp, Homo sapiens
cagggcaggcacagaggtctgctctgctckgtgtgggaagatgaagcccacggcccagaagaggttcctgcaagtcctctggttttaagcagatctttcccctctctcccttcggaatccctaaattcttggtccatgggaccaggcagatgaaaagaagtagtcaggaaaagctagagacacatatttcagaaacccgaaatagatttgtaatatgcaaacttcct

SEQ ID NO: 500498 - DNA, 632 bp, Homo sapiens
aaatttaagtgtgtaatagaatagtgttaactatgggcacaatgctgtacagcagacagcagacctctagagcttattcatcttgagtaactttggttccatttggggccaagtacagtatttgcctgaattaaatcttaaatcatgcactacatacacgtaaaaaawctcctaagtctagacagatgtttattaaaaatatttaatttgtcaatacagtgcatcattatttaatgaaataaataaatattgcagtgctatttcctttacttattttacaaaaatcaatctggaaaagatgatttagtaatgatcattcttcatttgcaaaccaaagttgactaattcataatggaaaagttggctagaatttaaggacttacaggagaaattcatatgactcagtctgcttttgagtaaaccaaaagatacaaaaaagatttgactatcttttgaaataccctgaattcaagtttctttttttcccggatttggttcaagagggattattctgttaggaatgagagaaggagcctggaaaaaaacttaaagaaaggcagaaccttttttgttacccattaatgcttttttagagttgttcatttttctcttctattggtgtcacataatat

SEQ ID NO: 500499 - DNA, 572 bp, Homo sapiens
agtgagagtttatttaatatttattattgtagggaccataaattttacctttaatatttgaaattaaattcactctcctcaccaccacccctgagattgtaattatcagaaagtaggcactgaacagaagtgaagatgattagaaaaataatttgttcctaatgaaatcagtggaatgccaccctgaccctattcagttatttcaggtactcaagtggccaactaaaattaaaattttaaatccttaatctcatgactaaatcccttcccccatccctattgaaggaaattcttgaccaaggttaaagaaatgcctccttaaatttgatcaaatatttccattttaactttaagaaacatttgcagagtttgatatttctctcaggtgtttgcaggggttctagttttaatatcatttttcttaatgtgctagctattatttttacataaatagtttagcagcaggctatagattaaatcytgaagtacactgtattcttagtatttctgaaaataaataaaagcacacagaagaaacatttatgaaaaatgacacattttctatatattca

SEQ ID NO: 500500 - DNA, 570 bp, Homo sapiens
gttgcccaatagcatcaacaacaaagaactggtacaatggtggagcaagagactaaggaagatccaataaaagtgtataagttcttgttcagttttgggacctaagccaactttcagatccataatccattgactaaagaagtaataaatagggtcctgactaaagcctgtcttataatgggctcactggttctacaggaaatgctagtagtcatttttgcagtctttgagtgtatatttggaatatgtatacttgtagttgggataacacccacwccgagtccttggcctatggtgtaagaactatcataggagggatagctaaatggaaaccactgaatctgcccacctccacacagtcaaagttagtaaatagaaaagacaactgcctcctaagaaaatggcaaagattactgccatctttaagccccctacataaaaaaaagtagtgatattgatccctattatatatccatttaatttgctgtttgggcctctgaataaataggtggatccaggaaaatgactgaagatttttataaatttaatgaatgaatatccccaattaca

SEQ ID NO: 500501 - DNA, 652 bp, Homo sapiens
tgaaagggacatgttcagtagtaacttttaaagatgtgcaccaatgtaaggcatctctaagggcaaaataaagcaaacaattgtgttgcccaatagcatcaacaacaaagaactggtacaatggtggagcaagagactaaggaagatccaataaaagtgtataagttcttgttcagttttgggacctaagccaactttcagatccataatccattgactaaagaagtaataaatagggtcctgactaaagcctgtcttataatgggctcactggttctacaggaaatgctagtagtcatttttgcagtctttgagtgtatatttggaatatgtatacttgtagttgggataacacccacaccgagtccttggcctatggtgtaagaactatcataggagggatagctaaatggaaaccactgaatctgcccacctccacacagtcaaagttagtaaatagaaaagacaactgcctcctaagaaaatggcaaagattactgccatctttaagccccctacataaaaaaaagtagtgatattgatccctattatatatccatttaatttgctgtttgggcctctgaataaatrggtggatccaggaaaatgactgaagatttttataaatttaatgaatgaatatccccaatta

SEQ ID NO: 500502 - DNA, 591 bp, Homo sapiens
cactgtaagtcctgttgctcaaactccccctcacatcacttggttgatttggaattagttttctaaagtaacaccttttcatcaatattgcctaaattcttactcattcaaatctgtttttctgtagcttttactttttaagtaaagtgtgttattcagggatcctcagagaaacaaaaccaaatatagtgtgtgtgtgtgtgtgtgtgtgttggatatgtgtatttgaatacagasgataaagagaaaaagagagaaagatatatttattttaaataattgctcatgtaattgtgtggactagaaagctcaaaatgtgcagggtaggatggtaggctgtagactaatggaacagttcatacttcagtttgagtttaaaggcagactacttgcaaaattccctctttgagggaagtcagtctttttctattaaggccttcatgtgattgcatgaggaccactcactttatgaagagtaatctccttattcagaatccactaattagtaatttcatcccccaaatacctttactgtaacatctaggataatgtttgaccaagtatctgggtactgtagcctgtaaattaacc

SEQ ID NO: 500503 - DNA, 595 bp, Homo sapiens
ttgagtttttcttatggttacagagtgctatttgtttttactcattgtttcacacatcttccttctgagtttagtttccttcgtactgaaatacgtcctttagaagttcattcagagatgctttgttagtaataaatttttcaatcttttaggaccaaagttgtcttgattttgctcttaatcttgaatgatgatttggcaggctttagaattctaggttggcagtttcccttattgcctggaaaatattaatccattacattctagtcttttattggtgttaaaggaatgtacattaattattaaaattgtttatttgtrtgtaatctattcttcctcttttgcttcattcttgatttcattttcctcttttgttctgcagttcgcaacagtatgtcccagtagggataacttttattctctttattgagcctttatttgattctttaaggattcatattttgttcattctgcaaaattctcagactctttttttagatatctattgcttcctagcttcttcctcaaaatttaatggctttaagccacaaacattaattatacctcatgattttaagcttcataattcatgcaa

SEQ ID NO: 500504 - DNA, 595 bp, Homo sapiens
ttgagtttttcttatggttacagagtgctatttgtttttactcattgtttcacacatcttccttctgagtttagtttccttcgtactgaaatacgtcctttagaagttcattcagagatgctttgttagtaataaatttttcaatcttttaggaccaaagttgtcttgattttgctcttaatcttgaatgatgatttggcaggctttagaattctaggttggcagtttcccttattgcctggaaaatattaatccattacattctagtcttttattggtgttaaaggaatgtacattaattattaaaattgtttatttgtgtgtaatctattcttcctcttttgcttcattcttgatttcattttcctcttttgttctgcagttcgcaacagtatgtcccagtagggataacttttattctctttattgagcctttatttgattctttaaggattcatattttgttcattctgcaaaattctcagactytttttttagatatctattgcttcctagcttcttcctcaaaatttaatggctttaagccacaaacattaattatacctcatgattttaagcttcataattcatgcaa

SEQ ID NO: 500505 - DNA, 580 bp, Homo sapiens
acatatctgtactgtaagttgagagttactgcaaaagagtcaaaaagtttttaaaaattgaaagtttataaagtgaaaaattacaataatttgtaggtttttgactttcaataatagaaggcaattattgaagaaataatttaaaaaataaatttagtgtagctactttacttttactgtaccttttgtctttactagtttagacacacaggtatttacaattgtgttacaattgcctacagtattcagtacagtaatatgttgtagaggtttatagcmtaggaacaaaaagctataccacatagcttgtatatataggatgctataccatctaggtttgtgtaagtgcatgctatgatgttcatacaatgaaataacctaatgactcttctcagaatgtatctccttcattaaaaaacacattactatactggtcctgtttctctggagaaacctgactaataaaatacctatttccacaacatctaattgaggtttttgagctaaatgagataaggtggctttcctagagatgtgattctctatttgtgttccagacaatgattactcagaaacttct

SEQ ID NO: 500506 - DNA, 605 bp, Homo sapiens
agttaaatgaaatacatatattgaatagataactaaattccacaattggaacttaaggaaatgcattctcctctgtcaaaacgtttcacataggttcaaataactgggatygtgcatcacgtcatggaatgaattcaacataaaaataaattggttgaaaaatcaaggaaaatattttaaattaaattgtttgctttctccctttcccaattctgtctcttttcctttccagaggcttctaagagactttaagtgtgcaccaagggattttctagctgttttcacccacggttgatatatctcaaatgtccctatactaatcttcccttttgctgatagcaaataatgtagatgtactccttttttattattgctgcaaaaatgatttatcttcaacatttaatacattaaaacattcataaaaatacaaatagttctacggtaaatgtgtgggtttgtcatgagcactgattgaatgcactaactattcgccaagactgtgaaaagattgtcccattctgatgctagcgatgacactgtgattttggacattctatgtttcaacttgactgtctcttaaatcatgtaactctcttcctgtacaa

SEQ ID NO: 500507 - DNA, 561 bp, Homo sapiens
gtaccatcatatattcatgagcatccattctgaatgggcaccacagtgccagaatccttcagatatctctggtcaatctatagtccagcaatccacaatgaccattccagatcttctctagcttccttaaatgccyaactttcctacccatcaacggatgcctttatttcatatttcacagagataatagacactgtcacataaggccactccccccactccacacccccaaatcctgctaccaaactcactaacataacagcatctgtacccatctggtcctccttcctgcctattccatagaggagctgtttttctttctgaaagagatcaattcctcacatgtgctttagaccccatctcctttctccttcgcaggaatcttataatttaggtggttctgtatctcctgaatatccaatctcttttcaacctcatcaattgcttcaaattgtaaacattaagcaaattatattcagctttcaaaaaaaaagggaggaaatcctgtcatttgggacaacatggatgaaactagaggacgttatggaaaatgaaataaag

SEQ ID NO: 500508 - DNA, 481 bp, Homo sapiens
ccatacctgacatgggataaagtcctacttgacctactctttctcccggagaagagcagcaactgagagattgttgtttcatcattcaacatcgaggaatttccaaatttataataaattatatctgggggagaaatgaggcatgagggtgcagttaatgccaacattcaacaaacagcaaaagaattatactgtggcctgtatcctcaaccctttatattcatgtaggacgttgagaagaatcaaacagacactgagaccagggctgctcccaaatatctctagtgctaggcccattgtcatctttttctctaacttcatgtggcaataggcgaggagggacctccatctttttgtttctaattaaggygaaattcagctaacatcaaattaacaattttaaagcatatgattcagtggcatttaggacattcacaatgttgggcaaacatcacttccgtctagtcccaaaacattttta

SEQ ID NO: 500509 - DNA, 580 bp, Homo sapiens
tgacccatagaatatacaacaccaagtgtgaactgggatgtaaatgatggactctgagtgatgatgatgtgccaatgtaggttcactgactgtagcaaatgtaccagtgtggtggggartgttggtaatgggggaggccctctgtgggtgatgtaacgtgggaactctgcacttttcactaaattttcctgtgtacctaaaaccattctaaaaaatatagtctttttttaaacaacggaaatgagctaaggctataaatagataattcacagaaggaaaaatgcaaatggccaatgaatattgaaaagtggttaaccttatttgtaaccaaagacattcaataaagtggtaccatttttgtctattaaattgaccatactttaaaaagtataaggattcttaattacagataaacatacatgtttatatatagtcaatggaaaagtaaattgcaatagcttttctagatatactttggcaagatgttcagaaggacttgaaaaatgtgcatgcactttgcccccattctgcactgagaaatgtatgctaaggaaataaccatgaatattcatcagacaca

SEQ ID NO: 500510 - DNA, 580 bp, Homo sapiens
tgacccatagaatatacaacaccaagtgtgaactgggatgtaaatgatggactctgagtgatgatgatgtgccaatgtaggttcactgactgtagcaaatgtaccagtgtggtggggaatgttggtaatgggggaggccctctgtgggtgatgtaacgtgggaactctgcacttttcactaaattttcctgtgtacctaaaaccattctaaaaaatatagtctttttttaaacaacggaaatgagctaaggctataaatagataattcacagaaggaaaaatgcaaatggccaaygaatattgaaaagtggttaaccttatttgtaaccaaagacattcaataaagtggtaccatttttgtctattaaattgaccatactttaaaaagtataaggattcttaattacagataaacatacatgtttatatatagtcaatggaaaagtaaattgcaatagcttttctagatatactttggcaagatgttcagaaggacttgaaaaatgtgcatgcactttgcccccattctgcactgagaaatgtatgctaaggaaataaccatgaatattcatcagacaca

SEQ ID NO: 500511 - DNA, 580 bp, Homo sapiens
tgacccatagaatatacaacaccaagtgtgaactgggatgtaaatgatggactctgagtgatgatgatgtgccaatgtaggttcactgactgtagcaaatgtaccagtgtggtggggaatgttggtaatgggggaggccctctgtgggtgatgtaacgtgggaactctgcacttttcactaaattttcctgtgtacctaaaaccattctaaaaaatatagtctttttttaaacaacggaaatgagctaaggctataaatagataattcacagaaggaaaaatgcaaatggccaatgaatattgaaaagtgkttaaccttatttgtaaccaaagacattcaataaagtggtaccatttttgtctattaaattgaccatactttaaaaagtataaggattcttaattacagataaacatacatgtttatatatagtcaatggaaaagtaaattgcaatagcttttctagatatactttggcaagatgttcagaaggacttgaaaaatgtgcatgcactttgcccccattctgcactgagaaatgtatgctaaggaaataaccatgaatattcatcagacaca

SEQ ID NO: 500512 - DNA, 618 bp, Homo sapiens
caggccagactgcagcctccacatctgcgctgcttggaaactgcttcccaggaagtgagaaagacctcacagtagccataactcctcaggaaagaagaatgagaactgcaaatgcagggtttagctttgtgggtttggaaggtttattataacagtccaactagtacgcacacctgggaatttgatgtgttaccacaggagttttgaaaagatctggaaataaagtcaacctgtgcaaggcggggagaggaaaccccaaaagctgccaggtgccaggagctgtgagtgtcctgtaaaacaggacaggcacacataagtgaacactgagggatgggaaagagtcccttcatcttgaatgtggaccttttctgagatcatgttcggattcttcacccaaagacactgcccacaatcctaaggcacctctgagaggccccattctgccacgtgggaacttgtggtcttagggtgcagaaaggcatttcagcaaagcatctccaaacctggccctaagaacaatggaggaaatcggtacagatgctgtgatgtgggttccccagcctatccycatcctggcctcttagccatgcccttggtgagacgggcccctactagctc

SEQ ID NO: 500513 - DNA, 666 bp, Homo sapiens
ccaaagtaagagtcgggaacatcgtcttagtagttttaaaaatataaaatagatcatcagactacatttatacttgtggatttcytttttaaataattttttatttctgttcatctgcagaatgacacatgaaaaagaaaatcccacagttaaaaagaacatcttttatatttagcatgtatatatacatatacataatacattacatatattatatgtgatacacacaatactatatatgtattccttcattcatgtgctcattcattcattaagcatttaaggagcaccatgtttgtgtcaaacacacttcacttagccacagttactgtttaaacaacaaactgagatgtcactctctttctgcttatgcaatgcccttgcctcagagcttctaacggatctaatgtagttcttccaaattcctctagcagaagcctgggaaaggcatggtcccagcctggagcagatacagaaagtattatactctgtccctctgtgatcgagtctctgatccacaagctctggttacttttttttttttttaggtacaggttctctcttggacacccaggctggagtgaagtggtaccatcaaaactcactgcagcgttcttgtagggatcatacaatacatataatattatatgttatataatataggga

SEQ ID NO: 500514 - DNA, 467 bp, Homo sapiens
gcagtcacaaaaaaaaaaaaaaaaaaaaaaargctccagcctctctgtctttgcatggtcaatgccactgcatccagctgccactggtgtgtactttgtgatcctggccttgcctggctggtctgagacttccaccactgctccctattcacaaacgttgctaatcaagccctcagaatccctcttaacacagccctccaagcaaccactattgactggcacggacttgggaaggggatgacagggacagaggtttgggccggagtcaacgacctggcactgctctgactctgaaacagaatctcccaggtatctctctgatacccgactacgtcatgttatctacgtctcatacctgactacgtcataggagctaaatcttgttcccataacctttagcaggaagcattttctcagaccagttggaaaggttggtttaggttttatgtttttcctaaggacctttc

SEQ ID NO: 500515 - DNA, 593 bp, Homo sapiens
tgcaaaaatattggtgtccttttttacacatgagtaagttaagactaagagtttgaaacgacttgtctaaggtcacataatgacagattaagaactcaaactcaggcctctctgactccaaaacttcagttcttttcactctgcaagaaacagaaggcattcgtagaaagcagaaatctggtgaggagggactatgattattactgtgactttcatacacagatcaatttcttccagcccactgaactcattgatagtctggttcagaagcttcccagcatttgcaaaatgttgctaggcayctgtatctctttgatatctcttggtcaccaccaggagtatactgtcacctacaccaaatcagagccatttctcgggtatagaataaagactttcttgatttctcctggttttccagaaggctaatggacatctcccggcagaagactagtagagagaccttttaaagaataatacatgttatcctaatactctaaaaataattctagagaccttgtcccagagctttcaggaaactctgccctggggataaggttggccttgacatgtgcatttctacatgtctagtcagc

SEQ ID NO: 500516 - DNA, 516 bp, Homo sapiens
gtggattgaggtctgaggctcttggagtaaacaaactcaattcaaattccaactctgccactcatttcctattacctcgaacaagtcatattagttctgagccttagtttcttcatcaataaaaggggcctaaaagttattgtactcacaacaatcatctaagttcttggcacagtacttgacatataaggaatgtgtgttaaacacaaggcatcctcaccattaaaagacctaatgaaggtgaaatggtaaagagaataaacacattactttgttgaaactttttaaactcacctttgatttggccaactctaagaatttattttgtctaaacctgtattacacaaatattatatgccagggactgaggtgggaaatgaagaaataaaaggaaaggaatttyaaaatctgatggtctcagaaaaggaatagcctaatcaaatcatcaaagaatcatagcagtgcctaaagaccttgatcggggtacatgtgtgggactgagagagatcagaagag

SEQ ID NO: 500517 - DNA, 497 bp, Homo sapiens
ctgctttggctcactttttaaaacactagcaaaacatggttgttgaggacaactggcctttgggcagccagtttgcattccctataaccttagaccagtggtcagcaaattgtttctattaaaagccagatagtaaatattttagactttgcaggccacatgagctctattgcaactactcagctctgctgttgtaatgtggaagcagacaytgacaatctgtagacaactagtcatggctttgttccaataaaactttatttacaaaatcaggaggtgggccaaagtttgctaacccctgtcttagcagattagacaacttggggagaaaattgtctctatttatacaaagtgtgactgatattatagaacagtattttaaaaatgtaacttgtgtcttcaaggtcaataaagtgttgtcttctgtgagctaaaaggagggcagaagttaacagtcttgtttcttcagttccaaagtacgcattaaataaaaacat

SEQ ID NO: 500518 - DNA, 651 bp, Homo sapiens
ctgctttggctcactttttaaaacactagcaaaacatggttgttgaggacaactggcctttgggcagccagtttgcattccctataaccttagaccagtggtcagcaaattgtttctattaaaagccagatagtaaatattttagactttgcaggccacatgagctctattgcaactactcagctctgctgttgtaatgtggaagcagacactgacaatctgtagacaactagwcatggctttgttccaataaaactttatttacaaaatcaggaggtgggccaaagtttgctaacccctgtcttagcagattagacaacttggggagaaaattgtctctatttatacaaagtgtgactgatattatagaacagtattttaaaaatgtaacttgtgtcttcaaggtcaataaagtgttgtcttctgtgagctaaaaggagggcagaagttaacagtcttgtttcttcagttccaaagtacgcattaaataaaaacattgcattcctaaaatagggattcatcttagagttgcagcatacatttaacacggtagcgtttctccagccctctacaacattgtttcttaactgagtggtatgtacagtgaagtgaaaagtcatatataaagtgacatcagatcagtttgaaaca

SEQ ID NO: 500519 - DNA, 648 bp, Homo sapiens
ctttggctcactttttaaaacactagcaaaacatggttgttgaggacaactggcctttgggcagccagtttgcattccctataaccttagaccagtggtcagcaaattgtttctattaaaagccagatagtaaatattttagactttgcaggccacatgagctctattgcaactactcagctctgctgttgtaatgtggaagcagacactgacaatctgtagacaactagtcatggctttgttccaataaaactttatttacaaaatcaggaggtgggccaaagtttgctaacccctgtcttagcagattagacaacttggggagaaaattgtctctatttatacaaagtgtgactgatattatagaacagtattttaaaaatgtaacttgtgtcttcaaggtcaataaagtgttgtcttctgtgagctaaaaggagggcagaagttaacagtcttgtttcttcarttccaaagtacgcattaaataaaaacattgcattcctaaaatagggattcatcttagagttgcagcatacatttaacacggtagcgtttctccagccctctacaacattgtttcttaactgagtggtatgtacagtgaagtgaaaagtcatatataaagtgacatcagatcagtttgaaaca

SEQ ID NO: 500520 - DNA, 651 bp, Homo sapiens
ctgctttggctcactttttaaaacactagcaaaacatggttgttgaggacaactggcctttgggcagccagtttgcattccctataaccttagaccagtggtcagcaaattgtttctattaaaagccagatagtaaatattttagactttgcaggccacatgagctctattgcaactactcagctctgctgttgtaatgtggaagcagacactgacaatctgtagacaactagtcatggctttgttccaataaaactttatttacaaaatcaggaggtgggccaaagtttgctaacccctgtcttagcagattagacaacttggggagaaaattgtctctatttatacaaagtgtgactgatattatagaacagtattttaaaaatgtaacttgtgtcttcaaggtcaataaagtgttgtcttctgtgagctaaaaggagggcagaagttaacagtcttgtttcttcagttccaaagtacgcattaaataaaaacattgcattcctaaaatagggattcatcttagagttgcagcatacattyaacacggtagcgtttctccagccctctacaacattgtttcttaactgagtggtatgtacagtgaagtgaaaagtcatatataaagtgacatcagatcagtttgaaaca

SEQ ID NO: 500521 - DNA, 648 bp, Homo sapiens
ctttggctcactttttaaaacactagcaaaacatggttgttgaggacaactggcctttgggcagccagtttgcattccctataaccttagaccagtggtcagcaaattgtttctattaaaagccagatagtaaatattttagactttgcaggccacatgagctctattgcaactactcagctctgctgttgtaatgtggaagcagacactgacaatctgtagacaactagtcatggctttgttccaataaaactttatttacaaaatcaggaggtgggccaaagtttgctaacccctgtcttagcagattagacaacttggggagaaaattgtctctatttatacaaagtgtgactgatattatagaacagtattttaaaaatgtaacttgtgtcttcaaggtcaataaagtgttgtcttctgtgagctaaaaggagggcagaagttaacagtcttgtttcttcagttccaaagtacgcattaaataaaaacattgcattcctaaaatagggattcatcttagagttgcagcatacatttaacacrgtagcgtttctccagccctctacaacattgtttcttaactgagtggtatgtacagtgaagtgaaaagtcatatataaagtgacatcagatcagtttgaaaca

SEQ ID NO: 500522 - DNA, 607 bp, Homo sapiens
gtaatacagcctagaaacagtatgtccaggggagcctgtcatggcctggtgttttgcctatgggtaagttggggtgcaagtaatcccctttctgcaaataaggaaaccgtggctcagaaagcccaaggtcacaaggtggctggcggaacaggataggggttactgcatttcatagatgataaaatgtgttgtaggaattttatacatgaggaaacaggtctggagggaaatgtgactttctcaagaccatgcaggtaagaggagcagggctggggctggatcccagtcaccctggttcctgctcctgagatctttctactttactcctcgttaggagcagtggtagaaccagtgaaacaagtagcacttattaatcatgttgttgtccatatttttgttgtttttcttctcatttttggaycaaagttcacagaattctatttaagtaagcaaaggaagaactgattctaaacaaaccctcctttttcttgtttctttattgtaattcttcacttagattctgcttgcgatgcaattttgtcctccattctcaacaaaaccctgccacctcaattagtttaatccatactgagcctggtctttgcca

SEQ ID NO: 500523 - DNA, 504 bp, Homo sapiens
gatcacctgttggctaagaaatagtaatagaggccgggcgtgggggctcatgcctgcaatcccagcactttgggaggctgaggcgggtggatcacgaggtcaggagatcgagaccatcctggctaataaggtgaaaccccgtctctactaaaaatacaaaaaattagctgggcgaggtggcgggtgcctgtagtcccagctactctggaggctgaggcaggagaatggcgtgaacccgggaggtggagcttgcagtgagcggagatggcgccactgcactcctacctaggcgacagagcaagattctgtctcagaaaaaaagaaagaaaraaacagtaatagaaggaaagaaataaaaagaagccaaagaaagacagacacatagtaaattcataataaagtgatatgattacacatacgcatacatcaataatcacaaacaatacaaatggactaaactctctagttagaagacaaatactgtcaataagggtaaaaacatca

SEQ ID NO: 500524 - DNA, 579 bp, Homo sapiens
ctcaggtctcagaggatgtgtaggacccatcataaaatccctctttggaacaatgcaggcggctctctatactagtctcaaagcccatgagggccaaggggctctctgtggctagggccacaggagtctgtggtgggaatgcagccttgcggggatctctcatttaccttttccctacgttgggcagtttctcttggatctgagctgatcctggctgggccggctgcttcacatcaytctctttgcatgtttccgaagttccttgtcctttccctctgaattccagtgttctttctaagctgctctacttgacatgtgattattcatttgctgtttgagtcctttgtgaaggaagtgagtgctggatgcctctggtcaccatcttgagctgaagaatgtttcttaccattcacaattaaaaaaaaaataagacaatgatgaggtttgctgcatcaaatgactctttcaaaaacattcctctgtagcatatgatgctatttgataaccttttactcacagcagaactttcaaaattggagtcagttctttcaaaccctgccaatgctttatcaagtaagt

SEQ ID NO: 500525 - DNA, 532 bp, Homo sapiens
gttaggtcctctgatgcactacgcagaatttacttagtttggtgattagactggaagtggaatagaagtgtsaaggatactgtcttagtttgctggggctaccataacaagctaaccaacaaactaaccgactgagaggcttcaatgacagaaaagaaattttttgcagtcctggaggctggaagtccaagatcaaggtgttggcagggctggttccccacaaggcctctcttgagcttggcttgtagatgccttcttctccctgtgtcctcactcggtcgtccctctgtgcatctgtgtcctcatcttctctctataaggacaccagtcctaatggaccagggcctactttaatttacttgcctacttaaatagctcatctccaaatacagccacctttgaaggtaccgggggttagaccttcaacatatgagttttgggggtacacaactcagcacgtaacagcgattttccattatttatgagttaaagagaagaaatagaaatgaaaactgtcaagtaaaattagcca

SEQ ID NO: 500526 - DNA, 541 bp, Homo sapiens
acgcccaagctggaaggttgcaggtttacgggaatgagggcagggaacacctggcccgcccagggcggaaaaccgcttaagggcattcttaagccataaacaaaagcctgagcgatctgtgtcttaagggcgtcttcctgctgcagttaactagcccaacctattcaattaattcggcccatcccttcgtttcccttaagggatactttagttaatttaatatctatagaaacaatgctaatgactgatttgctgttaataaatatgtgggtaaatctctgttcggggctctcagstcggaaggctgtgagacctctgatttcccactccacacgtctatatttctgtgtgtgtgtctttaattcctctagtaccgctgggttaagttctctcctaccgaggtggtctcggcagcttgttaaaattgtgagctccagagtttccataaatgagcgctttgggttggcagtatagctgaagagaaaggaccaggaaagggggacttcaagctgatttgctgtatttgttagcatcacctcag

SEQ ID NO: 500527 - DNA, 550 bp, Homo sapiens
caccattgcatttattttctatacctcttacttggcccttgaaatatattgccttattttgatagttagtataatgatttttgtgaatctttatcattgtgattaagaaacaggctttaaaaccagatttcctgggttacattgactagttttataacctgaagtaaatgctctatggcttacttttcccctgcaaaatggtrcctaccacagggattatggttaggattaatgaattaatacatgtgaacagctcattagacgacacctaattcatactaagtaattggaaattgttagccttaaaaccacactaagtaggctgcacactttcagaaagaagaattaagttttatcttttttatgcttcttgtcttttagcttttatactttctgcaaaaccaagcacgtaagcggttctcaataaacttttttgagactttttggatttatgatctttttttctaaaatattctcatttttaatacaaaatgttttgtgctatgagtaagaaagaagtgtatgtgagccagacatggtggcttccacc

SEQ ID NO: 500528 - DNA, 594 bp, Homo sapiens
atttgatttggagggatttagtgaatattagttaagctggtagaacattgtttagttccaaaaaatgacrgctttattttattgtgcttttagcaatagcaaaaagaaatatgcttctaagattgttacatggcagaaaagaatgttcaaacttaatttacttaattttaaattacaaaatctaggattctacttgttagctaatagagtttcaagtattttattaatctttgtgcaaatgttgtgtttaacagtttggaaccaatctgattttttattataaaccagtgtttataataaacagctagatagatagcaacagtgttaaacgtaaatcacacaagtggaaattgtaaggtgtaagagtttttaagagttatttatcatcatctgtaggagaaactggcttcagtctggtcagacaaatctaatctttccaacagctaagtaattcaccagcagggaatttatgaataattatttagtcaaccacctggaaattaagtctgattaaagttttaaaaataagcaagcaggcccaggcacggtggctcacgcctgtaatcccaacacttttaggctcaggcaggcaga

SEQ ID NO: 500529 - DNA, 484 bp, Homo sapiens
aaaaaacaaaactattaaaatcacagccatcatagttacttcagaattgttgtggctctgagtggataatagtaataactattgagcaataactattgaataataacaatgaacaattatttcaagcctgtcactcatcatagtgagaggatgaccaaaagaaaaaatggtttctgctagatgatcttacagtcaagttcagagaccaagaatagcaggaaacaattagaaaacaaagctggaaatttgtggcattcactacaagttaaagtacatagaagtgaaaggatagcatgagatggagaatttaataagggcttcatgaaggaagtatgccttgaattcgacatcgcaaatggatagacaaagggataggtagtttattttasacaaaagcatgcaaaaacattaacttggaaggtactggagttgtgaggagatggttctgactagaaaaaagagttatgtttttgaggacacagag

SEQ ID NO: 500530 - DNA, 288 bp, Homo sapiens
agccctgggtgccctcgcatttgaaaacaacaccgggtggaggatgctgcgatacctaattggacaaaacagcaataaaataagaccagtggaagtgctgagcacagggcgcagggctagggcccaggttttgtgttccaggccgagggcgaggcagcggccccgggagacggggcgccgggcggtcaggcaccggctggcgactctgctcggcctccrcagcccggcctgcagcccctttcccccagcctctgggcctcgtgggctctctccgctccgacgcctgtt

SEQ ID NO: 500531 - DNA, 604 bp, Homo sapiens
tgtgctgagctgaagacctgctataatccttaagcctctttgctatctcttgatctgagggcattatgggcaggggctatagcaggtaaaaacggcaggcctgtcttatacctatgagagctctgcccaagggaaatgcaatgctgcttctggcccaagttgtcaggctgaggtagctggctgtgctggaggctcaagccaggaggccctgaccagtgaggagtagaaggggccatgaccaacattaaaaactatatgactgcttttccagaaggcagctttccctgtgctggaggcccacaacagtcataacactcttcactccctcctgaccctgaaggcagttaggtagtggctggagctgcaatagcagcaaaaacagcagatatgtctattgcatctgggagcttcatcccagagaaatgcagagctgctgccagtcgaagaggtcaagtgggtgtttcatggctgttctggagttccaggtcagtgtgctttgcctggagaggtttaccagaggcaaggcatgaagtccctctgctcctcagaaccatgartgtagccactaacctttggcatgcagagaacttggcgttcctgttgg

SEQ ID NO: 500532 - DNA, 503 bp, Homo sapiens
ctggcagagcaccagccccttgtcagaagggcagccttcaccttgtgactgcctgggagctgtatggagtgggcaggagtgtgcttgcaggtgtgtgtgtgaaatcgtccccataaacttcataaaattaaccagggaagaagggagggggagaaacgaaaatgaactcagcctggcgccctcacactcgtccctgggtggtcatgctctgacaggctgcctcaagcctgtctgctgcctgtggccccagagtcacacaggcctggccacaagtccactgccttctcgactgctctgcagatgagcgctgggaacgtgtgtytccctttgagattccccttcaggccctgcatgccgaggaagctcctgatgccagccagcccgtaggaccctggaggacctgagctgccgaagaatcatcaagtccccacatcttgaagatttcagccccttaccccagccaatcagccaacccaattctccagcctctcaccccccagatc

SEQ ID NO: 500533 - DNA, 503 bp, Homo sapiens
ctggcagagcaccagccccttgtcagaagggcagccttcaccttgtgactgcctgggagctgtatggagtgggcaggagtgtgcttgcaggtgtgtgtgtgaaatcgtccccataaacttcataaaattaaccagggaagaagggagggggagaaacgaaaatgaactcagcctggcgccctcacactcgtccctgggtggtcatgctctgacaggctgcctcaagcctgtctgctgcctgtggccccagagtcacacaggcctggccacaagtccactgccttctcgactgctctgcagatgagcgctgggaacgtgtgtctccctttgagattccccttcaggccctgcrtgccgaggaagctcctgatgccagccagcccgtaggaccctggaggacctgagctgccgaagaatcatcaagtccccacatcttgaagatttcagccccttaccccagccaatcagccaacccaattctccagcctctcaccccccagatc

SEQ ID NO: 500534 - DNA, 601 bp, Homo sapiens
ttgcagaaattggcagaaacagaatccaagagactaaaaacaatctcaaagaaggagacagatccccacacaggggaagaaacccttccacaggctccaaggcaggagacaaactgggcagacaagaagcagaacttccaattaaagtaggggacagaggaagagaggaagcagaagacggggaagtgagaaggcagagagagaagccggaagcacaggagaaagcacgaggcagtgaaragagctggccaggctggagaagcagaatttctccacggaggaaaatcttctggggagaaaaatcaaaatctgtgccatacaattttttttcaagcatcctttcccagtgtgaagtcatttgcatattttaagaacatgcaatgcattatgcatatctcgtttttgtttaaagaaattatggttagtatatttaaagatgtgaatgcctgggaaattacaggggagaaatgtgggatttttggtcccccctgaattttctgggtttctcaaaactttcacatctgcagccagctccctagtgagttgggccgacaaaggaggaaattgaagagactgcttcgccctttccgggctgttccca

SEQ ID NO: 500535 - DNA, 232 bp, Homo sapiens
tgcttacaggttctgactattttaggcctccttgttttattctctgggcccttttatgagttccctgggagctcattaaagccttcactcttaaatgacacagtttggttttaaataacccttccattttttttgccaaagsgtgaaatccttcattagctatgctgagcacagtcctactgggacagtctgaaatttacatcatgtggaccttgttaggagcaatgagaga

SEQ ID NO: 500536 - DNA, 232 bp, Homo sapiens
tgcttacaggttctgactattttaggcctccttgttttattctctgggcccttttatgagttccctgggagctcattaaagccttcactcttaaatgacacagtttggttttaaataacccttccattttttttgccaaagcstgaaatccttcattagctatgctgagcacagtcctactgggacagtctgaaatttacatcatgtggaccttgttaggagcaatgagaga

SEQ ID NO: 500537 - DNA, 653 bp, Homo sapiens
ctgggctctcatccatcccagaattcataggaggagccagtataatggatgggcaaggggtgcaggacttgacatcagacccatcagtttaaatattttttctgctacttatcaccagtggtatccccgggcaagtgatctgtgcctctttcctcattgatgcaatgggacaacacaaggacccatctctggtggatcatggttttattctgctcaggaaggcttcccatctcttttgttttattttggttcttttaggcaagacctcttggtgggctgccaatcattgtgcttccaccccatgagcaggtacaagcagttgacacaggatgcgccaatcagagacctcgcttttctgctgagtcagtgggaatgttggtttttcccattgtggttgctaagtaggaagatacaactgttgctggcagctagcttccccctctttgtagagtgagcttgcttgcagaatgaagcctgatggagagaaacagagctgagagatggagggaaagaaccccaaytgctcaatgagtgtctggatccagccatgcctgaaggcatgtttctagattttcctttaattgaactagtaaaattcacttctatcttaaagttgtttgagttttgtttctgtcaatcctgtggcatctaga

SEQ ID NO: 500538 - DNA, 216 bp, Homo sapiens
aggcaaccactcctcattgattatttgcacatgagataaacctgtttgttttaccatactgaaggactaacagaatcacaaactgtaactcaagtgcttttccaatgaagagtgaaataggaaagaacgaaaataacatatatctaccccctcctcctcttcctttagcttgggttcatcattayctccatttctccattttatttttgtttcctt

SEQ ID NO: 500539 - DNA, 575 bp, Homo sapiens
tggggaggacccactgccaggctatggacggccaccttctctgctgtccttgaatggcagagaatggtgtctctcctctaaggtcacaaatcccacctggaggccctacctcaggacctcatctaaactaccctatcgcccacaggtcccatctccaaataccaccccattgtggggtagggcttcaacatagagatgtgaggggggcagcgttctgtccatagcaccattgataagtcccatcatcacaggctggtgacacagaggaccacttgtacagcgggatcctgcacagacattcagagaggttctggaagaaaccagggcatggagatgcacgtgtcacatatttttgtgagaaaagggaagttacaaaatgccattccatcatcatgtagcacccgactggcctctcttctgtaggtggccgacttcaagttttcagatttgttcttacgctgttgggtggggggagtgtgagaacttcaagcgcagtcccaggggcaggtggaagttcccaggagtggttccsttgtcacagagaagagggtgccagcctgagaggaagaaaggca

SEQ ID NO: 500540 - DNA, 404 bp, Homo sapiens
ccctttttgcttttgttgtttttaaagcagccattgcattgataacccaaacacagactgaggcgtgggccccgcgggggtgccctctttaaagcctctgagaatagstggtgccgggcaacacagcaagtgtcctcgggtgctggggactgacctttccatcactgcgcgtgctggacacacagaccacaggtgcaggggcggggaggcctttctgccacatccttacaaaatgagccccctttcaaagcgaaacagcattattgatcaaagcgtaggtggctccatatgcagagaagaaacagccggtgtcaccctgagccactcgcacacaggggcacggacaccccctctcattaaaaacgggttggattgcattccaggcccagcctgcaaagttaatg

SEQ ID NO: 500541 - DNA, 404 bp, Homo sapiens
ccctttttgcttttgttgtttttaaagcagccattgcattgataacccaaacacagactgaggcgtgggccccgcgggggtgccctctttaaagcctctgagaataggtggtgccgggcaacacagcaagtgtcctcgggtgctggggactgacctttccatcactgcgcgtgctggacacacagaccacaggtgcaggggcgggkaggcctttctgccacatccttacaaaatgagccccctttcaaagcgaaacagcattattgatcaaagcgtaggtggctccatatgcagagaagaaacagccggtgtcaccctgagccactcgcacacaggggcacggacaccccctctcattaaaaacgggttggattgcattccaggcccagcctgcaaagttaatg

SEQ ID NO: 500542 - DNA, 404 bp, Homo sapiens
ccctttttgcttttgttgtttttaaagcagccattgcattgataacccaaacacagactgaggcgtgggccccgcgggggtgccctctttaaagcctctgagaataggtggtgccgggcaacacagcaagtgtcctcgggtgctggggactgacctttccatcactgcgcgtgctggacacacagaccacaggtgcaggggcggggaggcctttctgccacatccttacaaaatgagccccctttcaaagcgaaacagcattattgatcaaagcgtaggtggctccatatrcagagaagaaacagccggtgtcaccctgagccactcgcacacaggggcacggacaccccctctcattaaaaacgggttggattgcattccaggcccagcctgcaaagttaatg

SEQ ID NO: 500543 - DNA, 482 bp, Homo sapiens
tgtgccccagttccttgcagaagtgccaatgcagctccctggcagcccaggctgtcgagcatgaagttgctcaattgcctctcacagcttctgtctctgatgcagaaaaagaaaacaaacctaaactccttatgttgaaagtaaaggcagacatarcggtaaacgctctggctaggtgataagtaggaggccagaggaaaatttctaccaatcagcttccactttcacaactgtcaggggaaatggctctttcaaaccatttagtggattctgttctgaaaacaaatgttctcattagccccaagtcttcttcatggaacacacaggagttggctgacaacagcattcaaacgcccattgtaattgctgagtcccttctacactccaaaataaaggaaacattttgcatttctaaatataaacttttcttctgaaatcctctagagtgcctcatgcttctcattaaattgtgctcaaagcat

SEQ ID NO: 500544 - DNA, 565 bp, Homo sapiens
taaactggttattggctggtttgcatatagaaatggctagttagtcaagaagatgatagtaacaaaaacaggagggatgatcacctctgtgggtcccacacctgagacagggccaaggagacactcgtctgtgcaatcacccacctgcaaactcacccaaataagttgaacgaagagacatgtccacaaagcyggcttattctgctggttgtgcagaactaggggcaccagcctctgggagaggcagacgcttcaaaccacagaatttatcagaagccaatgccaagataagcatgcaatgtctagaccacaaggagagctgtggggctttgtggggccgagtggggccgagtggcatgacctggtgtggtggaggccagagtcaagatccaggccagaaggaagaggctgcagggaccacgctgctgctggacacagggagatcaggcaagaggaggtttgaggccatccctgcaaagacagagcctttctcttcatcagggtcctgttgagtgagggcactttgttctctccctaggaccagctcacagccctggaaggagca

SEQ ID NO: 500545 - DNA, 565 bp, Homo sapiens
taaactggttattggctggtttgcatatagaaatggctagttagtcaagaagatgatagtaacaaaaacaggagggatgatcacctctgtgggtcccacacctgagacagggccaaggagacactcgtctgtgcaatcacccacctgcaaactcacccaaataagttgaacgaagagacatgtccacaaagccggcttattctgctggttgtgcagaactaggggcaccagcctctgggagaggcagacgcttcaaaccacagaatttatcagaagccaatgccaagataagcatgcaatgtctagaccacaaggagagctgtggggctttgtggggccgagtggggccgagtggcatgacctggtgtggtggaggccagagtcaagatccaggccagaaggaagaggctgcagggaccaygctgctgctggacacagggagatcaggcaagaggaggtttgaggccatccctgcaaagacagagcctttctcttcatcagggtcctgttgagtgagggcactttgttctctccctaggaccagctcacagccctggaaggagca

SEQ ID NO: 500546 - DNA, 565 bp, Homo sapiens
taaactggttattggctggtttgcatatagaaatggctagttagtcaagaagatgatagtaacaaaaacaggagggatgatcacctctgtgggtcccacacctgagacagggccaaggagacactcgtctgtgcaatcacccacctgcaaactcacccaaataagttgaacgaagagacatgtccacaaagccggcttattctgctggttgtgcagaactaggggcaccagcctctgggagaggcagacgcttcaaaccacagaatttatcagaagccaatgccaagataagcatgcaatgtctagaccacaaggagagctgtggggctttgtggggccgagtggggccgagtggcatgacctggtgtggtggaggccagagtcaagatccaggccagaaggaagaggctgcagggaccacgctgctgctggacacagggagatcaggcargaggaggtttgaggccatccctgcaaagacagagcctttctcttcatcagggtcctgttgagtgagggcactttgttctctccctaggaccagctcacagccctggaaggagca

SEQ ID NO: 500547 - DNA, 664 bp, Homo sapiens
ctaaatgtcagtagtagccaccagttgtgacaatgaaaaacgtctgccaaccgcaccaaatgtgccctggagcaaagccacctgggttgagattaggtgggtgccttctctcctctgctgatgtggcagctcttatctctgacccagggctcctccttcccagccctgacctttggcctggtcactagggcctcatgtaaccctgccttccttccactgtccccaaggggtggccaggccttcygggagccacagaagagctggtggggctgaagttctcaccaatgggagggttccagccagagtccactgggccagagactgcaccagtgatatgataattccaaagcattgagctttgtgggaaagaacagccaggaacatttggatcaatgatctgaacagagatacagaaccagcatgccttgaagtaggatggcttgttccctgacaaggtgctgggggacagagcccagccttcccccaaccccccagccagtagttgcttgcactgccctcaggggctggcacccccctcctggctgaacccatcttggggtggccttgctgagcttgacctccataacactcatcaagcttattcagaaaagacaaggaaaccaccgtcttgctggaggatgggcaatgtcttcttccttcaggg

SEQ ID NO: 500548 - DNA, 632 bp, Homo sapiens
tggaagtgtcagggaagacggcatgagagctgagcagaataggaaatggtgttaatttattaacaatatcaagaaaaggcctggtggtaaaagatgaagtggccaaactatttctcccmacaagaaagattcacaggtggtagcaacttgtgctaattccatatgagctccttcagtcaaacaaacaaatgtctacagaatgcttgacacttaacgtggcacagtgatagggtttggccacaggtagcacctccaggtggtattccaatagagttctgcatacttaaaatgaattttttaaaatcccagacattttaagattatttttctcttttctgaaaataccaagtgctataaacaataaccacaggtttaaaccaaaaaagtactccctgcatgtactagtgcatcaacgtttaccagaaaaaaacatacacacacgtcatgcacacatgatccctgtcagctacactgctttgaattacgacagaaaataatttattacaaaagacccccaaatagtcaaaagcatcaacaagtaatttcctcctggtgttactttatgagagctgcgcctgacagagtcgagtcacgtgtataaatgaagaaaagactatggagctgaaaagcaa

SEQ ID NO: 500549 - DNA, 632 bp, Homo sapiens
tggaagtgtcagggaagacggcatgagagctgagcagaataggaaatggtgttaatttattaacaatatcaagaaaaggcctggtggtaaaagatgaagtggccaaactatttctcccaacaagaaagattcacaggtggtagcaacttgtgctaattccatatgagctccttcagtcaaacaaacaaatgtctacagaatgcttgacacttaacgtggcacagtgatagggtttggccacaggtagcacctccaggtggtattccaatagagttctgcatacttaaaatgaattttttaaaatcccagacattttaagattatttttctcttttctgaaaataccaagtgctataaacaataaccacaggtttaaaccaaaaaagtactccctgcatgtactagtgcatcaacgtttaccasaaaaaaacatacacacacgtcatgcacacatgatccctgtcagctacactgctttgaattacgacagaaaataatttattacaaaagacccccaaatagtcaaaagcatcaacaagtaatttcctcctggtgttactttatgagagctgcgcctgacagagtcgagtcacgtgtataaatgaagaaaagactatggagctgaaaagcaa

SEQ ID NO: 500550 - DNA, 632 bp, Homo sapiens
tggaagtgtcagggaagacggcatgagagctgagcagaataggaaatggtgttaatttattaacaatatcaagaaaaggcctggtggtaaaagatgaagtggccaaactatttctcccaacaagaaagattcacaggtggtagcaacttgtgctaattccatatgagctccttcagtcaaacaaacaaatgtctacagaatgcttgacacttaacgtggcacagtgatagggtttggccacaggtagcacctccaggtggtattccaatagagttctgcatacttaaaatgaattttttaaaatcccagacattttaagattatttttctcttttctgaaaataccaagtgctataaacaataaccacaggtttaaaccaaaaaagtactccctgcatgtactagtgcatcaacgtttaccagaaaaaaacatacacacaygtcatgcacacatgatccctgtcagctacactgctttgaattacgacagaaaataatttattacaaaagacccccaaatagtcaaaagcatcaacaagtaatttcctcctggtgttactttatgagagctgcgcctgacagagtcgagtcacgtgtataaatgaagaaaagactatggagctgaaaagcaa

SEQ ID NO: 500551 - DNA, 605 bp, Homo sapiens
aggaattcctatgagagtaaggaagggagggtagctacaaaaaggtctcaaagcctcagagcagagtaaatggcacagtgtaccaaaagataatgaaaaacacagaaacacactgtacagaaagaaagtgggaaaatactgtcctgggtagagaagttataaaatgttaagtatcaggcacgggtaatgtttttgtttttcctgggaaactgggggtgggggtggggggggtaggaaaggttgcattcccaggcaaccaccctgaaaataaaccactgcttaatgaggtaggggccaggaataaacaacgggggaggggagggctggctcattacctttacagacgatgctggtcagaggcactgtgccttctgcttctctgataggtgggcagacctcttcctgctttcgcgtcttcttcagccagctcaaacctagaaaaacagaaaccagtgagtggtgtagtgtctcagrggtggggaggggggagctcaggaaaggggctggagagtggcaagggcaggcaagaaaaagcagagattttcctccctcctaccctcccagccagcactcttcccctcgggggaagtaaaggactttacctg

SEQ ID NO: 500552 - DNA, 484 bp, Homo sapiens
tgtgtctccctctctggatttccctggtaggaatggctgctggttacctcagtggcaagggatactggtgtcctctgtggagcactcctctgggtaccacgacagttccctgtgcatggatgacatggcacctttcttctttgctcatagctgtctcctggtgtctcaagtatgctgttctcaccagaaatactttctctgtgggtaatctccttttttttctccattgtgctgctgcagactttttactggacccttgagccctttctggtctattttggtttgtgaatagatgtttgtatttgtttttgttgggggatgaaggctgatatctcctactccaccatcttggtcagtttttttttttwaatttttgagacttttctttatagttcctcctaaagtaaaatatgatattcttttgttgcatgattttatctatagatgcctacttcatggaaaagaaggaaaaaataattatgag

SEQ ID NO: 500553 - DNA, 615 bp, Homo sapiens
cttctatatccaactggccactaaagcttatcattactacccttctcaaatccacctcaccatgccgtatttccatcrgcttttacttgattcacgtcctgagacctagtctccctcatagtacgtgaactacatagtacatagtacatggagtgaggagggtaacatgccttagcgggatgatggtttctcggaagttggtagattaagagatcaaaatatggaaggggatatccatgttggcaaggatagatttgactaaaatgtgctatgtccagtgaacgaacaaatgtaccatgcaatgttaaagattttgaatactggtgaatattcgtatggagttggttttgtatgtaagtgtaatattgatgtattacagttgattaggagattgctaatacttgcttatatgcatgtactgtaagctgtttagtactataaggcttatgtatgtactatgtacaatcaagcattaatagtactatatattattcatggggactagcaggttggtagccaggtgaccaggcctccatttcctctgcctgctttttaatgattaatattcctcaggctcttttctttgtaaaagtctcatcaggggtggcactactg

SEQ ID NO: 500554 - DNA, 516 bp, Homo sapiens
agctgctgttattattactattaatacttaccctttaatattaagtaatgtgtccatagaacagacctccatatccaggctggatttccttttttttttttttttttagagatatggtctcaccatgytgcccaggctggtctcacactcctgggctcaggccatcctgccctggactcccaaagtgctgggattgcaggtgtgaggcactgcacctggccttggatttcatttaaataccataccctctcctgcaactgaaagacagtggccttactgcttttgggtgcccatattatcaaatccctgacctttattattggagagaattggctttgtcataattttcccttgaagtgtttagtgtttttttttttttttggttcgatatacatatatatatagagagagagagttcaaaattcaggagcagattactatttaaaagatagtagattaaaggctgccctttttttttttttttcacaaaaaacttgtgatctgaagggcttttat

SEQ ID NO: 500555 - DNA, 588 bp, Homo sapiens
tgtcaccttcatctcttctcaacactgccagatgtctccttggatctcccagacagacaacaaggggcatctctggtttctcggtgcccgctagaaacctagggtcatttcaaggcattatgcaaatgagaagctttccttctcttcacctcatctcctgatcygcacaaaaatgactgtaggacccactgtaggtaccaatgtaggcaccaatcctcagtttaccacctgctctctacttgcttccctgccataactttctaaaagggatgtgagccatgtttaaagtcacctggtcactggagagatcttgttctaccctctacatcagtggttgccaacctttttggcaccagggatgggtgttgtggaagacaatttttccacggactggggggatggggggaatggtttcaggataaaactgttccacctcaaatcatcaggcattagattctcataaggagcacacaacctagattgctagcatgcgcagttcacaatagggttctttctcctgtgagaatggcgtgccgctgctgatctaacaggaggcagagctcaggcggtaatgggagcaagggggag

SEQ ID NO: 500556 - DNA, 588 bp, Homo sapiens
tgtcaccttcatctcttctcaacactgccagatgtctccttggatctcccagacagacaacaaggggcatctctggtttctcggtgcccgctagaaacctagggtcatttcaaggcattatgcaaatgagaagctttccttctcttcacctcatctcctgatctgcacaaaaatgactgtaggacccactgtaggtaccaatgtaggcaccaatcctcagtttaccacctgctctctacttgcttccctgccataactttctaaaagggatgtgagccatgtttaaagtcacctggtcactggagagatcttgttctaccctctacatcagtggttgccaacctttttggcaccagggatgggtgttgtggaagacaatttttccacggactggggggatggggggaatggtttcaggataaaactgttccacctcaaatcatcaggcattagattctcataaggagcacacaacctagattgctagcatgcgcagttcacaatagggttctttctcctgtgagaatggcgtgcygctgctgatctaacaggaggcagagctcaggcggtaatgggagcaagggggag

SEQ ID NO: 500557 - DNA, 530 bp, Homo sapiens
ctgaggacgcggcctctcggyggtaaccttggtaaccagccagcgcgccgctggccctccggaagtcagactccgccgggctgagccgagctacgccagcgccgactggcgtcgtggaggagtctgcgcagaggagacacctgatccggtgggagacggccaggggagcgcgcgcggattggctggagccgacgggggacggctgggcggggcgcggactgggggaccgcagtcccggggagcgcaccggaagttctcgcctggcccaggcgcggggtccaagatggtggcgctaggagccgcgacccagtgatagcggccgtggaggggcccccgaccgagcgggaggttgggggtagcctggaggtgagaccccgctgcgttcacagagctggcggccgcggcgcctgcgtccaccggcaagcgaggagtggagcagagctcatatgcctatggggagaggcctgggggaccgcaggaggatgtaggcgccgggtgcgcatgactgggccttcttgctctcggtcggc

SEQ ID NO: 500558 - DNA, 513 bp, Homo sapiens
tctctgaataagaagatgggagcccccccgagggaaaagttactatggtgagagtaaggaggccatcagacctcctccaaacaaaccacctctgccagcctctggctcttaaataacaatcatcatcatccagaaatttraggactcagccctggtcaaggcggcaaagggtctgtctttccccattagacagaggtcttgtgtggctaccctaattgtaaaggggtgcctgggaaggggtggtagggtcatggtggcagtggaggctccagccctacttctccaggctttgctgacagaggcctgcttttaatttttgtttttatcccatgactttttttaaaatcccgtaacttctttttcataactttttttgtaacttttcataaaatttttttctacttttttgccacaacttttttacattttttatcccataactttttcactctgtaacattttttaatcccgtaacttttttattttgtgttcttttaacaaacacttgcatag

SEQ ID NO: 500559 - DNA, 513 bp, Homo sapiens
tctctgaataagaagatgggagcccccccgagggaaaagttactatggtgagagtaaggaggccatcagacctcctccaaacaaaccacctctgccagcctctggctcttaaataacaatcatcatcatccagaaatttaaggactcagccctggtcaaggcggcaaagggtctgtctttccccattagacagaggtcttgtgtggctaccctaattgtaaaggggtgmctgggaaggggtggtagggtcatggtggcagtggaggctccagccctacttctccaggctttgctgacagaggcctgcttttaatttttgtttttatcccatgactttttttaaaatcccgtaacttctttttcataactttttttgtaacttttcataaaatttttttctacttttttgccacaacttttttacattttttatcccataactttttcactctgtaacattttttaatcccgtaacttttttattttgtgttcttttaacaaacacttgcatag

SEQ ID NO: 500560 - DNA, 513 bp, Homo sapiens
tctctgaataagaagatgggagcccccccgagggaaaagttactatggtgagagtaaggaggccatcagacctcctccaaacaaaccacctctgccagcctctggctcttaaataacaatcatcatcatccagaaatttaaggactcagccctggtcaaggcggcaaagggtctgtctttccccattagacagaggtcttgtgtggctaccctaattgtaaaggggtgcctgggaaggggtggtagggtcatggtggcagtggagrctccagccctacttctccaggctttgctgacagaggcctgcttttaatttttgtttttatcccatgactttttttaaaatcccgtaacttctttttcataactttttttgtaacttttcataaaatttttttctacttttttgccacaacttttttacattttttatcccataactttttcactctgtaacattttttaatcccgtaacttttttattttgtgttcttttaacaaacacttgcatag

SEQ ID NO: 500561 - DNA, 554 bp, Homo sapiens
agtggaatttttttttcctttccttcctgaaagtgtccctgtcatgcaagttaggtgtcatcctttggctttgyacctattggttttagggatcaaaggtattatatgaatttcttggcatgaagagccttattgtaatggttgtctcaaatgctagttgtttgtcctttgtagtaaaggcatgctggacacatggtcaggctcactgacttctacggagatggggaggtggacatcttggaaggcttattccccagtgctgtgcattgctgtcagcaggaattatactggattttttagttcaccttaaaggccagtagatggttgttgcagattagagccaggtgagcactgtacactgatatcaccagatgttgtaataggaaatgcaatttgatcttcagatcagtaggtgacacttgcaagcaagaggcaattgcatacaaaatagcagtgaaattttttacttggcctttgttgattggagaaggtaccagggtgtcccttgggacatggtaacctggggcattcagggattacatcctacactctac

SEQ ID NO: 500562 - DNA, 554 bp, Homo sapiens
agtggaatttttttttcctttccttcctgaaagtgtccctgtcatgcaagttaggtgtcatcctttggctttgtacmtattggttttagggatcaaaggtattatatgaatttcttggcatgaagagccttattgtaatggttgtctcaaatgctagttgtttgtcctttgtagtaaaggcatgctggacacatggtcaggctcactgacttctacggagatggggaggtggacatcttggaaggcttattccccagtgctgtgcattgctgtcagcaggaattatactggattttttagttcaccttaaaggccagtagatggttgttgcagattagagccaggtgagcactgtacactgatatcaccagatgttgtaataggaaatgcaatttgatcttcagatcagtaggtgacacttgcaagcaagaggcaattgcatacaaaatagcagtgaaattttttacttggcctttgttgattggagaaggtaccagggtgtcccttgggacatggtaacctggggcattcagggattacatcctacactctac

SEQ ID NO: 500563 - DNA, 554 bp, Homo sapiens
agtggaatttttttttcctttccttcctgaaagtgtccctgtcatgcaagttaggtgtcatcctttggctttgtacctattggttttagggatcaaaggtattatatgaatttcttggcakgaagagccttattgtaatggttgtctcaaatgctagttgtttgtcctttgtagtaaaggcatgctggacacatggtcaggctcactgacttctacggagatggggaggtggacatcttggaaggcttattccccagtgctgtgcattgctgtcagcaggaattatactggattttttagttcaccttaaaggccagtagatggttgttgcagattagagccaggtgagcactgtacactgatatcaccagatgttgtaataggaaatgcaatttgatcttcagatcagtaggtgacacttgcaagcaagaggcaattgcatacaaaatagcagtgaaattttttacttggcctttgttgattggagaaggtaccagggtgtcccttgggacatggtaacctggggcattcagggattacatcctacactctac

SEQ ID NO: 500564 - DNA, 554 bp, Homo sapiens
agtggaatttttttttcctttccttcctgaaagtgtccctgtcatgcaagttaggtgtcatcctttggctttgtacctattggttttagggatcaaaggtattatatgaatttcttggcatgaagagccttattgtaatggttgtctcaaatgctagttgtttgtcctttgtagtaaaggcatgctggacacatggtcaggctcactgacttctacggagatggggaggtggacatcttggaaggcttattccccagtgctgtgcattgctgtcagcaggaattatactggattttttagttcaccttaaaggccagtagatggttgttgcagattagagccaggtgagcactgtacactgatatcaccagatgttgtaataggaaatgcaatttgatcttcagrtcagtaggtgacacttgcaagcaagaggcaattgcatacaaaatagcagtgaaattttttacttggcctttgttgattggagaaggtaccagggtgtcccttgggacatggtaacctggggcattcagggattacatcctacactctac

SEQ ID NO: 500565 - DNA, 541 bp, Homo sapiens
agcttctgtgcttcaatgcaggcctagggaaggagattcctcctccccttctgcatattgatgcaggcacagcctctattactggcataggaagttgacatggttgagccagagggctgcctctctcaggcaagagtggcaactgtgaccccactgatggcatagcctccagacctgcacttaaaacsaagttggggccctctcccactctttacagccctgtagcactgctgccacagagagcaagagagcctgagagctcctgttctgggctgtgcaaagtgactctgacttcagcagacaaactgtgtgctgggctttaaaggtgaagggttaaatccccttctactgggcaagcggactgtgcttgctgggacgtaggagtagagaacaagaatactctccagctttcacacacccctgaaggcatggtccctgctgctgcactggaaagctggggcaagcaagccagcaggtggcccatctggctttgaggggtgattgcaactctagtggcagcatggcctcctggcctgggctt

SEQ ID NO: 500566 - DNA, 628 bp, Homo sapiens
ctattgaaacggatatatgatgtaggactctgacagaagaaaggtaagattttaaattatttaatgaaaacacatagaaatctgatgtcacacaatcctgtactgaattgtacatawttagttatcctattgaaagtaagtttgtacttcaatctaactataatcttgttgagatcctttcaatacttcttccattttatcattactacagttcatggatattagggatataacataaaaaattttccatgctaaacttggttcaccctggaattataaaatagaagggcactaatgatttcccttttgcacacggacacatgttatatcatcatacataaatttcaataaaatatgcgtaattgaaaaaggactatgaaaatgtgtgtttatacagagtatgtgcagttcacagaatgaacagttaaacctagtagcatgtgtctcttcttcatggataactctggaattaacatttctgtggaaacaattccattttttttcgcagagttgggaaagcaaaatctagcaaacatctagctaaagacaaatcatccatacttttaatggtcaactttccaggacatttgcttttctttatttccatggtaaagtcattcttgtttca

SEQ ID NO: 500567 - DNA, 595 bp, Homo sapiens
tcaccacaatgagtgctctgagagcttaattcttggtgacctgagagaaagcactaaaacggttcattaattaaatcaaagggaagcttcagcctaggggtttatcttygggaagtttggtcgctctgactgcagagctccagggcccttgttcccacccttgctccagtcctgcaggggctggtagccatccctgcacagcatcgcagggctcaggtgcagagggaagcaggcccgctgttgggaaagggggcacctgaggagtccctggggcagtcattagtgttacctaggcgctttagagcctcatggctaagactaagggactagggaactccccaaaacacaattgcactcttttttctgattaggaaaggttccacaaaaaatacccatgttgactaacaatattgtgtgctctgtgataaggctgagggcatcagtgagaagctcatggccttttagccttctccttgaactttatggttatttggttatgtccaccaaggtaggtagaacctgaaacttgctcagaactttttcccgagatgaaagaaagtgtcctgagagagcatggccccaggatgatttacca

SEQ ID NO: 500568 - DNA, 435 bp, Homo sapiens
attcttatgtgatcctatagttgatttgttaaatggagaatatttcccgagcagattgaggagattgagaaatcttggatagtttggatggaaggagaatgaatggcgccactgggtcactctgtgtaaaggagatgaggaggcattctaaatgaaytctcttagggggagctcctctagcccactgtctggcatgaagggctcaccatactaggtccccacctcacccctcttcagtcactccacaggctggtggatggcactccttagggacggtcagagtctgggaagcgaaattctattgtccactccactaacacatatggacctgggtctaggagatgtggccaaagggccagaagctgggtggcccctggggtgaactggggaacaagaacaaagttaggaaggaggagacaagttccaatgactatc

SEQ ID NO: 500569 - DNA, 549 bp, Homo sapiens
ctgagaccccctcgagagatagccctagctgaagagaaccaagcctaaggtcacacctgttcccaggagcaacgcttatcaaatgactgatgaattcaggagtaaaaagtctgagcccctcctccaattcagaaccactctgcagagacatcccattttcatcactctctctgaaattgtcataactgcatctcagctcagtgtctcctgatgtccaattctcacaaatactgattttaagagcacttcctaataagcttcctgcatgcaaatctccaactcagagcgtcccttccaggctctggattttcagggaatcaaacctggaacaatgcccttacctcggggtgaacacaagacccaggcttatccattcgtggtatctgtcatctgaaagttgtgagtgctccaagaatcagcacactgcccaagctaaaccaaatagattttcccttagmgttgtttttcaaatttggatagggtaaaataacttctttattccttggatacaacctgtgaagatgtggggctcaaagtagtggatgtcat

SEQ ID NO: 500570 - DNA, 669 bp, Homo sapiens
tcacagtatacatgagtcaaagagaaaggacagaaaatactaagtatggctcagcatatgtggtctgtcttggtgaatgttctatgtgagtttgagaagagttatttgttagctgttcttagacgtattttgcttaaatgtcgacttggctaacttctgtcattgatcgtgtgaattaattttgttctagtgggcagtaaaattactgcctgatcacattggacttatgtggatttggcttatgttttaytacagtggattcacggaaagcccacagcatttcccaagaccctctaatttggcaggactcaatcaccaatccacccctttgtggattttgacagggtttgatttcaggctttactagggctggtctagaaggggttttaaagcatgacacttattcctaaagcacagccattctagtgtcttagttggatacctgggtgctaatgaggtgtgcatgggttcttcccaccctggatggcaggaactccatcatccattccccaatcctcctccacctcaagtaccgctggtccaaactcaattttataacagccacccctctgttaaatctgttagtcttttcctcgtgcaggtacagtctagtccttgataagtatgcacatggaaccccacatggacttcgagagctccccctctgaa

SEQ ID NO: 500571 - DNA, 518 bp, Homo sapiens
agctggagcaattatgctccttccctcagaccgttttggcctggactctgactcttggacttctaccagacagagaggcggtaggcttgtggccatgttttgygaggaaaatcagaatctaagaatctctaaggcaagagcaagaatggattgggataggggaagtgataggaaaacagaggcactaagaagagggttggttttcatgtactgcatagttcatttccttagttgagaaatcaggtatctcaacctcagatatcttctgtccagcatatcgctggccagatctgattcatatgagggatccagagtaaggaagcatctgttagccaagtctttggttaccccaaattagctcaggtcctttactgcttgtttcctctgattatatagtacatatccaaaccctcaattttccagaataaactaggtctgcctattctgtgtggaaaacatttgatggtggttaagattctcttgcctagacgatggtagtgccttagtcgtttaactgc

SEQ ID NO: 500572 - DNA, 463 bp, Homo sapiens
cagctggagcaattatgctccttccctcagaccgttttggcctggactctgactcttggacttctaccagacagagaggcggtaggcttgtggccatgttttgcgaggmaaatcagaatctaagaatctctaaggcaagagcaagaatggattgggataggggaagtgataggaaaacagaggcactaagaagagggttggttttcatgtactgcatagttcatttccttagttgagaaatcaggtatctcaacctcagatatcttctgtccagcatatcgctggccagatctgattcatatgagggatccagagtaaggaagcatctgttagccaagtctttggttaccccaaattagctcaggtcctttactgcttgtttcctctgattatatagtacatatccaaaccctcaattttccagaataaactaggtctgcctattctgtgtggaaaacatttg

SEQ ID NO: 500573 - DNA, 463 bp, Homo sapiens
cagctggagcaattatgctccttccctcagaccgttttggcctggactctgactcttggacttctaccagacagagaggcggtaggcttgtggccatgttttgcgaggaaaatcagaatctaagaatctctaaggcaagagcaagaatggattgggataggggaagtgataggaaaacagaggcactaagaagagggttggttttcatgtactgcatagttcatttccttagttgagaaatcaggtatctcaacctcagatatcttctgtccagcatatcrctggccagatctgattcatatgagggatccagagtaaggaagcatctgttagccaagtctttggttaccccaaattagctcaggtcctttactgcttgtttcctctgattatatagtacatatccaaaccctcaattttccagaataaactaggtctgcctattctgtgtggaaaacatttg

SEQ ID NO: 500574 - DNA, 200 bp, Homo sapiens
tttttcccctgcccttacctcatttaccttaacgacagctcccccctctagagctcagctagggcaggctgccactgyggattggggggccaagaggcccagcgcaagaagaaagtgggttgaaagcagagttctgttcaaagaattttctgctggaaactagcccagagggagtaaagaggagctttaatgaggagcag

SEQ ID NO: 500575 - DNA, 200 bp, Homo sapiens
tttttcccctgcccttacctcatttaccttaacgacagctcccccctctagagctcagctagggcaggctgccactgcggattggggggccaagaggcccagcgcaagaagaaagtgggttgaaagcagagttctgttyaaagaattttctgctggaaactagcccagagggagtaaagaggagctttaatgaggagcag

SEQ ID NO: 500576 - DNA, 516 bp, Homo sapiens
tttttcatagtgagaaagataacagtaagatagtaagaagttcttattagccaattatctggcatccacatccttccatcctcacccccaaccaaaatctgtaccaggaaagctcaagaaccagtaacattccacagaagcattaaaaatagaggagtagaatcaaatcttgtccagtgttctatcgcaaaaagaaaatatatgaagagaaaaacttacttgcagtatcctgtgccattgtggtaggtaacacacattccttcatttacacagggttcatagccatctcgacactgcaatgcyaaaaataaaaacaaatgcacattagaagtaagtcactaatcataaccctcagacaccaaagaagtgtaatccaatccagatcagcattcattcccacctaatctgggtttctttttagagttttaatcagttttttatgttctggcttctagcacagaagcccatcccaaaactatcttccaacaataaccacgtttgtggtcttgaatgatg

SEQ ID NO: 500577 - DNA, 438 bp, Homo sapiens
ctgtaccaggaaagctcaagaaccagtaacattccacagaagcattaaaaatagaggagtagaatcaaatcttgtccagtgttctatcgcaaaaagaaaatatatgaagagaaaaacttacttgcagtatcctgtgccattgtggtaggtaacacacattccttcatttacacagggttcatagccatctcgacactgcaatgctaaaaataaaaacaaatgcacattagaagtaagtcactaatcataaccctcagacaccaaagaagtgtaatccaatccagatcagcattcattcccacctaatctgggtttctttttagagttttaatcagttttttatgttytggcttctagcacagaagcccatcccaaaactatcttccaacaataaccacgtttgtggtcttgaatgatgctcttatttctctgtgtttt

SEQ ID NO: 500578 - DNA, 438 bp, Homo sapiens
ctgtaccaggaaagctcaagaaccagtaacattccacagaagcattaaaaatagaggagtagaatcaaatcttgtccagtgttctatcgcaaaaagaaaatatatgaagagaaaaacttacttgcagtatcctgtgccattgtggtaggtaacacacattccttcatttacacagggttcatagccatctcgacactgcaatgctaaaaataaaaacaaatgcacattagaagtaagtcactaatcataaccctcagacaccaaagaagtgtaatccaatccagatcagcattcattcccacctaatctgggtttctttttagagttttaatcagttttttatgttctggcttctagcacagaagcccatcccaaaactatcttccaacaataaccacgtttgtggtcttgaatsatgctcttatttctctgtgtttt

SEQ ID NO: 500579 - DNA, 612 bp, Homo sapiens
tgagcagcttgaagaactatctgtttagaagaaagcaatatataaaatacctatctgaaagaaggtattttgtgataagtggcagttattcattggttccatcaaagaagaaatattagaaaagcttgtgaaaaatagagagrgaaggtccatagaacctgtttttattctttttaaaaatgtttctttagagaggcttgctgtcctccaaaggtttttttttcttaatgccctttgtgcagttttctttgcatgtttaatagaaatatagtatcaaaatttaaagaattaatatttttgtacatgtactgttacttcaagttaatgaatttgagatttcattccattacttgccatatatgtaacaaagaaagtgtcaaatctttttttcaaatacttggattagataaccattttcttttccaaagacagtcattggatacactgctcacagcagtttgaaatattaaaaccgtaggtcacaattctggattccatctgactgaaattagattatccacagagatgttatacataatacagaagtgtcttttcattctttcatctactttactttgtaaaatcaggctaatgttttgcaactgttgcttt

SEQ ID NO: 500580 - DNA, 543 bp, Homo sapiens
ggccaggctggtctcaaactcttggcctcaagtgaacctcctgcctcagcctcccaaagtgctgatattacaggcatgaactaccatgtgcagcctacttcaagttttttaaatgacaaaaagatccacttgctggatttacctatattcagaagatgtggatagaccaatacaagatagaagtttagaacgtatcttgaacrtttcagatactctactaagcatattacatgaattagttcatttaatcctcaaaacaacagagctaacatgagaaagacttcgctagattcagggtcacctagatcactggtgatcttagtgagagtgtcctcattggccttttgagggtagcaagccacattgcacggggctgaggaatgagtggaaggtgtggaaagggatactgcatgtataggtagcttgtttaaaaagtttagttgtgaaagtgaagacagaggccgggcactgtagctcacgcctgtaatcccagcactttggaaggcgggtgaggggggatcacatgaggccaggagtttgaga

SEQ ID NO: 500581 - DNA, 543 bp, Homo sapiens
ggccaggctggtctcaaactcttggcctcaagtgaacctcctgcctcagcctcccaaagtgctgatattacaggcatgaactaccatgtgcagcctacttcaagttttttaaatgacaaaaagatccacttgctggatttacctatattcagaagatgtggatagaccaatacaagatagaagtttagaacgtatcttgaacgtttcagatactctactaagcrtattacatgaattagttcatttaatcctcaaaacaacagagctaacatgagaaagacttcgctagattcagggtcacctagatcactggtgatcttagtgagagtgtcctcattggccttttgagggtagcaagccacattgcacggggctgaggaatgagtggaaggtgtggaaagggatactgcatgtataggtagcttgtttaaaaagtttagttgtgaaagtgaagacagaggccgggcactgtagctcacgcctgtaatcccagcactttggaaggcgggtgaggggggatcacatgaggccaggagtttgaga

SEQ ID NO: 500582 - DNA, 616 bp, Homo sapiens
tttagattccacacgtaagtggggtcatgcagtatttgcatttctgtgcctggcttatttcacttaacatatgtcctccacgttcatccatgtccttgcaaatgacagcatttcttttttaaggctgaataatattccactgtgtatatacaccacattttctttatacattcaactgttggtggacacttacatctcttcaacataccagtttcatttgctttggatatatacccagaaatggaattgctggatcatacagtagttctatttttaattatttgaggaagcttcatatggtttcccataatggttgtaccaatttatattccccaaacagtttacaagggttctcttttctccacatcctcatcaacatttatctcttatttttaattcttcagagaattctcatcaacatatgtaatactatttttccagaatctgggcaaaaaagaaagctaagtgttcaaagtatagttctcaaaattcattcaagagaaagaaaacaagccacatactgggagaatatatttgcaaaagatttatatgataaaggactgttatycaacatatacaaagaactcttaaagctcaacaataataaaacaaccag

SEQ ID NO: 500583 - DNA, 239 bp, Homo sapiens
tatgatataacagtggtagatacagtgaagatcccctgtatgatatcacagtggtagatacactgaagctgctctgtatgatatcgcagtggtagatatagcacagctcctctgtgtgatatcacagtggtagatacaatgaagctcctctgtatgatatcacagtggtagatatagtgaagctgccctgtatgatatcacagtggtagatatmgtgattctcctctgtatgatagcac

SEQ ID NO: 500584 - DNA, 542 bp, Homo sapiens
gttactagataataatgagagacaactggctgtttrggtaggttacatacatttccctagaataaattttagatggagtaatgctttagatgttaaaattgaagctgtgaatgtagtattggaaaatatacatgaaaatgtatgctagcttgggaccaggacagtctgtctaagcatgacaccaaagacaaatgccttgaaatagattttactatataaaaatattacccctccccctggctggtctgaaggtagtcagtgatctcagttgattgttcagtcagttacagattgatctccttgttctgctccttcccctcttctcactactgcatttaactagtcttaaagaaaaaatttcttctcccccagtaagtgaaagataggaaaatatttgaaaaaaagtgaaataactttcaaatcctatgtatttggagagcacggaaaaatgtcctgcaattccagttgaatgaaatgttgcatataggccgatctacccagacagaaagtcgattaatggttgcctagggctgggcgcaggg

SEQ ID NO: 500585 - DNA, 542 bp, Homo sapiens
gttactagataataatgagagacaactggctgtttgggtaggttacatacatttccctagaataaattttagrtggagtaatgctttagatgttaaaattgaagctgtgaatgtagtattggaaaatatacatgaaaatgtatgctagcttgggaccaggacagtctgtctaagcatgacaccaaagacaaatgccttgaaatagattttactatataaaaatattacccctccccctggctggtctgaaggtagtcagtgatctcagttgattgttcagtcagttacagattgatctccttgttctgctccttcccctcttctcactactgcatttaactagtcttaaagaaaaaatttcttctcccccagtaagtgaaagataggaaaatatttgaaaaaaagtgaaataactttcaaatcctatgtatttggagagcacggaaaaatgtcctgcaattccagttgaatgaaatgttgcatataggccgatctacccagacagaaagtcgattaatggttgcctagggctgggcgcaggg

SEQ ID NO: 500586 - DNA, 513 bp, Homo sapiens
aaattataagtgtacattttgtttctgaaggcacatttctagttcattgtcttgtacacaataattactaaaacatcagtcttaaatcccaacccacggaacacagagtctttcctgaggagacggcaaataggtttttttctcatgtgccaactctgataatttctagtgcctacctggggcatagactgaagaagactcctgaaggctgtcacaggctatgggaagagtgaaggagtaggagtgtctgctatgggtgagagtggtgcatcaaagttgcgtctagtttccagtatatggtggtgacctctggttgtgaaagaaaagacagaagagctgctttttagtgtttcgaatttttcctttcttactagcctggtaccttggttagataatttgttagataattttagttgatycatttgcttagctacctaaagcctttggtctcaatatatgtttaggagtcaatgttcagttaggtcatttggcatctatgataagaggtaaaac

SEQ ID NO: 500587 - DNA, 489 bp, Homo sapiens
tgtgccctaggggtcatcttsttggtttgttttgtgggtaggacacacaggaataagcagtactgttagttttagtcctggcctttcaaacccagtttttttttcttaagcagagatgctctcttcgctgtcaaactgcctgtgtcctcctcacctctcactctttttgactttgtcactctcaaaggatgcaagccttgtacaagagcagagaagagaggagggcaatggaaaccctcctccagcaagctgcgttctttccaccacaaagagccaaggaaaatgttcctctggggtgcaatcagggccagggctcctctgactcaacccccagatgacctaataaatagcaagaagaggacagaacattctaggagtcagaaagtctccccataaatgccagaggaagtgcagaacagtatcacaagagaccacaagggatcatagagctgcccgaattggcataaggccacaagtgccctcataaat

SEQ ID NO: 500588 - DNA, 443 bp, Homo sapiens
aaaagttctaaaatacctcgtgggcttggagaagcaattttttttaaaaagatccactttcatagcattttattcataaacactgaatgagttttggttctcatgaaaaatagtcagtagaggtggtggatttggaaaagaacctggaggagaccagcaaggaagctgcatggacaggggagagaccattttttccaggctgagggtggctttgtagctggctgcagcgaatgaagccagcactgctggcttgagcttgttttcatggcataattaatgtgaggaagtgtcatcttttcttgcaagtgggtaaccttggatcatgarctctgaacttaggaaaggaaaccacacacaaatgggtagaattgaggaaatccctcacctcacaatggcccttggggaggtatgtggtctgtgaaacacagaactgtgcaaggcaa

SEQ ID NO: 500589 - DNA, 656 bp, Homo sapiens
catggaaacctaaaactcagcccacattttgatgtggtcactttaacatggcctataaaacaaaccattaaaatttcagtctttaaaaaattaccaagctattgggacaaccgatagcctctctttgtctcagagctgggagtgagtgaggctcagggtcaaggtgaagggcaagagggatgtgaaatgggagttgggaatgccatggcacacattgctcagtaatttaaacaaaaaatagaaacagcattttttttttcaattttaatgaaacactttgaagtgagccatgtaaaaacattctgcttcaccaggactctctccaatgtcctagtggccaggtctggtgggccctacggacacctcccaaagggggtgctggcacttgggagcccaagggctgagcscaaccccccagattatgaattggctgaatagaattatgtccaaccccaccaaatacactatgccatcacaatcccctgaacaaggacagtcccaggcctgcagagcaaaatttaagagaaagtttaggccccagaatttgttaaggacaaactcgagagatcaaagggaaaggctgataccaccactgagaagcccatagacagtctctttcccaccaatgcagggcccacgtctgaccgctgtgcacg

SEQ ID NO: 500590 - DNA, 590 bp, Homo sapiens
ttttcttgccacttgtgaaagagacttattgtttccaaaggacaytctttgcattttcgacaaaatcatttgacttgggcctgttttggggctgactattctgttccacttatctgcttgtctattaaatcatgaatgacacactcttgtttattacattagctttagtgtaagtattcatatcacatctggcattgcacttcttcagtcttatttcatctattctaggtttaggaaaagttgttgatatatttacctggaatttgattggaatatagctgaaataataataaatgtgcttctccagaacaagaaacatctatttatttactttgtgagaaggagttgtgtcacccaggttggtgtgcggtggcatgatctcagctcacagattctcccacttcaacgacccaagtagctgggaccacaggcatgcaccaccaagctcagcttattttttttgtattttgggcagagatgggctttcaccgtgttccccagggtggtctccaattcatgggctcaaggtatctgcctgctgcagactcccgaggtgctgggattacaggcgtgtgacaacgtgcctagcc

SEQ ID NO: 500591 - DNA, 590 bp, Homo sapiens
ttttcttgccacttgtgaaagagacttattgtttccaaaggacattctttgcattttcgacaaaatcatttgacttgggcctgttttggggctgactattctgttccacttatctgcttgtctattaaatcatgaatgacacactcttgtttattacattagctttagtgtaagtattcatatcacatctggcattgcacttcttcagtcttatttcatctattctaggtttaggaaragttgttgatatatttacctggaatttgattggaatatagctgaaataataataaatgtgcttctccagaacaagaaacatctatttatttactttgtgagaaggagttgtgtcacccaggttggtgtgcggtggcatgatctcagctcacagattctcccacttcaacgacccaagtagctgggaccacaggcatgcaccaccaagctcagcttattttttttgtattttgggcagagatgggctttcaccgtgttccccagggtggtctccaattcatgggctcaaggtatctgcctgctgcagactcccgaggtgctgggattacaggcgtgtgacaacgtgcctagcc

SEQ ID NO: 500592 - DNA, 590 bp, Homo sapiens
ttttcttgccacttgtgaaagagacttattgtttccaaaggacattctttgcattttcgacaaaatcatttgacttgggcctgttttggggctgactattctgttccacttatctgcttgtctattaaatcatgaatgacacactcttgtttattacattagctttagtgtaagtattcatatcacatctggcattgcacttcttcagtcttatttcatctattctaggtttaggaaaagttgttgatatatttacctggaatttgattggaatatagctgaaataataataaatgtgcttctccagaacaagaaacatctatttatttactttgtgagaaggagttgtgtcacccaggttggtgtgcggtggcatgatctcagctcacagattctcccacttcaacgacccaagtagctgggaccacaggcatgcaccaccaagctcagcttattttttttgtattttgggcagagatgggctttcaccrtgttccccagggtggtctccaattcatgggctcaaggtatctgcctgctgcagactcccgaggtgctgggattacaggcgtgtgacaacgtgcctagcc

SEQ ID NO: 500593 - DNA, 585 bp, Homo sapiens
tagtttcctatgggtctggcagttagataactgatttgagtcacacttctcaggtgtgtaaatttagagccattctttgagtctcatgcagagtaaggggaggatgatggagggccatttatgagcaaatataaaatttaaaatggactttgattgtcctcaatagggctgaaaattgttacaggcttataaaataacctctgtgcccaaagaagtccttctgytcccaaaggataggtctccatgaagactcggggttcactttgcacatcacaggatccaaactgaagaagattaagggaaggcttttataggcacccactttcctcccttctttctgattacaaatataattttgatcccttactctcctgagtacattctagctcctaccaatttctcatttctgctcaaaacctttgatgaaaaataggaaagagttccttagaatatatgagaccatagtctagaaatacccttttacatgggtatagcatatgcatgggctattctgctttgagcataggaagggtaccacctgtgactgtcagtgtggacatgtctcatagtgtggaggtccagcca

SEQ ID NO: 500594 - DNA, 641 bp, Homo sapiens
tttggaggccttagaaatatagctcttaaatctaagactgtacagcatttcattaaggccccaactgctgcactttgaaatccatcagtgcatttgtgcagaagacctgcttccatgagcttctctcagccaatggctaagctaggcagaaatactaaaggggctctttcctgggagacataaaactcagacgcaagactcctctgatggactgcttgagctgagaacaccccatcagccttgctaaatgtctgtagaacttcactgtaatctaagatccatccagctaaccattatttctttttactctccttcacaagcatcagatctaaattgccatgtaacagctctttcagtctcctctgactccctctatattttctattataggcatttccactaataaatatcctacatgcctaattctgtcttggtgtctacttctcagatgaccgagactaatggtaccaagagtgatccaggaaaacagctgtaagagtgagatttgggactggcttatctactgcccagcaggtaaaaaggacaccttcctagttggtaggtgggacatgaggagttcctggaacacagtgacagcttaamcaccaaaaacccttggagaaatgtcttcatggaggaga

SEQ ID NO: 500595 - DNA, 604 bp, Homo sapiens
ccgtaacagtttatcattgttatggcaacactcagaagttacccccagttttctagctaattctgaataccctgcctcttaattagcattaaacgtgggtataaatatgactgtaaaactgcctctatgtcgctactctcagcaccctgcctatggtgtagcactgctctgtaagagcagtcacagagctgtaacactgccattgcctcaataaarccattttcttctacccttggctcacttttgaatttcttcctgggtgaagccaagaacttgccctgcatcacagttaattcatttttatccttctcatgtttaatttacttgaaattagacaacgtaatccacaaagctatgtggttataggcaaacagcatgaagtcacaatgtcctgaattcaaaagagagaaggaaagcactattgtcagaaagaacgcttatctattcctgaatcacaaattatcttaaaacctagtgtcctcagacaacaaccgtggtatgatgtcttaatgtttttatgaatcaggagaataccaaagcaggcttggctgggcaattcttctgcttcatgtggtgttgactgaggtcactctatggtactcag

SEQ ID NO: 500596 - DNA, 619 bp, Homo sapiens
ttcagctgtgatttattcttgatgtttatatttcataaacagcttaaaatattaacatatattaatataaatggtctttttctttcwttctataaatatagttaactaaagacttaagtccttgttaatacagatttcatgatctctaaaaataaaaaacaagttatcctccatcaaaataaatgatataaatcgtgaatacaacaatatttcaagactagttcaagttgaaggcagttactagaatatgcatcctgaagtagagtagatctttgttgaacagtaaatatatacaaacatgtgaaacatgtgttagtcatttttctgtttgctcttagatccactttctggctttttttctttctttctttctttttttcggtttggacattttagtcaggttttactctaaattacttctggttaagttgagccaggaggtactagaccactcaaaggtagaaggaagagataagccaggaccattttccctctctatgccctctccatggctccatcctccccctcactttcacctctctgctggaagccctagcaatggtacataagtattgggctctggtaatatgtttttattccaatttctctccacccttaa

SEQ ID NO: 500597 - DNA, 619 bp, Homo sapiens
ttcagctgtgatttattcttgatgtttatatttcataaacagcttaaaatattaacatatattaatataaatggtctttttctttcattctataaatatagttaactaaagacttaagtccttgttaatacagatttcatgatctcyaaaaataaaaaacaagttatcctccatcaaaataaatgatataaatcgtgaatacaacaatatttcaagactagttcaagttgaaggcagttactagaatatgcatcctgaagtagagtagatctttgttgaacagtaaatatatacaaacatgtgaaacatgtgttagtcatttttctgtttgctcttagatccactttctggctttttttctttctttctttctttttttcggtttggacattttagtcaggttttactctaaattacttctggttaagttgagccaggaggtactagaccactcaaaggtagaaggaagagataagccaggaccattttccctctctatgccctctccatggctccatcctccccctcactttcacctctctgctggaagccctagcaatggtacataagtattgggctctggtaatatgtttttattccaatttctctccacccttaa

SEQ ID NO: 500598 - DNA, 619 bp, Homo sapiens
ttcagctgtgatttattcttgatgtttatatttcataaacagcttaaaatattaacatatattaatataaatggtctttttctttcattctataaatatagttaactaaagacttaagtccttgttaatacagatttcatgatctctaaaaataaaaaacaagttatcctccatcaaaataaatgatataaatcgtgaatacaacaatatttcaagactagttcaagttgaaggcagttactagaatatgcatcctgaagtagagtagatctttgttgaacagtaaatatatacaaacatgtgaaacatgtgttagtcatttttctstttgctcttagatccactttctggctttttttctttctttctttctttttttcggtttggacattttagtcaggttttactctaaattacttctggttaagttgagccaggaggtactagaccactcaaaggtagaaggaagagataagccaggaccattttccctctctatgccctctccatggctccatcctccccctcactttcacctctctgctggaagccctagcaatggtacataagtattgggctctggtaatatgtttttattccaatttctctccacccttaa

SEQ ID NO: 500599 - DNA, 186 bp, Homo sapiens
ctccagaactaaggtcttcgtctattcaaagtggccagtactagagccctaatatttgccttttcaacctatatgtatttatctggaactagatatagtacctcagttagaatgtacttgtcacygtaagtaaacaccgatcactataaaataaattactgacttcacctttaaaataaatgcaat

SEQ ID NO: 500600 - DNA, 618 bp, Homo sapiens
tgtcactgatcagagaaaagagaagaccgtgactttttttccaktctcttttagtgaatcttccaaatttggtgaaaaggtttttgtgaaggaatgataaagatgagaaaaactttttaaaacgtaaagtgtaagcatacatctatttgaatgactccttcatccagggcaagtgaaagacgtgttaagttttattatacattttcctgctttatgcttacaaaagttcttaggtaagatgatgacaaagatccttcgtttgaaatcatcgtgttggctaccagtgttgcaccaacttgcctctcaccaagcatagtttgaatttcctcaatctttactgcctacttggaagaaatcacatgctataaatgaaaaagcatggtatttgggatcacaaagacttaagtacaaattccatctctaccatttactagctctatggccttagaaaaattatttaacccctcttatcttcagttttctcatctggaaaatgaagaaaattatctctgcctcacagagtgtgaatgttataaaagattggtcacctcataaagtgcccatgcctaataaattctccagaaatgtttttttctcagttgacagcatacctctcaa

SEQ ID NO: 500601 - DNA, 604 bp, Homo sapiens
tgcagcctcatccccagtcatagactgagcttcaaccacgttcaccctgttcacacaccaaaccccgacccaaccccaatgcagccccagtctaaccccagcccagcctgtcctctgtcctctgtcctcattcacatcagcccctgccagcctccagatgggcatactagtaaactaatcactgaaaaactgcttgaaaactacccttaggctacctccagcacccacatgctttctgttcagcacacaaacctagagatcactaaggctgcctgtcctttgagtcaggggcttcctacacatctcccacttctggttcttcacagcctggcttctcatgcactcagcaagtctaacaggagacccctagctgcaagtaacccatgcacctggacatgcccctggcctcctgcactcacctcaaccktatggaaggaatgtgtgaccccctttgtccagtcttcctccagaagaggtctggcaggctgcactgaaatacagcctctctgtctccgcctactcccttggacctccctggtcagggttatttattctctgcctcaccctctccctccttctgcttcttcctgcagggtggggcaga

SEQ ID NO: 500602 - DNA, 589 bp, Homo sapiens
tgcttgcctcatccctcctctcaccagccctggaaactaactgggcatacctttcatgccttcgagagtggtggktttttttttaattcttcatttacttttcttcttaattagcactgctagagatttaattgttagtaatcttttcaaagaacaggatatttgattttgttggctgtttctttttaaaatatttattttactcaatgtattgctactgaaaatttcttggctaagatcaaatgtcatctccatcaaggatctgttgccagtgactctttttcttcctgttttaccaaaacatctcacacaactgcctgttccttcactttctggttttgtttttgagccattatggacatgctggaaaatgcacaaatctcaaatgttcagttagatgaataattacaatgtgaacacatgaacacacctatgtaggaacaaatcaagatatacatactattgctctcaggctggtaaggcatactgttttcagaatgctctgtccaagttctcctaagacatatttctagcactgcacctgcctttgtttttaatcctgtggaaacattcacgtgcagatctggag

SEQ ID NO: 500603 - DNA, 506 bp, Homo sapiens
atgcttgcctcatccctcctctcaccagccctggaaactaactgggcatacctttcatgccttcgagagtggtgggtttttttttaattcttcatttacttttcttcttaattagcactgctagagatttaattgttagtaatcttttcaaagaacaggatatttgattytgttggctgtttctttttaaaatatttattttactcaatgtattgctactgaaaatttcttggctaagatcaaatgtcatctccatcaaggatctgttgccagtgactctttttcttcctgttttaccaaaacatctcacacaactgcctgttccttcactttctggttttgtttttgagccattatggacatgctggaaaatgcacaaatctcaaatgttcagttagatgaataattacaatgtgaacacatgaacacacctatgtaggaacaaatcaagatatacatactattgctctcaggctggtaaggcatactgttttcagaatgctctg

SEQ ID NO: 500604 - DNA, 602 bp, Homo sapiens
atcctctataccaataatctcctgggattatgaagccattctgttacaatccctaacgggtacaactggggagtcaacttgcttccatccatgctggctctaacacacagatctaataagtgccacagcgagggaaggcacacatgcccacatgcccagcaatcctgccctcatcactctgcagtgccaacgatactctcatcatcatcctaggtgttccacatgtgcctgctgttgtggwtttgactggaaggaagaggagcatgggcaaagaggagagaaccaaggaaactcaagatgaaccctggaattcccctcagagaggggaagatgctgtgcaatgattctctaactgcataaggaaagagggtaacaaattaaagacagggagggaatgaaggaagagagatgaaagaagggtcccacatgtcagagggaccatttggaagtggggtttctggaggaaaagcaaaggagacttcctctttgtaggaaaaacaggctctctggtcaccttatcttaggatcagagaaatgtatctttgcaaagaagaaactcaggcaaagaccaatgaaagcatgccaagaaggggcactaaaca

SEQ ID NO: 500605 - DNA, 602 bp, Homo sapiens
atcctctataccaataatctcctgggattatgaagccattctgttacaatccctaacgggtacaactggggagtcaacttgcttccatccatgctggctctaacacacagatctaataagtgccacagcgagggaaggcacacatgcccacatgcccagcaatcctgccctcatcactctgcagtgccaacgatactctcatcatcatcctaggtgttccacatgtgcctgctgttgtggttttgactggaaggaagaggagcatgggcaaagaggagagaaccaaggaaactcaagatgaaccctggaattcccctcagagaggggaagatgctgtgcaatgattctctaactgcataaggaaagarggtaacaaattaaagacagggagggaatgaaggaagagagatgaaagaagggtcccacatgtcagagggaccatttggaagtggggtttctggaggaaaagcaaaggagacttcctctttgtaggaaaaacaggctctctggtcaccttatcttaggatcagagaaatgtatctttgcaaagaagaaactcaggcaaagaccaatgaaagcatgccaagaaggggcactaaaca

SEQ ID NO: 500606 - DNA, 600 bp, Homo sapiens
gggccagctgtgatcacagcaccaccgcagagagaggaggaggatgccagggggctgggtagaccgtcagccctggaagaccattgttccacgggacagactgctgagggccagtcctgcaggtactttgctcttccacaggtcaaagccgtctcactggctgtcttctctttggggtctctggggctctggccagtgatcaggagaaagaccagccctgaggggcagggcaaaggttggccagggtccagaagggttagacatcacagtcctccactgcccaccttcccaggaaagcaccctcaggctgtgggccttccccagaggggcagtttctacagggtctacgcagtggattctaaaggtgataaaggctgggtgcagtggctcgcgcctgtaatcccagcactttgggargccaaagtgggaggattgcttgagtccagaggttcaagaccagcctgagcaaaatagtgaaaccttatctctactaaaaaaaaaaaaaaaaaaaaaaaaattagctgaacgtacgcctgtggtcccgggtactcagggggctgaggcaggaagatgacttgagcccagaagtttgagactgct

SEQ ID NO: 500607 - DNA, 612 bp, Homo sapiens
ttggtctggtggttctttatggtataacagggcagcattgagtttaattcctcaatttctaaatttttcctcttcccagtgcacggaaacactctccacacctcactgccactgccactgcagtgggcagggttggggtggtgtcagtgatacaggactgtttttcctacctcttcagtgcctctttcagtgttataaaattaaaatcaggtactgtgagtgcccatctgattttcagttattatgaagatgcgtctttatgtagatgttaaattaatgtgcttggtgaagggatgatcagcagaaccttctattccatcatcttgctctgccaacctctgtattgtgcactttaaaatgtgtttagagggtatatttcatgttaaatgttaccattgtgaaaatattaaaatgaatgaatgaaagaataaataaataaagttataagtatagaagccatacaaagtatatttttggaccacagtagaataaattagaaggaaagttggagaatttacaagtatgtgtaaatgtgcacctagataatcaatgagtcaaaaaataaaycacaatggaaattaaaatatactttgaactcaaagtaaaaacagt

SEQ ID NO: 500608 - DNA, 690 bp, Homo sapiens
gttgggtcaaatatctccagaacattatggttttatttgtgtaattaattaaaacttttttcaatatcactttcataaatcttgaatatgaagtacctataaattgacttagctctggtttatagattggcaatgtaaaaatgtcatatattctatatccttgtaagtcaaccataattcatttaagatttggagaatgggtaatacaaatggagtagaaagaaaaactataataggaacgtatttagttaaaaaatgtaaaagaaaagtttttaaaaacaaagaaagcatgtttgaaaaaagttgtaaaaattaaggatctaatacacaggtctagatacctgctcaaacacataccttctaagatccactgatgttgaaaacttgattttctcacaaacatagccccaggtgattgggaagagtctgagaattcaacctaatttcctgaatcattttaggatttggaaatgatttgtgtggaatataataaaacttaatcttcctcttcacccaaatttatagttgtggtggagaggaatttattccatgtggaaggctgagtatatttcagaagaggatgcctgctcacttataatcagacttagaaggccattctaattatgatttactaccaygcctttcagaaccagtctctcttcaaccccacacaaatgataatttatatgg

SEQ ID NO: 500609 - DNA, 508 bp, Homo sapiens
tgtctcaagcaaataaaaaaataaaaataaataaataaataaataaaacaacctagaaaactcgttaggaaaaatgattctgatttcacagaaagaataataaatctacctactgaagatgtgttttcaatcctgatctgctgctaaactagcgtggcagagacaccaaaatccacaycgtggctctgccagtttcttgctgtgttgcctcgggcaaatcaccctcagctttctcagctgtacaatggggataattatatcttcaatatggaaagccgtgaggatttaaagagaaaaaagatgtcaaaggcacagcacaggtgccggcacacattaaatggtatcattgagggtaactttgtggctaacatcatacatttttgggtcatctcattccaaagtagattttggtctttggaatgggatgacccgaaatggtatcaggttgctggagtgctatatgatttgtaatatgtgacagttaggaatttcacttgcctgcttgacc

SEQ ID NO: 500610 - DNA, 508 bp, Homo sapiens
tgtctcaagcaaataaaaaaataaaaataaataaataaataaataaaacaacctagaaaactcgttaggaaaaatgattctgatttcacagaaagaataataaatctacctactgaagatgtgttttcaatcctgatctgctgctaaactagcgtggcagagacaccaaaatccacatcgtggctctgccagtttcttgctgtgttgcctcgggcaaatcaccctcagctttctcagctgtacaatggggataattatatcttcaatatggaaagccgtgaggatttaaagagaaaaaagatgtcaaaggcacagcacaggtgccrgcacacattaaatggtatcattgagggtaactttgtggctaacatcatacatttttgggtcatctcattccaaagtagattttggtctttggaatgggatgacccgaaatggtatcaggttgctggagtgctatatgatttgtaatatgtgacagttaggaatttcacttgcctgcttgacc

SEQ ID NO: 500611 - DNA, 508 bp, Homo sapiens
tgtctcaagcaaataaaaaaataaaaataaataaataaataaataaaacaacctagaaaactcgttaggaaaaatgattctgatttcacagaaagaataataaatctacctactgaagatgtgttttcaatcctgatctgctgctaaactagcgtggcagagacaccaaaatccacatcgtggctctgccagtttcttgctgtgttgcctcgggcaaatcaccctcagctttctcagctgtacaatggggataattatatcttcaatatggaaagccgtgaggatttaaagagaaaaaagatgtcaaaggcacagcacaggtgccggcacacattaaatggtatmattgagggtaactttgtggctaacatcatacatttttgggtcatctcattccaaagtagattttggtctttggaatgggatgacccgaaatggtatcaggttgctggagtgctatatgatttgtaatatgtgacagttaggaatttcacttgcctgcttgacc

SEQ ID NO: 500612 - DNA, 455 bp, Homo sapiens
ttttttttttttttatagagatggggtttcgccatattgcccaatctggtctcaaactcctgagcccaagccttccacccacctcggcctcccaaagtgttgggattacaggcgtragccaccacaccctgcagcttctccttttttctcgggtctcaacttaagcacttcctttcctgggaccatttccctcatcattctgagaacatcccacctcagctcctttttgagtcattatccatcgttatcgtcttcacagaactattgtccgtctgaaataatctcagttgtgtttatttttttaatttacttatgcatctattagctgaggtccccgttagactatcagcatcatgagaacaaagaacaggccagagaaggcacccctggatttttagcacccaggacagtgcctgtggtgttgtcgaatgatcttgcctttagaggctagatcc

SEQ ID NO: 500613 - DNA, 618 bp, Homo sapiens
tatcctaagtgaaataacacagaaacagaaaatgaaataccacatgttctcayttataagtgagagctaaacactgggtacacacgtggatataaagatggaaacactagacactgggactccaaaagttgagagggaggaaaggatgggggcaagggttgaaaaactacctattggataataccttcactatttggatgaagggttccctaaaggccaaacccagcattgtacaatatacccatgtaacaaacctgcacatacacccctgaatctatagtttcaatagataaataatgctgtgagcatggatggctcttgaattgatactctgtaaagcctgaggacataatatcacattgtaagggcaattctgtggaatagtggaaagcacattggaactagagttcaaaggcctggatttgaatcctggtcctacaacttttggggattttgtaaaagtttactgagttctctgagcaacatttttcttatctacaaagaataatacttgctttaagtctgttttatggaaattaaataaattaatagacatgaacttgtataaatttgtctgtctcaagctagaagattaaatgtttttaacattttaatctg

SEQ ID NO: 500614 - DNA, 511 bp, Homo sapiens
cattgagtagcttctaccacattctgcctcatgctttttgtattcaaacaatctatctgcttctttatcaattttattgagatgggtattatttacatataataaagcacacacattccaagtttacattttaggagcttgacaaatatatacttcrtctaatcactaacccagtcaagttatccattatttccaccaccacagagatttctgccatggtttttgcagtcagcccattcttgccctactgattcctgcatcaggtaaccaaaatcccatttccatcactacagattagttttgctgattctaggactagaatgaattgtatagcacaaactcttttgcgtttggtttattttactcagcataatgttttgaaatttatccatgttgatttagtatcagtagttccatttttattgctgggtagtattccaccacatagatacactacaatttgtgtatccatttacctgttagtaaaccatttggttgttttcagcttgga

SEQ ID NO: 500615 - DNA, 511 bp, Homo sapiens
cattgagtagcttctaccacattctgcctcatgctttttgtattcaaacaatctatctgcttctttatcaattttattgagatgggtattatttacatataataaagcacacacattccaagtttacattttaggagcttgacaaatatatacttcgtctaatcactaacccagtcaagttatccattatttccaccaccacagagatttctgccatggtttttgcagtcagcccattcttgccctactgattcctgcatcaggtaaccaaaatcccatttccatcactacagattagttttgctgattctaggactagaatgaattgtatagcacaaactcttttgcrtttggtttattttactcagcataatgttttgaaatttatccatgttgatttagtatcagtagttccatttttattgctgggtagtattccaccacatagatacactacaatttgtgtatccatttacctgttagtaaaccatttggttgttttcagcttgga

SEQ ID NO: 500616 - DNA, 441 bp, Homo sapiens
tgctctttaagtgtagttcaaaagtatgaatgcttttgtagatcagtttgaaaaacagtgaaaccctaggacactaatttgagttgattggcatgattccaggacacagaacccagagagctacctgctctgcctactagcttcctttcccagtgccaacaagtcctcccaactcacgttagtatttccctgttcatgctctgccatcgactcatagaccagcaygtggtcttgggaccatctgtttcaggattacctgggatgtgtgtttaaaaggtcacatcctagaactgagtcaagatcttaggatgttgggtgtcagaatctgaatataaaacccttttgctcctgctccaccaccacaaccaccatggttctcatattcacttaaatttgaatcctactgctcttggagtagacatttaagaaaccactaagtta

SEQ ID NO: 500617 - DNA, 613 bp, Homo sapiens
tgaagaaggtgacatttacatcaagctctgaggcatgcagaaggaaaggtgtgcattctaggcagaggaagccccaggagcaacagcaaagaccttggcaatgactggcatgtgtgtggcaaatgtcggagaactaagaggaagagatgaagccaaaaagtaaactgcggctatgacagtccttgaattccaactgcaggaattctgctttattctgttattaaaggagggaatggttattgaaggtttctgaacagtggatgacatggttacccttgagaaatattacgkcagcaatgtgaaaggaaagactaaggtgaaagacagttgggggctgtggcaacagtccatgtaatagataacaaaaagctcatctgtggagcagcagtggaggcacagaagagggaatctgaagtatactagaaagttttagatttgctgcatggtccaatttatttccaaaaaaaaaaaaaaaaaaaaggcgtactacaagcacggtggctcatgcctataatcccagcactttgggaggccaaagtaggagggtcacttaaagccaggagtttgcgaccggcctgggcaacacagtgagaccctgtccttaaaaaaaaaa

SEQ ID NO: 500618 - DNA, 652 bp, Homo sapiens
tgttgaaattccacttcacattgtggcagcaataaactctgatgatgctttgttttccccaccaatagagtagggcagtcttggggagaatgttttaaaaccacttaggcctgtgatatttctctactacctgcacctatggcaaactaattttgtctttggattatccaaatttctctaacattcccatagcccttgatttaaagaatgaataaaggcatttttctaatgcaaattatcttcagactctgcctatataaacaaaatcaatgtctgagatacttagctagataattcaaatttaggacacactttgactcttagaacttatttttcataaatgggaaagagagctaagacatacgaaaaattagtaaaatataaactatgttagatggtgataaatgccaatgagaagacaccgaacaggaaaggaaatatgaaatgaagacgtaatatagttttagggagaatggcctaacacagtctcacagagaaggtgcattttggtaagcacatgaagtgagggatctgggtgttcaagtgtttgggggaaatgatttcaggcagagraaacagtaagtacaaaggcctctcaggagtgtgcctgggccttcaaggagcagcaaggggattagtggagctggaacaa

SEQ ID NO: 500619 - DNA, 589 bp, Homo sapiens
aaaattatgagtttacagaacaagatgtacctttggttcttattttatggcctagtactatggaatgcactattacgaaaacaattctaaactgtgctttattatattatattgtgcaatttatattcagaagatactatcagcaccagggaacagacaaatttaataaaagacacagtgttcctgttgtcctaatagttattaaaatgaaactctttccagaagacatttatagtgtcttttcrgcgatattctacatgctttgacagatcaattgggacctatagttaggaacagagacatcagggatgttagaaacatactgtactaagctaaaaggagcctgtataatcatccaaactaactccttcattttacaggggaggtcattaggctaagagacacaaattgatgcaatgtaatttacacttaagtatggctagaactgagggccctgacatgtaatcaaggattctttccacttttattgtcattaatgttagtaatcttataggatatccaggcattgccaaatatagccatatcatccctaaaacagctccaaaaggctcagaggaaagatctagtt

SEQ ID NO: 500620 - DNA, 507 bp, Homo sapiens
gattaactgatcagagaccttgaatattgacccagcttgcaaatatttaacaacagaatgtaagattacagattaatagaaataaaatacttggacctctaaagagataaacatatgtatagcaacattctgaatgttaataaagactatttttgaattggttggtaatagtaaaatggaaatggtagaaacacaaaatatattgtacattagatgtcataactcacttgattatgaaagaacacattcttcactaaaaataagtcatgtgcattatctatccactgatgtgcaatgtcatttaagacattccatcattctctgcttgagcactcttctgtaatctcatgaggtgtccagggaagagacaatgatrgccaagacattaaaatgtaatcaagatatgcaaattcatatctaaatatgatttgctaggaaaaagaaattaatctgggcatggtcaaataaacaatgtgtaatatggataattaatcaccaaattagcag

SEQ ID NO: 500621 - DNA, 507 bp, Homo sapiens
gattaactgatcagagaccttgaatattgacccagcttgcaaatatttaacaacagaatgtaagattacagattaatagaaataaaatacttggacctctaaagagataaacatatgtatagcaacattctgaatgttaataaagactatttttgaattggttggtaatagtaaaatggaaatggtagaaacacaaaatatattgtacattagatgtcataactcacttgattatgaaagaacacattcttcactaaaaataagtcatgtgcattatctatccactgatgtgcaatgtcatttaagacattccatcattctctgcttgagcactcttctgtaatctcatgaggtgtccagggaagagacaatgatagccaagacattaaaatgtaatcaagatatgcaaattcatatctaaatatgrtttgctaggaaaaagaaattaatctgggcatggtcaaataaacaatgtgtaatatggataattaatcaccaaattagcag

SEQ ID NO: 500622 - DNA, 658 bp, Homo sapiens
tagcatttttaacaaagaataataataaatgtgtagagaaatgacggaacaaagaataataataaatgtgtagagaaatgacagaacaaaggaaagcagttttaggtttccaagggcagggaactatgggaaggtaaacatatggggtaaactagtggagtaagagttgttggcagattcctctggtgctgtctctgggttggtaagagtctggagtcagacctaggaaaggagaatttagatcctgcctttaggcagaaagggggagggttgagagaaatgttcttgtgtttgctacttcttaattgccttcagctcaaactaattcctatgtcaaaaaggcatattttggggggacatattctgatctccttcaccagcaaaragccctgggaagaacatcaggtggtacaaactacggcaagtacaaagaggctgggacagagaagggcttgagaagtggggaggaggaacattaaacttcaacattaaaacttgaaggtaatgcaaagttgcttggattttattctaaatgcagtctgggccactggaggatggtgagcaaggagtgacataaccagatttaccttttaacggagcactctagatgctacgaggagaacgttctctaaggacgtgagagtagaacaggaaaacc

SEQ ID NO: 500623 - DNA, 517 bp, Homo sapiens
ttatgaatgatttgaattttcttgctcccttttgcttcctccaaatgagtccactacaatcctgaatttttatcattcccacatcggtctttcccccrattctacactcaggcaatgcagggagagaattgtacaacatgcttctacaaatccatgatctgtatccctagatattaccacaatgattttcctatatatcaattgttccttaacaccatcatttcctacgaaggttgcttcaaatctttactatattcgagttacccatccccttattcacaatagatatccttacctcagtcttcaccaagaaaacagagcaatcaggtaaaaattcccttaacttcccatccctctcctccctctactcatacaaccgtgtcttcatcagcatcttttcttacctccttcctacccatcccagagacagcatcctttctcttatctaaaaccaatactccagccctaatccctttgccccttttctactactggccacctgggttgttgatggagc

SEQ ID NO: 500624 - DNA, 552 bp, Homo sapiens
ctggtacagcctagagactatgcctctagcccctccccagattcctgaggcctagattccggagaccaatgggttttaacagagagaaaagacttctcctaccaactattgtggaacaaaacatttcctgctttatcttattttttaagtgattccagggtcttctataaaagatacatggctcatcatttgggaaaagttatttcttttttaaaataactttactatatgcataaccagcacaaaataaatgacatcaacataatcaagagagtgaatatattaatcacctcaaaagttactgtgcccctttttaatctctcactacctcccttacctgcctcccccatccttgcygtgggtccaggcaatccctggtctgcttcctgtcactgtagattattttgcatcatctagcattttatataaataaaatcatatggggctgggcacggtggcttacacctgtaatctcaacattttggaaggccaaggcaggcggatcacttgaggtcaggagtttgagagcagcctggccaacatggcgaaacc

SEQ ID NO: 500625 - DNA, 611 bp, Homo sapiens
ctgaagacaaccaaagctgctgcttttcaggcctgcggttgtagactaagaataaactacatgcctggccttgcaattaagagggcaggcatcaaagatggctgcagatcttcttgactccatggtggcagcaatagactatttgtcagtttggacttatttgcattttgtagctaaccttgttcttttggcaaaagcaattggtgctctcatgtcaacagacattaatctgacttcatgattttctagtaggaaatcatggcttattcttaatccactagttctataattcattcattkttgctagcttattttaaatgcatttacttatttattcctttattaagcacttgctatgtagtgacatattgagagccatcacaataaagcggtaagaatgtggaagttgggtaaacacggttttgcatcacacttttgtaatttactagttaataacccatgttattatatataggtaataagggcatgagttttagatcaggctgactgggttttaaaatctcagctctaccacttatgaaatctgtgacctataacaagttttcttttttcttttctttgctctgtcatccaggctggagtgcagtggc

SEQ ID NO: 500626 - DNA, 611 bp, Homo sapiens
ctgaagacaaccaaagctgctgcttttcaggcctgcggttgtagactaagaataaactacatgcctggccttgcaattaagagggcaggcatcaaagatggctgcagatcttcttgactccatggtggcagcaatagactatttgtcagtttggacttatttgcattttgtagctaaccttgttcttttggcaaaagcaattggtgctctcatgtcaacagacattaatctgacttcatgattttctagtaggaaatcatggcttattcttaatccactagttctataattcattcattgttgctagcttattttaaatgcatttacttatttattcctttattaagcacttgctatgtagtgacatattgagagccatcacaataaagcggtaagaatgtggaagttgggtaaacacggttttgcatcacacttttgtaatttaytagttaataacccatgttattatatataggtaataagggcatgagttttagatcaggctgactgggttttaaaatctcagctctaccacttatgaaatctgtgacctataacaagttttcttttttcttttctttgctctgtcatccaggctggagtgcagtggc

SEQ ID NO: 500627 - DNA, 627 bp, Homo sapiens
tctaaacattcccaagttcccaaattgtatgtagactaaataatttgcaaccaggaattgtccttgttagggagattagtgctgagaatatcccaatttgtacactactaagtccaagaaacaaattacatgtctatttgccagagccatggtttcygtatggcatcatctcagatgagtcaggaccaaagaggtcatcagtatcagaaatgcagtgactgatttcctgcaccgttgaaggctgagaaataggatttgggaattaagctttatagtccaaatattccttccatcaccttacccccccataaatgcatgcactcaattgaagtcagattactcaggctgactataaaaggcaagattttcctgtttccattttcaaatataaaatagccacctataggaaataaaacatgattcacagttaggtaaatactctattgttagtgagtcaataaacatgaatcagtcgtatacttataaagacaacctgaaagaatttgaggcataggataacaaaataaaaattagagctaacatctgttgaacattttgctgttcaccaaacattgcactaacaatatggaatatatgacagttaattttaggtatccactagactgg

SEQ ID NO: 500628 - DNA, 627 bp, Homo sapiens
tctaaacattcccaagttcccaaattgtatgtagactaaataatttgcaaccaggaattgtccttgttagggagattagtgctgagaatatcccaatttgtacactactaagtccaagaaacaaattacatgtctatttgccagagccatggtttccgtatggcatcatctcagatgagtcaggaccaaagaggtcatcagtatcagaaatgcagtgactgatttcctgcaccgttgaaggctgagaaataggatttgggaattragctttatagtccaaatattccttccatcaccttacccccccataaatgcatgcactcaattgaagtcagattactcaggctgactataaaaggcaagattttcctgtttccattttcaaatataaaatagccacctataggaaataaaacatgattcacagttaggtaaatactctattgttagtgagtcaataaacatgaatcagtcgtatacttataaagacaacctgaaagaatttgaggcataggataacaaaataaaaattagagctaacatctgttgaacattttgctgttcaccaaacattgcactaacaatatggaatatatgacagttaattttaggtatccactagactgg

SEQ ID NO: 500629 - DNA, 322 bp, Homo sapiens
gtggtcagggcattggacaggggtgaagcccttccaccaacagaaaagtaaatactggcctggggcagtggctcatgcctgtaatcccaacactttgggagaccgaggtgggtaaatcgattcagcccaggagtttgagaccagcctgggccacacaggcagccccacctctacaaaagaaaaaaaaaaaaaaatatatatatatatatatatatatatatatgtgtgtgtgtgtgtgtgtgtgtgtgtgtgtgtgtrtatatatacacacactattaggtattatatatgtatatctatctatctatctaataaatacctt

SEQ ID NO: 500630 - DNA, 631 bp, Homo sapiens
gctcgcttgagtcctgagctgggacaacgccttgactcttcttctttaagacctccaagcctcagggactctgggaatcaaggggtgtttcttcttgttttgtttgaggaggaatgagaagggtcagtagggtggcaccggtgggttaggagcccgaagaagggcgtcacttggttccccaagcgagccgycctattcctgaacccgcatcaagtctcccgtcccgcaggtcctgatcgatctgcccaccggagcctccgggcttcgacatgctggaggagccccggccgcggcctccgccctcgggcctcgcgggtctcctgttcctggcgttgtgcagtcggtgagcagttccccttgtctcccaggccatagaaacaccgacccggggtggggagagttggaggggtctggaccgcagaccccagacgccttcttgcgttcccagggctctaagcaatgagattctgggcctgaagttgcctggcgagccgccgctgacggccaacaccgtgtgcttgacgcctgtccggcctgagcaagcggccagctaggcctgtgcctgcgcaacccccgacgtgacggcgtccgcgcttcagggtctgcacatcgcggtccacgagtgtcagca

SEQ ID NO: 500631 - DNA, 568 bp, Homo sapiens
tgacatcttgtcatataggggaagtgagggttgtattatccaagctgccaagaacactgtagttagtttcttcactagacattggtttaggtctcttccctagacattgcccaaggttaggcccctctccagggtacctatttgcaattactagttaatgtggaaggacgaaggtctaaactccttgcccaattcaagacatttctaaaggactatcccagctccagagctcttaatgggattggcttagacattggttgcaactggatcagagttcaaattttctctctgccaartcctacaaatgataacaaatgtatcatcatgagctttgttaccaaaagctctcctcagcaaactgccttcaaactaatctctacctgagcttgtttccagtggaacttgacttaaaacatattaatttttgatatctccactcgtaaatatggtatccttctcctttatttaaggctatttttcaaatgtgtcttgataatgttttgtgtttttctccctaatcatttcaatttataaatctaaacattttatagatatagatatagatatt

SEQ ID NO: 500632 - DNA, 350 bp, Homo sapiens
aaataatcatttaatgttctcctaagttatataagtctaacttactggaccatatgtatttgaagagaatgaacaygtacattaaataattttatagtgcatctaagatgtattaggttctgagtcttagaataatttacaatgaaaaggaatgtggtttccaccttaataaaaatgaagtgttttggatatacataagaaacgatgacactgattcaagatttgttcattttaatagtttaacacgcacaaaatatttgagaataatattttactgagctttcttgtatttttaatttttttttcagctgccatttctgagccttttaatatttcaagtttgctcaaaa

SEQ ID NO: 500633 - DNA, 603 bp, Homo sapiens
gctgtcccttgccattggttcactctgacatgtactagcaactactaggcatgtttcactaatcaagacaagtccaagaaatagtttacatgccatggtagaaattcctcaccaactgtgagggtgcatgattgtgtttgrcaaaactagggttagctggatcaagatcttctaaaaagttagcggtggaaaaagcaatcagtataacgccattaaacatattaaaaattgatctaaaaaaagttccagaggatatttatgtctagaagaaacctaggttgtcagccttataaacctactctaatgcctgaactttcttcagaatcatctttgttttttaataatacagcatcctaatctactaagataaatttttaccccaggttttagacataatagggtattatgtctgcaacttactaccaaatagatcaggaaaaaaatagttcaaatttgtgataaggaaacttcagtgagagaaatggaaagacataaagtaaaagtggcaaaatgttcatgagtaaatctgagtaaaagataggtatatagaaagtatatattaatattcttgcaatttttaaaagtttgaaattcctttaagat

SEQ ID NO: 500634 - DNA, 603 bp, Homo sapiens
gctgtcccttgccattggttcactctgacatgtactagcaactactaggcatgtttcactaatcaagacaagtccaagaaatagtttacatgccatggtagaaattcctcaccaactgtgagggtgcatgattgtgtttgacaaaactagggttagctggatcaagatcttctaaaaagttagcggtggaaaaagcaatcagtataacgccattaaacatattaaaaattgatctaaaaaaagttccagaggatatttatgtctagaagaaacctaggttgtcagccttataaacctactctaatgsctgaactttcttcagaatcatctttgttttttaataatacagcatcctaatctactaagataaatttttaccccaggttttagacataatagggtattatgtctgcaacttactaccaaatagatcaggaaaaaaatagttcaaatttgtgataaggaaacttcagtgagagaaatggaaagacataaagtaaaagtggcaaaatgttcatgagtaaatctgagtaaaagataggtatatagaaagtatatattaatattcttgcaatttttaaaagtttgaaattcctttaagat

SEQ ID NO: 500635 - DNA, 666 bp, Homo sapiens
tcctatagtcttgattttgtctttttgaagtgtcttccttgtctatctgtctattaaaattctagttcctttttaatctaaaaaaaaaaagatttttactcctcaatgcttgtgtaactatctgcaggcagaaatcatcttataaaatattttaatatgcccatttttatacatggttcaatatgctacaaagtttgtagttcagtgagaaaagaaaatgttttctttccaaacacagaaaattaactaagtttttgaatgtttgaattataatttagcagrtcagttgagtgaactttggagtcaaaataaataggttttcatcttggcttcatcctttctagctgtatttccttggacaagttattttactttgctaggctctagtagtccaattgaaataggtttgatatcaatccatacttcataaggttttaaaaaaaattaaattagcgaatacagctagcgtgtttagtagtgttgacacattgtaaacagtgaatgcaacttattgagtaattaagtggaagataacatactgctaaatgagttgtctttgggcattttttaggtatatatgggagcttcgtctaaactattttctcagatagtcaataccattatgatattatcaaactaattttacaatagggtcagtaaaaaagt

SEQ ID NO: 500636 - DNA, 666 bp, Homo sapiens
tcctatagtcttgattttgtctttttgaagtgtcttccttgtctatctgtctattaaaattctagttcctttttaatctaaaaaaaaaaagatttttactcctcaatgcttgtgtaactatctgcaggcagaaatcatcttataaaatattttaatatgcccatttttatacatggttcaatatgctacaaagtttgtagttcagtgagaaaagaaaatgttttctttccaaacacagaaaattaactaagtttttgaatgtttgaattataatttagcaggtcagttgagtgaactttggagtcaaaataaataggttttcatcttggcttcatcctttctagctgtatttccttggacaagttattttactttgctaggctctagtagtccaattgaaataggtttgatatcaatccatacttcataaggttttaaaaaaaattaaattagygaatacagctagcgtgtttagtagtgttgacacattgtaaacagtgaatgcaacttattgagtaattaagtggaagataacatactgctaaatgagttgtctttgggcattttttaggtatatatgggagcttcgtctaaactattttctcagatagtcaataccattatgatattatcaaactaattttacaatagggtcagtaaaaaagt

SEQ ID NO: 500637 - DNA, 544 bp, Homo sapiens
tgggcaagtggtagaagaggaagttgagcctcagcccacgcccatattctgagtccccacagcacttggagtggtgcggagggtggttcctggttcagttctgctacccaccagaggggtgatcttgcccaccagagggcaaccgtttaccctcttgagaccacattagcaaaatggtgggggaggcgtacataatacctgtctcccagggaccccaccaggatcaaactccaaaatgctcatgaaagccgtgtagggcttgctgatgaaagggtgcaggttgccagccgggaaaactggggctggagctatgctttggctcttctggaaccatagctcactgctgtatgaccctccagagtkgggggctggtggaggggctgggtctcaccaaccattgccccctctgtacctggcctggtgctcatctagaactccataggtatttgtggagtgaatgcctgcgtgagggaaggaccagggcataggtaagaggaggagaatgaatacatgagtgagaggcagagtgaatgaagcagggact

SEQ ID NO: 500638 - DNA, 575 bp, Homo sapiens
ctgtggggctttaagagcacattccaggaggcagattgcccagccctgtctatctatgtggccttgggccagtcacttaagctgtccgggcctcagtttccttgtgtagaacgggacagcgatatgacctacctccctgagttgttgtgaggatccagtgagtttttatgcataaagcacttaaagagttcctggcatgaggtcagcaccatgtaagtgttggctataattagacaatgtttggagatcactttcctctgccttggctcctaataagctcttggtgaaaggtagttgttatttttaacttcttcgttctccttcactgtcttaattcccaccttcatttagccttgcaatttcctttaaataccttatcttctcccctcgtttgttgtcaatctgctgcactaccaataaaggcgtgcataaattatatttgtcccatgtttacattcataaaacatttcccatgcactcctgtcccaamctcacagcaaacgcgtgagcgagcagtgcagctcatgtcattgccctcattttgagagcccgggacagggtgtgatctgtccaga

SEQ ID NO: 500639 - DNA, 159 bp, Homo sapiens
aaacccccatcttgaggcaaattgccaggggctggagcataaggaatagatgagactgargaagttagctgtgatataggctgaagtgtcagagaactagagctaaagaagcctcaaaggacatcaggaccaaatcttccaatatgtagataagaaaca

SEQ ID NO: 500640 - DNA, 582 bp, Homo sapiens
ctgcagccctgggttaatatgtgagacttggcaagtgagagcctgggcaggatctcagatccactcccactcccgggatctggcatccaagtgtctgacacagccatacgtggcagtgggtgtaggagcctgcctggggtgctgaccccactggaccrtcttcctagttccaggagctggtgctgccccactttgggaaggaagatgctggggatgtacagcagttctacgacctgctctccggttctctggaggtcatccgcaagtgggcggagaagatccctggctttgctgagctgtcaccggctgaccaggacctgttgctggagtcggccttcctggagctcttcatcctccgcctggcgtacaggtgagagccactgactgtctgcccagcccctttccctgatacacctgcctgtgaaccaccctgatcgctcttcgtgcccatctgcctgccaggtctaagccaggcgagggcaagctcatcttctgctcaggcctggtgctacaccggctgcagtgtgcccgtggcttcggggactggattgacagtatcctggccttctcaaggtccctgca

SEQ ID NO: 500641 - DNA, 540 bp, Homo sapiens
atttccagttacaaaataggtgttagttcttatttaattatacaatcccttctgctctatcagctattggcaaagttttctgtgcattgtcttaatgctttgtgatacaattcttttatgatataacacatatcccttaaatttgtatttcctgccttttcttcccgcactaatttgaaccatacaaaaaattgatacaaaagaggagaaacttcatgcaggacaaataaggatattctactggggcaattctcaattaaagttagcattttacataacaatacaggatatggcaaaatcaactcaagatgcggtatattgcgatagcattataactaaccaagtccagacctgaattttacaccagttgtaaatcatggtgagaaaaataaatctcatgcctgagccagagtttgctttccttggatttggcacaaactattactaactttgcccaagataggccmcaggggagaaaataactacatttttttgaaacaatccctggttataaagggtagctaattctcatttagcaac

SEQ ID NO: 500642 - DNA, 635 bp, Homo sapiens
ctgcggagttccctggcaggtgctgatatgcacacaagctgagcatcagagatctcatcagaccaccagatctagtgctgtctcccattcggcaggagatggggacattttgcacctgtgataataaaaagaatggaggtctggtggcataaaagccactcttcctcctctctcctcatcccacaatttttgaacatgtgtaaacagctcctgaatagtgaagtggcgtctgctaaccagacaagatctgtggccttttctacaagaagttaacactttcctcagacctactaaagtagggacttaacaagtagttccttcaagggccgagtgcagtggttcatgcctataatctcagcacttcgggagactgaccagcctggccaacatggtgaaaccccmtctctactaaaaatacaaaaattagctgggtgtggtggcgcacacctgtaatcccagctacttgggaggctgaggcaggagaatcgcttgaacctgggaggcggagcttgcagtgagccgagatcatgcccctgcactggcagcctgggtgacagagcgagactccctttccaaaaaaaaaaaaaaaaaaaaaaaaaagtagttccttcaattcattatccaagacagagtcc

SEQ ID NO: 500643 - DNA, 616 bp, Homo sapiens
ttggagtcagggactctaatatgcatcyttaagaatgagttaggaggcgggcatggtggctcatgcctgtaatcccagcactttgggaggctgaggcaggtggatcagttgaggtcagcagttcgagaccagcctggccaacatggtgaaacccagtctctactacaaatacaaaattagctgagcatggtggcacagcctgtaatcccagctactcaggaggctgaggcaggagaatcgcttgaatccaggaggcagaggaggttgcagtgaaccgagatcgcaccgttatactccagcctgggcgacaagagtgaagagcaaaactccatctcaaaaaaagaaaaaaagaatgaattaggagccagtgcacagatagaattgaggggattcagcagagggctcatttcaggccaatatgggcaaagacagaaaggaataataaatagtatactcagagtaacaatttgataggcaaagcagaagagccaagaaatgaatctggagaggaggcaagggagaagatggagggttttataggccaggtaagggtttcagccattattcaaagctattaagtgacagggtcacatttttgctttggagagattagcct

SEQ ID NO: 500644 - DNA, 472 bp, Homo sapiens
gtggctgtgttagtgaacaagttcacttgtggctcctctggtgtcctcctccctaactaaatgggtgcctgtggagtgtgactggagagctgaccaaatgcaatccacccagcagggtcaccaaggccactgaagcatgagtctgcatttctcaagtcgatgtaatagaatctgaccctcacacagtggagggtgggtcagaaggctatcyggtagccaagggcgctgctgaggctttagaaaaacagcacaaggttgtaatcgaacgccgtcccaggacattcagccagttaatcatctcagtcatccatgttttattcataaacatgaggaacgacgtttctttggctgcttgctttgccctttcaagttacaccaatattatactgtcccaatgttctccttcatgtcacataaaatgcacccggcatcttgtcaccagagatgtcactaccaatagtggactgggacc

SEQ ID NO: 500645 - DNA, 472 bp, Homo sapiens
gtggctgtgttagtgaacaagttcacttgtggctcctctggtgtcctcctccctaactaaatgggtgcctgtggagtgtgactggagagctgaccaaatgcaatccacccagcagggtcaccaaggccactgaagcatgagtctgcatttctcaagtcgatgtaatagaatctgaccctcacacagtggagggtgggtcagaaggctatctggtagccaagggcgctgctgaggctttagaaaaacagcacaaggttgtaatcgaacgccgtcccrggacattcagccagttaatcatctcagtcatccatgttttattcataaacatgaggaacgacgtttctttggctgcttgctttgccctttcaagttacaccaatattatactgtcccaatgttctccttcatgtcacataaaatgcacccggcatcttgtcaccagagatgtcactaccaatagtggactgggacc

SEQ ID NO: 500646 - DNA, 521 bp, Homo sapiens
ctgccttcatttgaaaagggtcaagagaaaggaaattattaaaatgtaagagaaggcatccaaagccctacaagctaccatttaaagaaagtggttgttgaacctgactcagagtaggygctcaatatttgctgaatagtagaggtaagaaaaaattgacaattagctgtgtgattttcagggggatgggactcacttaagctagtgccttcattttaatttgtgaagtctaccaccttttccaactattcacagataatgtaagaaaaacactgaagacaaatacttttataataatgatcagataattgtaacaagctgtagaggggacttgtagaaactatatccatagaaacctccaaaaatagtataaacaaggacagtatagggatcccatagaaataaaagctctttcaaaaaacagaaggtagaccaaattcgatattcaggtcttccctagctctagaaggaaatggagtagatttttgcatgtatacaataaattgctggtttctctaaaa

SEQ ID NO: 500647 - DNA, 554 bp, Homo sapiens
tcacagcttactagctacatgactttgtctgagttagttaaccattctgttcctcagtttccttatccataaaatggacttaaagtaacttataatagcacctacctcatatatcccataggcttgttatgaggattaaaaaagttagcatttgcaaaatgtttagagcattcctggcacacagtaagtgctgcataatttcttgccattgtaatgaaattacatctcaaacaacagcataacatagcacagtagccactttagaagacttgttattaatataatatcccaggtcttttttatctactttgatcaagaggttgtgaatgtcaaggttgaaataaggaagaagggtgtagatgatgttgttagagaygcagagtgagatatgagaaagtaatgggtgccaggagttggttaagggggattcagggggagggtctgaaggcctggcacatgtacaggtatatgataatgtaaaatcagtaggaactttaaaaaaaaattaattgccatccttcctccaaatatgaaagtagaatactgtttcagaa

SEQ ID NO: 500648 - DNA, 540 bp, Homo sapiens
ctcatggcaagtagccagactgggtgaagccaccaaaggcatttatttttctctctactgcagtctatttatgagtaggacgaacttttctcttctttttaaagatgactgttgactacaatggctcactatttgtgtgccaagacaggtaggacttgcagagcccaggaagcaatttcttcactaataccctgcattggtcacacccttgtttgatttgtgtctgattcggacctctttacttaaaaaacagcaatgtgacggaacaactgagcagggtcccaagaagaggagtaaacacaattcaaggggtggaaaatagaagctttgaagaggctaaaggaaaagtggtattttagcctgagggaaagaatgaggaacaatctcatcacactcgcyttcacgcatttaaaatgggtttattcagagaacagtgggtgaccagttcttcatgctcagagtgaaacagacaggaggaaatcacatcaaatcagtaaaattctatggttggaaaagggaaaataatttcttgatcttcac

SEQ ID NO: 500649 - DNA, 630 bp, Homo sapiens
gtcaggagagagtgctggaccacactagcagacctgggtctacatcagagcttggacacccttttttaggcctgttcccttgttggtggaatacaggccagagtttgcatcatccatggcccacagatctttattccctcttccatgccacagcagatgtctctaagcagaaaatattttctgttcattctggatacggtctagtctccccttccgatctatagccatccctaagatctcctacagagacattttggagcccccaaagggtctatctacacttcattgaaaggtttgccaaacaaaattgtgatagtctgagtttttctcttaggagtggggcagatttatatgcatccttccattctaaccaacaatgcccactcataattatctagaactcatgtttactgagaacattttatgggccagacacattgcacagatgagttcatcaatcttcaattctatgtggatgtttytcatgccattttttatagataaggaaacaggcccagacaggttaaatcattttttccaagaaacactgatagtaagtataaggtctagagaatgggtcttatcacgtacagactttaggatcacagtcatgtagcctctgtgggcctc

SEQ ID NO: 500650 - DNA, 524 bp, Homo sapiens
ggtctaggctgcagtgagccatgatcccaccactgtactcaagcctggacgacaaagtgagacccatcttaaaaaaaaaaaaaaaaagaaaagaaaaagaaaaaaaaaacaaaaaaaaaactaaaatcatggaaaatgaaacagaactaagtggggctgcaagtggccacagtccctatccacattcttcctagatacagtggcttaaacgcacatgggaatgaagggggtgaggtgaagagatgagatggggggacttgaaggctgccctggcagggcaggaggcgatgccctctctgtagcaggagcagtaggcggcactattgtgcctgtggcctccaggctatsccgctcacgggctctggcactagcaggtggttcttgtgacttctgtctccccataagccaggtagcttgagagacccacacccctgagaagcaggtgggccaaggggaaggtggacctagtaggggtgacggatggccatcctgttctctttcttcctggccctcttggaggcaga

SEQ ID NO: 500651 - DNA, 524 bp, Homo sapiens
gtatactcccactccagagtaggccttcaggacctggaggccagtgcacacccaccctgcctttctgggtctctctaccgcttcctgtccggggctgtttcttgcacctctgctggkgtctcccctattctggagcgctgggaagcccctgccacacaggcttggtctgctggcacataccctgcttctagtgctgcggggtcagcccctagagggagttgtttggaagtgcacctgtacacacacacacacacacacacacacacacacacacacacacacacacacggtatggattaatggagatgaggtcaaccctgggcaaagggaagaggcaggtgatgagattaggtggaggaagggggagggagcaggtctcaggcaaaacaaagcggcagcaacagtcctcccagccccccgcccctcctctcccagagcgaggccttgccctgggagtggccatatggatgccttggggactctggggagcccatctcagccatgccctgcctggctggccacag

SEQ ID NO: 500652 - DNA, 545 bp, Homo sapiens
  misc_feature (1)...(545): n = A,T,C or G
ctggggaaggtggattatgacatcaaatccctgcgatgtccttgtttctgctcctcagagtgccaaggggaccagacggcggcctctgctgcttgggaagaagatgaaaggcactcaggagggcagcaagtgaggccgcctcccatggagccctgaaatcagtggggttgcaggaagtttctcacatccatgtttagggtcataggcacagacctgcaaaataccctttrcaaagttaagaatgtctttgagattggaacttgggagagtcctcagtcagagtaggaatgtgcatcctttcccacgtacagaggattgtatgtttacgtggcagcaggatcttatttgaagctagtgctggcatttgtgttttttttttaggaaaatgtcactaagtcaagcaggcccatcccctgagagggccatggagaatctgtggccagcccctccctggccccctgacctggcagaggaaggaaagggcattggagtaaggcttctgtcttcaggccagagggggaggtggttcangggcaggcttggtg

SEQ ID NO: 500653 - DNA, 584 bp, Homo sapiens
gagtggggccagatagcaacttaggacagagtaaattgaacttagaggaaaatggttcatattctatgttttatggtaaagtttatacttgtcacaggagctataatggaaacctgtttacatgagttcattggaggcctaaaggcagaaaaataatgttagggagtactatcgttcttcttaggattaaaaaataaatactgttctgtttcaaagttttatgattctcttcttacatgctaagaatagattggttgtctatattaatctgtcttaaagcaaatcaaatagaggaaaagaagggctttattcttttctaaatgtcttatattaacactggcatggracactcaatatttttgctttgaagaaattgttccagacttaaaaaagtattctgtcatctttcatactcagcattaccaaaaaaatgagcaggcaattcctagttttctttagaagggtcttcagttttgttgagggctatgacttactagagtcatatagtttatattttatgatctccttcaagcctcacaacaaccctaggaggtgctgctgttatcccccatttcacaagtgag

SEQ ID NO: 500654 - DNA, 574 bp, Homo sapiens
ctgagaaagaaatcactcatcctttatttcattcattttcttagctgattccccatccctcaggatctgtagaggtatttgtcgactattcactgkggtggcctacaaaaatcctccagcttttggttggtcatgaagttctgtggattttctgccttttgaatccatcccctcctttctattccactgccaccgactgccctagtgcagagcctctttacgtcatggccacacttccagtgcactccaaagtacttgccttccaggctctgtctgccatccttactcctttctttgctgcctgccatctttcttcatacaaatctgatcatatcactgcactaattgcaaaactttaagagctcataatctgctattaagtctcaattttattcaagtccatttgcaatctaaccccaccctacttgtctctggccattccctcctgccctgaagttcaagcagaactggctaacatgcatttcccacatcccccgacccactatttcttccagctcctctgtctggaatgcgcttaccttttcctcctcattcttcgtgtccaacaactcct
